United States Patent Application Publication US 2004/0123343 A1 - sequence listing, part 34

SEQ ID NO: 93256 - DNA, 4481 bp, Oryza sativa
  Clone ID: PAT_MRT4530_91659C.1
ctagcgattgtattgatagaagtggccatggtgacggtcccctccatcatactgacgatggtaatccacattgtactgaaggccttctccaacatagtaattattttcgtcctcatcatagtagtcatcatattcatcttcaggatcatcatggatagcagcattgccttgaggatcatcacggataatgttgcgttcatcccacagtggacaagagcaggtcgctttcttctccttccattcttttccacaggtgtagcagaactcatagccgcaccgctgccgtgcaaggttctgtagataggcatcttctagacgagcatgggggtacctcctcttgtagtcataacaagtcattttgaggatgatgcttgcattggatgtatcagttctctcatggacatcaaggctgaacacttgggatatgggcaataaatcttgtgagttggaggaatttgtgcttccctgatacgctgcaccatgatcgctaataaccgtggagataggaacatctttgaaccctccacagtttagcttggtagtgcaaccatcttgtgggcaagctgggagcatcccatgaagtagcttaactttgacacgctccttcatgcaggagaagcaaaagcgatgcgcgcagccttcaactgcatgaatcttagagacgtcagtgtcttccaagcagatggtgcagttctcttttttctccttgccagcactcacagcagcagctttggcaatttgagtatgcagagaatctgttgctaattttgtgacatagttgacttgggttcgtgcaacacagaggatctcacattgctcaaatttctgttttgttgagaaagcctcattgatcaaatccacaagcctcttctgtcttgggcgccatataccactcatatggttgtgcagcggcttgttgtcagtgaggacgttgagggtccggatgccgagggcgagcgccgcattgaggccttccaccagcgccatcgcctccagcatcatccgcccttgctgcgcctgcgcctgcacgggcttgtgtatccggagcaccacctccccccttggcccgcagatggcgacggcgagcaccccgacgccagggtcacggtcacgcggccccaccacctccctgctcgccatgcccttgaacagcacgcggaagagcgcgccgcctccttccagggggaggggccgctcgaagtagtcgccgtcgtgggcccacctgtcctccgggatggcggcgaggtcgcgcgcgaagagggcgtcgtgcgcggcgacgcggacggaggcggcggcccgggcgtggtaggcgcggcaggcctgggcgtcgcggcggtcatgctcggctcgcgcgaggtcggcggcgtgggatttccagggcacatgaggcgtgggaaggttcctccggtggcgcgggggcggcggcattggagggtagggaggcctggatggcctcggtgagctgctccatctcctcgtcttcctcttgccacattctcctcttcctctcctcgcagcttccttccctgcctcctccgctacaagccagatccatctccgctcaccaccgccctcgtccacgactccgtgggtaagcactacggccatacaaaaagtaaatttcttcttctcactggcacgctcagtcgtgaatccacatgtaaatggcctcgccgtgccgcatccctgcagccaccggttccggcaacaaagagaacaatatctcccaaaatcgacgccatgtcttggattgccaaaccccgtgcgaaggcaaaggcgtggctacctctaaaaagaggaagaacaagcctgcaggggggttcaatctcagaaaaagcatcgcatggaatcctgctttcttcactgaacaaggcgttttggataacacggagctttctatgcttactggctcccaagtgaaggcaactaggagccctgcctctggattttcttctaccttttccccattgtctaggtttggaaaatctagcaatacatctgtgctcaaggaaatcggagagaattctcgtggaaaatttccttcaaaatgtttgagtgcagaaaacaagggaaggaagttgtttgcttcctcaaaagcttctgagcaggatgaacgaaaagcacttgcggtcagttcatcacatagcattttgcttacttatggtaatgctattattaaagctcatgcaatttctcgttttcttctggacaattgcagggcacacaggataaaagtgccaaactcaagtggtatagctcaaatacaaaggataccaaagaagtctgaaccttctccttctgtggtctctagaagtagaagtacctcatctgtgacaaatgttcccaaaccacaacaaggccagctacaggtttcagcacttttgcatgtcactatcactaattcagcacgccactatttttcagttacaagtgagtgtacacataaagtagaggggctcccgcttaaatcgaagactgagcgttcatctgtcactaaatcttctggacctaccatagggaaggacatggtgccgcctactgttactaccatctgtcaagaaaccaatggttctgggaaatgtgaaactttttcaccatattcacaagataacccctccagttctgttgtcgcccctgcacgaatatctgctaagccatctgctctccggatgccttcaccttcagttggctttttcactcagggaaaagcttctgtatcacatagtggtactgctcaaagaaatccagagaggtgctttagtggaaatatttcatcagtaaaaccccccagtcttcctgtgcaacctgccactagtgacagcactcccaacgtcttggcctcttctctacctggtgttgaggatgcgacagtttgttcactgaagcaatccttatcggaaagtactgtaccatattcagaaaaatcagggaatataagttatcaagaaatgccagatgatgatttttcgttggctggaaatggagctaccacagagttgagttttagagataatgatgatggcagaaatagcatgcccaatgagtgcagtgttgcgctgtctgtcggacaggatcttaatgctatttgctgctcaagcactgagcctgctgaggattcttgctttcttaaagtcatttgctcgtcaagcgaaccttccgtggggagtaacttgacaacatcttgcatttcttctccagggtgcaccccaaatgatctcaattctcaaagcaagtctgacaatggtgaaacagcagttgacatagaaaattcactctctggagagacatctggtacagtttgttcatcagaaggcaacaattgcacttcagctacagattccttgcaaaaatccgattcctgccatcagcagaatatgctagttcagtctatacattgtacagatcaaataccacagtttgatagttcaacaggcataaaaccatctttagcatacagccagttagactccaacaattctttgtgtagtgaagttcagcttacttcatcagaaggaccagatattgatagtgaaatggagcttgatacagatgattcattcactgtggaggaacctcccctgttacatgtagggggtgaatgtgaccatgattacaggagtgcagaatgttcacatatgaacctggcagcgccttcacctcgtgtagatcaagaggcactagctggcaatttgactgaaaaagtagatacagctgacggtagaacagaatcacatcactgttcgacccaggaaagacgacctattttatcagaagaacaagatactgaagacacaattgggtttgacaccaagttgtcgtcttcagagggtgcatcaagtatagagaggattaagtcagtgggtaaatcaagaacaaataccataagtaaagatcatctaaaaaacttggtaccgtttacagaagaatggcttgctgtcatggaagcttttggagaggaagttttggaacagaagacgggcgctgtgcaaaattctcctaccgataaagctgctccagaacctagtccatggtcaccggatcacttcttgccattgctggtaacaaaagtgaagttaagtaggttgattgatgaagagccattccttgtgatggtcctgcaggttaaacggaaagctcaagatgttgggccattcgactgtaccaagtattccaagaacgtcagaacaagtgactgatgataccccttgacagcaatcaaatcgttggccttggacttgtcttgaggtcacagcacaacacgaagccttgctcgcaacaagttggtcctgttgttccatgtaattggctaaccttgtacatgagacattcacaagccttgccactgcgcttgcttgcgctcattttgttgtcatttggttgccaaatttgtagaacatcgttcggaccacgtcccaggcaaacgcttggctaacaaatcaataaagggaaacctcttgttccaaaaaaaaaaaaaaaaaaaa

SEQ ID NO: 93257 - DNA, 1318 bp, Oryza sativa
  unsure (1)..(1318): unsure at all n locations
  Clone ID: PAT_MRT4530_9165C.1
atggcccactcgttaatggctgttgggccggggaggccggattgggccgtgggctggcccacctgccaggcccgcaagcgccgccaccgatgcggctggcttcccgagacaagcggcgcgttccctgctgcttttttcctcttctcccccgggattccattcggcatccgcttctcggtgggcaacgcgacggcggcggaaagccaaggccaacgatgcagcgcctctcccgcttcgtcccctcctcctccaggagagtcactgacctaaaggatgctctctggagtggttctttgactttccaacatgctctttcaacatttgcagcagacgagaacacatctggtagaaaatttgcaagctacaccgtgttcaagggaaaggctgcactttctatgcaacccatactgccaagcttcagcaaactggaatctggaggatctcgtgtgaacaaaaatggatcggtgatgttgacttttttcccggctgtgggacaaaggaaatatgattattcaaagaaacagctctttgctctgtcacctactgaagtcggaagcttgataagtcttgggcctgctgaatcttgtgaatttttccatgatccctccatgaaatcaagtcatgaaggccaagtgaaaaaatcgttgtcagtcactcctctcggcaatgacagtggatactttctgaatataactgttctgaacaacttgcagaagacaactgagcgactttcactcccaatctcaaaagctgagtttacagttatgcgcacagcattgagtttcgcattgccgcacatcttgggctgggaccaggccttgactaatcaccagccaagtccatcaccagctagcaagcccagggtggagcgcccacacccagattcagagtgggaaaggtgaagctcccttgtaggcaccagcagcatggagggatttgaacatcatcgctaccaaaatttggatgctgttgcactttctccacgaaatcgaattaggagatatctattagattcatggagctaaagatcgaatgtcacagattgagcacaccatgaagggttgtgtttgttcaatgcatgtttgaacttcaccaggcctactagttgcaaaattctactccagttagctatgcattgcgtttgacaccttgtgccttttgaatgtgtgacttatgttatttgcaaaatggtggagtcttacaaaactactcaaacgtagttgagtggttatggctttaaaaagctaaacaaaaaacatatctgtttgttaaggctcaaactttttattccactgcatcttaaactcacattcatttn

SEQ ID NO: 93258 - DNA, 936 bp, Oryza sativa
  Clone ID: PAT_MRT4530_91660C.1
tcactcctctgaatcggtggcggctcccgtctcccctaaatcgtgaggttctccagtataaacgagctgcttggggcccgcccagccgcgctgcctcttggatcgatttcccatcgatcgttgctgtgtcgagctccggtcaggcatacgatcgaacacctcgagggggatcatcgtccacctccgcccggcaagccgccacggaaggggcggcccagctgaggaagcaaccgtggtgcttcctgaccccgacctcaccggcaggacgcggcacgcgctagccctgcactgcagcgagcgcgcgaggaaggccggcggcggcgagtcggtccgcagttgccgccggtgcaccgcggccaatcgcatgcgcaggagggccgtgcgcctagccggcggcgcaggcggcggcggaaagcgggcgtcggccgctcctctcggcgcgagcaggaggcggcggcgaccggccggcggccaagcggcgaggctgctaaacatggcgccaaacacagcgaggctgctgccgttgcacgggccgtcgtgggcgaacacgaagttcatcgccatcatcagcgacagcgcgtccttgccggcggcgacgacgtacatcccctgcgcgcgtccgaccagcctcgaggaggtcaggttgggaccgtcggtgagcgggttgtcgatcaccaccaccgtcccgaaccacgtcgccgaggcgttcgtcgtcggcgcctccgccacctgcgccaccgtggagttgggagcaccgccgcaaacacgaaggaggaggaggcagccattacttagctctgtgttggtcgcatggttcttgatccagattccagcacaaaacctaaggtgcgaatgagtggggcagtgtttgctaatgagccagatttcatagccgctcctaaagctttgggcttccaaatgggcgaagtcctccat

SEQ ID NO: 93259 - DNA, 1476 bp, Oryza sativa
  Clone ID: PAT_MRT4530_91661C.1
atgggctccatcgcggccgacggcgacaagccgcacgccgtgtgcatgccgttcccggcgcaggggcacgtcacgcccatgctgaagctcgccaagatcctccaccaccgtggcttccacatcaccttcgtcaacaccgagttcaaccaccgccgcctcctccgctcccgcggcgccgccgcgctggacggcctcccggggttccgcttcgccgccatcccggacggcctcccgccgtccgacgccgacgcgacgcaggacgtgcccccgctctgccgctccaccagggagacgtgcctccctcacttcagccgcctcctcgccgacctcaacgccaacgcctcccccgagtccccgcccgtcacgtgcgtcgtcgccgacgacgtcatgagcttcgccgtcgacgccgccagggagttccgcgtgccgtgcgcgctcttctggacggccagcgtctgcggctacatgggctaccgctactaccgttccttcctcgacaagggcatcttcccgctcaaagaggagcagctgacgaacgggttcttggacgcgccggtggactggacgccggggatgagcaagcacctgcggctcaaggacttcccgtcgttcttccgcgcgacggaccccgacgagtacatgttccacttcgcgctccacgtgacggagcggctggcggaggcggacgccgccgtgctcaacaccttcgacgagctcgagccggaggcgctcgacgcgatgcgcgcgatgctgccgccgtcggtgtccatccacaccatcggcccgctcgggttcctcgccgagcaggtcgttcccaaggggagccccctcgacgcgctgggctccaacctgtggaaggaggacgactcctgcttcggctggctcgacggcaagccgccccggtcggtggtgttcgttaactacggcagcgtcacggtgatgacgaacgaggagctggttgagttcgcgtgggggctcgccaacagcggccacgacttcctgtggatcgtccgccccgacctcatccacggcgatgccgccgtgctgccgccggagttcatggagtccgtcggggggcgcggcctgctggcgagctggtgcccgcaggaggcggtgctgcggcacgaggcggtgggcgtgttcctgacgcactccggctggaactcgacggtggagagcctctgcggcggggtgccgatgctgtgctggccgttcttcgcggagcagcagaccaaccgccggtacagctgcaccgagtggggcgtcgccatggagatcgacgacgacgtgcggcgcgacgcggtggaggccaagatacgggaggcgatgggaggagacaagggccgggagatgcgccgccgggcgggcgagtggaaggagaccggcctccgcgcgacgcgccccggcggccgcgcgcacgccagcctcgacgcgctggtcgccgacgtcctcctctccggtggcaaggctcggtag

SEQ ID NO: 93260 - DNA, 187 bp, Oryza sativa
  Clone ID: PAT_MRT4530_91662C.1
tcgtacgcgtgcgacagtggagtaaagtgaagcagcagcagagaagcagagaccatttccctcctccctcctctctcgccaaacacgacgacgtcgcctcggtttagtcgtcgtcggccggcagccggatgacgggcagtagctgtccggccgattcttcccagttgctgtaccctcgccggggcgt

SEQ ID NO: 93261 - DNA, 366 bp, Oryza sativa
  Clone ID: PAT_MRT4530_91663C.1
atggccgtggatgaggtagatgagtcggcgggacgagaagaggggtggatctggccgctcttcaaccgctcatgtgccgccgacctcacagtccgctgctcttgcaccaccgaccttgttgtccaccgtggtgaatcaggggacgagaggaagggtgaatatggccgctcttcaaccgctctcactccatcgacctcgccgtcccccgcggctactccacccagcaccaatgccaacaccacttgggccaccccaccgctgctccgctacgagttcgtcgccgccggggcgcagctacggggggtgccggagggggccaacacccccctatctgccccctccctgctatactatttagcgcattag

SEQ ID NO: 93262 - DNA, 534 bp, Oryza sativa
  Clone ID: PAT_MRT4530_91664C.1
atgtcatggcacagggccggtgtcctgctgctgggggctcagtcctgcctacctgtcccgggggttccggccgtaggtggggttgggtcggtactcttgtttatggctaggatgggttgggaactatgtcacgtcttccgtccgtataccgtggtgcaatggcgcgttctggggaaagctcgactgcttcgagcgccgcggtggtgttgcgttcgagctccagtggaggccacagtgacattcgtccgtgttcctcgggctactcggaaatgggaggtcatcatcacacgtgctggcgcgggacgaggtgccttgccattacgtctccaccgtaatactgacaccggcatcatcgggaacctggttaaggctctcgccggcgtgccacaagctaagcgggtgcaaggcaccgaaccacggatccttgaaggcgacgaggtcgttcggcggtgtgaaccagcagtgttgcaccgacaacgagtgatgcgccctgtgcgggtggatcaggaccaaggagaacatgttcttgtgtag

SEQ ID NO: 93263 - DNA, 6105 bp, Oryza sativa
  Clone ID: PAT_MRT4530_91665C.1
atggatcggcaatggatgtacgctgaccggcggtccaaagagtttattgacggcgtgcactattttttgagagtggccgaagctaacaggaaaaggggttttatttgttgtccatgcaataagtgtaagaatcagaaggagtattctgcatccaggactattcatttccacttgtttgagtcggggttcatgccaagctataattgttggacatcccacggagagcaaggtgttgaaatggaagaagatgaagtggaagacgacaatattccggactttgctcagtttgttggatttgaaggaaatcaaacgggcgaggaggaaatagctgctgatggtaacgacgttgcggatgatcttggtcagatgttgcaggacgccagggaggacagcgaaagtgaaaaggaggcccataaattggacaagatgttggaggaccacagaacttcgttgtacccaagttgcgagcaggggcacaaaaagttggataccactctggagttgttgcaatggaaggcaaaaaatggggttagtgacaaggcatttggcgatttattgaaactcgtcaagaacattcttccggggggaaagaaattgcccgagacaacgaacaaggggaatgctagaatgttgcgatggcacgctgaagagcgtcaacatgacgggatgctgagacactcagccgatggttcgcagtggcgaaacatcgacagaaaatttaaagaatttggaaaggacgcacgaaacatacggtttggtttgagtacggatggcatgaatccttttggagagatgagcagcggccatagcacttggcccgttacgatgtgtatctacaacctccccccctggctatgcatgaagaggaagtacataatgatgccgattattattcaaggccccaagcaacctggtaacgacatcgacgtgtacctaagaccactggtcgaagatcttaaacagttgtggaagaaggaaggtgtccccgtgtgggacgaggacaaacaggaggagtttaacctacgagcgctgctgttcgtaaccatcaacgattggcctgcacttagcaacctatccggacagtccaccaaggggtacaaggcttgcactcactgtatggatgaaacagaaagtacgtatcttaagcactgtaggaaggttgtatacatgggtcatcgtcgattccttgcagcaaaccacccggtacggaagaaaggcaagcacttcgaacataaggccgaccaccgtacgaagcctaaacatcgcagcgggaaaacagtgtttgctatggttaaagatcttaaagtagtgttcggaaaggggcctggaagccagcatatagagagcgaagatggtcacgcggcgatgtggaaaaagaactctatattttgggagttaccatattgggaattcttggacgtacgccacgcaatcgacgtgatgcacctcactaagaacctttgcgtaaaccttcttggcttcctaggtgtatacggaaagtcgaaagatacactggaagcacgtaatgatctgaagcatatggaacaacgcggcgactttcacccggaaccaaaggagaaaggaagccattacttgagtccagccagctacactcttagcaaggcagagaaggaaagtatgtttgaatgcttggagagcataaaggtaccgtctagatactccacgaatatcaagcgaataataagcacgaaggagaagaagttcacaaacctaaagtctcatgactgtcacgtgttgatgacacaactgctaccagttgtaataaggggtatccttccagacaatgtccgggcaacaataacaaagctatgtgcattcatgaacgcaatttcgcagaaggtcatcgatccggatagattagaagcccttcagaatgaagtggtgcaatgtctcgtcagttttgagttgatatttccaccttcatttttcaatataatgacgcatctgctttgtcaccttgtgaaagagatccgtattctcgggcctatgtacctacacaacatgtttcctttcgagaggtacatgggcgttctgaagaagtatgttcgtaaccgtgctcgtccagaggcaagcatcgccaagggttatggaacagaggaggtcatcgaattttgcgtagaatttatcgaagaccttcgcccaattggggtacctaaatcacgccatgaagggagactacggggaaagggaactctcggaaggaaagcaataatgacggtagacaacaatttattccgtaaagcccatttcactgttctgcaacactcttcattggtagctccttacatcgaggagcacttggctctagttcacgccaggaacatcggtaagtccgatgcatggattacacggcatcacattgatactttccccgcgtggctacgacaacatctcatgggtaacgagtcgatcaaccaacaacttgccttcctggcgaggggaccgtctgggtcgatcgcgacattccagggatatgagatcaatgggtacacattctacacgagagcccaagacatgaagagcacgaaccaaaacagcgctgttcgtgtcgatgccatgggacacgatggaacaactgccacgtattacggtgccatcgaggacatatgggaacttgactatggtcctctcaaggttcctctgttccggtgccaatgggttaggttgactggtggaggcgtaatgattgatgacagtgggatgacaactgttgaccttaacaaggttggatactcggacgaaccttttgtccttgccaatgatgtaacgcaagtctttttcgtgaaggacatgtctagcaaaggaaagaagggcagagggcctgatgagcctaagcgtcaagtggttctcccaggcaaaagaaaaatcgtcggagttgaggacaagactgacgaggattacgatcagttggatgggcaaccccctttcacggtgacgattgaccctagcatcctcctatcaaatgaagacaccccttactcacgcagcgatcacaaggagggaacaatagtgaggagaaaatgtttcttgtatcaacagatggctgaccgcgatgaggaacagatattgtacgatacaatcgcggagggaagcagccagtactggaatgaagaagaggggaacgaggatccaaaccagtacttgaacgaggaagggaacgtggagagggatgcggaggggaaccagcaggggcacgtggaaagggatgtggaggggaaccaggaggaggaggctagtggtagtcaaccctccattggacagaagagggcacgcgggcaacgaggtgcagcgaagaagcttgagggtcggcacatcataacggaagtggaagaagatggacgtcctagtgccccggccgaagccgccaagaactatgtacgtcacagcggttgggttgtgcgggataacgtgcctgtcagtacggtgtactggcgaagaacaagggcacgcggagatcatgagagctttgtcccagattcggagaaagagatgctgtggaccacaatgctcgagacattcacccttcctgcgggtacagaggacaaagtgaaaaggtggactctgaagaaaatggcagaacagtttcagagcttcaagggagatctgtaccagaagtatatactgaaggggcagacaccgaacttcgacacattcccaaagctaagggatcactgggacgagttcgttgcatataagacaggtgaacaagggaaggcgatgatggaaagaaacaaagaaaatgccgccaagaagaagtaccatcaccacttggggtcaggaggctatagcgtcgcgatgccgaagtgggagcagatggaggctagcttgattgagaggggtatcgaaccggcaacagccaattggccggaacgatcgaagttctggtactatgctcacggtggaacgctcaacccagctgatggctcactgactccagagcatccaggacgaactcgagggaaaggggtgattccttggaagattagtttcaaggaggacatccacacgtacaggagtcggatgaggagcaagagagataccgaggcgaagattgcagacctagagttccgggtatcgagctacgaactcaacatgcaagaggaggtggcaaggaaggttgatgaacgcatggccgcacatcggtcccatgatccccagccgaccattcctcctgcaatggtgagcccgtcaggaaaccgtagcagctgcgcctcaacggggcaggtaggatcacagagcatggacgccatgcaaacacaggacgaatcgacctgtcccatggatgacatcactcagcggacaccatgtgagctgcatattcctttgaagaacttatcaataaaggtggcgtcgggcatggccatcccaacggacccttcaggtacttaccactgcaggccgattccagcaggatactccaaggtcgaagttgagttggtcgaaggcgcgtacgaggacctcgagctggattaccctggaggagacggtgagacgcatctacgagacacatgccatgccattattctatggcgcaggcggtacatcatcctccctgggcgacaagcggcgtctcgtgcaccatctcctccggctccgccatctcctcctcaggatcctgcaccgtctcctcctcatgctccgccagcaccgtctccacctcaggctccagcatcgactcctcaggatcctgcaccgactcctcctcgtgctcctacacctactcccccacaagctcctcttccggcaccttcaaagtcaagggcccccccagctccaccgcttgcccacacaagggcaacaaagaaggcgaaagttgacgccgccaagaacaaggacccggggtacgattgcacgcaagaggagcttgacgcttacgttgcatcagaagtcaagagacaattcaagcctcgaagtccagaaaagaagattcctatagaccccagtgtcaggaacttcttcaggggtatgtctgcatctgtcaaggaggccatcaagctatcggactatgagcgaacgctgaagaaagcatcttctggaaagtccaaaccagtccctcagcttggagagcaaccaaaccaggagatcgagccgttggtgaccggtaaagaaatgacgatagaacaatttattactgacaccggtctaactacggatcaattgctaggagtcgcaccaatcgaaaaggcggaagtgaaatacatgtacgaactcggtaaaccgcttgtcaagcctgagctgctgcagtccctacccacacaaatgtacaagttccatcagctgtacatggagatgagcgccaccggtagagagatgatcggagcgaggatcagggacacggacttcttgcaaggagatgacattctctggatcaatttcaggggaatctacgaactataccggctggacgccctcgacgtctctattatgagttgctggattttaatggagattcaaagggcccgacggcggagggttttcgatactggattcatcgaccctcggaaagtaaacgtcgcaatgctcgaccaatatccacaagaaacagaggacaatctcgtccatctcctgaaggcgcagcattacaagacgttcatactgttgccatacaacacagaattccactgggtgcttttactcatcgacctggaggcctgcaccgtcaacgtatatgactcaatggataaaaaagagtctacgtttgacaaggttttcgaacttatagacagggcttggtatcggttccgtcatttggtccgcggcaaatggagagaaagacttaggcggaagttcaaatttccttgcgcaaagcaaaagcagggaactaacttgtgcggctattacgtgtgcgagtattgccactgccttgcaaaccaaatcatcaccacaagagagctcgattttattcgcatgagggataacctgaccacacacaaggaatttatcgcggcggttcaagaacaactcatgggattcatcaacaaagaaatccttgatcccaagggtgaattctactacgacggaaacacaattcaccggtccttagcttctgagctagcagcgagtactactacgtcgaaatcgtag

SEQ ID NO: 93264 - DNA, 5480 bp, Oryza sativa
  Clone ID: PAT_MRT4530_91666C.1
ctctccttcatctcccaaggcgtgacatgtgagagaggagagatagcagtgctgccatgtgggcccaaggatatttttgacatttcccgcgatttctatggatcggcaatggatgtacgctgaccggcggtccaaagagtttattgacggcgtgcactattttttgagagtggccgaagctaacaggcaaaggggttttatttattgtccatgcaataagtgtaagaatcagaaggagtattctgcatccaggactattcatttccacttgtttgagtcggggttcatgccaagctataattgttggacatcccacggagagcaaggtgttgaaatggaagaagatgaagtggaagacgacaatattccggactttgctcaatatgttggatttgaaggaaatcaaacgggcgaggaggaaatagctgctgatggtaacgacgttgcggatgatcttggtcagatgttgcaggacgccagggaggactgcgaaagtgaaaaggaggcccataaattggacaagatgttggaggaccacagaacttcgttgtacccaggttgcgagtaggggcacaaaaagttggataccactctggagttgttgcaatggaaggcaaaaaatggggttagtgacaaggcatttggcgatttattgaaactcgtcaagaacattcttccggggggaaacaaattgcccgagacaacgtacgaggctaagaagatagtctgcccgttaggactggaagttcataagattcacgcatgtccgaacgattgtatcctatatcgcggtgaggagtatgagaacctagaagcatgccctgtttgcaaagcactacgatacaagattagacgggacgatccaggagaagttgacgggcagctaacaaagaagagaattcctgctaaggtgatgtggtatttccctataataccacggctaaggcgtttgttcaggaacaaggggaatgctagaatgttgcgatggcacgctgaagagcgtcaacaggacgggatgctgagacaccccgccgatggttcgcagtggcgaaacatcgatagaaaatttaaagaatttggaaaggacgcacgaaacatacggtttggtttgagtacggatggcatgaatccttttggagagatgagcagcggccatagcacttggcccgttacgatgtgtatctacaacctccccccatggctatgcatgaagaggaagtacataataatgccgattattattcaaggccccaagcaacctggtaatgacatcgatgtgtacctaataccactggtcgaagatcttaaactgttgtggaagaaggaaggtgtccccgtgtgggacgaggacaaacaggaggagtttaacctacgagcgctgttgttcgtaaccatcaacgattggcttgcacttagcaacctatccggacagtccaacaagggatacaaggcttgcactcactgtatggatgaaacagaaagtgtatacggaaagtcgaaagatacactggaagcacgtaatgatctgaagcatatggaacaacgcggcgaccttcacccggaaccaaaggagaaaggaagccattacttgagtccagccagctacactcttagcaaggcagagaaggaaagtatgtttgaatgcttggagagcataaaggtaccgtctggatactccacgaatatcaagcgaataataagcacgaaggagaagaagttcacaaacctaaagtctcatgactgtcacgtgttgatgacacaactgctaccagttgtaataaggggtatccttccagacaatgtccgggcaacaataacaaagctatgtgcattcatgaacgcaatttcgcagaaggtcatcgatccggatagattagaagcccttcagaatgaagtgaggtacatgggcgttctgaagaagtatgttcgtaaccgtgctcgtctagaggcaagcatcgccaagggttatggaatagaggaggtcatcgaattttgcgtagaatttatcgaagaccttcgcccaatcggggtacctgaatcacgccatgaagggagactacggggaaagggaactctcggaaggaaagcaataacgacggtagacaacaatttattccgtaaagcccatttcactgttctgcaacactcttcattggtagctccttacatcgaggagcacttggctctagttcgcgccaggaacatcggtaagtccgatgcatggattacacggcatcacattgatactttccccgcgtggctacgacaacatctcatgggtaacgagtcgatcaaccaacaacttgccttcctggcgaggggaccgtctgggtcgatcgcgacattccagggatatgagatcaatgggtacacattctacacgagggcccaagacatgaagagcacgaaccaaaacagcgctgttcgtgtcgatgccatgggacacgatggaacaactgccacgtattacggtgccatcgaggacatatgggaacttgactatggtcctctcaaggttcctctgttccggtgccaatgggttaggttgactggtggaggcgtaatgattgatgacagtgggatgacaactgttgaccttaacaaggttggatactcggacgaaccttttgtccttgccaatgatgtaacgcaagtctttttcgtgaaggacatgtctagcaaaggaaagaagggcagagggcctgatgagcctaagcgtcaagtggttctcccaggcaaaagaaaaatcgtcggagttgaggacaagactgacgaggattacgatcagttggatgggcaaccccctttcacggtgacgattgaccctagcatcctcctatcaaatgaagacaccccttactcacgcagcgatcacaaggagggaacaatatacttgaacgaggaagggaacgtggagagggatgcggaggggaaccagcaggggcacgtggaaagggatgtggaggggaaccaggaggaggaggctagtggtagtcaaccctccgttggacggaagagggcacgcgggcaacgaggtgcagcgaagaagcttgagggtcggcacatcataacggaagtggaagaagatggacgtcctagtgccccggccgaagccgccaagaactatgtacgtcacagcagttgggttgtgcgggataacgtgcctgtcagtacggtgtactggcgaagaacaagggcacgcggagatcatgagagctttgtcccagattcggagaaagagatgctgtggaccacaatgctcgagacattcacccttcctgcgggtacagaggacaaagtgaaaaggtggactctgaagaaaatggcagaacagtttcagagcttcaagggagatctgtaccagaagtatatactgaaggggcagacaccgaacttcgacacattcccaaagctaagggatcactgggacgagttcgttgcatataagacaggtgaacaagggcaggcgatgatggaaagaaacaaagaaaatgccgccaagaagaagtaccatcaccacttggggtcagaaggctatagcgtcgcgatgccgaagtgggagcagatggaggctagcttgattgagaggggtatcgaaccggcaacagccaattggccggaacgatcgaagttctggtactatgctcacggtggaacgctcaacccagctgatggctcactggtcttcggtgatcagatacgagaggctgcgcgacgactaacagatgcagtggaagcctcctctcagggcacgttccgaccagacagagatagggacgagctgagtcggatgagaagcaagagagatatcgaggcgaagattgcagacctagagttccgggtatcgagctacgaactcaacatgcaagaggaggtggcaaggaaggttgatgaacgcatggccacacatcggtcccatgatccccagccgaccattcctcctgcaatggtgagcccgtcaggaaaccgtagcagctgcgcctcaacggggcaggtggcgtcgggcatggccatcccaacggacccttcaggtacttaccactgcaggccgattccagcaggatactcgaaggtcgaagttgagttggtcgaaggcgcgtacgaggacctcgagctggattaccctggaggagacggtgagacgcatctacgagacacatgccatgccattattctatggcgcaggtggtacatcatcctccctgggcgacaagcggcgtctcgtgcaccatctcctccggctccgccatctcctcctcaggatcctgcaccgtctcctcctcatgctccgccagcaccgtctccacctcaggctccaccggcaccttcaaagtcaaggccccccccagctccactgcctgcccacacaagggcaacgaagaaggtgaaagttgacgccgccaagaacaaggacccggggtacgattgcacgcaagaggagcttgacgcttacgttgcatcagaagtcaagagacaattcaagcctcgaagtccagaaaagaagattcctatagaccccagtgtcaggaacttctttaggggtatgtctgcatctgtcaagaggagcatcttctggaaagtccaaaccagtccctcagcttggagagcaaccaaaccaggagatcgagccattggtgaccggtaaagaaatgacgatagaacaatttattactgacaccggtctaactacggatcaattgctaggagtcgcaccaatcgaaaaggcggaagtgaaatacatgtacgaactcggtaaaccgcttgtcaagcctgagctgctgcagtccctacccacacaaatgtacaagttccatcagctgtacatggagatgagcgccaccggtagagagatgatcggagcgaggatcagggacacgaacttcttgcaaggagatgacattctctggatcaatttcaggggaatctacgaactataccagctggacgccctcgacgtctctattatgagttgctggattttaatggagattcaaagggcccgacggcggagggttttcgatactggattcatcgaccctcggaaagtaaacgtcgcaatgctcgaccaatatccacaagaaacagaggacaatctcgtccatctcctgaaggcgcagcattacaagacgttcatactgttgccatacaacacagagttaaacgtatatgactcaatggataaaaaagagtctacgtttgacaaggttttcgaacttatagacagggcttggtatcggttccgtcatttggtccgcggcaaatggagagaaagacttaggcggaagttcaaatttcctttgattcgcatgagggataacctgaccacacacaaggaatttatcgcggcggttcaagaacaactcatgggattcatcaacgaagaaatccttgatcccaagggtgaattctactacgacggaaacacaattcaccggtccttagcttctgagctagcagcgagtactactacgtcgaaatcg

SEQ ID NO: 93265 - DNA, 342 bp, Oryza sativa
  Clone ID: PAT_MRT4530_91667C.1
atggccggcgacggcacggctcatcgtcgagaaaaaggcggcgacgcgtgtcggcgtttaatttgctgtaatggcggctcggtggtcggcaacggctcgcggcggcgcgtggcggaagcggattggtgcggcaaggtggcggcggcggattggcttggcggcggaggaggaaaggcacgggacggcgtcgacggcggcgcattgggaaggggcgagcggacgaaggagggacccaactcggtgacaatggagaagacctctgggttctctactggggggtcttttctttgtgggcgtcgtctcaccacaacggcgtggcggtggtacgatgagccgacgtag

SEQ ID NO: 93266 - DNA, 2237 bp, Oryza sativa
  Clone ID: PAT_MRT4530_91668C.1
ctagttctagatcgcgagcggccgcccgcgatctagaactacccacgcgtccgcccacgcgtgcgcccacgcgtccgcccacgtcgcagccgcaattcgcagggtcggagtcgcacgcgaacccgcccgcctctccacaagccatggccgccgccaccaacgccgccgccgccgccgccgccgctccggccccagctccggcgacgccggtgccgcgcgggcaggtggatctggtcgacttcatcgactggagcggcgtcgagtgcctcaaccaggaccccgcccacagcatcgttaacgccctcaagcagggttacagggacgacgaggggctgtacttggccagcgattcggatgagcagctgcttatccacatccccttcatgcaggtggttaagctgcattccgcgctattcaagggccccgaggaagatggcccgaaaacaattaaactcttctgcaacaaagagcatatgggtttcagcaatgtcaatgactatccaccaagtgacagtcttgacctgtcttccaatcatttatcagagagtaagcctatgcagcttaagtatgtcaagttccagaatgttcgcagcctgactatatttattgaggacaatcaaagtggaagtgatgtctcaaaaattctcaagattgcgctgtacggaacaactgtggacactacaaatatgaaggacctgaagaagatagaagagcattaagaccatacgaagctagcatgttccaatgggtgtatggcacaaaaaacagttaacaattgaatttctagttgatcttggcaactttgcgccccattttatacatgaggaatttgagagccgcaggatctggtggagataccatacatttgcctcttggcctcgggctttaccttgtagtgctaccgatggcttgatgtggcaagcgaattcatatgtttcctctttaagaaattcatatttggagttgtggtggtaccttcttgatcgatcgatcgatctgcttcacagtaaccgttacatgtttcttaagaaattcatatttggagttgtggtggtacttgttagatcgatcgatctgcgtcacagcaactgttgcatatgtttagcttgtgtttgtttgcctgtcttagttaactgggaaccaaacttgtggtcattcggtcaatttgctatgtcatgacaagatgattcaaactacagtttggactggcaatgcttgcttgttaatgcccaatcacaaaagagttgtttaaccctatctttacatacactgtcttgtgtttaaaaaaaagtactagaaatcacatttcgatccagcttcatcctgcagcccaatgtggttggcaaacttgttctactacccatcggcggcctggagcgccgtgacgagggccatgaagaggttgatgatgtcgaggtagagcgtgatggcggcggccacgtactcgtcgtaggtgtatcgcttgatgaggttgtcggtgtcgtagataatgaacccggagaagatcagcgccgccacgcacccgtacaccaacttccccgttctccccatcggcaaaaagatcgtgattatggcgtagaggaagaggacgagcgtggcagcgaagaggaatgggccgaggaactcgaagtcgtagcctctcttggcggcccagaacgtgtagcaggtcagtccgatcactatcgccgccgtcattcccgccgcctgaaatatcactgtcccattcttggagagggcaacccaggccgacggagaagctaatacagacggtgaagaggaggaggaagaagaggttgatcggatgcttgttacggaagtagatcatcggcagcatcatgatgaggggggagatgatgatgatgacgtaggcgacgaggacctccggcgtgcgagcctggaagaaggtcttgatgggctcgacgaggttcaccgcgccggcgacggcgacggtcaccagcagctgcaccgacacgatcacgtacaccttgcggatgaacgcccaccggagctgcgcgttctcgatcatgtacgggtacatcccgccgcccggcgccccgcccgggtagcacgcctccacgtcgcacttgccatgcttccccatgtctcgatcgctaccctcctagctccgtgctgctggtgcctcggttcgtcgatcgatcggagacgacgacgacgacggcggcggcggcggcggcgtacgcgctagctgtggccggcgcgggcgtcagcggacgcgt

SEQ ID NO: 93267 - DNA, 5076 bp, Oryza sativa
  Clone ID: PAT_MRT4530_91669C.1
atggaagaagatgaagtggaagacgtcaatattccggactttgctcagtatgttggatttgaaggaaatcaaacgggcgaggaggaaatagctgctgatggtaacgacgttgcggatgatcttggtcagatgttgcaggacgccagggaggactgcgaaagtgaaaaggaggcctataaattggacaagatgttggaggaccacagaacttcgttgtacccaggttgcgagcaggggcacaaaaagttggataccactctggagttgttgcaatggaaggcaaaaaatggggacgggatgctgagacaccccgccgatggttcgcagtggcgaaacatcgacagaaaatttaaagaatttggaaaggacgcacgaaacatacggtttggtttgagtacggatggccccaagcaacctggtaacgacatcgacgtgtacctaagaccactggtcgaagatcttaaacagttgtggaagaaggaaggtgtccccgtgtgggacgaggacaaacaggaggagtttaacatacgagcgctgctgttcgtaaccatcaacgattggcctgcacttagcaacctatccggacagtccaacaagggggtgaacaagccgcggggcgcgcccgaaggcggcctcgccggcacggccgacgggaggcggcgcgcccgcgccccgatggtcaccgccggcgaccaccggcgcggcggagcggcgcccgagagagcggagggaagggggaagcgaaagggacggtcccacggctcaccccggtcgacgacgacgacgggaacggcgaccgaagcggaggaaggcggcggcgcggttcgggacgacgagggcgacggagctccggcggtcggcgggcgaagcgaaggggcggacggggtcgacgacgacgtggcgaagccgaaggaggtgacgccgagtcgggaggaagtccggagcgacgacggcggcggaccggaggtcggcggcgacggcggagagagagcaaaccacccggtacggaagaaaggcaagcacttcgaacataaggccgaccaccgtacgaagcctaaacatcacagcgggaaaacagtgtttgctatggttaaagatcttaaagtagtgttcggaaaggggcctggaagccagcatatagagagcgaagatggtcacgcggcgatgtggaaaaagaactctatattttgggagttaccatattgggaattcttggacgtacgccacgcaatcgacgtgatgcacctcactaagaacctttgcgtaaaccttcttggcttcctaggtgtatacggaaagtcgaaagatacactggaagcacgtaatgatctgaagcatatggaacaacgcggcgaccttcacccggaaccaaaggagaaaggaagccattacttgagtccagccagctacactcttagcaaggcagagaaggaaagtatgtttgaatgcttggagagcataaaggtaccgtctggatactccacgaatatcaagcgaataataagcacgaaggagaagaagttcacaaacctaaagtcttatgactgtcacgtgttgatgacacaactgctaccagttgtaataaggggtatccttccagacaatgtccgggcaacaataacaaagctatgtgcattcatgaacgcaatttcgcagaaggtcatcgatccggatagattagaagcccttcagaataaagtggtgcaatgtctcatcagttttgagttgatatttccaccttcatttttcaatataatgacgcatctgctttgtcaccttgtgaaagagatccgtattctcgggcctatgtacctacacaacatgtttcctttcgagaggtacatgggcgttctgaagaagtatgttcgtaaccgtgctcgtccagaggcaagcatcgccaagggttatggaacagaggaggtcatcgaattttgcgtagaatttatcgaagaccttcgcccaattggggtacctgaatcacgccatgaagggagactacggggaaagggaactctcggaaggaaagcaataatgacggtagacaacaatttattccgtaaaacccatttcactgttctgcaacactcttcattggtagctccttacatcgaggagcacttggctctagttcgcgccaggaacatcggtaagtccgatgcatggattacacggcatcacattgatactttccccgcgtggctacgacaacatctcatggataacgagtcgatcaaccaacaacttgccttcctggcgaggggaccgtctgggtcgatcgcgacattccagggatatgagatcaatgggtacacattctacacgagagcccaagacatgaagagcacgaaccaaaacagcgctgttcgtgtcgatgccatgggatacgatggaacaactgccacgtattacggtgccatcgaggacatatgggaacttgactatggtcctctcaaggttcctctgttctggtgccaatgggttaggttgactggtggaggcgtaatgattgatgatagtgggatgacaacggttgaccttaataaggttggatactcggacgaaccttttgtccttgccaatgatgtaacgcaagtcttttacgtgaaggacatatctagcaaaggaaagaagggcagaggacctgatgagccgaagcgtcccgtggttctcccagcgcgccctcgtcttctccaccaacacttagaagttttttcccggatcgatctctctcggcttctccttcgccgccactgcctagggcatccccgcgccgccgtcgccgttgtatctcgccgtcgtctcgcgcgcgtcatcgtcgccgcctccgccgccgccgcatctctggggtgtttctcgtatgaacagatggctgatcgtgatgaggaatagatactgtacgatacaatcgcggaggaaagcagccagtactggaacgaagaagaggggaacgaggatccaaaccaatacttgaacgaggaagggaacgtggagagggatgcggaggggaaccaggaggggaacgtggagagggatgtggaggggaaccaggaggaggaggctagtggaagtcaaccctccgctggatagaagagggcacgcgggcaacgaggtgccgcgaagaagctagagggttggcacatcataacggaagtggacgaagacggccgacctagtgccccggcggaagcagccaagaactacgtacgacacatcggttgggttgtgcgggataacatgcctgtcagtacggtgtactggcaaaacaagggcacgcggagatcatgagagcattgtcccagattcgaagaaagagatgttgtggaccgcaatgctcgagacattcacccttcccgcgggtacagaggacaaagtgaaaaggtggactctaaagaaaatggcagaacagtttcagagcttcaagggagatctgtaccagaaatatatcctgaaggggcagacaccgaacttcgacacattcccaaagctaagggatcactgggacgagttcattgcatataagacaggtcaacaagggcaggcgatgatggaaagaaacaaagaaaatgccgccaagaagaagtaccatcaccacttggggtcaggcggctatagcgtcgcgatgccgaagtgggaggagatggaggcaagcttgcttgagaggggtatcgaaccggccaccgctaaatggccggatcgatcgaagttctggtactatgctcacggtggaatgctcaacccaattgatggctccctggtcttcagcgatcagatatgcaaggctgcgcgtcgactaacggacgtagtggaagcctcttctcagggcacgttccgacctgagagagagaaggacgagctgtcactcgccctgcagactccagagcatccaggacgaatacgagggaaaggggtgattccttggaagattggattcaaggaggacatccacacgtacaggagtcggatgaggagcaagagagataccgatgcgaagattgcagatcttgagtacagggtatcgagctcgagctcagcatgcaagaggaggtggcaaggaaggttgatgaacgcatagccgcacatcggtcccatgatccccagctgaccattcctcctgcaatggtgagcccttcaggcaatcgtagcagctgcgcctcaacggggcaggtaggatcacagagcatggacgccatgcaaacccaggacgaaaccacctgccctgttgatgacatcactcagcggacaccatgtaagctgcatatttccttcaagaatttatcaataaaggtggcgtcgggcatggccataccaacggacccttcaggtacttaccactgcaggccgattccagcaggatactccaaggtcgaagttgagttggtggaaggcacgtacgaggacctcgagttggattaccatagaggagacggtgagacgcatctacgagacacaagccacgccattatactatggcgcaagcggtacatcatcctccctgggcgacaagcggcgtctcgtgcaccatctcctccggctctgccatctcctcctcaggctcctgcaccgtctcctcctcatgctccagcaccgtctccacctcaggctcctgcaccgactcctcctcaggctccttcaccgactcctcctcaggctcctacaccgactccttcgcaagctcctcgtctggcaccttccaagtcaagggccccccaagctccaccgcctgcccccacaagggcaacaaagaaggcgaaagttgacgctgcaaaaaataaggacccggggtacgattgcacgcaagaggatcttgacgcttttgtggcatcagaagtcaggagacaattgaagcctcgaagtccagaaaagaagattcctatagacccgagtaccaggaacttcttcaggggtatgtctgcacctgccaaagaggccataaagctatcggactatgagcgaacacttaagaaagcatcttttggaaagtccaaaccagtccctcagcttagagagcaaccaaaccaagagatcgagccgttggtgaccggtgaagatttgaaaatatttaaaaaaatcaacgac

SEQ ID NO: 93268 - DNA, 168 bp, Oryza sativa
  Clone ID: PAT_MRT4530_9166C.1
tgccaaagattctcctaagccgcagacccatttacgatccgttcgtccgtttctggtccccttggaagtagcaaaacgtctcaagactgaagacaatcggattgtccggcgaggaaggggagtcgccggagaaggggagatgccgacggtgtgggcggcgctcaagaa

SEQ ID NO: 93269 - DNA, 5613 bp, Oryza sativa
  Clone ID: PAT_MRT4530_91670C.1
atggaagaagataaagtggaagacgacaatattccggactttgctcagtatgttggatttgaaggaaatcaaacgggcgaggaggaaatagctgctgatggtaacgacgttgcggatgatcttggtcagatgttgcaggacgccagggaagactgcgaaagtgaaaaggaggcccataaattggtcaggatgttggaggaccacagaacttcgttgtacccaggttgcgagcgggggcacaaaaagttggataccactctggagttggtgcaatggaaggcaaaaaatggggacgggatgctgagacaccccgccgatggttcgcagtggcgaaacatcgacagaaaatttaaagaatttggaaaggacgcacgaaacatacggtttggtttgagtacggatggcatgaatccttttggagagatgagcagcggccatagcacttggcccgttacgatgtgtatctacaacctccccccctggctatgcatgaagaggaagtacataatgatgccgattattattcaaggccccaagcaacctggtaacgacatcgacgtgtacctaagaccactggtcgaagatcttaaacagttgtggaagaaggaaggtgtccccatgtgggacgaggacaaacaggaggagtttaacctacgagcgctgctgttcgtaaccatcaacgattggcctgcacttagcaacctatccggacagtccaacaaggggtacaaggcttgcactcactgtatggatgaaacagaaagtacgtatcttaagcactgtaggaaggttgtatacatgggtcatcgtcgattccttgcagcaaaccacccggtacggaagaaaggcaagcacttcgaacataaggccgaccaccgtacgaagcctaaacatcgcagcgggaaaacagtgtttgatatggttaaagatcttaaagtagtgttcggaaaggggcctggaagccagcatatagagagcgaagatggtcacgcggcgatgtggaaaaagaactccatattttgggagttaccatattgggaattcttggacgtacgccacgcaatcgacgtgatgcacctcactaagaacctttgcgtaaaccttcttggcttcctaggtgtatacggaaagtcgaaagatacactggaagcacgtaatgatctgaagcatatggaacaacgcggcgaccttcactcggaaccaaaggagaaaggaagccattacttgagtccagccagctacactcttagcaaggcagagaaggaaagtatgtttgaatgcttggagagcataaaggtaccgtctggatactccacgaatatcaagcgaataataagcacgaaggagaagaagttcacaaacctaaagtctcatgactgtcacgtgttgatgatacaactgctaccagttgtaataaggggtatccttccagacaatgtccgggcaacaataacaaagatatgtgcattcatgaacgcaatttcgcagaaggtcatcgatccggatagattagaagcccttcagaatgaagtggtgcaatgtctcgtcagttttgagttgatatttccaccttcatttttcaatataatgacgcatctgctttgtcaccttgtgaaagagatccgtattctcgggcctatgtacctacacaacatgtttcctttcgagaggtacatgggcgttctgaagaagtatgttcgtaaccgtgctcgtccagaggcaagcatcgccaagggttatggaacagaggaggtcatcgaattttgcgtagaatttatcgaagaccttcgcccaatcggggtacctgaatcacgccatgaagggagactacggggaaagggaactctcggaaggaaagcaataacgacggtagacaacaatttattccgtaaagcccatttcactgttctgcaacactcttcattggtagctccttacatcgaggagcacttggctctagttcgcgccaggaacatcggtaagtccgatgcatggattacacggcatcacattgatactttccccgcgtggctacgacaacatctcatgggtaacgagtcgatcaaccaacaacttgccttcctggcgaggggaccgtctgggtcgatcgcgacattccagggatatgagatcaatgggtacacattctacacgagagcccaagacatgaagagcacgaaccaaaacagcgctgttcgtgtcgatgccatgggacacgatggaacaactgccacgtattacggtgccatcgaggacatatgggaacttgactatggtcctctcaaggttcctctgttccggtgccaatgggttaggttgactagtggaggcgtaatgattgatgacagtgggatgacaactgttgaccttaacaaggttggatactcggacgaaccttttgtccttgccaatgatgtaacgcaagtctttttcgtgaaggacatgtctagcaaaggaaagaagggcagagggcctgatgagcctaagcgtcaagtggttctcccaggcaaaagaaaaatcgtcggagttgaggacaagactgacgaggattacgataagttggatgggcaaccccctttcacggtgacgattgaccctagcatcctcctatcaaatgaagacaccccttactcacgcagcgatcacaaggaggaaacaatagagaggagaaaatgtttcttgtatcaacagatggctgaccgcgatgaggaacagatattgtacgatacaatcgcggagggaagcagccagtactggaatgaagaagaggggaacgaggatccaaaccagtacttgaacgaggaagggaacgtggagagggatgcggaggtgaaccagcaggggcacgtggaaagggatgtggaggggaaccaggaggaggaggctagtggtagtcaaccctccgttggacagaagagggcacgcgggcaacgaggtggagcgaagaagcttgagggtcggcacatcataacggaagtggaagaagttggacgtcctagtgccccggccgaagccgccaagaactatgtacgtcacagcggttgggttgtgcgggataacgtgcctgtcagtacggtgtactggcgaagaacaagggcacgcggagatcatgagagctttgtcccagattcggagaaagagatgctgtggaccacaatgctcgagacattcacccttcctgcgggtacagaggacaaagtgaaaaggtggactctgaagaaaatggcagaacagtttcagagcttcaagggagatctgtaccagaagtatatactgaaggggcagacaccgaacttcgacacattcccaaagctaagggatcactgggacgagttcgttgcatataagacaggtgaacaagggcaggcgatgatggaaagaaacaaagaaaatgccgccaagaagaagtaccatcaccacttggggtcaggaggctatagcgtcgcgatgccgaagtgggagcagatggaggctagcttgattgagaggggtatcgaaccggcaacagccaattggccggaacaatcgaagttctggtactatgctcacggtggaacgctcaacccagctgatggctcactggtcttcggctatcagatacgagaggctgcgcgacgactaacagatgcagtggaagcctcctctcagggcacgttccgaccagacagagatagggacgagctgacactcgccctgcagactccagagcatccaggacgaactcgagggaaaggggtgattccttggaagattggtttcaaggaggacatccacacgtacaggagtcggatgaggagcaagagagataccgaggcgaagattgcagacctagagttccgggtatcgagctacgaactcaacatgcaagaggaggtggcaaggaaggttgatgaacgcatggccgcacatcggtcccatgatccccagccgaccattcctcctgcaatggtgagcccgtcaggaaaccgtagcagctgcgcctcaacggggcaggtaggatcacagagcatggacgccatgcaaacacaggacgaatcgacctgtcccgttgatgacatcactcagcggacaccatgtgagctgcatattcctttcaagaacttatcaataaaggtggcgtcgggcatggccatcccaacggacccttcaggtacttaccactgcaggccgattccagcaggatactcaaaggtcgaagttgagttggtcgaaggcgtgtacgaggacctcgagctggattaccctggaggagacggatcctgcaccgtctcctcctcatgctccgccagcaccgtctccacctcaggctccagcatcgactcctcctcaggatcctgcaccgactcctcctcgtgcccctacacctactcccccgcaagctcctcttctggcaccttcaaagtcaagggcccccccccagctccaccgcctgcccacacaagggcaacgaagaaggcgaaagttgacgccgccaagaacaaggacccggggggtatgtctgcatctgtcaaggaggccatcaagctatcggactatgagcgaacgctgaagaaagcatcttctggaaagtccaaaccagtccctcagcttggagagcaaccaaaccaggagatcgagccgttggtgatcggtaaagaaatgacgatagaacaatttattactgacaccggtctaactacggatcaattgctaggagtcgcaccaatcgaaaaggcggaagtgaaatacatgtacgaactcggtaaaccgcttgtcaagcctgagctgctgcagtccctacccacacaaatgtacaagttccatcagctgtacatggagatgagcgccaccggtagagagatgatcggagcgaggatcagggacacggacttcttgcaaggagatgacattctctggatcaatttaaggggaatctacgaactataccagctggacgccctcgacgtctctattatgagttgctggattttaatggagattcaaagggcccgacggcggagggttttcgatactggattcatcgaccctcggaaagtaaacgtcgcaatgctcgaccaatatccacaagaaacagaggacaatctcgtccatctcctgaaggcgcagcattacaagacgttcatactgtttccatacaacacagaattccactgggtgcttttactcttcgacctggaggcctgcaccgtcaacgtatatgactcaatggataaaaaagagtctacgtttgacaaggttttcgaacttatagacagggcttggtatcggttccgtcatttggtccgcggcaaatggagagaaagacttaggcggaagttcaaatttccttgcgcaaagcaaaagcagggaactaacttgtgcggctattacgtgtgcgagtattgccactgccttgcagaccaaatcatcaccacaagagagctcgattttattcgcatgagggataacctgaccacacacaaggaatttatcgcggcggttcaagaacaactcatgggattcatcaacgaagaaatccttgatcccaagggtgaattctactacgacggaaacacaattcaccggtccttagcttctgagctagcagcgagtactactacgtcgaaatcgtag

SEQ ID NO: 93270 - DNA, 6884 bp, Oryza sativa
  Clone ID: PAT_MRT4530_91671C.1
atggatcggcaatggatgtacgctgaccggcggtccaaagagtttattgacggcgtgcactattttttgagagtggccgaagctaacaggaaaaggggttttatttgttgtccatgcaataagtgtaagaatcagaaggagtattctgcatccaggactattcatttccacttgtttgagtcggggttcatgccaagctataattgttggacatcccacggagagcaaggtgttgaaatggaagaagatgaagtggaagacgacaatattccggactttgctcaatttgttggatttgaaggaaatcaaacgggcgaggaggaaatagctgctgatggtaacgacgttgcggatgatcttggtcaaatgttgcaggacgccagggaggactgcgaaagtgaaaaggaggcccataaattggacaagatgttggaggaccacagaacttcgttgtacccaggttgcgagcaggggcacaaaaagttggataccactctggagttgttgcaatggaaggcaaaaaatggggttagtgacaaggcatttggcgatttattgaaactcgtcaagaacattcttccggggggaaacaaattgcccgagacaacgtacgaggctaagaagatatgtctgcccgttaggactggaagttcataagattcacgcatgtccgaacgattgtatcctatatcgcggtgaggagtacgagaacctagaagcatgccctgtttgcaaagcactacgatacaagattagacgggacgatccaggagaagttgacgggcagctaacaaagaagagaattcctgctaagggtgatgtggtatttccctataataccacggctaaggcgtttgttcaggaacaaggggaatgctagaatgttgcgatggcacgctgaagagcgtcaacaggacgggatgctgagacaccccgccgatggttcgcagtggcgaaacatcgacagaaaatttaaagaatttggaaaggacgcacgaaacatacggtttggtttgagtacggatggcatgaatccttttggagagatgagcagcggccatagcacttggcccgttacgatgtgtatctacaacctccccccctggctatgcatgaagaggaagtacataatgatgccgattattattcaaggccccaagcaacctggtaacgacatcgacgtgtacctaagaccactggtcgaggatcttaaacagttgtggaagaaggaaggtgtccccgtgtgggacgaggacaaacaggaggagtttaacctacgagcgctgctgttcgtaaccatcaacgattggcctgcacttagcaacctatccggacagtccaacaaggggtacaaggcttgcactcactgtatggatgaaacagaaagtacgtatcttaagcactgtaggaaggttgtatacatgggtcatcgtcgattccttgcagcaaaccacccggtacggaagaaaggcaagcacttcgaacataaggccgaccaccgtacgaagcctaaacatcgcagcgggaaaacagtgtttgctatggttaaagatcttaaagtagtgttcggaaagggccctggaagccagcatatagagagcgaagatggtcacgcggcgatgtggaaaaagaactctatattttgggagttaccatattgggaattcttggacgtacgccacgcaatcgacgtgatgcacctcactaagaacctttgcgtaaaccttcttggcttcctaggtgtatacggaaagtcgaaagatacactggaagcacgtaatgatctgaagcatatggaacaacgcggcgaccttcacccggaaccaaaggagaaaggaagccattacttgagtccagccagctacactcttagcaaggcagagaaggaaagtatgtttgaatgcttggagagcataaaggtaccgtctggatactccacgaatatcaagcgaataataagcacgaaggagaagaagttcacaaacctaaagtctcatgactgtcacgtgttgatgacacaactgctaccagttgtaataaggggtatccttccagacaatgtccgggcaacaataacaaagctatgtgcattcatgaacgcaatttcgcagaaggtcatcgatccggatagattagatgcccttcagaatgaagtggtgcaatgtctcgtcagttttgagttgatatttccaccttcatttttcaatataatgacacatctgctttgtcaccttgtgaaagagatccgtattctcgggcctatgtacctacacaacatgtttcctttcgagaggtacatgggcgttctgaagaagtatgttcgtaaccgtgctcgtccagaggcaagcatcgccaagggttatggaacagaggaggtcatcgaattttgcgtagaatttatcgaagaccttcgcccaatcggggtaccggaatcacgccatgaagggagactacggggaaagggaactctcggaaggaaagcaattatgacggtagacaacaatttattccgtaaagcccatttcactgttctgcaacactcttcattggtagctccttacatcgaggagcacttggctctagttcgcgccaggaacatcggtaagtccgatgtatggattacacggcatcacattgatactttccccgcgtggctacgacaacatctcatgggtaacgagtcgatcaaccaacaacttgccttcctggcgaggggaccgtctgggtcgatcgcgacattccagggatatgagatcaatgggtacacattctacacgagagcccaagacatgaagagcacgaaccaaaacagcgctgttcgtgtcgatgccatgggacacgatggaacaactgccacgtattacggtgccatcgaggacatatgggaacttgactatggtcctctcaaggttcctctgttccggtgccaatgggttaggttgactggtggaggcgtaatgattgatgacagtgggatgacaactgttgaccttaacaaggttggatactcggacgaaccttttgtccttgccaatgatgtaacgcaagtctttttcgtgaaggacatgtctagcaaaggaaagaagggcagagggcctgatgagcctaagcgtcaagtggttctcccagtgcgccctcgtcttcttcaccaacacttagacgttttcggccgatcgatctctctcggcctctctccttcgccgccactgcctagggcaaatccccgcgccgacgccgccgtatctcgccgtcgtctcgagctcgtcgtcctcgccgccgcctccgcctcctccgctgccgccgcatctctcagatgtttcttgtatcaacagatggctgaccgcgatgaggaacagatattgtacgatacaatcgcggagggaagcagccagtactggaatgaagaagaggggaacgaggatccaaaccagtacttgaacgaggaagggaacgtggagagggatgcggaggggaaccagcaggggcacgtggaaagggatgtggaggggaaccaggaggaggaggctagtggtagtcaaccctccgttggacagaagagggcacgcgggcaacgaggtgcagcgaagaagcttgagggtcggcacatcataacggaagtggaagaagatggacgtcctagtgccccggccgaagccgccaagaactatgtacgtcacagcggttgggttgtgcgggataacgtgcctgtcagtacggtgtactggcgaagaacaagggcacgaggagatcatgagagctttgtcccagattcggagaaagagatgctgtggaccacaatgctcgagacattcacccttcctgcgggtacagaggacaaagtgaaaaggtggactctgaagaaaatggcagaacagtttcagagcttcaagggagatctgtacaagaagtatatactgaaggggcagacaccgaacttcgacacattcccaaagctaagggatcactgggacgagttcgttgcatataagacaggtgaacaagggcaggcgatgatggaaagaaacaaagaaaatgccgccaagaagaagtaccatcaccacttggggtcaggaggctatagcgtcgcgatgccgaagtgggaggagatggaggctagcttgattgagaggggtatcgaaccggcaacagccaattggccggaacgatcgaagttctggtactatgctcacggtggaacgctcaacccagctgatggctcactggtattcggcgttcagatacgagaggctgcgcaacgactaacagatgcagtggaagcctcctctcagggcacgttccgacccgacagagatagggacgagctgacactcgccctgcagactccagagcatccaggacgaacacgagggaaaggggtgattccttggaagattggtttcaaggaggacatccacacgtacaggagtcggatgaggagcaagagagataccgaggcgaagattgcagacctagagttccgggtatcgagctacgaactcaacatgcaagaggaggtggcaaggaaggttgatgaacgcatggccgcacatcggtcccatgatccccagccgaccattcctcctgcaatggtgagcccgtcaggaaaccgtagcagctgcgcctcaacggggcaggtaggatcgcagagcatggacgccatgcaaacacaggacgaatcgacctgtcccgttgatgacatcactcagcggacaccatgtgagctgcatattcctttcaagaacttatcaataaaggtggcgtcgggcatggccatcccaacggacccttcaggtacttaccactgcaggccgattccagcaggatactcgaaggtcgaagttgagttggtcgaaggcgcgtacgaggacctcgagctggattaccctggaggagacggtgagacgcatctacgagacacaagccatgccattattctatggcgcaggcggtacatcatcctccctgggcgacaagcggcgtctcgtgcaccatctcctccggctccgccatctcctcctcatgatcctgcaccgtctcctcctcatgctccgccagcaccgtctccacctcaggctccagcatcgactcctcctcaggatcctgcaccgactcctcctcgtgctcctacacctactcccccgcaagctcctcttccggcaccttcaaagtcaagggcccccccagctgcaccgcctgcccacacaagggcaacgaagaaggcgaaagttgacgccgacaagaacaaggacccggggtacgattgcacgcaagaggagcttgacgcttacgttgcatcagaagtcaagagacaattcaagcctcgaagtccagaaaagaagattcctatagaccccagtgtcaggaacttcttcaggggtatgtctgcatctgtcaaggaggccatcaagctatcggactatgagcgaacgctgaagaaagcatcttctggaaagtccaaaccagtccctcagcttggagagcaaccaaaacaggagatcgagccgttggttaccggtaaagaaatgacgatagaacaatttattactgacaccggtctaactacggatcaattgctaggagtcgcaccaatcgaaaaggcggaagtgaaatacatgtacgaactcggtaaaccgcttgtcaagcctgagctgctgcagtccctacccacacaaatgtacaagttccatcagctgtacatggagatgagcgccaccggtagagagatgatcggagcgaggattagggatacggacttcttgcaaggagatgacattctctggatcaatttcacacatatctacgaactataccagctggacgccgtcgacgtctctattatgagttgctggattttaatggagattcaaagggcccgacggcggagggttttcgatactggattcatcgaccctcggagagtaaacgtcgcaatgctcgaccaatatccacaagaaacagaggacaatctcgtccatctcctgaaggcgcagcattacaagacgttcatactgttgccatacaacacagaattccactgggtgcttttactcttcgacctggaggcctgcaccgtcaacgtatatgactcaatggataaaaaagagtctacgttcgacaaggttttcgaacttatagacagggcttggtatcggttccgtcatttggtccgcggcaaatggagagaaagacttaggcggaagttcaaatttccttgcgcaaagcaaaagcagggaaataacttgtgcggctattacgtgtgcgagtattgccactgccttgcaaaccaaatcatcaccacaagagagctcgattttattcgcatgagggataacctgaccacacacaaggaatttatcacggcggttcaagaacaactcatgggattcatcaacgaagaaatccttaatcccaaggcgcgcaggggcagggaggtgggcagcggcgcggggacgggcggtgagctggagggcggtggaggatgccgccgcgccacggctgcacgccgtgcgtctcccacctcaccttcgccgccagttgcatcgaccccaggaggatgccaccgcgccacggctgcactcatgcagtgccagcgcgtgagtgacctgctcatcgtggcgaccttcctctccttcccgttcgagctcttctacttcgccacctgcgccgacctgtcggaggtcaagtgcgcggtgctccacttctgcgccttcatcgtcctctgcagcgccaccaacctcctcgccgcgttcacccacgccctcccgcactccacgccgctgctcagggcgctcaccaccgccaaggtgctcgccgtggccgcatcgtcggcagtcacggtctcgctccccaccttcatccccaagctgctctgcttcaaggtgtag

SEQ ID NO: 93271 - DNA, 486 bp, Oryza sativa
  Clone ID: PAT_MRT4530_91672C.1
atgtttcagccaaatatagcgattctctctcctcacaccatatctcaacgcccacatctggatcgagctcccgcccccatccggacttccgtcgcgacgtccccttcgtcgtcgtcatcgccgttgccggccacaagccgccgacgccaagccgtcaaaagccacaagccgccgcagccgcttacgagcttgccggccacctgcgtcgctcgccacctcagcatctgccgtcgttgcctgtgtgccttcgcgcccgccagccattgccgtcatttcctcaccctccggccaccaccttcacttctgcgcccgctggccgcctgcccgcctgagggcgttgtcgcctgctcggctccgcgcctgctggcctccgccaccgcttccacggctgtcggccgcctgcgccacccgctcgcctcagcttccaccgccagccgcctgcacacatccactcctgctggccgacagccgtggaagctggagtag

SEQ ID NO: 93272 - DNA, 6489 bp, Oryza sativa
  Clone ID: PAT_MRT4530_91673C.1
atgaaactaattaagatggatcggcaatggatgtacgctgaccggcggtccaaagagtttattgacggcgtgcactattttttgagagtggccgaagctaacaggcaaaggggttttatttgttgtccatgcaataagtgtaagaatcagaaggagtattctgcatccaggactattcatttccacttgtttgagtcggggttcataccaagctataattgttggacatcccacggagagcaaggtgttgaaatggaagaagatgaagtggaagacgacaatattccggactttgctcagtatgttggatttgaaggaaatcaaacgggcgaggaggaaatagctgctgatggtaacgacgttgcggatgatcttggtcagatgttgcaggacgccagggaggactgcgaaagtgaaaaggaggcccataaattggacaagatgttggaggaccacagaacttcgttgtacccaggttgcgagcaggggcacaaaaagttggataccactctggagttgttgcaatggaaggcaaaaaatggggttagtgacaaggcatttggcgatttattgaaactcgtcaagaacattcttccggggggaaacaaattgcccgagacaacgtacgaggctaagaagatagtctgcccgttaggactggaagttcataagattcacgcatgtccgaacgattgtatcctatatcgcggtgaggagtatgagaacctagaagcatgccctgtttgcaaagcactacgatacaagattagacgggacgatccaggagaagttgacgggcagctgacaaagaagagaattcctgctaaggtgatgtggtatttccctataataccacggctaaggcgttttttcaggaacaaggggaatgctagaatgttgcgatggcacgctgaagagcgtcaacaggacgggatgctgagacaccccgccgatggttcgcagtggcgaaacatcgacagaaaatttaaagaatttggaaaggacgcacgaaacatacggtttggtttgagtacggatggcatgaatccttttggagagatgagcagcggccatagcacttggcccattacgatgtgtatctacaacctccccccctggctatgcatgaagaggaagtacataatgatgccgattattattcaaggccccaagcaacctggtaacgacatcgacgtgtacctaagaccactggtcgaagatcttaaactgttgtggaggaaggaaggtgtccccgtgtgggacgaggacaaacaggaggagtttaacctacgagcgctgctgttcgtaaccatcaacgattggcctgcacttagcaacctatccggacagtccaacaaggggtacaaggcttgcactcactgtatggatgaaacagaaagtacgtatcttaagcactgtaggaaggttgtatacatgggtcatcgtcgattccttgcagcaaaccacccggtacggaagaaaggcaagcacttcgaacataaggccgaccaccgtacgaagcctaaacatcgcagcgggaaaacagtgtttgctatggttaaagatcttaaagtagtgttcggaaaggggcctggaagccagcatatagagagcgaagatggtcacgcggcgatgtggaaaaagaactctatattttgggagttaccatgttgggaattcttggacgtacgccacgcaatcgacgtgatgcacctcactaagaacctttgcataaaccttcttggcttcctaggtgtatacggaaagtcgaaagatacactggaagcacgtaatgatctgaagcatatggaacaacgcggcgaccttcacccggaaccaaaggagaaaggaagccattacttgagtccagccagctacactcttagcaaggcagagaaggaaagtatgtttgaatgcttggagagcataaaggtaccgtctggatactccacgaatatcaagcgaataataagcacgaaggagaagaagttcacaaacctaaagtctcatgactgtcacatgttgatgacacaactgctaccagttgtaataaggggtatccttccagacaatgtccgggcaacaataacaaagctatgtgcattcatgaacgcaatttcgcagaaggtcatcgatccggatagattagaagcccttcagaatgaagtggtgcaatgtctcgtcagttttgagttgatatttccaccttcatttttcaatataatgacgcatctgctttgtcaccttgtgaaagagatccgtattctcgggcctatgtacctacacaacatgtttcctttcgagaggtacatgggcgttctgaagaagtatgttcgtaaccgtgctcgtccagaggcaagcatcgccaagggttatggaacagaggaggtcatcgaattttgcatagaatttatcgaagaccttcgcccaatcggggtacctgaatcacgccatgaagggagactacggggaaagggaactctcggaaggaaagtaataacgacggtagacaacaatttattccgtaaagcccatttcactgttctgcaacactcttcattggtagctccttacatcgaggagcacttggctctagttcgcgccaggaacatcggtaagtccgatgcatggattacacggcatcacattgatactttccccgcgtggctacgacaacatctcatgggtaacgagtcgatcaaccaacaacttgccttcctggcgaggggaccgtctgggtcgatcgcgacattccagggatatgagatcaatgggtacacattctacacgagagcccaagacatgaagagcacgaaccaaaacagcgctgttcgtgtcgatgccatgggacacgatggaacaactgccacgtattacggtgccatcgaggacatatgggaacttgactatggtcctctcaaggttcctctgttccggtgccaatgggttaggttgactggtggaggcgtaatgattgatgacagtgggatgacaactgttgaccttaacaaggttggatactcggacgaaccttttgtccttgccaatgatgtaacgcaagtctttttcgtgaaggacatgtctagcaaaggaaagaagggcagagggcctgatgagcctaagcgtcaagtggttttcccaggcaaaagaaaaatcgtcggagttgaggacaagactgacgaggattacgatcagttggatgggcaacccctttcacgcgagaacgtgaacgagaacgagaacgatcgaacgaacgagagcgagaacgagaacgatcgaacgaagacaagcgagaacgagggaacgaacgtgaatgagaacaagcgaacgaacgtgaatgagaacgagcgaacgaacatgaacgagctagggaacatggctgaccgcgatgaggaacagatattgtacgatacaatcgcggagggaagcagccagtactggaatgaagaagaggggaacgaggatccaaaccagtacttgaacgaggaagggaacgtggagagggatgcggaggggaaccagcaggggcacgtggaaagggatgtggaggggaaccaggaggaggaggctagtggtagtcaaccctccgttggacagaagagggcacgcgggcaacgaggtgcagcgaagaagcttgagggtcggcacatcataacggaagtggaagaagatggacgtcctagtgccccggccgaagccgccaagaactatgtacgtcacagcggttgggttgtgcgggataacgtgcctgtcagtacggtgtactggcgaagaacaagggcacgcggagatcatgagagctttgtcccagattcggagaaagagatgctgtggaccacaatgctcgagacattcacccttcctgcgggtacagaggacaaagtgaaaaggtggactctgaagaaaatggcagaacagtttcagagcttcaagggagatctgtaccagaagtatatactgaaggggcagacaccgaacttcgacacattcccaaagctaagggatcactgggacgagttcgttgcatataagacaggtgaacaagggaaggcgatgatggaaagaaacaaagaaaatgccgccaagaagaagtaccatcaccacttggggtcaggaggctatagcgtcgcgatgccgaagtgggagcagatggaggctagcttgattgacaggggtatcgaaccggcaacagccaattggccggaacgatcgaagttctggtactatgctcacggtggaacgctcaacccagctgatggctcactggtcttcggctatcagatacaagaggctgcgcgacgactaacagatgcagtggaagcctcctctcagggcacgttccgaccagacagagatagggacgagctgacactcgccctgcagactccagagcatccaggacgaactcgagggaaaggggtgattccttggaagattggtttcaaggaggacatccacacgtacaggagtcggatgaggagcaagagagataccgaggcgaagattgcagacctagagttccgggtatcgagctacgaactcaacatgcaagaggaggtggcaaggaaggttgatgaacgtatggccgcacatcggtcccatgatccccagccgaccattcctcctgcaatggtgagcccgtcaggaaaccgtagcagctgcgcctcaacggggcaggtaggatcacagagcatggacgccatgcaaacacaggacgaatcgacctgtcccgttgatgacatcactcagcggacaccatgtgagctgcatattactttcaagaacttatcaataaaggtggcgtcgggcatggccatcccaacggacccttcaggtacttaccactgcaggacgattccagcaggatactccaaggtcgaagttgagttggtcgaaggcgcgtacgaggacctcgagctggattaccctggaggagacggcggtacatcatccttcctgggcgacaagcggcgtctcgtgcaccatctcctccggctccgccatctcctcctcaggatcctgcaccgtctcctcctcatgctccgccagcaccgtctccacctcaggctccagcatcgactcctcaggatcctgcaccgactcctcctcgtgctcctacacctactcccccgcaagctcctcttccggcaccttcaaagtcaagggccccccccagctccaccgcttgcccacacaagggcaacaaagaaggcgaaagttgacgccgccaagaacaaggacccggggtacgattgcacgcaagaggagcttgacgcttacgttgcatcagaagtcaagagacaattcaagcctcgaagtccagaaaagaagattcctatagaccccagtgtcaggaacttcttcaggggtatgtctgcatctgtcaaggaggccatcaagctatcggactatgagcgaacgctgaagaaagcatcttctggaaagtccaaaccagtccctcagcttggagagcaaccaaaccaggagatcgagccgttggtgaccggtaaagaaatgacgatagaacaatttattactgacaccggtctaactacggatcaattgctaggagtcgcaccaatcgaaaaggcggaagtgaaatacatgtacgaactcggtaaaccgcttgtcaagtctgagctgctgcagtccctacccacacaaatgtacaagttccatcagctgtacatggagatgagcgccaccggtagagagatgatcggagcgaggatcagggacacggacttcttgcaaggagatgacattctctggatcaatttcaggggaatctatgaactataccagctggacgccctcgacgtctctattatgagttgctggattttaatggagattcaaagggcccgacggcggagggttttcgatactggattcatcgaccctcggaaagtaaacgtcgcaatgctcgaccaatatccacaagaaacagaggacaatctcgtccatctcctgaaggcgcagcattacaagacgttcatactgttgccatacaacacagaattccactgggtgcttttactcatcgacctggaggcctgcaccgtcaacgtatatgactcaatggataaaaaagagtctacgtttgacaaggttttcgaacttatagacagggcttggtatcggttccgtcatttggtccgcggcaaatggagagaaagacttaggcggaagttcaaatttccttgcgcaaagcaaaagcagggaactaacttgtgcggctattacatgtgcgagtattgccactgccttgcagaccaaatcatcaccacaagagagctcgattttattcgcatgagggataacctgaccacacacaaggaatttatcgcggcggttcaagaacaactcatgggattcatcaacgaagaaatccttgatcccaagggtgaattctactacgacggaaacacaattcaccggtccttagcttctgagctagcagcgagtactactacgtcgaaatcgtag

SEQ ID NO: 93273 - DNA, 535 bp, Oryza sativa
  Clone ID: PAT_MRT4530_91674C.1
atggcttcagctccactcccacaggcagctcaactggggtataagccaaacgtcttctccttctggatctttttcttcaactgaggttgattgattattgcaagaatgagcatatgacatactcamcaagccacacagcaaatatgcaagtgcacaaggataccaaaggatggcataatataggctcatttgcaaaagcagcatttagcaaagagttaagacgacgcactcacgaaccttcgcaacgacggaaacgacaagctaacacgcaaaacgaagaaaaagacccggcgaaccacggcacaataacgcaaacggagggcaccgggagcgagaggggatcaaagtgacccttaccaccatttatgcgacgacgaacggcaacggaagatagccggcgacgagcttcgaagggcggcgaggtactgtccacggaggcgatgactttccggcgatgtgcggcgacaacggaggggtggccgggcttcacttcgcagctgcgaatccaatggaggcaacagggacaccaggattt

SEQ ID NO: 93274 - DNA, 6448 bp, Oryza sativa
  Clone ID: PAT_MRT4530_91675C.1
atggatcggcaatggatgtacgctgaccggcggtccaaagagtttattgacggcgtgcactattttttgagagtggccgaagctaacaggcaaaggggttttatttgttgtccatgcaataagtgtaagaatcagaaggagtattctgcatccaggactattcatttccacttgtttgagtcggggttcatgccaagctataattgttggacatcccacggagagcaaggtgttgaaatggaagaagatgaagtggaagacgacaatattccggactttgctcagtatgttggatttgaaggaaatcaaacgggcgaggaggaaatagctgctgatggtaacgacgttgcggatgatcttggtcagatgttgcaggacgccagggaggactgggaaagtgaaaaggaggcccataaattggacaagatgttggaggaccacagaacttcgttgtacccaggttgcgagcaggggcacaaaaagttggataccactctggagttgttgcaatggaaggcaaaaaatggggttagtgacaaggcatttggcgatttattgaaactcgtcaagaacattcttccggggggaaacaaattgcccgagacaacgtacgaggctaagaagatagtctgcccgttaggactggaagttcataagattcacgcatgtccgaacgattgtatcctatatcgcggtgaggagtgtgagaacctagaagcatgccctgtttgcaaagcactacgatacaagattagacgggacgatccaggagaagttgacgggcagctaacaaagaagagaattcctgctaaggtgatgtggtatttccctataataccacggctaaggcgtttgttcaggaacaaggggaatgctagaatgttgcgatggcacgctgaagagcgtcaacaggacgggatgctgagacaccccgccgatggttcgcagtggtgaaacatcgacagaaaatttaaagaatttggaaaggacgcacgaaacatacggtttggtttgagtacggatggcatgaatccttttggagagatgagcagcggccatagcacttggcccgttacgatgtgtatctacaacctcccccctggctatgcatgaagaggaagtacataatgatgccgattattattcaaggccccaagcaacctggtaacgacattgacgtgtacctaagaccactggtcgaagatcttaaacagttgtggaagaaggaaggtgtccccgtgtgggacgaggacaaacaggaggagtttaacctacgagcgctgctgttcgtaaccatcaacgattggcctgcacttagcaacctatccggacagtccaacaaggggtacaaggcttgcactcactgtatggatgaaacagaaagtacgtatcttaagcactgtaggaaggttgtatacatgggtcatcgtcgattccttgcagcaaaccacccggtacggaagaaaggcaagcacttcgaacataaggccgaccaccgtacgaagcctaaacatcgcagcgggaaaacagtgtttgctatggttaaagatcttaaagtagtgttcggaaaggggcctggaagccagcatatagagagcgaagatggtcacgcggcgatgtggaaaaagaactctatattttgggagttaccatattgggaattcttggacgtacgccacgcaatcgacgtgatgcacctcactaagaacctttgcgtaaaccttcttggcttcctaggtgtatacggaaagtcgaaagatacactggaagcacgtaatgatctgaagcatatggaacaacgcggcgaccttcacccggaaccaaaggagaaaggaagccattacttgagtccagccagctacactcttagcaaggcagagaaggaaagtatgtttgaatgcttggagagcataaaggtaccgtctggatactccacgaatatcaagcgaataataagcacgaaggagaagaagttcacaaacctaaaacagcgttgttcgtgtcgatgccatgggacacgatggaacaactgccacgtattacggtgctatcgaggacatatgggaacttgactatggtcctctcaaggttcctctgttccggtgccaatgggttaggttgactggtcctaagcgtcaagtggttctcccaggcaaaagaaaaatcgtcggagttgaggacaagactgacgaggattacgatcagttggatgggcaaccccctttcacggtgacgattgaccctagcatcctcctatcaaatgaagacaccccttactcacgcagcgatcacaaggagggaacaatagtgaggagaaagtacgtgccgtaattattgtgtacacgatgtaaactattttggatgtattgattatccatataaatcaattgatgtatggcatatattaattacgcacgattattagaggtttcaacaagtttaaatcaaggatttttaaaagttttaaatcacgcaagtggcaatttcatatattaattagagtttttaacatttaatttactatcattcatatgctaattataattgactggagaatttttaaaagtattaaatttaatatatttttaaaactatcattcatatattagagtttttcacaatttaatttactatctttcatatgctacttatatatgactattcgaatttttaaaaggttaaaatcatgcatgtggcatttacatatgttaattagagtttttagcatttaatttaatataattcctacactaagtacatatgatgattacaatttttattaattttaaatcatgcagtatgtacatacatatcttaattagagtttttaccaatataataatatcattcatatatatgctaagtatatatgattattggaatttttattaattatatttgcttattacgatttatccacttaatttatcgaaaatcatatgcagtgctataatctttagtcccggttcttaaccctaaccgggtttaaaaagaatttcgaaatagcgggaaaagatatttactcccggttgttgagaacaaccgaaactaaagatatctttagtcccggttgttgagaacaaccggaagtaaagatccaggggtatatatattcccggtgcgccctcgtcttcttcaccaacacttaaacgttttcggccgatcgatctctctcggcctctctccttcgccgccactgcctagggcaaatccccgcgccgacggccgccgtatctctccgtcgtctcgagctcgtcgtcctcgccgccgcctccgtctcctccgctgccgccgcatctctcagatgtttcatgtatcaacagatggctgaccccgatgaggaacagatattgtacgatacaatcgcggagggaagcagccagtactggaatgaagaagaggggaacgaggatccaaaccagtacttgaacgaggaagggaacgtggagagggatgcggaggggaaccagcaggggcacgtggaaagggatgtggaggggaaccaggaggaggaggctagtggtagtcaaccctccgttggacagaagagggcacgcgggcaacgaggtgcagcgaagaagcttgagggtcggcacatcataacggaagtggaagaagatggacgtcctagtgccccggccgaagccgccaagaactatgtacgtcacagcggttgggttgtgcgggataacgtgcctgtcagtacggtgtactggcgaagaacaagggcacgcggagatcatgagagctttgtcccagattcggagaaagagatgctgtggaccacaatgctcgagacattcacccttcctgcgggtacagaggacaaagtgaaaaggtggactctgaagaaaatggcagaacagtttcagagcttcaagggagatctgtaccagaagtatatactgaaggggcagacaccgaacttcgacacattcccaaagctaagggatcactgggacgagttcgttgcatataagacaggtgaacaagggcaggcgatgatggaaagaaacaaagaaaatgccgccaagaagaagtaccatcaccacttggggtcaggaggctatagcgtcgcgatgccgaagtgggagcagatggaggctagcttgattgagaggggtatcgaaccggcaacagccaattggccggaacgatcgaagttctggtactatgctcacggtggaacgctcaacccagctgatggctcactggtcttcggctatcagatacaagaggctgcgcgacgactaacagatgcagtggaagcctcctctcagggcacgttccgaccagacagagatagggacgagctgacactcgccctgcagactccagagcatccaggacgaacttgagggaaaggggtgattccttggaagattggtttcaaggaggacatccacacgtacaggagtcggatgaggagcaagagagataccgaggcgaagattgcagacctagagttccgggtatcgagctacgaactcaacatgcaagaggaggtggcaaggaaggttgatgaacgcatggccgcacatcggtcccatgatccccagccgaccattcctcctgcaatggtgagcccgtcaggaaactgtagcagctgcgcctcaacggggcaggtaggatcacagagcatggacgccatgcaaacacaggacgaatcgacctgtcccgttgatgacatcactcagcggacaccatgtgagctgcatattcctttcaagaacttatcaataaaggtggcgtcgggcatggccatcccaacggacccttcaggtacttaccactgcaggccgattccagcaggatactccaaggtcgaagttgagttggtcgaaggcgcgtacgaggacctcgagctggattaccctggaggagacggtgagacgcatctacgagacacatgccatgccattattctatggcacaggcggtacatcatcctccctgggcgacaagcggcgtctcatgcaccatctcctccggctccgccatctcctcctcaggatcctgcaccgtctcctcctcatgctccgctagcaccgtctccacctcaggctccagcatcgactcctcctcaggatcctgcaccgactcctcctcgggctcctacacctactcctccgcaagctcctcttccggcaccttcaaagtcaagggcccccccagctccaccgcctgcccacacaagggcaacgaagaaggcgaaaattgatgccgccaagaacaaggacccggggtacgattgcacgcaagaggagcttgacgcttacgttgcatcagaagtcaagagacaattcaagcctcgaagtctagaaaagaagattcctatagaccccagtgtcaggaacttcttcaggggtatgtctgcacctgtcaaggaggccatcaagctatcggactatgagcgaacgctgaagaaagcatcttctggaaagtccaaaccagtccctcagcttggagagcaaccaaaccaggagatcgagccattggtgaccagggaagacatgatgatagaaaaatttattattgacaccggtctaactacggatcaattgctaggagttgaaccaatagaaaaggcataattgaaatacatgtacgaactcggtaaaccgcttgtcaagcccgagctggtgcagtccctacccacacaaatgtacaagttccatcagctgtacatggagatgagcgccaccggtagagagatgatcggagcgaggatcagggacccggacttcttgcaaggagatgatattctctggatcaatttcaagagaatctacgaagtataccagctggacgccctcgacgtctctattatgagttgctggattttaatggagattcaaagggcccgacggcggagggttttcgatactggattcatcgaccctcggagagtaaacgtcgcaatgctcgaccaatatccacaagaaacagaggacaatctcgtccatctcctgaaggcgcagcattacaagacgttcatactgttgccgtacaacacagaattccactgggtgcttttactcttcgacctgtcggcctgcaccgtcaacgtatatgactcaatggataaaaaagagtctacgtttaacaaggttttcgaacttatatacagggcttggtatcggttccgtcatttggtctgcggcaactggagagaaagacttaggcggaggttcaaatttccttttattcgcatgagggataacctgaccacacacaaggaatttatcgcagcggttcaagaacaactcatgggattcatcaacgaagaaatccttgatcccaagggtgaattctactacgacggaaacacaattcaccggtccttagcttctgagctagcagcgagtactactacatgccatcccatgaggtgggcttttgggattttccaaagaattaatcttcgagtgggccttagcccatctat

SEQ ID NO: 93275 - DNA, 5214 bp, Oryza sativa
  Clone ID: PAT_MRT4530_91676C.1
atgggcgccgtcctgggcaccgggagggtggggactctgactcgggtggcgctgacggtcctcgtcttcctgctgctcttgccgtcgcacgccctcgccgcggccgtcgcgaaggacacctccgccacactggtcgagacgctgccgctgcccacgacgctggtcggcccggagagcgtcgcgttcgacaagttcggcgatggcccctacagcggcgtctccgacggccgcatcctccgttgggacggcgccgacaaaggctggacgacggactgtaagaatgaacagatgatcgaagacaaggatgaagtgcatgctcatttgataatgaatggattcatgaagaaatatacctgctggaccaagcatggagagcaagaggcgcctgatgtcgcagctgaagaagtgttggatcaggatgtagagaacaccgccgcagctcgagaaggcatgttcgtaccttctcctttaggtggagagaccatagatttggacactcaatgtctatctacaatgttgcatgacattgaagacgcagaggacaacgacagagattatgagaagtttagtaagttggtggaagattgccagatgccgttgtatgatggatgcaagtcgaagcacagcaagttgtcatgcgtgttggaactcatgaagcttaaggctagtaatggctggtcggacaagagttttacagaactccttgagctgttaaaggatctgttgccagaggggaacaatttacctcagacgacatatgaagcgaagcaagtattatgtccgttgggcctggagaatgtatgcgagagtttaatgggattactacttaacccaggtactacaaaggatggtctcaacgcccgacgagatctggaagatatgggtgttcggtcggagctacatcccataaccacggaatccggcagggtttaccttcctccagcctgctacactctctcgaaagaagagaagattgatttgctaacatgtttgagtggtataaaggttccatctggttactcatcaagaatcagtaggctcgtttcactgcaagatcttaagttggttggaatgaagtcgcatgattgccacgttcttatcacacagctgttgcccgttgcaataaggaatattttgcctcctaaggtgcgacacacgatccagcggttgtgttccttcttccatgcaatcggccagaagatcattgatcccgagggactagatgaactacaggcagaacttgtgagaaccctatgtcatcttgagatgtactttcctccaactttctttgacataatggaacatcttccggtgcaccttgtgaggcaaacaaagtgctgtggtccagcattcatgacgcagatgtatccttgcgaaaggtacctggggatccttaagggttatgtacggaaccgttcacaccccgaggggagtatcatcgagagttacaccaccgaagaggccatcgaattttgtgtggactacatgtcagaaacatcttcaattggattaccacgatctcatcacgaagggaggcttgacggtgttggtactgttggaagaaagactattaggttggatcggaaggtgtacgataaagctcatttcacggtactacagcatatgactgaggtggtgccgtacgttgacgaacaccttgcagttatccgacaagagaacccaggccgatcagagagttggggtcctgaatggagtgccaccacctggcaaggatatgacataaatggatacacctttcacacggtcaagcaagatagcaaatgcacagtgcagaacagtgggttacgcatcgaggctgctagtgacagtggtcgtcgtgatcaatactatggtagagttgagcaaatattggagctagattacttgaagttcaaagtcccgttgtttcgttgtcgatgggtcgatcttcgcaatgtaaaagttgacaatgaaggtttcaccactgtcaacttggctaacaacgcgtacaaggatgaaccgttcgttctcgccaaacaagttgttcaagtgttctacatagttgacccgtgtaacaagaaagtacatgttgttcgtgaagggaaaaggagaattgttggattagacaatattgcagacgaggatgattacaaccagcacgtccacggcataggtcaagaaatacctctagaagaggaggaggaagaagatgaagttcaatatgcacggccgtcacaagtgacttcacctgtgacggcccaaagtgttgggcccgtcacaggtggtcttacctgtgacggctccacgatccggtgcccactctcactcactcactctctcgaccgccgcctcgcctctctcgacctctctgccgccctctacgccctcctctccaccgccgcctcgacctctccaccgccgtcctcgccgccgacaaatccgccgccctctccgccaccctctacgccctcctctccaccgcctcgacctcgacctctccgccaccatctctgccgccgccctctacgccgccctccccaccgccgcctagacctctctgccggcctctccaccgccgccgactctcgaccgccgccgtccatctccatcgacctctccgccgccatctccgccgccctctctaccgccatctccgccctctacgccgccctccccaccgccgcctcgacctctccaccgctgccgcctcactcactctctcgacggccgccgggacctcctctcagtcgccacgccaggaccgtcgtcgccgccaccgggatctcctctccgccgcctcctcctctcgaccgggactcgtcgtcgccgtgtgccgcctcctctgctcgtcgtctcctctccaggcccacggcgcccaggactgtcattggaagatggtctaactgctgcgggatagcggcacgtgagaacttcgggatcctccataaagatatcgggaaggtcacagaagccgagaaagagcgagcttggacggcaatggagaaatggttcacatttccagccgaagcaaaggataggctcaagcggaaggcattccaaaagatgggcaaagcttggaagaattggaagtcgaagctcttcaccgagtttgtcaacccgcccggcaatcatacgccgttcgatgaataccctcaaataaccgaagcggtttgggaggaattctgctctctcaagaccacccaagagtttagggaatcaagcgaggcacatcgcctactgcaacagcggaatgagcacccgcatcggctgggcaccgcagggtacatcggcaaggaggcaatatgggcccaagaagatgcagccgctgcagcagcgaatgtccctgccccgttttcagacatccctgaacaaagagctcgcaactgggcgcgggcaaggggtaaggtcaacccggacggctctgtcacatttgagaacaaaagtgatgccgtcgtctatcaggaactgttatgcttggttactgaacaagctttacaaagcgaggttgagtccacgccgaagaggcgcgaagatgacatcctcacaaaggcgctcggaaccaaagaacatcctggccgaactcggggaattggtagcgatgtgccctggaagcatggactccctcagtacagatcccaatacaggaaacggaaagtctccaaggaagagagggacgctcgtttgaaggccgaacttaaggttgaggtcattcaagaactagaagctagcatgaatgcaagggtggaagaaagggttaacaaggtcctcgccgacatgaatataccccgagtcacaacacctgatgtgcaaccaactcctcgtgtacaacacgacgcgagtccgtcacagcataggagtagttgtgcatccacagaggtgccggcccctggtctcccgatcgcaccactagctgcagtggaccacatcgagggcgcagcacagtgtgtcctactagcgagagtccacccaactttcgctcctgaagtcgctgagggcatggctttcaagccctcggttacagacaaggtccacggcgcagacctgctagctgggtatgccaaggtgtccatcgatacagtaaagaacacctggtcaggctatccgctgcccgtgcccccaaatgatgaaatcatgactttgggcgatgcgcgcaagacgttcatacaatggcccaaagaagacatagttgtgaagatgactcctcatctaagtcgaccgacggagcttacacctcccaagtctaagctatcaattgaggctccccgtggaccggcattgtcagtacctcattctcctggtggagctgatatggacttggcagatatagctcaaagcttggctctaataaagaccacaacaaaggacgatagctccccaccacttgtcaaaggccagaagcgtgaacgcggcaaggggaaggtcggggagttgccgccggagccaaaaaggggcaagactgcgacgtcgatgccggtgagcaaagcggggaaggtcgtgagggcgccagcccaatttgagctaggcatgccattggtggaggacaatgtgttagccgtgatgggtattgtttgccgagagctacataagcaatacatggagctaagcaatgccaagcggaaaatgagggagtcatccatagttggacatcacgaccaccagccgttcctatcatcgcctgcctatataactataggctttgatgacctcttcgaccttttcaggatccggaagttggacactggtcttctaaaatgctactccttgttgtgttggatcgagagtcgtcgccttggtaaacaggttgggttccttgatccatccatggtgaacgaggttaatttacgacagagtttcactaaggtggttgactatgtcaaccagtgtttatgggcccatcaagacaaggagtacatcatgtgcgcacacaaccaagagcgacattggattctcctagtcatcgtacctaagtggactagggttacctaccttaactccaataagtccaaagattatgatttcactgaaatcaccaaggccttaaatatggcttggggcccatatgtggaaaagggtggtaggcacaaggagggcaaggacgaactttaccatgacaccaagttcgcatgcgcacaacagatcggaaaccaatgtggtttacacgtgtgccacaacatgtcaacacttctaagagaggtgaaagatttcaaccctgaggttgttgctaatggcgaataa

SEQ ID NO: 93276 - DNA, 359 bp, Oryza sativa
  Clone ID: PAT_MRT4530_91677C.1
atgagtgatgaatatatcaccatctacagcagtaactctatacttttaaataaaaaggaaaatattataggccagaggactcatatgtcaaccacccctaccaccacattccaacttaaaatggaaaagaaaaacgacagtgtgggccaaaggataagaaaaaaattgatcgacgagacacatcacaagtgggaacattttactaccagtgacagtgagagactagcgtcgcgcacatgcacatcttgtgcgtctcaccctcaccggcaggttaccgcaccgctgctaggcagctaggctgctcttgtcggattttttccatgaaaacgaatctcttcgtggccgtgttccgttacttt

SEQ ID NO: 93277 - DNA, 2744 bp, Oryza sativa
  Clone ID: PAT_MRT4530_91678C.1
atgttagaggaccacagaacgtcattgtacccaggttgcgagtaggggcacaaaaagttggataccactctggagttcttgcaatggaaggcaaaaaaatggtactagtgacaaggcatttggcgatttattgaaactcgtcaataacattcttctggagggaaacaaattgcccgagacaacgtacgaggctaagaagatagtctgccctctaggactggaagttcagaagattcacgcatgtccaaatgattgtatcctatatcgcggtgaggagtacgagaacttagaagcatgccctatttgtaaagtactacaatacaagattagacgagatgatccaggagaagttgacaggcagctaacgaagaagagaattcctgttaaggtaatgtggtatttccctataataccacggctaaggcgtttgtcgagaaacaaggggaatgctagaatgatgcattggcacgctgaagagcgtcaacaggacgtgatgctgagacaccccgccgatggttcgcagtggcgaaacatcaacaaacggtttggtttaagtacggatggcatgaatccttttggagagatgagcagcggccatagcacttgacctgttacgatgtgtatctacaacctccccccttggctatgcatgaaaaggaagtacaaaatgatgccaattattattcaaggccccaagcaacctggtaacgacatcgatgtgtacctaagaccactggtcgaagatcttaaactgttgtggaagaaggaatgtgtccccgtgtgggacaaggacaaacaggaggagtttaacttacaagtgctgctgttcgtaactatcaacgattggcctgcacttagcaacctatccgggcagtccaacaaggggtacaaggcttgcactcactgtatggatgaaacagaaagtacgtatcttaagcactatcggaaggttgtgtacatgagtcatcgtcgattccttgcagcaaaccacccagtacggaagaaaggcaagcactttgaacatacggcggaccaccgtacgaagccaaaacatcacagcggtaaaacaatgtttgatatggtgaaatatcttaaagttgtgtttggaaaggggcctggcagctagcctatagagagcgaagatggtcacgtggcgatgtggaaaaaaaaactccatattttgggagttaccctattgggaattcttggacgtccaccacgcaatcgacgtgatgcacctcactaagaacctttgcgtaaaccttcttggcttccgatgtgtatatggaaagtcgaaagatacactggaagcacgtaatgatctgaagcatatggaacaacgcgggaaccttcacccggaaccaaatgagaaaggaagccattacttgagtccagccagctacactcttagcaagggcagagaacgaaaagtatgtttggaatgcttggagagcataaaggtaccgtctggatactccacgaatatcaagcgaataataagcacgaaggagaagaagttcacaaacctaaagtctcatgaatgtcacgtgttgatgacacaactgctaccagttgcaataaggggtatcctttcagacaatgtgcgtgcaacaataacaaagctatgtgcattcatgaacgcaatttcgcagaagtcatcgatccggatagattagaagcccttcagaataatatggtgcaatgtccttgtcagctttgagttgatatttccaccttcatttctcaatataatgacgcatctgctttgtcaccttgtcaaagagattggtattctcgggcctgtgtacctacacaacatgtttcctttcgagaggtacatgggcgttctgaagaagtatgttcgtaaccgtgctcgtccagagacaagcatcgccaaggggtatggaacataggaggtcattgaattctgcgtagaatttatcgaagaccttcgcccaatcgggatacctgaatcacgccatgaagggagactacggggaaaggggactctcagaaggaaagcaataatgatggtagacaacaatttattccgtaaagcccatttcacggttctgcaacaatcttcattggtggctccctacatcaaggagcacttggctctagttcgcgccagaaacatcggtaaatccgatgcatggattacacggcatcacattgatactttctccgcgtggctgcgacaacatctcatgggtaacgagacgattaaccaacaactggccttcctggcgaggggaccatctggctcgatcgcaacattctagggatatgaaatcaatgggtacacattctacacgagagcccaagacatgaagagcacgaaccagaacggtgctgttcgtatcgatgccatgggacacgatggtacaactggcacctattacggtgccatcgaggacatatgggaacttgactatggacctctcaaggtacctctgttccggtgccaatgggttaggttgactggtggaggcgtaacgattgatgacagtgggatgacaacggttaaccttaacaaggttggatactcggacgaaccgtttgtccctgtcaatgatgtaacggaagttttttgcgtcaacgacatatctagtaaaggaaaaaagggcaaagggcctgacgagccgaagcgccacatggttctcccaagaaaaagaaaaatcatcggagtagaggacatggtttgatgggcaaccccctttcacagtgacgattgaccctag

SEQ ID NO: 93278 - DNA, 1110 bp, Oryza sativa
  Clone ID: PAT_MRT4530_91679C.1
atggtgaacagtcgcaccaatggaagtggaaacaataacaatgaagggaacccaactcttgctcaagttctggctcaacagactcagttaatgaatatgatgatacagcagatgcagaaccagctcaaccaagggaacaacaatgctccaccgccgcagaacaagttaactgattttcttcgtgtgaggccacctaccttttctagcactaccaacctagtggaagcaggtgattggctgcacgctgttgagaagaagttggaactgctccagtgcacggatcaggagaaagttgttttcgcttcacatcagttgcaaggacctgcatcagaatggtgggatcatttccggatgaacagagcagatggacaaccaatcacttgggcagagttcacagaagcattcaagaagacacacatacctgtaggagttgttgctttgaagaagcgtgagttcagagcattgaagcaaaaggatcataccgtggcagagtatcttcatgagttcaatcgtctggcacgttatgctccagaagatgtgcgtactgacgaggaaaggcaggagaagttcttggaaggtctgaaggatgaactgtcagttacgttgatctcccatgactatgttgattttcagcagctggttgacaaagcaattcgacttgaagacaagaagaatatgatggataaccgtaaaaggaaaatgactgtattccatgaggcacaaggtagtagccagaggcagcgtatcaagccactccaaattggtgaatcttcctccgctggtcaaggacagtcgcaacagttgaacatcggtggtgagatcaaatcagagactaatggaagcaatgaagttaacatcgagcaagctaatcagccagtgccagttcagcaggatcagtctcaggagaataacagtagtggaagggagcagcaggtatgtttcaactgttacaacccaggtcactttgcaagagagtgtccgaagccgaagcatcagcagtcgcaagtcaacaacattgtcgtcacaggagccaatgcagtgtcagttgcgtcttcaagagttgcgtcttcaagtgttacagctcagccaccagtttcaaggcagcagtag

SEQ ID NO: 93279 - DNA, 471 bp, Oryza sativa
  Clone ID: PAT_MRT4530_9167C.1
tgctccggcggtctacagcgatggcgaaggggcggacgaggacggcgacgacttggcgaccacgatgacgaccttcccgagagacggcgacgactggaacggcggcggcgcacgactagagcagcagcgacgacggcggcgcgaggtcacacggcgctaaggctctaccggcgacgagaggcgaaggcgagggtggcggcgggtagaggagacaccggggatccttttaaaggggctaggaggcagcggcaaaggcccacggcggccggcgacgcgaaggaaacctcgggctcggagagagaaaaaccgatccgaatcaacctcgaatcaaacactttccaagcgattttagccgatgattccaaaagagaaaaggtagaggagatcccgaggatcatttcccctctaacgattcggccggagaaggaaagacgcggccgaatttggaaggagacggcggcgcagctcggc

SEQ ID NO: 93280 - DNA, 353 bp, Oryza sativa
  Clone ID: PAT_MRT4530_91680C.1
ggagggcccgccctgaagcccctttgaaaaaagggaaatattatcgataaaaaaaaaaggggttttttaaaaaaggttggggggggggaccccggtttttcttgtttttgggataaaaacacaagggttgggaaaaaggcaattttccggggggggaaacgtactcaaaccaaaccggaggtttaaggcgccctttccaaatttttaaaatttttgggcgaggtttccccactggaaaccatgggggggggggctaaacatcccgtcctggggacgcttttaagggggccatggaaacattttaacattccccttgttccggaaaaaccccttagccggggttttatagggaa

SEQ ID NO: 93281 - DNA, 6459 bp, Oryza sativa
  Clone ID: PAT_MRT4530_91681C.1
atggatcggcaatggatgtacgctgaccggcggtcgaaagagtttattgacggcgtgcactattttttgagagtggccgaagctaacaggaaaaggggttttatttgttgtccatgcaataagtgtaagaatcagaaggagtattctgcatccaggactattcatttccacttgtttgagtcggggttcatgccaagctataattgttggacatcccacggagagcaaggtgttgaaatggaagaagatgaagtggaagacgacaatattccggactttgctcaatttgttggatttgaaggaaatcaaacgggcgaggaggaaatagctgctgatggtaacgacgttgcggatgatcttggtcaaatgttgcaggacgccagggaggactgcgaaagtgaaaaggaggcccataaattggacaagatgttggaggaccacagaacttcgttgtacccaggttgcgagcaggggcacaaaaagttggataccactctggagttgttgcaatggaaggcaaaaaatggggttagtgacaaggcatttggcgatttattgaaactcgtcaagaacattcttccggggggaaacaaattgcccgagacaacgtacgaggctaagaagatagtctgcccgttaggactggaagttcataagattcacgcatgtccgaacgattgtatcctatatcgcggtgaggagtacgagaacctagaagcatgccctgtttgcaaagcactacgatacaagattagacgggacgatccaggagaagttgacgggcagctaacaaagaagagaattcctgctaaggtgatgtggtatttccctataataccacggctaaggcgtttgttcaggaacaaggggaatgctagaatgttgcgatggcacgctgaagagcgtcaacaggacgggatgctgagacaccccgccgatggttcgcagtggcgaaacatcgacagaaaatttaaagaatttggaaaggacgcacgaaacatacggtttggtttgagtacggatggcatgaatccttttggagagatgagcagcggccatagcacttggcccgttacgatgtgtatctacaacctccccccctggctatgcatgaagaggaagtacataatgatgccgattattattcaaggccccaagcaacctggtaacgacatcgacgtgtacctaagaccactggtcgaggatcttaaacagttgtggaagaaggaaggtgtccccgtgtgggacgaggacaaacaggaggagtttaacctacgagcgctgctgttcgtaaccatcaacgattggcctgcacttagcaacctatccggacagtccaacaaggggtacaaggcttgcactcactgtatggatgaaacagaaagtacgtatcttaagcactgtaggaaggttgtatacatgggtcatcgtcgattccttgcagcaaaccacccggtacggaagaaaggcaagcacttcgaacataaggccgaccaccgtacgaagcctaaacatcgcagcgggaaaacagtgtttgctatggttaaagatcttaaagtagtgttcggaaaggggcctggaagccagcatatagagagcgaagatggtcacgcggcgatgtggaaaaagaactctatattttgggagttaccatattgggaattcttggacgtacgccacgcaatcgacgtgatgcacctcactaagaacctttgcgtaaaccttcttggcttcctaggtgtatacggaaagtcgaaagatacactggaagcacgtaatgatctgaagcatatggaacaacgcggcgaccttcacccggaaccaaaggagaaaggaagccattacttgagtccagccagctacactcttagcaaggcagagaaggaaagtatgtttgaatgcttggagagcataaaggtaccgtctggatactccacgaatatcaagcgaataataagcacgaaggagaagaagttcacaaacctaaagtctcatgactgtcacgtgttgatgacacaactgctaccagttgtaataaggggtatccttccagacaatgtccgggcaacaataacaaagctatgtgcattcatgaacgcaatttcgcagaaggtcatcgatccggatagattagatgcccttcagaatgaagtggtgcaatgtctcgtcagttttgagttgatatttccaccttcatttttcaatataatgacacatctgctttgtcaccttgtgaaagagatccgtattctcgggcctatgtacctacacaacatgtttcctttcgagaggtacatgggcgttctgaagaagtatgttcgtaaccgtgctcgtccagaggcaagcatcgccaagggttatggaacagaggaggtcatcgaattttgcgtagaatttatcgaagaccttcgcccaatcggggtaccggaatcacgccatgaagggagactacggggaaagggaactctcggaaggaaagcaattatgacggtagacaacaatttattccgtaaagcccatttcactgttctgcaacactcttcattggtagctccttacatcgaggagcacttggctctagttcgcgccaggaacatcggtaagtccgatgtatggattacacggcatcacattgatactttccccgcgtggctacgacaacatctcatgggtaacgagtcgatcaaccaacaacttgccttcctggcgaggggaccgtctgggtcgatcgcgacattccagggatatgagatcaatgggtacacattctacacgagagcccaagacatgaagagcacgaaccaaaacagcgctgttcgtgtcgatgccatgggacacgatggaacaactgccacgtattacggtgccatcgaggacatatgggaacttgactatggtcctctcaaggttcctctgttccggtgccaatgggttaggttgactggtggaggcgtaatgattgatgacagtgggatgacaactgttgaccttaacaaggttggatactcggacgaaccttttgtccttgccaatgatgtaacgcaagtctttttcgtgaaggacatgtctagcaaaggaaagaagggcagagggcctgatgagcctaagcgtcaagtggttctcccagtgcgccctcgtcttcttcaccaacacttaaacgttttcggccgatcgatctctctcggcctctctccttcgccgccactgcctagggcaaatccccgcgccgacgccgccgtatctcgccgtcgtctcgagctcgtcgtcctcgccgccgcctccgcctcctccgctgccgccgcatctctcagatgtttcttgtatcaacagatggctgaccgcgatgaggaacagatattgtacgatacaatcgcggagggaagcagccagtactggaatgaagaagaggggaacgaggatccaaaccagtacttgaacgaggaagggaacgtggagagggatgcggaggggaaccaggaggaggaggctagtggtagtcaaccctccgttggacagaagagggcacgcgggcaacgaggtgcagcgaagaagcttgagggtcggcacatcataacggaagtggaagaagatggacgtcctagtgccccggccgaagccgccaagaactatgtacgtcacagcggttgggttgtgcgggataacgtgcctgtcagtacggtgtactggcgaagaacaagggcacgaggagatcatgagagctttgtcccagattcggagaaagagatgctgtggaccacaatgctcgagacattcaccattcctgcgggtacagaggacaaagtgaaaaggtggactctgaagaaaatggcagaacagtttcagagcttcaagggagatctgtacaagaagtatatactgaaggggcagacaccgaacttcgacacattcccaaagctaagggatcactgggacgagttcgttgcatataagacaggtgaacaagggcaggcgatgatggaaagaaacaaagaaaatgccgccaagaagaagtaccatcaccacttggggtcaggaggctatagcgtcgcgatgccgaagtgggaggagatggaggctagcttgattgagaggggtatcgaaccggcaacagccaattggccggaacgatcgaagttctggtactatgctcacggtggaacgctcaacccagctgatggctcactggtattcggcgttcagatacgagaggctgcgcaacgactaacagatgcagtggaagcctcctctcagggcacgttccgacccgacagagatagggacgagctgacactcgccctgcagactccagagcatccaggacgaacacgagggaaaggggtgattccttggaagattggtttcaaggaggacatccacacgtacaggagtcggatgaggagcaagagagataccgaggcgaagattgcagacctagagttccgggtatcgagctacgaactcaacatgcaagaggaggtggcaaggaaggttgatgaacgcatggccgcacatcggtcccatgatccccagccgaccattcctcctgcaatggtgagcccgtcaggaaaccgtagcagctgcgcctcaacggggcaggtaggatcgcagagcatggacgccatgcaaacacaggacgaatcgacctgtcccgttgatgacatcactcagcggacaccatgtgagctgcatattcctttcaagaacttatcaataaaggtggcgtcgggcatggccatcccaacggacccttcaggtacttaccactgcaggccgattccagcaggatactcgaaggtcgaagttgagttggtcgaaggcgcgtacgaggacctcgagctggattaccctggaggagacggtgagacgcatctacgagacacaagccatgccattattctatggcgcaggcggtacatcatcctccctgggcgacaagcggcgtctcgtgcaccatctcctccggctccgccatctcctcctcatgatcctgcaccgtctcctcctcatgctccgccagcaccgtctccacctcaagctccagcatcgactcctcctcaggatcctgcaccgactcctcctcgtgctcctacacctactcccccgcaagctcctcttccggcaccttcaaagtcaagggcccccccagctgcaccgcctgcccacacaagggcaacgaagaaggcgaaagttgacgccgccaagaacaaggacccggggtacgattgcacgcaagaggagcttgacgcttacgttgcatcagaagtcaagagacaattcaagcctcgaagtccagaaaagaagattcctatagaccccagtgtcaggaacttcttcaggggtatgtctgcatctgtcaaggaggccatcaagctatcggactatgagcgaacgctgaagaaagcatcttctggaaagtccaaaccagtccctcagcttggagagcaaccaaaacaggagatcgagccgttggttaccggtaaagaaatgacgatagaacaatttattactgacaccggtctaactacggatcaattgctaggagtcgcaccaatcgaaaaggcggaagtgaaatacatgtacgaactcggtaaaccgcttgtcaagcctgagctgctgcagtccctacccacacaaatgtacaagttccatcagctgtacatggagatgagcgccgccggtagagagatgatcggagcgaggatcagggacacggacttcttgcaaggagatgacattctctggatcaatttcaagggaatctacgaactataccagctggacgccctcgacgtctctattatgagttgctggattttaatggagattcaaagggcccgacggcggagggttttcgatactggattcatcgaccctcggagagtaaacgtcgcaatgctcgaccaatatccacaagaaacagaggacaatctcgtccatctcctgaaggcgcagcattacaagacgttcatactgttgccatacaacacagaattccactgggtgcttttactcttcgacctggaggcctgcaccgtcaacgtatatgactcaatggataaaaaagagtctacgtttgacaaggttttcgaacttatagacagggcttggtatcggttccgtcatttggtccgcggcaaatggagagaaagacttaggcggaagttcaaatttccttgcgcaaagcaaaagcagggaactaacttgtgcggctattacgtgtgcgagtattgccactgccttgcagaccaaatcatcaccacaagagagctcgattttattcgcatgagggataacctgaccacacacaaggaatttatcgcggcggttcaagaacaactcatgggattcatcaacgaagaaatccttaatcccaagggtgaattctactacgacggaaacacaattcaccggtccttagcttctgagctagcagcgagtactactacgtcgaaatcgtag

SEQ ID NO: 93282 - DNA, 692 bp, Oryza sativa
  Clone ID: PAT_MRT4530_91682C.1
atgacatcatcaatggccggaccaagatggcgacctcgccggagatagagcgaccggctgcggatttggaggacatgaacacgtagaggacgacgagacgaacccaacgatactcaccctcgtgccaaacgacgaccgacgacggccggcgacgaggaggcgacggcggcggctcgggttgcacggggcggcggagctccgatgaccggcgacggaaaaggaagggtggccgagcttcccctcaccacggcgcacccaacggtggtgacggcgaccggcgacgacgatggagacggcggcgcggcggcaccggagatggccggcggcggcggtttgcttggcggcggtggcgacggagctacggagcacggaagaggacgggagagggggcaaacgaaagaggaggactagggggtcctatttatagccttggattgaagagatcggactcctcccgcaagaaatcgatccgggaaatcaaaaactcggttttggagataaactcgaaaacgagtttgattcggataagatactcaacgatttgctccgatttttgggggtaaagatagaggaggataagaggaatatttcccctcaactaaattggaaaaaggagcaacggggaggcgagatttggaaggaagaggcggcggcactgtgcacggcacggctggctcgggctctgcatgaga

SEQ ID NO: 93283 - DNA, 960 bp, Oryza sativa
  Clone ID: PAT_MRT4530_91683C.1
atggcaatcgtgtgtgccggtttccctgccaacgatgggtcactgcaccccaacttctacgcggcgacgtgcccgcaggcggagaccatcgttcgccaggaggtcacccgggccctctacaccaacatcggcttcgctgccggcctcgtccgcatgcacttccacgactgcttcgtcagggggtgcgacgggtcggtgctgctggagtcgacgtcggacaacgtcgcggagagggactcgccgatcaacaacccgagcctacgcggcttcgaggtcatcgacgccgccaaggctcggctggaggccgcctgcccaggcgtcgtctcctgcgccgacgtcctcgcctacgccgccagggacggcgtcgcgctcaccgggggcccccgctacgacgtcccgggcggccggagggacggcacggcgtcgctcgagccggaggtggcggacaacatcccggctccgacgttcacgctggaccagctcacccagagcttcgccgccaagggcctcacacaggaggagatggtcaccctgtccggcgcgcacaccgtcggccgcgcgcactgcacgtcgttcagcgaccgcctctacaacttcagcgcgacgggcgccgccgaccccagcgtcgacccggcgttgctgccgcagctccgccgcgcgtgcccggccgcgggacccgacggcgccgtggacgccggcctcgtcgtgcccatggagccccgcacgcccaacggcttcgacgcgctctactactgggccgtgctacgcaaccgcgccctcttcacctccgaccaggcgctgctgtccagcccgcccaccgccgcgcaggtcaggcagaccgcgtacggcgggtacccgtggaagctcaagttcgccgccgccatggtgaagatggggcagatcgaggtgctcaccggcggcagcggcgagatcaggaccaagtgcagcgccgtcaactga

SEQ ID NO: 93284 - DNA, 1116 bp, Oryza sativa
  Clone ID: PAT_MRT4530_91684C.1
gaagctccggctccactcccacaggcagctcaactgggatataagccaaacgtcttctccttctggatcctttttcttcaactgaggttgattgattattgcaaggtgagcatatgacatactcagcaagccacacagcaaatatgcaagtgcacaaggataccaaaggatggcataatattggctcatttgcaaaagcagcattttagcaaaacatttaagagaagtaaaacagtggagtaattaatcaggaattttaatcaacactgaacagcacacccatgctgcacaggcccaaccatcctgaacaaccatacccggctgtacagatctaactccaaaccaggagctaaacaaattattactagttatagcatcaataattattgtgagaggtgtgagactaatcacgaaaaacattgctcaacccgcccataaccgcgggcacggctattcgaatagttttcctctggccagaggtgtaccactgtacccacaaggcacagcctcaacatcatgtctaccatgcgtcgcaatactggaaagtatccgaatagaggctgtgacaataccctttgcacaacacaactcaccacagtgcaccattcctggatcataatcaccccctctataaatataaccagaggcatggactcctcagcgacccccacggacttctcgccgcttcttagtctggcaccccgcaatgaatcatgctataccatggcactggaccacaactccacaggcgatagagagctcggttgagctatccgaagacaccaacacgaagaggacgacgacgcgaactcaccggtgcaaagaactacgacgaacgacgacaaacgacggccggcgacgaggtccgacggcggctcggctcgggtctacgtcggcgacggcgctccggcggtcttcggcggctgcaaaggggcggacggggtgctcctccttctcacgaacccgacggtggcgacagaaggtggcggcgacgaccacagcagcggcgcggcgcggctgaagtgacgacaacaacggcggtggctagggctacgcggtggcggcgctacgggcaacggtagagatcgggacttggggcaaacggaagaggacgac

SEQ ID NO: 93285 - DNA, 9358 bp, Oryza sativa
  Clone ID: PAT_MRT4530_91685C.1
ctaagacctactgaacgccatcgtcttcatctccctcctggtagtaggcatagggatcctccgaggcttcatctcccgcttccccttaaataatgctcgtcccgagatttcataccagttttcgaatagatgcgggtattccgtcctcaaaaattcttcactttcccaggtggcttcatcctcagtatgattgctccattgtaccttgtacatacgccacactttgctcctagtcctcttttcggcttcatccaatatccggatcgggtgttctggatatgtgagatcattgctaatgtgaatctcttccagcggagcttgctcttccggcattcgtaaacatttctttagctgagacacatggaagactgggtgcacatccgcgatattctctggtaactgtaactgatatgcaacttctcctcgcctggcgatgatctggaatggtcccacatattttggtgccagttttcctttgaccttaaacctttttgttcccctcatcggagaaacctttagataaacgtaatctgcttccttaaactccaggattcttcttcgggtgtcggcgtaaatcttctgtcgtgattgtgccacttttagacggtcacggatcaagcgaaccttttcttcggcttcttgaataatgccaggtccaaataccgcccgttctctagtctcggaccacattagcggggtacgacatcttcgaccaaacaatgcctcattgggtgacatctttaggcttgcttgaaagctgttgttgtaggagaattcggtgtagggcaaacatctctcccagtccttgctaaaatccatagcacaagccctcagcatgtcctccaggacctggttggttctctccgtctggccatctgtctgtggatgataagcggtgctaaatgcgaggtaacttcctacggcttcatggactttctcccagaaatgtgaggtaaacagtgtgccccgatcagatataattttcttaggtacaccatgaagacatactgccggcctctggtgttcagccttcaccttctggcatacgtcgcagagtgctacgtattcggccacatctctcttcatgttgggccaccagtagccctccttcaaatcctggtacatttcggtacttccggggtgtaatgaataagccgattcgtgagcttcctttaaaattaatcccctcagtccaccctgttcgggtacgtaaattctctttttataccatagaacatcattttcgtcggttgaaaattcctttgcacgtcctgcagctaagcgttccttcacctctcggatttcctcgttgtccttctgggcttcttctatttgggttctcaaaagaggttgaatgtccagggtgtttatctgtccacggggtactatatgtaagttcagctgagctatttcttccctaagctcagggaccatcccttccattctcagatgattgcaatggctcttacgactcagagcgtcggccacgacgtttgctttgcctgggtgatagtgaacctctaaatcatagtccttgattaattctaaccatcgtctttgcctcaagttgagatctgactgggtgaagatatactttagactcttgtggtcagtgtagatatcgcaatggtttccaattagataatgtctccaaatctttagcgcatgaaccacagctgcgagttctaggtcatgggtagggtagttttcctcatgtggtcgcaattgtcgcgacgcataggccacaacttttccgtcctgcatcagtactcctcctagtccttgccacacaaacttcttttccttcttgagtagttgtgtcattggtcgggctatcttagagaaccctttaatgaaccgtcggtagtatccagccaagcctagaaaactccgaatttcagtcacagatttgggtgctttccattccgtgacagcctccactttagcaggatccactgctactccaccggccgagattacgtggcctagaaaagcgacttcttttaaccagaactcacacttgctgaattttgcatataacttatgcttccgaagtttctcgagtaccaattgcaagtgctctgcatgttcttcctcatctttggagtagattagaatatcatcgatgaataccaccacaaatttgtccaagtagtccatgaacactttgttcataagattcataaagtatgccggagcgttggttaaaccaaacgacattacagtgaactcatataatccataacgtgttgagaacgcggttttgggtatgtccctggttctaattttcaattggtggtatcctgaccgaaggtcaatcttagagaacaccttagctcctttgagttgatcaaaaagatcatcaatccgtggtagtggatacttgtttttgatagttacttcgttcagtgagcggtagtccacacacattcttatgctaccatctttcttcttgacgaatagcactggggctccccaaggtgacgaactggggcgtacaaatcccttttcttgcagctccctaatttgcttcttaagttcttctaactcattgaccggcatccgatatggtctcttggatatgagggcagttccgggtatcaggtcaataatgaactctatgtcacgatctggtggcattccaggtaaatcctctgggaacacatcaggaaatcgctgcactacgggcattccctttaggggtagcatggtaaatatacctccaacacgttcggttagcctaggatcttgatccatggttgctctcatatccgatccccagggtgtggtcagggtaacttctctacgtctatagtcaattattcctctatgctttgctaaccaatccatacccagaatgacatcaagagtttggggtattagcaccataagattggagggaaacaccatatccctcatcaatagccggaccaagatggcgacctcgccggagattggatggtcggctgcgactttggaggacatgtgtagaaaatcattgtccgaactcgataagatggatcggcaatggatgtacgctgaccggcggtccaaagagtttattgacggcgtgcactattttttgagagtggccgaagctaacaggcaaaggggttttatttgttgtccatgcaataagtgtaagaatcagaaggagtattctgcatccaggactattcatttccacttgtttgagtcggggttcatgccaagctataattgttggacatcccacggagagcaaggtgttgaaatggaagaagatgaagtggaagacgacaatattccggactttgctcagtacgttggatttgaaggaaatcaaacgggcgaggaggaaagggatgctgatggtaacgacgttgcagatgatcttggtcagatgttgcaggacaccaaggaggactgcgaaagtgaaaagggagcccataaattggacaagatgttagaggaccacagaacttcgttgtacccaggttgcgagcaggggcacaaaaagttggataccactctggagttcttgcaatggaaggcaaaaaatggggttagtgacaaggcatttggcgatttattgaaactcgtcaagaacattcttccggagggaaacaaattgcccgagacaacgtacgaggctaagaagatagtctgcctgctaggactggaagttcaaaagattcacgcatgtccgaatgattgtatcctatatcgcggtgaggagtatgagaacctagaagcatgccctgtttgcaaagcactacgatacaagattagacgagacgatccaggagaagttgacgggcagctaacaaagaagagaattcctgctaaggtgatgtgcaacctatctggacagtccaacaaggggtacaaggcttgcactcactgtatggatgaaacagaaagtacgtatcttaagcactgtaggaaggttgtatacatgggtcatcgtcgattccttgcagcaaaccacccggtatggaagaaaggcatgcacttcgaacataaggctgaccaccgtacgaagcctaaacatcgcaacgggaaaatagtgtttgctatggttaaagatcttaaagtagtgttcgaaaaggggcctggaagccagcctatagagagcgaagatggtcacgcggcgatgtggaaaaagaactctatattttgggagttaccctattgggaattcttagacgtacgccacgcaatcgacgtgatgcacctcactaagaacctttgcgttaaccttcttggcttcctaggtgtatacggaaagtcaaaagatacactggaagcacgtaatgatctgaagcatatggaacaacgcggcgaccttcacccggaaccaaaggagaaaggaagccattacttgagtccagccagctacactcttagcaaggcagggaaggaaagtatgtttgaatgcttggagagtataaaagtaccgtctggatactccacgaatatcaagcgaataataagcacgaaggagaagaagttcacaaacctaaagtctcatgactgtcacgtgttgatgacacatctgctaccagttgtaataaggggtatccttccagacaatgtccgggcaacaataacaaagcaatgtgctttcatgaacgcaatttcgcagaaggtcatcgatccggatagattagaagcccttcagaatgaagtggtgcaatgtctcgtcagttttgagttggtatttccaccttcatttttcaatataatgacgcatctgctttgtcaccttgtgaaagagatccgtattctcgggcctatgtacctacacaacatgtttcctttcgagaggtacatgggcgttctgaagaagtatgttcgtaaccgtgctcgtccagaggcaagcatcgccaagggttatggaacagaggaggtcatcgaattttgcgtagaatttatcgaagaccttcgcccaatcggggtacctgaatcacgccatgaagggagactacggggaaagggaactctcggaaggaaagcaataatgacggtagacaacaatttattccgtaaagcccatttcactgttctgcaacactcttcattggtagctccttacatcgaggagcacttggctctagttcgcgccaggaacatcggtaagtccgatgcatggattacacggcatcacattgatactttccccgcgtggctacgacaacatctcatgggtaacgagtcgatcaaccaacaacttgccttcctggcgaggggaccgtctgggtcgatcgcgacattccagggatatgagatcaatgggtacacattctacacgagagcccaagacatgaagagcacgaaccaaaacagcgctgttcgtgtcgatgccatgggacacgatggaacaactgccacatattacggtgccatcgaggacatatgggaacttgactatggtcctctcaaggttcctctgttccggtgccaatgggttaggttgactggtggaggcgtaatgattgatgacagtgggatgacaactgttgaccttaacaaggttggatactcggacgaaccttttgtccttgccaatgatgtaacgcaagtctttttcgtgaaggacatgtctagcaaaggaaagaagggcagagggcctgatgagcctaagcgtcaagtggttctcccagtgcgccctcgtcttcttcaccaacacttagacgttttcggccgatcgatctctctcggcctctctccttcgccgccactgcctagggcaaatccccgcgccgacgccgccgtatctcgccgtcgtctcgagctcgtcgtcctcgccgccgcctccgcctcctccgatgccgccgcatctctcagatgtttcttgtatcaacagatggctgaccgcgatgaggaacagatattgtacgatacaatcgcggagggaagcagccagtactggaatgaagaagaggggaacgaggatccaaaccagtacttgaacgaggaagggaacgtggagagggatgcggaggggaaccagcaggggcacgtggaaagggatatggaggggaaccaggaggaggaggctagtggtagtcaaccctccgttggacagaagagggcacgcgggcaacgaggtgcagcgaagaagcttgagggtcggcacatcataacggaagtggaagaagatggacgtcctagtgccccggccgaagccgccaagaactatgtacgtcacagcggttgggttgtgcgggataacgtgcctgtcagtacggtgtactggcgaagaacaagggcacgcggagatcatgagagctttgtcccagattcggagaaagagatgctgtggaccacaatgctcgagacattcacccttcctgcgggtacagaggacaaagtgaaaaggtggactctgaagaaaatggcagaacagtttcagagcttcaagggagatctgtaccagaagtatatactgaaggggcagacaccgaacttcgacacattctcaaagctaagggatcactgggacgagttcgttgcatataagacaggtgaacaagggcaggcgatgatggaaagaaacaaagaaaatgccgccaagaagaagtaccatcaccacttggggtcaggaggctatagcgtcgcgatgccgaagtgggaggagatggaggctagcttgattgagaggggtatcgaaccggcaacagccaattggccggaacgatcgaagttctggtactatgctcacggtggaacgctcaacccagctgatggctcactggtcttcggcgatcagatacgagaggctgcgcgacgactaacagatgcagtggaagcctcctctcagggcacgttccgaccagacagagatagggacgagctgacactcgccctgcagactccagagcatccaggacgaatacaagggaaaggggtgattccttggaagattggtttcaaggaggacatccacacgtacaggagtcggatgaggagcaagagagataccgaggcgaagattgcagacctagagttccgggtatcgagctacgaactcaacatgcaagaggaggtggcaaggaaggttgatgaacgcatggccgcacatcggtcccatgatccccagccgaccattcctcctgcaatggtgagcccgtcaggaaaccgtagcagctgcgcctcaacggggcaggtaggatcacagagtatggacgccatgcaaacacaggacgaatcgacctgtcccgttgatgacatcactcagcggacaccatgtgagctgcatattcctttcaagaacttatcaataaaggtggcgtcgggcatggccatcccaacggacccttcaggtacttaccactgcaggccgattccagcaggatactcgaaggtcaaagttgagttggtcgaaggcgcgtacgaggacctcgagctggattaccctggaggagacggtgagacgcatttacgagacacaagccatgccattattctatggcgcaggcggtacatcatcctccctgggcgacaaacggcgtctcgtgcaccatctcctccggctccgccatctcctcctcaggatcctgcaccgtctcctcctcatgctccgccagcaccgtctccacctcaggctccagcatcgactcctcctcaggatcctgcaccgactcctcctcgtgctcctacacctactcctccgcaagctcctcttccggcaccttcaaagtcaagggcccccccagctccaccgcctacccacacaagggcaacgaagaaggcgaaagttgacgccgccaagaacaaggacccggggtacgattgcacgcaagaggagcttgacgcttacgttgcatcagaagtcaagagacaattcaagcctcgaagtccagaaaagaatattcctatagaccccagtgtcatgaacttcttcaggggtatgtctgcacctgtcaaggaggccatcaagctatcggactctgagcgaacgctgaagaaagcatcttctggaaagtccaaaccagtccctcagcttggagagcaaccaaaccaggagatcgagccgttggtaaccgggaaagacatgacgatagaagaatttattattgacaccggtctatctacggatcaattgctaggagttgaaccaatagaaaaggcggaattgaaatacatgtacgaactcggtaaaccgcttgtcaagtccgagctggtgcagtccctacccacacaaatgtacaagttccatcagctgtacgtggagatgagcgccaccggtagagagatgatcggagcgaggatcagggacccggacttcttgcaaggagatgatattctctggatcaatttcaagggaatctacgaagtataccagctggacgccctcgacgtctctattatgagttgctggactttaatggagattcaaagggcccgacggcggagggttttcgatactggattcatcgaccctcggagagtaaacgttgcaatgctcgaccaatatccgcaggaaacagaggacaatctcgtccatctcctgaaggcgcagcattacaagacgttcatactgttaccgtacaacacagagttagtttaattttactgtcttcctacataccaattttcattcccgtacgaacttgctaagtgtttcatatgtaatgcatcccacgcacattgcagattccactgggtgcttttactattcgacctggaggcctgcaccgtcaacgtatataactcaatggataaaaaagagtctacgtttgacaaggttttcgaacttatagacaggtaccgtcataagttcctttgttaattaagaaaatcttaatgttaattgctacgaatcatagctttaaactctatgtagggcttggtatcggttccgtcatttggtccgcggcaaatggagagaaagacttaggtggaagttcaaatttcctgtgagtacacatgctctacatttatatttctccgattcaaatacatacaagtgtatattaattagatctctcgttgtttgtcatttatttgtagtgcgcaaagcaaaagcagggaactaacttgtgcggctattacgtgtgcgagtattgccactgccttgcaaaccaaatcatcaccacaagagagctcgatgtacgtagaaataaattcaaaatttcattacgtagcgatttcttgtttaattactaatcaatttcatacattcatatagtttattcgcatgagggataacctgaccacacacaaggaatttatcacggcggttcaagaacaactcatgggattcatcaacgaagaaatccttaatcccaagggtgaattctactacgacggaaacacaattcaccggtccttagcttctgagctagcagcgagtactactacgtcgaaatga

SEQ ID NO: 93286 - DNA, 834 bp, Oryza sativa
  Clone ID: PAT_MRT4530_91686C.1
gaagctctggctccactcccacaggcagctcaactggggtataagccaaacgtcttctccttctggatcctttttcttcaactgaggttgattgattattgcaagaatgagcatatgacatactcaacaagccacacagcaaatatgcaagtgcacagggattccaaaggatggcataatataggctcatttgcaaaagcagcatttagcaaaacatttaagagaacgcactcacgaaccttcgcaacgacggaaacgacaagctaacacgcaaaacgaagaaaaagactaataaaaaccaaagacatgtacacgtagaggacgacgagacgaacccaacggtactcaccacaacgacaaacgacgacgaccggcgacgagaggaacggtggcggcggctcggttcaccggcggcggcggctctccggtggccggcggcgaaggggaagcggcggccgggcttctccaccccttggcgcacccacgggcggcgacggcaagcggcggcgacggcggagacggcgcggcggccagcagcatggtgatcaccagagacgccacgaacgccgtcgcgttgcagtagaagaacacgctgtaccgcaccgggtagtgcgcctggagaacggagtcgccggcgacgtggccgtcggcgtcgtcggcccagacgccgccgggcggggcgaggccggcgttgtaggtgacggtggcggcgaggatggcgaggagaaggaggctcttgtgcatcttctccagtatgcccttgttatgctgatccagctctggatccgtcgacgacgacgacgaacgtccaccgtgctccggcgccgcctccat

SEQ ID NO: 93287 - DNA, 1080 bp, Oryza sativa
  Clone ID: PAT_MRT4530_91687C.1
gtgagaggtgtgagactaatcacaaaaaacattgctcaacccgcccatgaccgcaggcacagctattcgaatagttttactctggccagagatgtaccactgtacccacaagacacgattccacacatgttgccataccccgaagtaccaccacggcactgcaaagggggaaatcgtgacaataccctttgcacaacacaactcaccacagtgcaccattcctggatcataatcaccccctcaaaaaccaaaggcatggactccccagcgacccccacggacttctcgccgcttctcagtctggcaccctacaatgaatcatgctatacaaaaggtaaagccgacgcgaccaccggcaaaagagagctcggttgggctatccgagaacacctacgcgtagaggacgacgacgcgaactcaccggtgcaaagaacaacgacggacgacgacgaacgacggccggcgacgaggttcgccggcggctcggctcgggtccccgacggcgacggcgctcctatggtcttcggcggctgcgaaggggtggacggggttcctctcctccgtgcgcacccgacggcggcgacggacggcagcggcgacgatgctagcggcggcgcgacgcgaccggaggatcgccggcgacgacggcggctagagcaaggcggcggcggctctacgggcgacggctcggcttgggacttggggcagacggaagaggacgtcaaggggatgctttatataggcttggactagagagatcggactccaaacaagaggatttgagccggaaaatccgacggttagtttggagagataaactcgaaaacgaattcgatttggtttatccaggcaaaattaatctccgagactttaggggaaagggagaggataaggtggagatgatttcccctcaactaattttaggaaaacagaagagataaggccggatttggtggagaaaaccgagccaactcggtctcagttcggcagccagaggttgaagatgaacagtacgagggaggtttatatgtggagctcgacaaggatcaaacatggcatacttgcattcagatttatcac

SEQ ID NO: 93288 - DNA, 415 bp, Oryza sativa
  Clone ID: PAT_MRT4530_91688C.1
atgagtagtgtgggactaatcacgaaaaacattgttagacccgcccataaccacgggcacggctattcgaatagttttactctggccagagatgtaccactgtacccacaagacacgattccacacatgctgccatgccccgaagtaccaccacggcactgctaagggggaaatcgtgacagtacccttcacacaacacaactcaccacagtgtactatttctggatcataatcaccccctcaataaccagaggcatggactccccagcgaccccccacggacttctcgccgcttcacagtctggcacaccataatgaatcatgctatacaaaagataaagtcgttgcccacgctggcttccggtaaatgacatgggagagaggagagctcaccggagaagacgacggcgacgac

SEQ ID NO: 93289 - DNA, 114 bp, Oryza sativa
  Clone ID: PAT_MRT4530_91689C.1
atggctccggcgtcctcaaaggacaccgcttctgacgtcgacaaggacggtcactgctccatacacggctccggcaacggtgggagggtgtcgttaatggcgctgctggagtag

SEQ ID NO: 93290 - DNA, 2719 bp, Oryza sativa
  Clone ID: PAT_MRT4530_9168C.1
atgggggcgattggaggcgacgagctggtgcagtgggacaagatgggtgcagctgaggcagtcaatggcggctgtggaggcgccgggaagatggataggatacaggtgttggtgaggctgaggccgctgagcgagaaggaggttgctaggagggagccagcggagtgggagtgcatcaatgacagcactgtcatgttccggagcaccttccctgaccgacccacggcgccaacagcatacacgttcgatagggtatttcactctgattgcagtaccaaagaagtctacgaggaaggggtgaaggaagttgccctctctgtagttagtggcattaactcaagtatttttgcatatggacaaaccagcagtggaaagacatacactatgactggagtaacagaatatacagtagcagatatatatgattatattaacaagcatgaagagagagcctttgtgttgaagttctctgcgattgaaatatataatgaagttatacgggatcttcttagtgcggaaaatacccctcttagactctgggatgatgcagagaagggcacctatgtagagaatcttacagaggttgtattaaggtttgggtctattctcaagggacttatttctgtgtgtgaagcaattcagacagttgaaagctctgctcgcgagttcttaggaaaggacaagtcaactacacttgtggctagtgcaaactttgttgatctggctggaagtgagcgtgcatctcaggcattgtcagctggcacaagactgaaagaaggttgtcacattaataggagtttgcttgcccttggcactgtcattagaaaactgagcatgggaagtaatgcacacataccgtatagagattcaaagcttacacgcatactacagccatctttgggaggtaatgcaagaactgcaattatttgtacactgagccctgccactagccacattgagcaatcaagaaatactctgctatttgggagttgtgcaaaggaagtagttacaaatgctcaggttaatgtggtcatgtctgataaagcactggttaagcacttgcaaaaggaacttgctagattggagagcgagttgcggcatccagttcagagttccagtctcgaaacattattgaaggaaaaggacaaccaaatcagaaagatggagaaagaaataaaagaactgaagtcacaacgtgatttggctcaatccaggttgcaggatttgctgcaatctgtcggtgatcatgacctgaaccgtcaagttcaaggaaagcattcagtcagaagccctccatctgttggaatgcccccaagcgtcagcagagatgatagttctcaggtctctcatgatgattcagatctttacaaggaagtgcgatgtattgaaagcaatcggacaggaggaaatgaccagttggacttatcagctggtgaaagtagtagcccacaagattcaaatatgaattctggtttgcatggaaatgattcaaatgcatcagtgaattctaggcattcaaggccctctggcgaagctcctattactttggaggaacacttggagaatattagaaggccttttgtcagtctagccaaagatctaggatcttcaacacgtaactcatcaaacttaagagtaattggtagaagcaggagctgtagatcactgacaggttctactatgtttgacgatatggagatggatgattgcactccactaaatagaagtttggtggagttcccaggaagacctgtggaatctcatagaagaggatctgcactgcactatgatgcagagaccgacacactttcaagggcaggatccatgagttctgagatcagcacttttaaggatgcaaagacaaatgggtctgttgcatgcgatacagaattcactggtattggtgaatttgttgctgaactcaaagagatggcccaggttcattatcagaagcagttaggtgaccagaatgcaaatggaaagagcatcggattggacccgatcgagggtgtttctcagtcaccttctcgatggcctttggaattcgagaagaagcagcaagagatcatcgagctttggcaagcttgcagcatttccttggtccacaggacttactttttcttgctattcaagggagaagcagctgactcgatctacatggaagtggagcttcgaaggctatcattcctgagagatacatactcaagggggagcacccctagcaatgcgatagtaggcagcctgagtacttcccctgttgcgagcgcaaagaagctgcagcgggagagggagatgcttgccaggcagatgcagaagcggctgtccacggaggagagggagcacacgtacacaaaatggggtgtctcgctggactccaagaggaggaaactgcaggtcgctcgccgcctctggaccgagacgaaagacctggagcatgtcagggagagcgcgtccctggtcgccaagctgatcgggctccaggagccaggccaagttctcaaggagatgttcgggctcagcttcgcgccgcagcagcagccgacccggcggcgatcctccaacggctggagatacgggatcccttcgttcgcctgatttggatcgaccacacacgaaacaaggctgacacgacgatgcgactgaccaaaggatcttttgttttttctccttttttttttcgccttttcgatcttggtgtatctgcatgttctgattgtcc

SEQ ID NO: 93291 - DNA, 729 bp, Oryza sativa
  Clone ID: PAT_MRT4530_91690C.1
atggcaataaagaggggaagcaacaggcgagccgtagaggagtacagtggtaaagccgtcaccactgacggtttggcgggacttctagaaaatacctgtgcgattgtggcctgcaccgtggccctggaggggatgcaccggaaggtgtacgaggagtccaacggcgttgggacgttccctgtcgcttggcaggccgcggggagttggaacgagcagctgcggctcgcgtgcgagcgcaaaggcgtctggaaggcgcgcgagggagccaatgtgggcgatgtgctaatcaagattcaggagcttgcgggcgtggtgaccagtgtccccggattgttgatgccactgctcagttgggagaagcacagcgccgggcttacccgggagcgcgtggctgagctcatagacctcggcccctgcattgggagactgtgggtttgtccctggtaccattacttcgataccgataatggctgggtttatcttgggtgcggccgggacaaacttgatagggacgatagcaaagagcgctacagaaatcaggtgggctcgcacgctgtcgtctgcttcgcatatcgattctgcgaaaatggtgagatgcatgtgctcgtgttggacaaccatgatgatgacggcccacaacggtggatcgacgttgaagagctggatgcgatcttcaccctgaccgtggagtgcctaaccaacggaggcgcttctcccccaaggaggtga

SEQ ID NO: 93292 - DNA, 427 bp, Oryza sativa
  Clone ID: PAT_MRT4530_91691C.1
gaagctccggctccactcccacaggcagctcaactggggtataagccaaacgtcttctccttctggatcctttttcttcaactgaggttgattgattattgcaagaatgagcatatgacatactcaacaagccacacagcaagtatgcaagtgcacaaggataccaaaggatggcataatataggctcatttgcgaaagcagcatttagcaaagagttaagacgacgcactcacgaaccttcgcaacgacggaaacgacaagctaacacgcaaaacgaagaaaatcggctgcgacttttgaggacatgtacacctataggacgacgagacgaacccaacggttcttaccacgacgaccaacgacgaacaatgaccgcccgcgactaggaggaccgcggcggctgctctgtcggcggtggccgcggaa

SEQ ID NO: 93293 - DNA, 375 bp, Oryza sativa
  Clone ID: PAT_MRT4530_91692C.1
atttgtgtgaaggtgtgcgcgggtgggatccatcaatgaaaatcgatgaacatggggggacacagtgagaggcgctcttattagcattacgtggctaaccgtgacaagctttaacatgagtaatctgcatatgaaagccaatgggatcaaagtgggaaccatagggaaccatagcataacaaacacatgaaagctcgacaccgtctggcaccttcaggaaggtacagagaggattctcaacctgaactatgctggactcagctgggaccattgccgacctctgacgacaacggaaaacaatgggcacagttgcacgcacctccagggccctaatgctgactataccggatgatcctgcttgaactggctggaact

SEQ ID NO: 93294 - DNA, 960 bp, Oryza sativa
  Clone ID: PAT_MRT4530_91693C.1
tcacaggaacggacggccgagatcaaccctatccaaaacggacggctgagatcgatcggtccacgaccggctcacggcgaacggctccgatgacgtcagcgatgacgtcacctccggcagcggcggctcggcggctcggacggctcggacggcgcacgctcgccggcgaacggcggctctacggcacaaacggagggcaccaagacgtagatcacggcgcggcgaactcaccgatgaccaaaacgtcggcggaagaccaacggacgacggcggcggcgaggaagaagcggcggcggagatcgggtcgacggcggcgacggagctccggcggtcttcggcggcggcgaaggggcggacgaggacggcgacgaccttgcgaacccgatggaggcgacggcgaccgacgacggcggctgcaacggcggcgcgacgcggctgaaccgacggcaacgacggcggcgactagggctacgcggaggcggcgctagacgcgacggcaggctaaggcaaaggaggcgacgggtagaggagagctcgggggtccttttaaaggggctaggaggcggcggcgaaggcccacggcggccggcgacgagaaggaaagcctgcggcttgaaggaaagaggccgatccgaatcgaactcgattccacgaacttccaaaacgatttagccgatgtttccaaaggagaaaaggtagaggagatcccggagattgtttcccctcaatcaattcggccggagaaggaaaggaacggccggatttggaaggaaacggcgacggcggcgcgctagggtttcgggcggcggcagccggaggaagacgaagggtccgacaggcgggccccacctgtcagcgaccgaacgcgcgcgcgcggcggctgtggactgggccggctgggccgaggagagagagaagggttttgggccgactttcggcccaaagccaaaagaagagttt

SEQ ID NO: 93295 - DNA, 1482 bp, Oryza sativa
  Clone ID: PAT_MRT4530_91694C.1
tgcctcgccgcgccgcgtgctcggaggaggagggagcagcgcggagcgcgtcgagatggccggcaaggagaacgccgcggcggcgcagccccgcctcacccgcgccgccgccaagcgcgcggccgccgtcaccgccgtggccgtcgccgccaagcgcaagcgcgtcgcgctcagcgagctccccacgctgtccaacaacaacgccgtggtgctcaagccgcagccggcgcccaggggcggcaagagggccgcctcccacgccgccgagcccaagaagccagctccgccgccggcgccggcggtggtggtcgtggtcgacgacgacgaggagggggagggggatccgcagctctgcgcgccctacgcctccgacatcaactcctacctccgctccatggaggtgcaagcgaagcggcggccggcggcggactacatcgagacggtgcaggtggacgtgacggccaacatgcgaggcatcctggtcgactggctcgtcgaggtcgccgaggagtacaagctcgtctccgacacgctctacctcaccgtctcctacatcgaccgcttcctctccgccaaatccatcaaccgccagaagctgcagctcctcggcgtctccgccatgctcatcgcctcgaagtatgaggagatcagccccccaaatgtggaggatttctgctatataaccgacaatacctatatgaaacaggaggttgtcaagatggagcgcgatatactgaatgttctcaagtttgagatgggcaatcctacaaccaagacgttcctgaggatgttcatcagatctagccaagaagacgataagtatcctagccttcccttggagttcatgtgtagctatcttgccgagctgagcctgctggagtacggctgtgttcggctcttgccatccgttgttgcagcctcagtggtgtttgttgcaaggctaacccttgattcagacaccaatccttggagcaagaagttgcaagaggtgaccggctacagggcatctgagttgaaggattgcattacctgcatacatgacttgcagctaaacaggaaagggtcatctctaatggctatccgggacaagtacaagcaacataggttcaagggcgtatcaacattgttaccccctgttgagatccctgcatcatacttcgaagacctaaacgagtagatgttactggatgatgatgtggtgagattaagattgagctttcctcaagatagatccatggtgactgaagttgaaagggggcttgtcagtacactcagtacaagagatgtcctaccttggatgctggactgtcaaagcttagctaggagctcttagggttgatttattaagctgaagcttagtacacttcagtaagatgctaggcatgtggagagttgtacctctgtatcatattcatacattacaacctgatgccttaatttttgggccagaactgcaatacttgatttgctagtcctcatgcc

SEQ ID NO: 93296 - DNA, 454 bp, Oryza sativa
  Clone ID: PAT_MRT4530_91695C.1
gtcctgggcgctcatcgagctgcccatcggccccggctggcgcggacaggacccccccagggcacggtgtcgggcggcctgctcctaccgatgtaaccctcgcctccgactgaaccctagctacctccctgagaacgcaacttcctcgacttccacacgcacaaacgccacagagacgccatgcggaccagcctctttcatactcggaaagagagaccactccgatagaacagtggcgtatgcactgatgtcgcaacagcacgatcacatgtatcaaagctcacgaacaccacagaccctaacagaacgaagatgacaaacatgacgatactgctgctgacctgcacgagtggaactacgaccgaggagagactgataacatgtgaagaagctgaagagcacgccttttgcaagaggaggctcgcgacacccattgagaagctgcaggacacgg

SEQ ID NO: 93297 - DNA, 438 bp, Oryza sativa
  Clone ID: PAT_MRT4530_91696C.1
aaatattatcaaacctggactttttcactgctaatgctacttacaactgagtagtactaagtagtgtgcttaaaagcagcaagaacagaagtagcataagaagcagaaagagctcaaagaagaagaggtgatcatgagctactaccggggtacctcgccggcgtgggggctgggccgccgcggcggcggtggtgggccgtctccggtggtgccactcctcatcggggtggccctggtctgggtcaactacaacgagaccctgacggagtggtacgacaaggcggcgaacctgccggggacggtggccgacaatgccgtcaccctggtcgccgccggcgggcttctgctgctcgccgccgtgctcctcatccgccggagcgaggtggtggtcgtgccggtggcgatcgtgctatccgcgatgctgctgcagaacatcat

SEQ ID NO: 93298 - DNA, 2450 bp, Oryza sativa
  Clone ID: PAT_MRT4530_91697C.1
ttcaaacttcactctcatcttcatcctcagctcagctcagctcagctcaagctcaaaagccttttttgtttgttcgctgctgccactgtccccatcctcctctcctcgctgccgtttgcttcactcccactgctcctcctccacgcgcgcgcgcgcgggggctagatctcgccggaaccctagccggtaatgccacgggcggctgccgcggcgggacagtgaggtgttgagggggtttccggatcgatgcatcgggtggccatggctgcggcggcggcgggggacggcggcgacgggagggggcggacgctgggggcggtcatcaaggagaaggacgaggagctggccctcttcctcgagatgcgccgccgcgagaaggagcgcggcgctgctgccgctgccgcggcggccgagcagctgctgctttccggggaccgcgtcgacgtggcgcgggatgggatgcttctcgtcgaccaaccgccgccgcgcccgcagcccgcccggcggcgccgacgacttcctcaattcggacggcggcgacaagaacgattacgactggcttctgactccaccaggaactccactttttccatctctagaagagtcaaaaaagtccccagtgagccaaactggaaccccaaagactcgcccaactgccttaaaatcaagggttattggccaatcatccagatcctccatcaagaacaacccttccattgagagcaacatcatcaaacaacttgaactcagctgccacaacacgtaggccgtcatcttctggagggcacacatctaattcatcaaggccttcaacaccaactgggcggcctgcactgaccaatacctccaaaggttcaagaccttcaacccccacgtctcgggcaactgtaccttctaagtctggacctcctgccccaagatcatcaactcccacttccaggtcaacacttacttcagcaaggtcaacaacaccttcaagaacatctggccctgctaccaggacatcaattccttcaggtagagcatcagcaccagctagcaggtcatccacacctacttcaagatcatcgatacctgctaccaggtcatccacgccatcatccaggccctccataccagcacaaagcaagccagtatcaaggtcatcaaccccaacaagacggccttctgccacttccacccaacatggtagcttggctgcaccagttcgatctacctcaatctccaaaccagcccctacaatgtccaaaagttcttcaccggcaaaaactatagcgtcaacaccttcaaggggcagctcacctactgtcaaatcgagaccatggaagccatctgaaatgcctggcttctcacttgacgctcctccaaatctgaggacatcactaccagaaagaccaacctctgctactcgtggcagacctggagctcctagttctaggtcttcctctgtggagcctgggccagctgctcggccaagacggcagtcttgctctccttctagagggaggactttaaatggtagtgtgccttcaggtagttcggtgccagcagtgagaagatcacatcttaatagtggtgacagtgtcaatcctgttcaaatgggtaataagatggttgagagggtagtgaacatgagaaggctagttcctccaaaacatgatgaccaaagatccagcctcaacggtctatctggaaaatcatcaaactctccagatagctctggcttcggtaggacattgtcaaaaaagtcacttgacatggctcttcgacatatggtacactactttctctaagatagtcaatactacaataaattgacaagcataccagcatcctctgtgcatagcgcacggtcagggtctacaaggagcagaccaattagtgtttcagactctcctcttgcaacaagcagcaatgccagttctgagccgagcgtcaacaacaacctgatgtgcttggacagcatcgaaatcgatgatgagttgtgcagtgatagggcaggacaatacaggcgatgatttgcttctttgatagtataatagttatgattcctgcgaaggtttacgaccttaaaatgttcagagcagcgatgggaggatcatctccaagatgacctgatgggttcctattctcatatgtagttcattgggtgtccaatatttatccggtttattcatgttatgttgcgagctgctccatgtgcaactttattctggaccttatatgctattgaaaagcgtcttttatgtgttcagtccttgagtatcattttcagtactttgggagtttaagttaggtcttcttagccccttgagtctttgacaccatcttgtagcggatttcgcgctacagcctggtagtcacatgtgtttccccggctgaactgtattgacatttttctctgttgttgtatcagcaatgtacatttagtagcattttttctttcaagt

SEQ ID NO: 93299 - DNA, 240 bp, Oryza sativa
  Clone ID: PAT_MRT4530_91698C.1
atgcgcacttcttttgcttccattaagattcgtcatgctggttggttcgctagggtagcctggaggcctgtacacaatgacgctgtcttgtgctcggtgggcagctgcacagagccacagattgttcttgttaggattcgagagaatccatccataacaacattgtatcgggaacaatttgcacaagtggcctcgtaatcagtgctaactcatatgtatctatttgaatgaaccctgccc

SEQ ID NO: 93300 - DNA, 615 bp, Oryza sativa
  Clone ID: PAT_MRT4530_91699C.1
atggcgtccaagggtttactcgtgttcactctgctgctcgctgctgccttcctcgtcaactgcgctcgacaagaacctcatcagaactcacgtttatatgtacgtgcagagcccaacgagggaccgacagctgaccccgacgccggcgccggcggcgaccacggaacgtcatcgggcaacggcaaagcgtcgggccatcggccgcaggcgaaattcggcggcggctgctgctgcggcgccggttgcagcgagcagtgcgccgagtgccctcgccctccacatccacccccatctccatctccatgcgtccatcccccctgctgcgagtcggccgccggctgctgctgcaatggatgcagcggcggcggttgcggtggtggtcagtgcccgccatctccgtcatgcgagaatcatcatcctccctgcaagccgggctgctgctgctgcggatgcagcggcggcgagtgccctccgcctccatctccgccgtgccagcatgagtgccctccaactccgccatgcgagcatcctccctgcagcgagtcgggctgctgcgacaagggttgcaacagctgctgcaaccggtgcggcgagtacggacagtcccgcccctag

SEQ ID NO: 93301 - DNA, 701 bp, Oryza sativa
  Clone ID: PAT_MRT4530_9169C.1
ccacgcgtccgattttttttctcccaaattcctcgctctcgagctccccggatcccgaaggcgcggcgatttcttcgattcggccgcgggaaggaggagaggtgctccgatttgattgcggcggggcgccgcccgccgcggggtgattttgggcggccggggaatgctctacctcaagcagccgggcgcggatttagggttccggccggcggcggcggcggggctgtgatctgctgaccaggtcggcggatgcgaggttgagccgtgggtagtcggccggccatggcggtggaggcggaggcggaggtggaggtggaggtggaggcgggggggatgcctcctgcagagcttcgagctctacgaggccgagtcgaaattctatattctcggaactaacactgacaaaacatcatggaaactactcaagattgatagaatcgaaccatcagagctcaacattgatgagagttcaactgtgtactcacatagtggatatcttgatctgctaaaggttcttgatgaagaccacaggtcaactggtggagtaaaatttgttacaaaatgttttggaatcatcggtttcattaagttcctcggaccttattacatgctaatcatcaccgagcagagaaaaattgggctatatttggccatccagtttaccaagttactaggactgcaatgattgaactgtcaaattc

SEQ ID NO: 93302 - DNA, 330 bp, Oryza sativa
  Clone ID: PAT_MRT4530_916C.1
atggatgtgatggctctggaggttggtatgggagcatggagccaaggaggtggcagtagggatgtggatgaggagaagattcgctgccatcgtttgggatccgagagcgtctcgccactggagctccgtgaggcgatcttgggagatcttggtaggagatggtggcgagtatgggaaggaagagattgcattggcgcttggcatgggaagaagatggtccagcggtggtgcttggcatggggaggaggacggcccggtggtggcagcaaggcggaaggaaggaagcggcgatggggaggcacagcggcagatgcggagtcgacgcggtga

SEQ ID NO: 93303 - DNA, 1095 bp, Oryza sativa
  Clone ID: PAT_MRT4530_91700C.1
atgggcgtccccctcgttacacaccacaccgggattccggaaaaaaggggggcgctccaaacggggctacaaggactcgcagcgcgcggggataaagtcagcaagaacgcatccccacgccgagaaaaagggtttccccccccggccgcccaagaattctcggcaaacgagaaggcggtcttcgtccagctccacaacaacgcccgggcggcggtgggcgtcgggccggtggcgtggaacgacgcgctggcggcgcaggccctgcagcacgcgcgctactgccagacgcagcacatcccggggccctacggcgagaacctgtggtggagctacggcgccggcaccaccgggacgccggccgacgcgatgagctactgggtgggggagaagccgtactacgactacagcagcaacagctgcggcggccgcgagtgccgccactacacgcaggtggtgtggaggcgcacggcgtacgtcggctgcgcccgcgtcgcctgcaacaccaacaacggcatcggcaccatcatcgcttgcaactactacccgggtggcgtccttgtcgacgtgaggccctactgcttgaaaattttgaatccttcggtccattctgtggagcgtttattttgcatcaaacgacaaaatgatgggaaaatgggagcccgtagacaaatagcaccaattgatggacccgtagcactatcatcgatccgcttcctccccatcggcgcgtccctcttgctcatgcagaatccgctgtcgccgacaccacagaggtggacggttgtagcccctcattgcacccctcgcctacctcccagaccaccacctcaaacccctcttgccgtcgctgctgccgcactcgaccacccactcctcccccacctcacaaggcgccacccctctaaccctatcgatttactctccttccctagctcaatgcggcgtatcacgggtggtagtggtgctaccaccttcctgtaccgactcctagaggacatggccgccgccttcctcaaccaactctggagggcgctgtggcattcctcccctagctcgtggaggttaccgtcacatcctaccagaagtggattctaa

SEQ ID NO: 93304 - DNA, 489 bp, Oryza sativa
  Clone ID: PAT_MRT4530_91701C.1
atggtgacctcaaataggggtcaagttgtaatcgcatcactctcgatcacccctgactctctatccaacaacacaatcaaagaattagcactaaaatacaaaatcaacatccaagaacaaatagaggagaacataaagataccaaaatcaatcatctcactgctgccgcttgacccaccaccgccgctggtattgtcatcgagccagccagccccgtgctcgtggtcgcggatccggcctcccacgagcatgcatcagcagatccagccgcccctaagtagagtggatgaggggagaaggggcggccgagatcaagcaatgatgacacgtcgaactggtcctaccccacggccagggagggcgaggccgcgcttggggcgtcgcgtcacctcttcatctcttgctgctcaggatctcattgagagcagcctgtccgggtctcggagctcagccttcacctccttaaggcacaacacgttgtcctcctag

SEQ ID NO: 93305 - DNA, 477 bp, Oryza sativa
  Clone ID: PAT_MRT4530_91702C.1
atggcggctttcgccatgattatcatggccacgaccacgacggcgcaacaattctcggaagacgagaaggcggccttcgtcaacctccacaacagcgcccgcgcggcggtgggcgtcgggcgggtggcgtggaacgacgcgctggcggcgcaggccctgcagcacgcgcgctactgccagacgcagcacatcccggggccctacggcgagaacctgtggtggagctacggcgccggcaccaccgggacgccggccgacgccatgagctactggctcgccgagaaggcaaagtactactacgacagcaactactgctcggcgggcgagctcggctgcacgcactacacgcaggtggtgtggaggcgcacggcgtacgtcggctgcgcccgcgtcgcctgcaataccaacggcatcggcaccatcatcgcttgcaactacttcccgcgtggtaacatgaagaacgaaaggccctactaa

SEQ ID NO: 93306 - DNA, 550 bp, Oryza sativa
  Clone ID: PAT_MRT4530_91703C.1
cgggggcgcgggtcgaactacgcgggcaattaatatcaggcgttggcgtctgtaaaattttttttatttttggttttgaattccctataatatattgtttttctgggggggttatatttaattttttttctcggcaatatactactgagatctggtctcatatgggcatgtcagattaagacattgtcgtcgggaatatccaccctctgacccgggaaagttgctttctccgggcgtgtgcagacccgggcagtgcaacggtctcaccgtttgtatggctgaccctgcgcactggagttggaagtcgtaccccgtcatgataccgcgcacaaatcgtcccagtcagtggctccaaccaccctggaccatccccccagcaagctccgtgctggaatggtgccactgctcgggaaaccgccccggcggaagatcctgccctgagttgagcgtcccctgggccccccctcaagggaacacccccccctctgggggcggggaacacgctctcctggttatctcgcgaaacccgttccgcggttcaaccgaagcg

SEQ ID NO: 93307 - DNA, 1190 bp, Oryza sativa
  Clone ID: PAT_MRT4530_91704C.1
aaaaaaaaagaaaagagaagaagaaatcctccgaaatggcggcgtccggcgagggggcgtcgctggcgtcggcggcgggaggggaggacgggcggcggcggcgggtgagctacttctacgagccgtcgatcggggactactactacgggcaggggcacccgatgaagccccatcgcatccgcatggcgcactcgctggtggtccactacggcctccaccgcctcctcgagctctcccgcccctacccggcctccgacgccgacatccgccgcttccactccgacgactacgtcgccttcctcgcctccgccaccgggaaccccgccctgctcgacgcccgcgccgtcaagcgcttcaacgtcggcgaggactgcccggtcttcgacggcctcttccccttctgccaggcctccgcggggggcagcatcggcgccgccgtcaagctcaaccgcggcgacgccgacatcaccgtcaactgggcggggggcctccaccacgccaagaagggcgaggcctccggcttctgctacgtcaacgacatcgtcctcgccatcctcgagctcctcaagttccacaggcgtgtgctatatgtagacattgatgtccaccatggagatggcgtggaggaagctttcttcactacgaatcgagtcatgacttgttcctttcacaagtatggggactttttccctggtactgggcatatcactgatgttggagcaggcgaaggaaaacattatgctttaaatgtgcccctgagtgatggcattgatgatgatacctttcgtgatctgttccagtgcatcatcaaaaagactgcagttgctgttggagttgaacctgataacaagttaccttataatgactactatgagtactttggtcctgattataatctccatattcaacccagaagtgtggagaacctgaattcgactaaagacctggagaacataaagagcatgatattggatcatctctcaaaaattgagcatgttccgagcactcagttccatgacagaccatcagatcctgaagctccagagcaggaagaggaggacatggacaagagaccacctcagcgcagtaggttatggagtggaggagcttatgaatctgatacagaggatcctgacaacatgaaaactgagaccaatgacttatctgccagctctgtcatgaaggtttga

SEQ ID NO: 93308 - DNA, 546 bp, Oryza sativa
  Clone ID: PAT_MRT4530_91705C.1
atggatgacgcccagaagtcgactcctagtcaaactcggatcaaaccaactgacatgctcttgaacccaaagatttggacctgcactgaagttaagcaggttgcaaatgctctctacttcgtgacaaccgcgtggcaatctagtggcacaatcaccggtcgttgtgcagccccgacgccatccatcccgctgcctctccacagcatcgggcctcaagcagactcatcacaccatcccgtcattaccgccattgctaccgaacccatccgaggagatccgggctatcacgtcgaagagacaccggatccggtcaggggcatgccggatctagacgttgggatgctagctctggctgtcccttacaccgccttcagcaccgaccgttgtaccattgccacatgcgcaccgtcgagctctggctctcctttgtctttcctgccgctcgcaagcctcatcgcaagatctggtcgtggaggtccggatctgcgcaacgtgacattcgcccggttgcctcggtgccccaccatcggtcgcgtcttcgagtga

SEQ ID NO: 93309 - DNA, 453 bp, Oryza sativa
  Clone ID: PAT_MRT4530_91706C.1
atggtgtacaacatcaatgagacaggctgtccagaagaagtggatgcaagactccaagaccctacttcagcagcaaattgcgaagctccagaagagaagaagctggacaatctgaaggctgagacctacaaacgtgagatcaccaatataatttctgagctatcagttggtctctgcaagaacctagatgatctatctcccgagatggtcaaaggtgtcaagctggaggtggcgaagcatagggaggctattagaaaccgcattgtcgagcttcgcgcccaaggtgcttcttcttcggtggttgtggctccacaagaggaaatagttgcaccacatgcttttcaatttgatttgaatgaacctgcagcggttgatgatgatcctcccatagtgaggaagaggtcgatctcccctgcaactaaaggtgctttgtttggcaagacttttatatga

SEQ ID NO: 93310 - DNA, 228 bp, Oryza sativa
  Clone ID: PAT_MRT4530_91707C.1
atgggagacctcatcgctatcattgactggatcaacgatatcatcatgatcaacatcctgccatgcctcatcggcttcgcgtctacgccgactgcatcacctttagcattaatcttcgacattggcatacatgaggatttacacgcctacaccaccatgaatgctgcttatatttcatcaactacgagctgttgtgggtcaatctcaatgtgtcctttatatggttga

SEQ ID NO: 93311 - DNA, 453 bp, Oryza sativa
  Clone ID: PAT_MRT4530_91708C.1
atggccaacgccgcctcgtcagctccagcgaccaccaccgtgcttaccgcggcgctgcacgtggagcacggtaaaaacaacggcaatgcgaatgggtgggcgagtgctaacaacaacggcagtagctccccggacacgagaaggttaatggatgaacccatcgccgtctctccctcccgagtcccgacgaagctcacctctgcctctaccactgtccccgacccaacccgctccctcccccatccagcgccacaacaccctccaaagtccaaacaagccatcaaaacgaatctctccgcctacgccccagcttacgccctccgccgatgctccttcctgtgtgcaccctgcgtcatcgccgccccttcctccgtgtgcactacaccgcccacccccatcgcccagcgaccacctcctggtgtggcaagcatggacgcgaccagccaagcttga

SEQ ID NO: 93312 - DNA, 5109 bp, Oryza sativa
  Clone ID: PAT_MRT4530_91709C.1
atgtgggacgaggacaaacaggaggagtttaacctacgagcgctgctgttggtaaccatcaacgattggcctgcacttagcaacctttccggtcagtccaacaaggggtacaaggcttgcactcactgtatggatgaaacagaaagtacgtatcttaatcactgtaggaaggttgtgtacatgggtcatcgtcgattccttgctgcaaaccacccgatacggaagaaaggcaagcactttgaacataaggcagaccaccgtacgaagcctaaatatcgcagcgggaaaacagtgtttgctatggttaaagatcttaaagtagtgttcggaaaggggcctagaagccagcctatagagagcgaagatggtgtatatggaatgtcgaaagatacactggaagcacgtaatgatctgaagcatatggaacaacgcagcgaccttcacccggaaccaaaggagaaaggaagccattacttgagtccagccagctacactcttagcaaggcagagaaggaaagtatgtttgaatgcttggagagcataaaggtaccgtctggatactccacgaatataaagcgaataaaaagcacgaaggagaagaagttcacaaacctaaagtctcatgactctcacgtgttgatgacacaactgctaccagttgtaataaggggtatccttccagataatgtccgggcaacaataacaaagctcacaaacctaaagtctcatgactgtcacgtgttgatgacacaactgctaccagttgtaataaggggtatccttccagataatgtccgggcaacaataacaaagctatgtgctttcatgaacgcaatttcgcagaaggtcatcgatccggatagattagaagcccttcagaatgatgtggtgcaatgtcttgtcagttttgagttgatatttccaccgtcatttttcaatataatgacgcatctgctttgtcaccttgtcaaagagatcggtattctcgggcctgtgtacctaaacaacatgtttcctttcgagaggtacatgggcgttctgaagaagtatgttcgtaaccgtgctcgtccagaggcaagcatcgccaagggttatggagcagaggaggtcatcgaattttgcgtagaatttatcgaagatcttcgcccaatcggggtacctgaatcacgccatgaagggagactacggggaaagggaactcttggaacgaaagcaataatgacggtagacaacaatttattccgtaaagcccatttcacagttctgcaacaatcttcattggtagctccttacatcgaggagcacttggctctagttcgcgccaggaatatcggtaagtccgatgcatggattacacggcatcacattgatactttccccgcgtggctacgacaacatctcatgggtaacgagtcgatcaaccaacaacttgccttcctggcgagtggaccgtctgggtcgattgcgacatttcagggatatgagatcaatgggtacacattctacacgagagcccaagacatgaagagcacgaaccaaaacagcgttgttcgtgtcgatgccatgggacacgatggaacaactggcacgtattacggtgccatcgaggacatatgggaacttaactatggtcctctcaaggtccctctgttccggtgccaatgggttaggttgactagtggaggcgtaatgattgatgacagtgggatgactacggttgaccttaacaaggttggatactcggacgaaccttttgtccttgccaacgatgtaacgcaagtctctttcgtgaaggacatgtctagcaaaggaacgaagggcagagggcctgacgagcctaagcgtcatgtggttctcccaggcaaacctcgtcttctccaccaacacttagaagtttttgcccgatcgatctctctcggtttctccttcgccgccactgcctagggcatccccgcgccgacgccgccgccgtatctcgccgtcgtctcgcgctcgtcgtcgtcgccgccgcctccaccacctccgtcgccgccgcatttttgggatgtttcctgtatgaacagatggctgatcgtgatgaggaaaagatattgtacgatacaatcgcggagggaagcagccagtactggaacgaagaagaggggaacgaggatccaaaccagtatttgaacgaggaagggaacgtggagagggatgcggaggagaaccaggaggggcacgtggaaagggatgtggaggggaaccaggaggaggaggctagtggaagtcaaccctccgttggacagaagagggcacgcgggcaacgaggtgccaagaagaagcttgagggtcggcacatcataacggaattgagaaaatggacgacctagtgccccggcagaagccgccaagaactatgtacgtcacagcggttgggttgtgcgggataacgtgcctgtcagtacggtgtactggcgaagaacaagggcacgcggagatcatgaaagctttgtcccagattcgaagaaagagatgctgtggaccacaatgctcgagacattcacccttcccgcgggtacagaggacaaagtgaaaaggtggactctgaagaaaatggcagaaatatatcctgaaggggaagacaccgaacttcgacacattcccaaagctaagggatcactgggacgagttcgttgcatataagacaggtgaacaagggcaggcgatgatggaaagaaacaaagaaaatgccgccaagaagaagtaccatcaccacttggggtcaggcggctatagcgtcgcgatgccgaagtgggaggagatggaggctagcttgcttgagaggggtatcgaaccggccaccgctaattggctggaacgatcgaagttcttgtactatgctcatggtggaacgctcaacccagctgatggctcactggtcttcggtgatcagatacgagaggctgcgcgtcgactaacagacgcagtggaagcctcttctcagggcacgttccgaccggacagagagagggacgagctgtcactcgccctgcagactctagagcatccaggacgaacacaagggaaaggggtgattccttggaagattgggttcaaggaggacatccacacgtacaggagtcggatgaggcgcaagagagataccaaggcgaaaattgcagatctagagttcagggtatcgagctacgagcgcagcatgcaaaaggaggtgacaaggaaggttgatgaacgcatggccgcacatcggtcccatgatccccagccgaccattcctcctgcaatggtgagcccatcaggaaaccgtagcagctgcgcctcaacggggcaagtaggatcatagagcatggacgccatgcaaacccaggacgaatccacctgccccgttgatgacatcactcaacggacaccatgtgagctgcatattcctttcaagaacttatcaataaaggtggcgtcgggcatggccatcccaatggacccttcaggtacttaccactgcaggccgattccagcaggatactccaaggtcgaagttgagttggtcgaaggcgcgtacgaggacctcgagctggattaccctggaggagacggtgagacgcatctacgagacacaagccatgccattattctatggcgcaggcagtacatcatcctccctgggcgacaagcggcgtctcgtgcaccatctcctccggctccgccatctcctcctcaggatcctgcactgtctcctcctcatgctctagcaccgtctctacctcaggctcctgcaccgactcctcctcagactcctgcactgactcctcctcgggctcctacaccgactcctccacaagctcctcttccggcaccttcaaagtcaagggccccccaagctccaccgcctgcccacacaagggcaatgaagaaggcgaaagttgacaccgccaagaacaaggacccggggtacgattgcacgcaagaggagcttgacgtttacgtggcatcagaagtcaagagacaattcaagcctcgaagtccagaaaagaagattcctatagacccgagtgtcatgaacttcttcaggggtatgtctgcacctgccaaggaggccattaagctatcggactatgagcaaacgctgaagaaagcatcttctggaaagtccaaaccagtccctcagcttagagagcaaccaaaccaggagatcgagccgttggtgaccggtaaagaaatgacaatagaagaatttattactgacaccggtctaactacggatcaattgctaggagtcgcaccaatcgaaaaggcggaagtgaaatacatgtacgaactcggtaaaccgcttgtcaagcctgagctgctgcagtccctacccacacaaatgtacaagttccatcagctgtacatggagatgagcgtcaccggtagagaaatgatcggagcgaggatcagggacacggacttcttgcaaggagatgacattctctggatcaatttcaagggaatctacgaactataccagctagacgccctcgacgtctctattatgagttgctggattttaatagagattcaaagggcccgacggcggggggttttcgatactggattcattgaccctcggaaagtaaacgtcgcaatgctcgaccaatatctgcaagccacagaggacaatctcgtccatctcctgaaggtgcagcattacaagacgttcatactgttgccgtacaacacagaattccactgggtgcttttactcttcgacctgtcggcctgcaccgtcaacgtatatgactcaatggataaaaaagagtctacgtttgacaaggttttcgaacttatagatagggcttggtatcagttccgtcatttggtccgcggcaaatggagagaaagacttaggcggaagttcaaatttccttttattcgcatgagagataacctgaccacacacaaggaatttatcgcggcggttcaagaacaactcatgggattcatcaacgaacaaatccttgatcccaagggtgaattctactacgacggaaacacaattcataggtccttagcttctgagctagcgactactactacgtcgaaatcgtagctagctaggacatataatggatt

SEQ ID NO: 93313 - DNA, 1344 bp, Oryza sativa
  Clone ID: PAT_MRT4530_9170C.1
atgcctgttggcgaatttgcagattttgggatggatgttggtacggtttctccatcaccccttgctaatgttggtggcagtcaacctagatggaagaaaccgggagagggatacctgaagataaatgttgatggagccttttcaggaatagcacagaatctggtggctggggcttcatcatcagagatagccatcgcagtctcagcggggtcgggcaacctgcaaaatgtttctgaaccgtctcaggcagaggcagaggcagagacctgcctccaggccttcaagtttgcttcagatgctgcccagctacataatgagcccagcccagatgacaacttgccatcacgcctccgccggccgccgccgccgccgcgatggatgccggcgacggacgaggggacggcgtcgaccgtctcagcgatctcagtggcttccacggaggcgggccgcgctctcgacgcggtggcgcgacgtgttcgccagcgtccacaccgtctcgatgacgagcgttcgtcggcatgggcgtcggcgcaacacacatatcctgcccggacaacggcagcgacgacgatcgatgacgacgacgacaacgacctcaccaccatgtcctccgaatccgaagacgacggagatcgcaggatctctcgtctccgtcttcctcctgttaccgcaagggtcgccccgcaacccggcggcgccaagggcgccatgccgcgccatgggcgtccgtctctccgtctccgctgcccggcgtcggtgaccaagctcgccatggcgaactgccgctggaagatgaagaacgcccggcgtcggcgtgacggctccgagccctggacctcgacgcgccggcgctacgacacttcgtctacagggcttcgtcctccacctctcgctgcgatcctcacccacaacgccatcgcaatcgccggcgaggagagcctcggcgcggcggcggtggcggctctcgtcaacctcgatcgcctcgagctggacctacggcacaatgcaccgtgttccagaaagcgcagcgccgtggcgatggcaaacctgtacaagagagactactcatcacgatctcttctactacaattcagatataaactcgatttcgacaagtccgtcgatctcttcgtgcaccggagttcgaagccgaagctttctttggatgacgatgatgaagaagaagaagaggtttctgacattgctgtcttgagtggccaatcgttcgagtgcttgcagagcactctgaaacgagtgagcttgcaattccgaatggagatcgaagaccaactgctttggatcgcagcttgccaacttcttcgccgaaaacgccatggttcttga

SEQ ID NO: 93314 - DNA, 1869 bp, Oryza sativa
  Clone ID: PAT_MRT4530_91710C.1
atggcggcggccaccgagcagcactgcggcggcggcggcggcgacaaggagaaagacctcctgtcggcggtggtgggcgacatccgctcctattccggctccgaccccctccgcccatggctccggggcatgaggaagatggaggcggcgctgccgcccgcgacgctgcgggcgaagctgcccaggttcctgcagaagtgcgcccaggagttccaggacgacgcccgctaccgcgacgattcccgctacctccgcgtctggatccagctgatggactatgtgaaagatgcaaagccattgctaaagaagatggaaaagaacagaataggccttaagagatcagcattttatatggcttatgcagtgtattatgagaagcacaagaggtttgaggatgctgagaacatgtaccgcttgggaacccagaaccttgcagagcctgttggggagctgcagaaagcacatgaacaatttattcggcgcgtggaactatacaagaggaggaaatctagagtgcagcaggaacgaatgcctaacaaggttcagtccattgctatatcaaagaacgaagttgaaggtcaaagcagaagttgtacaaaaccgaagtccaatccagtgcaaagatcaggaagtggttctaatcctcatttgggttttccgcatcccttagggcgtccactatctagaggcacttcaggagaaacaatgagtttgtctcgtcataatagtgatgatactgtagttgtaaggtttgtaggctctgcattggttgggaaatcagaaactgaagatgcatgccatcatggccttgttgaacccactataaacactaaagaggcaatggatgctatcagtagcatgtttttggagccattggaaccagaaactaagctcaagaggcgctcaaatcgtgataaaccaagttttaatcaggaagcaagtgcatttgagatctttgtcgatgaagatgaacctaacaagagtggacccagcaaactccaggacaaaaacatgaagcaggataatccaaagttaagtcagcaggcaagcgcatttgagatctttgtagatgaagatgatccttactgcaacaaccaaaatatggtgcagcataggcactttaataaggagaacacacaggtaaatcagaatgcaagtggatttgaaatctttgttgatgaaaatgaggctcatggcaatggtcgtaatgccatgagccataagagtagtggatgtcctccaaagccatcgcgtgattcaaagcagcaagccaattttgacttccagaaaccattcgtgggagggtttgcaatactgcctgatgatgaagatgaacagcttgagaaaaatgataatggtgttaagatcaattctggaactgtgcaactaactgatgataaggacacttcactctgttcgagacaaactgattcaaaaataagatgtgatgacttacgtcctgcaatatctggacttcgagaagacactgtctttcatagatttgttggatcagctgttgttggagagcctaaagtggaaaatgcttgccaccatgggttggtcgaaccaactgtcaatttaaaggaggctatggatgatataaataacatgtttgggataccactgaacttcaaaggtgataaacctaaaaacaagaaaaccactgcattgtcagagagaaaagcggcactgctcagtggtttctccatattagctgatgatgaaccaggcgaaaatccagcagcccaagttaaaccaagcaatgcttccaaatttgaatgtcagagtggtctctttgagcccactattactacccgcgatgtgatggctgagatcaatgacatgttcggaatgccactggacttctaa

SEQ ID NO: 93315 - DNA, 6403 bp, Oryza sativa
  Clone ID: PAT_MRT4530_91711C.1
atggatcggcaatggatgtacgctgaccggcggtccaaagagtttattgacagcgtgcactattttttgagagtgaccgaagctaacatgcaaaggggttttatttgttgtccatgcaataagtgtaagaatcagaaggagtattctgcatccaggactattcatttccacttgtttgagtcggggttcatgccaagctataattgttggacatcccacggaaaacaaggtgttgaaatggaagaagatgaagtggaagacgacaatattccggactttgctcagtatgttggatttgaagaaaatcaaacgggcgaggaggaaatagctgctgatggtaacgatgttgcggatgatcttggtcagatgttgcaggacgccagggaggactgcgaaagtgaaaaggagaccataaattggacaagatgttggaggaccacagaactttgttgtacccaggttgcgagcaggggcacaaaaagttggataccactctagagttcttgcaatggaaggcaaaaaatggggttagtgacaaggcatttggcgatttattgaaactcgtcaagaacattcttccggggggaaacaaattgcccgagacaacgtacgaggctaagaagatagtttgcccgttaggactggaagttcataagattcacgcatgtccgaacgattgtatcctatatcgcggtgaggagtatgagaacctagaagcatgccctgtttgcaaagcactacgatacaagattagacgagacgaaccaagagaagttgacgggcagctaacaaagaagagaattcctgctaaggtgatgtggtatttccctataataccacggctaaggcgtttattcaggaacaaggggaatgctagaatgttgcgatggcatgctgaagagcgtcaacaggacgggatgctgagacaccccgccgatggttcgcagtggtgaaacatcgacagaaaatttaaagaatttggaaaggacgcacgaaacatacggtttggtttgagtacggatggcatgaatccttttggagagatgagcaacggccatagcacttggcccgttacgatgtgtatctacaacctccccctggctatgcatgaagagaaagtacataatgatgccgattattattcaaggccccaagcaacctggtaacgacatcgatgtgtacctaagaccactggtcgaagatcttaaacagttgtggaagaaggaaggtgtccccatgtgggacgaggacaaacaggaggaatttaacctacgagcgctgctgttcgtaaccatcaacgattggcctgcacttagcaacctatccggacagtccaacaaggggtacgaggcttgcactcactgtatggatgaaacagaaagtacgtatcttaagcactgtaggaaggttgtatacatgggtcatcgtcgattccttgcagcaaaccacccggtatggaagaaaggcaagcacttcgaacataaggccgaccaccatacgaagcctaaacatcgcagtgggaaaacagtgtttgctatggttaaagatcttaaagtagtgttcggaaaggggcctggaagccagcctatagagagcgaagatggtcacgcggcgatgtggaaaaagaactctatattttgggagttaccatattgggaattcttggacgtacgccacgcaatcgacgtgatgcacctcactaagaacctttgtgtaaaccttcttggcttcctaggtgtatacggaaagtcgaaagatacactggaagcacgtaatgatctgaagcatatggaacaatgcggcgaccttcacccggaaccaaaggagaaatgaagccattacttgagtccagccagctacactcttagcaaggcagagaaggaaagaatgtttgaatgcttggagagcataaaggtaccgtctggatactccacgaatatcaagcgaataataagcatgaaggagaagaagttcacaaacctaaagtctcatgactgtcacgtgttgatgacacaactgctaccagttgtaataaggggtatccttctagacaatgtccgggcaacaataacaaagctatgtgcattcatgaacgcaatttcgcagaaggtcatcgatccggatagattagaagcccttcagaatgaagtggtgcaatgtctcgtcagttttgagttgatatttccaccttcatttttcaatataatgacgcatctgctttgtcaccttgtgaaagagatccgtattctcgggcttgtgtacctacacaacatgtttcctttcgagaggtacatgggcgttctgaagaagtatgttcgtaaccgtgctcgtccagaggcaagcatcgccaagggttatggaacagaggaggtcatcgaattttgcgtagaatttatcgaagaccttcgcccaatcggggtacctgaattacgccatgaagggagactacggggaaagggaactctcggaaggaaagcaataatgacggtagacaacaatttattccgtaaagcccatttcactgttctgcaacactcttcattggtagctccttacatcgaggagcacttggctctagttcgcgccaggaacatcggtaagtccgatgcatggattacacggcatcacattgatactttcccccacatggctacgacaacatctcatgggtaacgagtcgatcaaccaacaacttgccttcctggcgaggggaccgtctgggtcgatcgcgacattccagggatatgagatcaatgggtacacattctacacgagagctcaagacatgaagagcacgaaccaaaacagcgctgttcgtgtcgatgccatgggacacgatggaacaattgccacgtattacggtgccatcgaggatatatgggaacttgactatggtcctctcaaggttcctctgttccggtgccaatgggttaggttgactggtggaggcgtaatgattgatgatagttgtatgacaactgttgaccttaacaaggttggatactcggacgaaccttttgtccttgccaatgatgtaacgcaagtcttttttgtgaaggacatgtctagcaaaggaaagaagggcagagggcctcacgagcctaagcgtcaagtggttctcccagcgcgccctcgtcttctccaccaacacttaacgttttcggccgatcgatctctctcggcctctctccttcgccgccactgcctagggcaaatccccgcgccgacgccgccgtatctcgccgtcgtctcgagctcgtcgtcctcgccgccgcctccgcctcctccgccgccgccgcatctctcagatgtttcttgtatcaacagatggctgaccgcgatgaggaacagatattgtacgatacaatcgcggagggaagcagccagtactggaatgaagaagaggggaacgaggatccaaaccagtacttgaacgaggaagggaacgtggagagggatgcggaggggaaccagcaggggcacgtggaaagggatgtggaggggaaccaggaggaggaggctagtggtagtcaaccctccgttggacagaagagggtacacgggcaacgaggtgcagcgaagaagcttgagggtcggcacatcataacagaagtggaagaagatggacgtcctagtgccccggccgaagccgccaagaactatgtacgtcacagcggttgggttgtgcgggataacgtgcctatcagtacggtgtactggcgaagaacaagggcacgtggagatcatgagagctttgtcccagattcggagaaagagatgctgtggaccacaatgctcgagacattcacccttcccgcgggtacagaggacaaagtgaaaaggtggactctgaagaaaatggcagaacagtttcagagcttcaagggagagctgtacaagaaatatatcctgaaggggcagacaccgaacttcgacacattcccaaagctaagggatcactgggacgagttcgttgcatataagacaggtgaacaagggcaggcgatgatggaaagaaacaaagaaaatgccgccaagaagaagtaccatcaccacttggggttaggaggctatagcgtcgcgatgccgaagtgggaggagatggaggctagcttgattgagaggggtatcgaaccggcaaccgccaattggccggaacgatcgaagttctggtactatgctcacggtggaacgcttaacccagctgatggctcactggtcttcggcgatcagatacgagaggctgcgcgacgactaacagatgcagtggaagcctcctctcagggcacgttctgaccggacagagatagggacgagctgacactcgccctgcagactccagagcatccaggacgaacacgagggaaaggggtgatttcttggaagattggtttcaaggaggacatccacacgtacaggaatcggatgaggagtaagagagataccgaggcgaagattgcagatctagagttccgggtatcgagctacgaactcagcatgcaagaggaggtggcaaggaaggttgatgaacgcatggccgcacatcggtcccatgatccccagccgaccattcctcctgcaatggtgagcccgtcaggaaaccgtagcagctgcgcctcaacggggcaggtaggatcacagagcatggacgccatgcaaacacaggacgaatcgacctgtcccgttgatgacatcactcagcggacaccatgtgagctgcatattccttacaagaacttatcaataaaggtggcgtcgggcatggccatcccaacggacccttcaggtacttaccactgcaggccgattccagcaggatactcgaaggtcgaagttgagttggtcgaaggcgcgtacgaggacctcgagctggattaccctgaaggagacggtgagacgcatctacgagacacaagccatgccattattctatggtgcaggcggtacatcatcctccctgggcgacaagcggcgtctcgtgcaccatctcctccggctctgccatctcctcctcaggatcctgcactgtctcctcctcatgatctgccagcaccatctccacctcaggctccagcaccgactcctcctcaggatcctgcaccgactcctcctcgggctcctacacctactcctccgcaagctcctcttccggcaccttcaaagtcaagggcccccccagctccaccgcctgcccacacaagggcaacgaagaaggcgaaagttgacgccgccaagaacaaggacccggggtacgattgtacgcaagaggagcttgacgcttacgttgcatcagaagtccagagacaattcaagcctcgaagtccagaaaagaagattcctatagaccctagtgtcagaaacttcttcaggggtatgtctgcatctgtcaagcaggcaatcaagctatcagactatgagcgaacgctgaagaaagcatcttctggaaagtccaaaccagtccctcagcttggagagcaaccaaaccaggagatcgagccgttggtgaccggtaaagaaatgacgatagaaaaatttattactgacaccggtctaactacggatcaattgctaggagtcgcaccaatcgaaaaggtggaagtgaaatacatgtacgaactcggtaaaccgcttgtcaagcctgagctgctgcagtccctacccacacaaatgtacaagttccatcagctgtacatggagatgagcgccactggtagagagatgatcggagcgaggatcagggacacggacttcttgcaaggagatgacattctctggatcaatttcaagggaatctccgaactataccagctggacgccctcgacgtctctattatgagttgctggattttaatggagattcaaagggcctgacggcggagggttttcgatactggattcatcgaccctcggagagtaaacgtcgcaatgctcgaccaatatccacaagaaacagaggacaatctcgtccatctcctgaaggcgtagcattacaagacgttcatattgttgccgtacaacacagaattccactgggtgcttttactcttcgacctgtcggcctgcaccgtcaacgtatatgactcaatggataaaaaagagtctatgtttgacaaggttttcgaacttatagacagggcttggtatcggttccgtcatttggtccgcggcaaatggagagaaagacttaggcggaagttcaaatttccttttattcgcatgagggataacctgaccacacacaaggaatttatcgcggcggttcaagaacaactcatgggattcatcaacgaaaaaatccttgatcccaagggtgaattctactacgacggaaacacaattcaccgctactggccatgtgaattcagagtggagtacaccacggaaacctagcaggttattaaag

SEQ ID NO: 93316 - DNA, 1917 bp, Oryza sativa
  Clone ID: PAT_MRT4530_91712C.1
atggcggcggccaccgagcagcactgcggcggcggcggcggcgacaaggagaaagacctcctgtcggcggtggtgggcgacatccgctcctactccggctccgaccccctccgcccatggctccggggcatgaggaagatggaggcggcgctgccgccggcgacgctgcgggcgaagctgcccaggttcctgcagaagtgcgcccaggagttccaggacgacgcccgctaccgcgacgatccccgctacctccgcgtctggatccagctgatggactatgtgaaggatgcaaagccattgctaaagaagatggaaaagaacagaataggccttaagagatccgcattttatatggcttatgcactgtattatgagaagcacaagaggtttgaggatgctgagaacatgtaccgcttgggaacccagaagtaccacttaccatttatcaatgtattcaatagccttgcagagcctgttggggagctgcagaaagcacatgaacaatttattcggcgcatgaaactatacaagaggaggaaatctagagtgcagcaggaacgaatgcctaacaaggttcagtccattgctacatcaaagaacgaagttgaaggtcaaagcagaagttgtacagaaccgaagtccaatccagtgcaaagatcaggaagtggttctaatcctcatttgggttttccgcatccgttagggcgtccactatatagaggcacttcaggagatacaaagagtttgtctcgtcataatagtgatgatactgtagttgtaaggtttgtaggctctgcattggttgggaaatcagaaactgaagatgcatgccatcatggccttgttgaacccactataaacactaaagaggcaatggatgctatcagtagcatgtttttggagccattggaaccagaaactaagctcaagaggcgctcaaatcgtgataaaccaagttttaatcaggaagcaagtgcatttgagatatttgtcgatgaagatgaacctaacaagagtggacccagcaaactccaggacaagaacaaactccaggacaagaacatgaagcaggataatccaaagttaagtcagcaagcaagcgcatttgagatctttgtagatgaagatgatccttactgcaacaaccaaaaaatggtgcagcacaggcactttaataaggagaacacacaggtaaatcagaaggcaagtggatttgaaatctttgttgatgaaaatgagccacatggcaatggtcgtaacgccatgagccataagagtactgtatgtcctccaaagccatcacgtgattcaaggcagcaagccaattttgacttccagaaaccattcgtgggagggtttgcaatactgcctgatgatgaagatgaacagcttgagaaaaatgataatggtgttaagatcaattctggaaccatgcaactaactgatgataacacttcactctgttcgagacaaactgattcaaaaataagatgtgatgacttacatccagcaatatctggacttcgagaagacacggtctttcatagatttgttggatcagctgttgttggagagcctaaagtggaaaatgcttgccaccatgggttggtcgaaccaactgtcaatttaaaggaggctatggatgatataaataacatgtttgggataccactgaacttcaaaggtgagaaacctaaaaacaagaaaaccacaacattgtcagagagaaaagcggcacccctcagtggtttctccatattagctgatgatgaaccaggcgaaaatccagcagcccaagttaaaccaagcaatgcttccaaatttgaatgccagagtggtctctttgagcccactattactacccgcgatgtgatggctgagatcaatgacatgttcggaatgccactggacttctaa

SEQ ID NO: 93317 - DNA, 2913 bp, Oryza sativa
  Clone ID: PAT_MRT4530_91713C.1
atggctgatcgcgatgagggacagatattgtacgatacaatcgcagagggaagcagccagtactggaacgaagaagaggggaacgaggatccaaaccagtacttgaacgaggaagagaacgtggagagggatgcggaggggaaccaggaggggcacgtggagagggatgtggaggggaaccaggaggaggaggctagtggaagtcaaccctccgctggacagaagagggcacgcgggcaacgaggtgccgcgaagaagcttgagggtcggcacatcataacggaagtggacgaagacggccgacctagtgccccggtggaagcagccaagaactacgtacatcacagcggttgggttgtgcgggataacgtgcctgtcagtatggtgtactggcgcagaacaagggcatgcggagatcatgagagctttgtcccagattcggagaaagagatgctatggaccacaatgctcgagacattcacccttcccgcgggtacagaggacaaagtgaaaaggtggactctaaagaaaatggcagaacaatttcagagcttcaagggagatctgtaccagaaatatatcctgaaggggcagacaccgaacttcgacacattcccaaagctaagggatcactgggacgagttcgttgcatatcagacaggtcaacaagggcaggcgatgatggaaagaaacaaagaaaatgccgccaagaagaagtaccatcaccagttggggtcaggcggctatagcgtcgcgatgccgaagtgggaggagatggaggcaagcttgcttgagaggggtatcgaaccggccaccgctaattggccggatcgatcaaagttctggtactatgctcacggtggaacgctcaacccagctgatggctctctggaccccctagtcctcctctttcgtttgccccctctcccgtcctcttccgtgctccgtagctccgtcgccaccgccgccaagcaaaccgccgccgccggccatctccggtgccgccgcgccgccgtctccatcgtcgtcgccggtcgccgtcaccaccgttgggtgcgccgtggtgaggggaagctcggccacccttccttttccgtcgccggggtgattccttggaagattgggttcaaggaggacatccacacatacaggagtcggatgaggagcaagagagataccgaggcgaagattgcagatcttgagtacaaggtattgagctacgagcttagcatgcaagaggaggtggcaaggaaggttgatgaacgcatggccgcacatcggtcccatgatccccagccgaccattcctcctgcaattgtgagcccttctggaaatcgtagcagttgcgccttaacggggcaggtagtatcacagagcatggacaccatgcaaacccatgatgaaaccacctgccccgttgatgacatcactcagcggacaccatgtgagctgcatattcccttcaagaacttatcaataaaggtaagctcgccgattctagcaggatactccaaggtcgaagttgagttgatcgaaggcgcgtacgaggacctcgagttggattaccctggaggagacgcaccgtctccacctcaggctcctgcaatgactcctcctcaggctcctgcaccgactcctcctcaagctcctcgtccagcaccttccaagtcaagggccccccaagctccaccgcctgcccccacaagggcaacgaagaaggcgaaagttgacaccgccaagaataaggacccgggaaaagaagattttatagacccgagtgtcaagaacttctttaggggtatgtctgcacctgccaaggaggccataaagctatcggactatgagcgaacactcaagaaagcatcttctggaaagtccaaaccagtccctcagcttggagagcaaccaaaccaggagatcgagccgttggtgaccggtgaagattttggaatacaagaatttattaatgacaccgggctaactgtggatcaattgctacgaggcgcaccaatcgaaaaggcggaagcgaaatacatgtacgaactcggtaaaccgcttgtcaagcctgagcagctgcagtccctacccacacaaatatacaagttccatcaactgtacatggagatgagcaccaccggtagagagatgatcggagcgaggatcagggacacggacttcttgcaaggagatgacattctctggatcaatttcaagggtatctacgaactataccagctggacgccctcgacgtctctattatgagttgctggattttaatggagattcaaagggcccgacagcgaggggttttcgatactagattcatcgaccctcggaaagtaaacgtcgcaatactcgaccagtatccgcaagccacagaggacaatctcgtccatctcctgaaggcgcagcattacaagacattcatactattgccgtacaacacagaattccactgggtccttttactcttcgacctggaggcctgcaccgtcaacgtatatgactcaatggataaaaaagagtctatgtttgacaaggtttttgaacttatagacagggcttggtataggttccgccatttggtccgtggcaaatggagagaaagacttagacggaagttcaattttccttgcgcaaagcaaaagcagggaactaacttgtgcggctactacgtgtgcgagtattgccactgccttgcagaccaaatcatcaccacaagagagctcgattttattcgcatgagggataacctgatcacacacaaggaatttatcgcggcagttcaagaacaactcatgggattcatcaacgaacaaatccttgatcccaagggtgaattctactacgatggaaatacaattcataggtccttagcttctgagataacgactactactacgtcgaaattg

SEQ ID NO: 93318 - DNA, 6606 bp, Oryza sativa
  Clone ID: PAT_MRT4530_91714C.1
atggcctacgccgcgatacggcagctgctcgtggcggccctcgaccagaagcggcaggggcagccactgccgccgctgccgttcaccatccacgacgccaacgtcttcaccgccggcgaccacccctcccacctctactataatttgaagagcaatgcggcggaagacggcagcgtgtacgtgttcagcccgggacgcaagatcccacggccgagaaacatcaccggaggctactggaaagtgatgatcaatcaaccggaatcgatcatcgccacggcggacggcgccaagatcggccggagtaggagatgggccttcgtcaacgattggtccgtcgggtgcgacgtcgaaggctgggctatggaggagctccgcatcgccggcggcacgacggcgaccactcgccccgacgacgacctacggttgtaccgcctctaccgattagctcatgaattcgaccgagcaaacacaaaaaagagacaaaaacaagaacatgctgggattcaggaggtgcatggattcgtacaccatgtaactaatagcctcaatccaagaaacatgtcaacagtaccagatgcttcatacaagcaaatggatcggcaatggatgtacgctgaccggcggtccaaagagtttattgacggcgtgcactattttttgagagtggccgaagctaacaggcaaaggggttttatttgttgtccatgcaataagtgtaagaatcagaaggagtattctgcatccaggactattcatttccacttgtttgagtcggggttcatgccaagctataattgttggacatcccacggagagcaaggtgttgaaatggaagaagatgaagtggaagacgacaatattccggactttgctcagtatgttggatttgaaggaaatcaaacgggcgaggaggaaatagctgctgatggtaacgacgttgcggatgatcttggtcagatgttgcaggacgccagggaagactgcgaaagtgaaaaggaggcccataaattggacaagatgttggaggaccacagaacttcgttgtacccaggttgcgagcaggggcacaaaaagttggataccactctggagttgttgcaatggaaggcaaaaaatggggttagtgacaaggcatttggcgatttattgaaactcgtcaagaacattcttccggggggaaacaaattgcccgagacaacgtacgaggctaagaagatagtctgcccgttaggactggaagttcataagattcacgcatgtccgaacgattgtatcctatatcgcggtgaggagtatgagaacctagaagcatgccctgtttgcaaagcactacgatacaagattagacgggacgatccaggagaagttgacgggcagctaacaaagaagagaattcctgctaaggtgatgtggtatttccctataataccacggctaaggcgtttgttcaggaacaaggggaatgctagaatgttgcgatggcacgctgaagagcgtcaacaggacgggatgctgagacaccccgccgatggttcgcagtggcgaaacatcgacagaaaatttaaagaatttggaaaggacgcacgaaacatacggtttggccccaagcaacctggtaacgacatcgacgtgtacctaagaccactggtcgaagatcttaaacagttgtggaagaaggaaggtgtccccgtgtgggacgaggacaaacaggaggagtttaacctacgagcgctgctgttcgtaaccatcaacgattggcctgcacttagcaacctatccggacagtccaacaaggggtacaaggcttgcactcactgtatggatgaaacagaaagtacgtatcttaagcactgtaggaaggttgtatacatgggtcatcgtcgattccttgcagcaaaccacccggtacggaagaaaggcaagcacttcgaacataaggccgaccaccgtacgaagcctaaacatcgcagcgggaaaacagtgtttgctatggttaaagatcttaaagtagtgttcggaaaggggcctggaagccagcatatagagagcgaagatggtcacgcggcgatgtggaaaaagaactctatattttgggagttaccatattgggaattcttggacgtacgccacgcaatcgacgtgatgcacctcactaagaacctttgcgtaaaccttcttggcttcctaggtgtatacggaaagtcgaaagatacactggaagcacgtaatgatctgaagcatatggaacaacgcggcgaccttcacccggaaccaaaggagaaaggaagccattacttgagtccagccagctacactcttagcaaggcagagaaggaaagtatgtttgaatgcttggagagcataaaggtaccgtctggatactccacgaatatcaagcgaataataagcacgaaggagaagaagttcacaaacctaaagtctcatgactgtcacgtgttgatgacacaactgctaccagttgtaataaggggtatccttccagacaatgtccgggcaacaataacaaagctatgtgcattcatgaacgcaatttcgcagaaggtcatcgatccggatagattagaagcccttcagaatgaagtggtgcaatgtctcgtcagttttgagttgatatttccaccttcatttttcaatataatgacgcatctgctttgtcaccttgtgaaagagatccgtattctcgggcctatgtacctacacaacatgtttcctttcgagaggtacatgggcgttctgaagaagtatgttcgtaaccgtgctcgtccagaggcaagcatcgccaagggttatggaacagaggaggtcatcgaattttgcgtagaatttatcgaagaccttcgcccaatcggggtacctgaatcacgccatgaagggagactacggggaaagggaactctcggaaggaaagcaataacgacggtagacaacaatttattccgtaaagcccatttcactgttctgcaacactcttcattggtagctccttacatcgaggagcacttggctctagttcgcgccaggaacatcggtaagtccgatgcatggattacacggcatcacattgatactttccccgcgtggctacgacaacatctcatgggtaacgagtcgatcaaccaacaacttgccttcctggcgaggggaccgtctgggtcgatcgcgacattccagggatatgagatcaatgggtacacattctacacgagagcccaagacatgaagagcacgaaccaaaacagcgctgttcgtgtcgatgccatgggacacgatggaacaactgccacgtattacggtgccatcgaggacatatgggaacttgactatggtcctctcaaggttcctctgttccggtgccaatgggttaggttgactggtggaggcgtaatgattgatgacagtgggatgacaactgttgaccttaacaaggttggatactcggacgaaccttttgtccttgccaatgatgtaacgcaagtctttttcgtgaaggacatgtctagcaaaggaaagaagggcagagggcctgatgagcctaagcgtcaagtggttctcccaggcaaaagaaaaatcgtcggagttgaggacaagactgacgaggattacgatcagttggatgggcaaccccctttcacggtgacgattgaccctagcatcctcctatcaaatgaagacaccccttactcacgcagcgatcacaaggagggaacaatagtgaggagaaaaggatttttaaaagttttaaatcacatggcagaccgcgatgaggaacagatattgtacgatacaatcgcggagggaagcagccagtactggaatgaagaagaggggaacgaggatccaaaccagtacttgaacgaggaagggaacgtggagagggatgcggaggggaaccagcaggggcacgtggaaagggatgtggaggggaaccaggaggaggaggctagtggtagtcaaccctccattggacagaagagggcacgcgggcaacgaggtgcagcgaagaagcttgagggtcggcacatcataacggaagtggaagaagatggacgtcctagtgccccggccgaagccgccaagaactatgtacgtcacagcggttgggttgtgcgggataacgtgcctgtcagtacggtgtactggcaaagaacaagggcacgcggatatcatgagagctttgtcccagattcggagaaagagatgctgtggaccacaatgctcgagacattcacccttcctgcgggtacagaggacaaagtgaaaaggtggactctgaagaaaatggcagaacagtttcagagcttcaagggagatctgtaccagaagtatatactgaaggggcagacaccgaacttcgacacattcccaaagctaagggatcactgggacgagttcgttgcatataagacaggaggctatagcgtcgcgatgccgaagtgggagcagatggaggctagcttgattgagaggggtatcgaaccggcaacagccaattggccggaacgatcgaagttctggtactatgctcacggtggaacgctcaacccagctgatggctcactggtcttcggcgatcagatacgagaggctgcacgacgactaacagatgcagtggaagcctcctctcagggcacgttccgaccagacagagatagggacgagctgacactcgccctgcagactccagagcatccaggacgaacacgagggaaaggggtgattccttggaagattggtttcaaggaggacatccacacgtacaggagtcggatgaggagcaagagagataccgaggcgaagattgcagacctagagttccgggtatcgagctacgaactcaacatgcaagaggagatggcaaggaaggttgatgaacgcatggccgcacatcggtcccatgatccccagccgaccattcctcctgcaatggtgagcccgtcaggaaaccgtagcagctgcgcctcaacggggcaggtggcgtcgggcatggccatcccaacggacccttcaggtacttaccactgcaggccgattccagcaagatactcgaaggtcgaagttgagttggtcgaaggcgcgtacgaggacctcgagctggattaccctggaggagacggcggtacatcatcctccctaggcgataagcggcgtctcgtgcaccatctcctccggctccgccatctcctcctcaggatcctgcaccgtctcctcctcatgctccgccagcaccgtctccacctcaggctccagcatcgactcctcctcaggatcctgcaccgactcctcctcgtgctcctacacctactcccctgcaagctcctcttccggcacctacaaagtcaagggcccccccagctccaccgcctgcccacacaagggcaacgaagaaggcgaaagttgacgccgccaagaacaaggacccgggaaaagaagattcctatagaccccagtgccaggaacttcttcaggggtatgtctgcatctgtcaaggaggccatcaagctatcggactatgagcgaacgctgaagaaagcatcttctggaaagtccaaaccagtccctcagcttggagagcaaccaaaccaggagatcgagccgttggtgaccggtaaagaaatgacgatagaacaatttattactgacaccggtctaactacggatcaattgctaggagtcgcaccaatcgaaaaggtggaagtgaaatacatgtacgaactcggtaaaccgcttgtcaagcctgagctgctgcagtccctacccacacaaatgtacaagttccatcagctgtacacggagatgagcgccaccggtagagagatgatcggagcgaggatcagggacacagacttcttgcaaggagatgacattctctggatcaatttcaggggaatctacgaactataccagctggacgccctcgacgtctctattatgagttgctggattttaatggagattcaaagggcccgacggcggagggttttcgatactggattcatcgaccctcggaaagtaaacgtcgcaatgctcgaccaatatccacaagaaacagaggacaatctcgtccatctcctgaaggcgcagcattacaagacgttcatactgttgccatacaacacagaattccactgggtgcttttactcttcgacctagaggcctgcaccgtcaacgtatatgactcaatggataaaaaagagtctacgtttgacaaggttttcgaacttatagacagggcttggtatcggttccgtcatttggtccgcggcaaatggagagaaagacttaggcggaagttcaaatttccttgcgcaaagcaaaagcagggaactaacttgtgcggctattacgtgtgcgagtattgccactgccttgcagaccaaatcatcaccacaagagagctcgattttattcgcatgagggataacctgaccacacacaaggaatttatcgcggcggttcaagaacaactcatgggattcatcaacgaacaaatccttgatcccaagggtgaattctactacgacggaaacacaattcataggtccttaacttctgagctagcgactactactacgtcgaaatcgtag

SEQ ID NO: 93319 - DNA, 5454 bp, Oryza sativa
  Clone ID: PAT_MRT4530_91715C.1
tattttttcatcaaaatataatcatgtgagatcttgttatggatcggcaatggatgtacgctgacaggcgatccaaagagtttattgacggcgtgcactattttttgagagtggccgaagctaacaggcaaaggggttttatttgttgtccatgcaataagtgtaagaatcagaaggagtattctgcatccaggactattcatttccacttgtttgagtcggggttcatgccaagctataattgttggacatcccacggagagcaaggtgttgaaatggaagaagatgaagtggaagatgacaatattccggactttgctcagtatgttggatttgaaggaaatcaaacgggcgaggaggaaatagctgctgatggtaacgacgttgcggatgatcttggtcagatgttgcaggacgccagggaggactgcgaaagtgaaaaggaggcgcataaattggacaagatgttggaggaccacagaacttcattgtacccaggttgcgagcaggggcacaaaaagttggataccactctggagttgttgcaatgaaaggcaaaaatggggttagtgacaaggcatttggcgatttattgaaactcgtcaagaacattcttccggggggaaacaaattgcccgagacaacgtacgaggctaagaagatagtctgcccgttaggactggaagttcataagattcacgcatgtccgaacgattgtatcctatatcgtggtgaggagtatgagaacctagaagcatgccctgtttgcaaagcactacgatacaagattagacgggacgatccaggagaagttgacgggcagctaacaaagaagagaattcctgctaaggtgatgtggtatttccctataataccacggctaaggcgtttgttcaggaacaaggggaatgctagaatgttgcgatggcacgctgaagagcgtcaacaggacgggatgctgagacaccccgccgatggttcgcagtggcgaaacatcgacagaaaatttaaagaatttggaaaggacgcacgaaacatacggtttggtttgagtacggatggcatgaatccttttggagagatgagcagcggccatagcacttggcccgttacgatgtgtatctacaacctccccccctggctatgcatgaagaggaagtacataatgatgccgattattattcaaggccccaagcaacctggtaacgacatcgacgtgtacctaagaccactggtcgaagatcttaaacagttgtggaagaaggaaggtgtccccgtgtgggacgaggacaaacaggaggagtttaacctacgagcgctgctgttcgtaaccatcaacgattggcctgcacttagcaacctatccggacagtccaacaaggggtacaaggcttgcactcactgtatggatgaaacagaaagtgtatacggaaagtcgaaagatacactggaagcacgtaatgatctgaagcatatggaacaacgcggcgaccttcacccggaaccaaaggagaaaggaagccattacttgagtccagccagctacactcttagcaaggcagagaaggaaagtatgtttgaatgcttggagagcataaaggtaccgtctggatactccacgaatatcaagcgaataataagcacgaaggagaagaagttcacaaacctaaagtctcatgactgtcacgtgttgatgacacaactgctactagttgtaataaggggtatccttccagacaatgtccgggcaacaataacaaagctatgtgcattcatgaacgcaatttcgcagaaggtcatcgatccagatagattagaagcccttcagaatgaagtgaggtacatgggcgttctgaagaagtatgttcgtaaccgtgctcgtccagaggcaagcatcgccaagggttatggaacagaggaggtcatcgaattttgcgtagaatttatcgaagaccttcgcccaatcggggtacctgaatcacgccatgaagggagactacggggaaagggaactctcggaaggaaagcaataacgacggtagacaacaatttattccgtaaagcccatttcactgttctgcaacactcttcattggtagctccttacatcgaggagcacttggctctagttcgcgccaggaacatcggtaagtccgatgcatggattacacggcatcacattgatactttccccgcgtggctacgacaacatctcatgggtaacgagtcgatcaaccaacaacttgccttcctggcgaggggaccgtctgggtcgatcgcgacattccagggatatgagatcaatgggtacacattctacacgagagcccaagacatgaagagcacgaaccaaaacagcgctgttcgtgtcgatgccatgggacacgatggaacaactgccacatattacggtgccatcgaggacatatgggaacttgactatggtcctctcaaggttcctctgttccggtgccaatgggttaggttgactggtggaggcgtaatgattgatgacagtgggatgacaactgttgaccttaacaaggttggatactcggacgaaccttttgtccttgccaatgatgtaacgcaagtctttttcgtgaaggacatgtctagcaaaggaaagaagggcagagggcctgatgagcctaagcgtcaagtggttctcccaggcaaaagaaaaatcgtcagagttgaggacaagactgacgaggattacgatcagttggatgggcaaccccctttcacggtgacgattgaccctagcatcttcctatcaaatgaagacaccccttactcacgcagcgatcacaaggagggaacaatatacttgaacgaggaagggaacgtggagagggatgcggaggggaaccagcaggggcacgtggaaagggatgtggaggggaaccaggaggaggaggctagtggtagtcaaccctccgttggacagaagagggcacgcgggcaacgaggtgtagcgaacaagcttgagggtcggcacatcataacggaagtggaagaagatggacatcctagtgccccggccgaagccgccaagaactatgtacgtcacagcggttgggttgtgcgggataacgtgcctgtcagtacggtgtactggcgaagaacaagggcacgcggagatcatgagagctttgtcccagattcggagaaagagatgctgtggaccacaatgctcgagacattcacccttcctgcgggtacagaggacaaagtgaaaaggtggactctgaagaaaatggcagaacagtttcagagcttcaagggagatctgtacaagaagtatatactgaaggggcagacaccgaacttcgacacattcccaaagctaagggatcactgggacgagttcgttgcatataagacaggtgaacaagggcaggcgatgatggaaagaaacaaagaaaatgccgccaagaagaagtaccatcaccacttggggtcaggaggctatagcgtcgcgatgccgaagtgggagcagatggaggctagcttgattgagaggggtatcgaaccggcaacagccaattggccggaacgatcgaagttctggtactatgctcacgatggaacgctcaacccagctgatggctcactggtcttcggcgatcagatacgagaggctgcgcgacgactaacagatgcagtggaagcctcctctcagggcacgttccgaccagacagagatagggacgagctgagtcggatgaggagcaagagagataccgaggcgaagattgcagacctagagttccgggtatcgagctacgaactcaacatgcaagaggaggtggcaaggaaggttgatgaacgcatggccgcacatcggtcccatgatccccagccgaccattcctcctgcaatggtgagcccgtcaggaaaccgtagcagctgcgcctcaacggggcaggtggcgtcgggcatggccatcccaacggacccttcaggtacttaccactgcaggccgattccagcaggatactcgaaggtcgaagttgagttggtcgaaggcgcgtacgaggacctcgagctggattaccctggaggagacggtgagacgcatctacgagacacatgccatgccattattctatggcgcaggcggtacatcatcctccctgggcgacaagcggcgtctcgtgcaccatctcctccggctccgccacctcaggatcctgcaccgactcctcctcgtgctcctacacctactcccccgcaagctcctcttccggcaccttcaaagtcaggggccccccagctccaccgcctgcccacacaagggcaacgaagaaggcgaaagttgacgccgccaagaacaaggacccggggtacgattgcacgcaagaggagcttgacgcttacgttgcatcagaagtcaagagacaattcaagcctcgaagtccagaaaagaagattcctatagaccccagtgtcaggaacttcttcaggggtatgtctgcatctgtcaaggaggccatcaagctatcggactatgagcgaacgctgaagaaagcatcttctggaaagtccaaaccagtccctcagcttggagagcaaccaaaccaggagatcgagccgttggtgaccggtaaagaaatgacgatagaacaatttattactgacaccggtctaactacggatcaattgctaggagtcgcaccaatcgaaaaggcggaagtgaaatacatgtacgaactcggtaaaccgcttgtcaagcctgagctgctgcagtccctacccacacaaatgtacaagttccatcagctgtacatggagatgagcgccaccggtagagagatgatcggagcgaggatcagggacacggacttcttgcaaggagatgacattctctggatcaatttcaggggaatctacgaactataccagctggacgccctcgacgtctctattatgagttgctggattttaatggagattcaaagggcccgacggcggagggttttcgatactggattcatcgaccctcggaaagtaaacgtcgcaatgctcgaccaatatccaaaagaaacagaggacaatctcgtccatctcctgaaggcgcagcattacaagacgttcatactgttgccatacaacacagagttaaacgtatatgactcaatggataaaaaagagtctacgtttgacaaggttttcgaacttatagacagggcttggtatcggttccgtcatttggtccgcggcaaatggagagaaagacttaggcggaagttcaaatttccttttattcgcatgagggataacctgaccacacacaaggaatttatcgcggcggttcaagaacaactcatgggattcatcaacgaagaaatccttgatcccaagggtgaattctactacgacggaaacacaattcaccggtccttagcttctgagctagcagcgagtactactacgtcgaaatcgtag

SEQ ID NO: 93320 - DNA, 301 bp, Oryza sativa
  Clone ID: PAT_MRT4530_91716C.1
aaggtgggttgtgagcatatggttttgatggttgtgctcatgacaattaaggaccggttcgcgagctactgttgtgaaacatttaccgtgccaaccacaagccagcatgggcaacggctttaccttttgtatagcagggttcattatagtgtgccagactgtgaagcggcgagaagtccgtgggggtcgctggggagtccatgccttgtttataagggggtgactatgatccgggaacggtgcactgttttgagttgtgttgtgcaaagagtattgtcacgatttccccctttgcaatgcc

SEQ ID NO: 93321 - DNA, 6367 bp, Oryza sativa
  Clone ID: PAT_MRT4530_91717C.1
atggatcggcaatggatgtacgctgaccggcggtccaaagagtttattgacggcgtgcattattttttgagagtggccgaagctaacaggcaaaagggttttatttgttgtccatgcaataagtgtaagaatcagaaggagtattctgcatccaggactattcatttccacttgtttgagtcggggttcatgccaagctataattgttggacatcccacggagagcaaggtgttgaaatggaagaagatgaagtggaagacgacaatattccggactttgctcagtacgttggatttgaaggaaatcaaacgggcgaggaggaaagagatgctgatggtaacgacgttgcggatgatcttggtcagatgttgtaggacgccaaggaggactgcgaaagtgaaaagggggcccataaattggacaagatgttagaggaccacagaacgtcgttgtacctaggttgtgagcaggggcacaaaaagttggataccactctggagttcttgcaatggaaggcaaaaaatggggttagtgacaaggcatttggcgatttcttgaaactcgtcaagaacattcttctggagggaatcaaattgctcgagacaacgtacgaggctaagaagatagtctgccctctaggactagaagttcagaagattcacgcatgtccgaatgattgtatcctatatcgtggtgagagtacgagaacctagaagcatgccctatttgcaaagcgctacaatacaagattagacgagacgatctaggagaagttgacgggcagctaacaaagaagagaattcctgctaaggtgatgtggtatttccctataataccacggctaaggcatttgttcaggaacaaggggaatgctagaatgttgcgatggcacgctgaagagcgtcaacaggacgggatgctgagacaccccgccgatggttcgcagtggcgaaacatcgacagaaaatttaaagactttggaaaggacgcacaaaacatacggttttgtttgagtacggatggcatgaatccttttggagagatgagcagtggccatagcacttggcccgttacgatgtgtatctataacctcccccctagctatgtatgaagaggaagtacataatgatgccgattattattcaaggccgcaagcaacctggtaatgatatcgatgtgtacctaagaccactggtcgaagatcttaaactgttgtggaagaaggaaggtgtccccgtgtgggacgaggacaaacaggaggagtttaacctacgagcgctgctgtttgtaaccatcaacgattggcctgcacttagcaacctatccggacagtccaacatggggtacaaggcttgcactcactgtatggatgaaacagaaagtacgtatcttaagcattgtagcaaggttgtatacatgggtcatcgtcgattccttgcagcaaaccacccagtacggaagaaaggcaagcacttcgaacataaggctgaccaccgtacgaagcctaaacatcgcagcgggaaaacagtgttttctatggttaaagatcttaaagtagtgttcggaaaagggcctggaagccagcctatagagagcgaagatggtcacgcggcgatatggaaaaagaactctatattttgggagttaccctattgggaattattggacgtccaccacgcaatcgacgtgatgcacctcactaagaacctttgcgtaaaccttcttggcttcctaggtgtatacggaaagtcgaaagatacactggaagcacgtaatgatctgaagcatatggaacaacgcggcgaccttcacccggaaccaaaggagaaaggaagccattacttgagtccagccagctacactcttagcaaggcagagaaggaaagtatgtttgaatgcttggatagcataaaggtaccgtctggatactccacgaatatcaagcgaataataagcacgaaggagaagaagttcacaaacctaaagtctcatgactgtcacgtgttgatgacacaactgctaccagttgtaataaggggtatccttccagacaatgtccgggcaacaataacaaagctatgtgtattcatgaacgcaatttcgcagaaggtcatcgatccggatagattagaagcccttcagaatgaagtggtgcaatgtctcgtcagttttgagttgatatttccaccttcatttttcaatataatgacgcatctgctttgtcaccttgtgaaagagatccgtattctcgggcctatgtacctacacaacatgtttcctttcgagaggtacatgggcgttctgaagaagtatgttcgtaaccgtgctcgtccagaggcaagcatcgccaagggttatggaacagaggaggtcatcgaattttgcgtagaatttatcgaagaccttcgcccaatcggggtacctgaatcacgccatgaagggagactacggggaaagggaactctcggaaggaaagcaataacgacggtagacaacaatttattccgtaaagcccatttcactgttctgcaacaatcttcattggtagctccttacatcgaggagcacttggctctagttcgtgccaggaacatcggtaagtccgatgcatggattacacggcatcacattgattctttccccgcgtggctacggcaacatctcatgtttaacgagtcgatcaaccaacaacttgccttcctggcgaggggactgtctgggtcgatcgcgacattccagggatatgagattaatgggtacacattctacacgagagcccaagacatgaagagcacgaaccaaaacatcgctgttcgtgtcaatgccatgggacacgatggaacaactggcacgtattacggtgccatcgaggacatatgggaacttgactatggtcctctcaaggtccctctgttccggtgccaatgggttaggttgactagtggaggcgtaatgattgatgacagtgggatgacaacggttgaccttaacaaggttggatattcggacgaaccttttgtccttgccaatgttgtaacgcaagtcttttacgtgaaggacatgtctagcaaaggaaagaagggcagagggcctgacgagcctaagcatcacgtggttctcccaacgcgccctcgtcttctccaccaatacttagaagtttttgcccgatcgatctctctcggcttctccttcgccgccactgcctacggcatccctgcaccgacgccgccgtcgtatcgtgccgttgtctcgtgctcgtcgttgtcgccgcctccgcctcctccgccgccgccgtatctctcaactgtttcctgtatgaacagatggctaatcgcgatgaggaacatatattgtacgatacaatagcggattgaagcagccagtactggaacgaagaagaggggaacgaggatccaaaccagtatttgaatgaggaagggaacatggagagggatgtggaggggaaccaggaggggcacatggagagggatgtggaggggaaccaggaggaggaggctagtggaagtcaaccctccgctggacagaagagggcacgcaggcaacgaggtgccgcgaagaagcttgagggtcggcacatcataacggaagtggactaagacggccgacctagtgccctggcagaagccaccaagaactatgtacgtcacagcggttgggttgtgggggataacgtgcctgtcagtacggtgtactggcgcagaacaagggcacgcggagatcatgagagctttgtcctagattcggagaaagagatgccgtggaccacaatgctcgagacattcacccttcccgcgggtacagaggacaaagtaaaaaggtggactctgaagaaaatggcagaacagtttcagagcttcaagggagatctgtaccagaaatatatcctgaaggggcagacaccgaacttcgacacattcctaaagctaagggatcactgggactagttcgttgcatataagacaggtgaacaagggcaggcgatgatggaaagaaacaaagaaaatgccgccaagaagaagtaccatcaccacttggggtcaggcggctatagcgtcgcgatgccgaagtgggaggagatggaggctagcttgcttgagaggggtatcgaaccggtcaccgctaattggccggaacaatcgaagttctggtactatgctcatggtggaacgctcaacccagctgatggctccctggtcttcggcgattagatacgcaaggctgcgcgtcgactaacagacgcagtggaagcctcttctcagggcacgttctgaccggacatagagaaggacgagctgtcactcgccctgcagactccagagcatctaggacgaacacgagggaaaggggtgattccttggaagattgggttcaaggaggacatccacacgtacaggagtcggatgaggagcaagagagataccgaggcgaagattgcagatcttgagttcagggtatcgagctacgagctcggcatgcaagaggaggtggcaaggaaggttgatgaacgcatggccgcatatcagtcccatgatccccagccgaccattcctcctgcaatggtgagcccgtgaggaaatcgtagcagctgcgcctcaacggggcaggtaggatcacagagcatggacgccatgcaaacccaggacgaaaccacctgccccgttgatgacatcactcagcggacaccatgtgagctgcatattcccttcaagaacttatcaataaaggtggcgtcgggcatggccatcctaacggacccttcaagtacttaccactacaggccgattccagcaggatactccaaagtcgaagttgagttggtcgaaggcgcgtacgaggacctcgagctggattaccctggaggagacggtgagacgcatctacgagacacaagccacgccattattctatggcgcaagcggtacatcatcctccctaggcgataagcggcgtctcgtgcaccatctcctccagctccgccatctcctcctcaggctcctgcaccgtctcctcctcttgctccagcaccgtctccacctcaggctccggcaccgactcctcctcaggctcctacaccgactcctccgcaagctcctcttttggcaccttccaagtcaagggccccctaagctccaccgcctgcccccacaagggcaacaaagaaggcgaaagttgacgccgccaagaacaaggacccagggtacgattgcacgcaagaggagcttgacgcttacgtggcatcagaagtcaggagacaattgaagcctcgaagtccagaaaagaacattcctatagacccgagtgtcaagaacttcttcaggggtatgtctgcacctgccaaggaggccataaagctatcggactatgagcgaacattcaagaaagcatcttctagaaagtccaaaccagtccctcagcttggagagcaaccaaaccaggagatcgagccgttggtgaccggtgaagattttgaaatacaagactttattaatgacaccgggctaactacggatcaattgctacgagacgcaccaatcgaaaaggcggaagtgaaatacatgtacgaactcggtaaaccgcttgtcaagcctgagctgctgcagtccttacccacacaaatgtacaagttccatcagctgtacatggagatgagcgccaccggtagagagatgatcagagcgaggatcagggacacggacttcttgcaaggagatgacattctctggatcaatttcaagggaatctacgaaatataccagctggacgccctcgacgtctctattatgagttactggattttaatggagattcaaagggcccgacggcgggggttttcgatactggattcatcgaccctcgaaaagtaaatgtcgcaatgctcgaccaatatccgcaagccacagaggacaatctcgtccatctcctgaaggcgcaacattacaagacgttcatactgttgccgtacaacagagaattccactgggtgcttttactcttcgacctggaggcctgcaccgtcaacgtatatgactcaatggataaaaaagagtctacgtttgacaaggttttcgaacttatagacagggcttggtatcggttccgtcatttggtccgtggcaaatggagagaaagacttaggcggaagttcaaatttccttttattcgcatgagggataacttgatcacacacaaggaatttatcgcggcggttcaagaacaactcatgggattcatcaacgaataaatccttgatcccaagggtaaattctactacgacagaaatacaattcataggtcattatcttctgagatagcgactactactacgtcgaaatcatagctagctag

SEQ ID NO: 93322 - DNA, 3922 bp, Oryza sativa
  Clone ID: PAT_MRT4530_91718C.1
atgaagtcgcatgattgccacgttcttatcacacagctgttgcccgttgcaataaggaatacttttcctcctaaggtgcgacacacgatccagcggttgtgttccttcttccatgcaatcggccagaagatcattgatcccgagggactagatgaactacaggctgaacttgtgagaaccctatgtcatcttgagatgtactttcctccaactttctttgacataatggaacatattcccgtgcaccttgtgaggcaaacaaagtgttgtggtccagcattcatgacgcagatgtatccttgcgaaaggtacctggggatccttaagggttatgtacgtaaccgttcacaccccgaggggagtatcatcgagagttacaccaccgaagaggtcatcgatttttgtgtggactacatgtcagaaacatcttcaattggattaccacgatctcatcacgaagggaggcttgatggtgttggtactgttggaagaaagactgttaggttggatcggaaggtgtacgataaagctcatttcacggtactgcagcatatgactgaggtggtgccgtacgttgacgaacaccttgcagttctccgacaggagaacccaggccgatcagagagttgggtcagaaataagcacatgtcttctttcaacgagtggctgaagaaccgaattgccaggttgcagaacctttctagtgaaacacttcagtggttatcacagggtcctgaatggagtgccaccacttggcaaggatatgacataaatggatacacctttcacacggtaaagcaaaacagcaaatgcacagtgcagaacagtgggttacgcatcgaggctgctagtgacggtggttggcgtgatcaatactatggtagagttgagcaaatattggagctagattacttgaagttcaaagtcccgttgtttcgttgtcaatgggtcgatctttgcaatgtaaaagttgacaatgaaggtttcaccactgtcaacttagctaacaacgcgtacaaggatgaaccgttcgttctcgcccaacaagttgttcaagtgttctacatagttgacccgtgctctaactgtgaggccgtcacaggtgcccagaacgctgggcccgtcacaggtggcctcagctgtgacgaacccgctctttgcgcccgtcacagatccggccactctctcactctcactcactctctcgaccgccacctcgaccgccgacgctgctcgccctcgccgcctcgccctctccgccctcctctccaccgtcgccgcctcgccctctccgccgccatctctgccgccctctacgccttcctctccaccgccgcccctcgtcctctccgccgtccatccatcgacttccccgacctccccgaccccgacctccccgacaccgggatccacgatgccgtccacctccacctccacgacgccgggaccccgaccactgccggccctctccgtcgccatctccaccaccactgccgcctcgacctctccaccgccgcccactctgccaccatctccaccaccgccctcgtgtgtttgccgccgtccgtccatcaccggccccgacctccccgaccccaacctccccgacgcctggattgacgacatcggcctgcaccgccgaccgcctcgacctcttcgccgctgcctctccgccctcgtcttcgccgccgccgggatccaggacgcctacggcctgcgccgccttctccaaaccatgacaacgcccggcgcaaacccgccctccccaacacctgcaaggatacaggaaaagcaaacccagccacggagacagttgccgaaagtcatccctcgacaacggcgaatcgccccaggaataacatacgtcgatgtcggacgggacaagtgcaagcccacggcgccgaggactgtcattggaagatggtctaactgctgcgggctggcggcacgtgagaatttcgggatcctccataaagatatcgacaaggtcacaaaagccgagaaagagcgagcttggacggcaatggagaaatggttcacatttccggctaaagcaaaggataggctcaagcggaaggcattccataagatgggcaaagcttggaagaattggaagtcgaagcttttcaccgagtttgtcaacctgcccggcaatcatacgccgttcgatgaataccctcaaataaccgaagcagtgtgggaggaattctgctctctcaagaacacccaagagtttagggaatcaagcgaggcacatcgcctactgcagcagcggaatgagcacccgcatcggctgggcaccgcagggtacatcggcaagaaggcaatatgggcccaagaagatgcagccgctgcagcagcaaatgtccctaccccgttttcagacatccctgaacaaagagctcgcaactgtgcgcgggaagggttgggcttggttgctgaacaagcttcacaaagcgaggttgagtccgcgccgaagaggcgcgaagatgacatcctcacaaaggggctcggaaccaaagaacatcctggccggactaggggaattggtagcgatgtgccctggaagcatggactcccgcagtacagctcccaatacaggaaacggaaagtctccaaggaagaaagggacgctcgtttgaaggccgaacttaaggttgaggtcattcaagaactagaagctagcatgaacgctagggtggaagaaaggtttaacaaggtcctcgccaacatgaatataccccgaggcacaacacctgctgtgcatccaactcctcgtgcacaacacgacgcgagtccgtcacagcataggagtagttgtgcatccacagaggtgccggcccctggtctcccggtcgcaccactagctgcagtggaccacatagagggcgtagcacagtgtgtcctactggcgagggtccacccaactttcgctcccgaagtcgctgagggcatggctttcaagccctcggttacagacaaggtccactgcgcatacctgctagctgggtatgccaaggtgtccaacgatacagtaaaggacacctggtcaggctatccgctgcccgtgccccccaatgatgaaatcatgactttgggcgatgcgcgcaagacgttcatacaatggcccaaagaagacatagttgtgaagatgactcctcgtccaagtcgaccgacggagcttacacctcccaagtctaagctatcaattgaggctccccgtggaccggcattgtcagtacctcattctcctgatggagctaatatggacttggcagatatagctcaaagcttggctctaataaagaccacaagaaaggctgatagctccccgccacttatcaagggccagaagcgtgaacgcggcaaggggaaggtcgggaagttggcaccggagccaaaaaggggcaaggctgtgacgtcgatgccggtgagcaaagcggggaaggtcgtgagggcgccggcccaatttgagctaggcatgctattggtggaggacaatgtgttagccgtgatgggtattgcttgccgagagctacataagcaatacatgaagctaagcaatgccaagcaaaaaatgagggttgggttccttgatccatccatggtgaacgaggttaatttacgacagagcttcactgaggtggttgactatgtcaaccgggttacctaccttaactccaataagtccaaagattatgatttcactgaaatcaccaaggccttaaatatggcttggggcccatatgtggaaaagggtggtaggcacaaggagggcaaggacgaactttatcatgacaccaagttcgcatgcgcacaacagatcgaagaccaatgtggtttccacgtgtgccacaacatgtcaacacttctaagagaggtgaaagatttcgaccctgaggttgttgctaatggcgaataa

SEQ ID NO: 93323 - DNA, 4265 bp, Oryza sativa
  Clone ID: PAT_MRT4530_91719C.1
atggagaaggttcgggcatccttcctgatggacaccttctggcaagatcaccacttccgcttgttcatctccgacaccgagggcttcaacgcggtggtgaacctaatcaccgatatgatctcctgcctcaggagcaagctcgaggaagcatcccttctcatctcggacccgggattgcggtgcatattcttgctcaacaattggcagcttgtcttgcgccgcgttgaatccatggacctgccatcttcggccctgatagaaacaagcatgacacagagaaatccacacaaatgcacacaaatctacataaattcacagaaatccgagcaccaccgcccgcggcccgacggcgtcggtcgtgacgaggtcgaggccccgcggtcgtgctccccgcgccaccgccggggcggatccgtgctcctcgagccgccgccggggcggatccgtcctccccgcgcccgtcctccccagcggcggcctcctcccatcggacagatatgggagaggggagaggaggggatgggaaggcgcggcgccgccgcttccttcgtggtcgccgtcgtcgccgcttccgttgtggtcgccgttgtcgccgtcgccagtcgccgtcgtcgccgtgcacatccgcaccgccggccgggcggatccgtcctcccagcgcccgtcctccccggcgacggcctcctcccctcggaccgatctgggagaggggagaggaggggatgggagggcgcggtcccgccacttccttcgtggtcgccgtcgtcgccgcttctgtcgaggtcgccgtcgtcgccgtcgccagtcgccgtcgtcgccgtgcacatccgcgccgccgctggggcggatctgtcctccccgcacccgtcctccccggcagcggggatcccgccagtcgtggtcgccgtcattggcgccgcgcccctccaaggaggaggttgggggcgcaaggaaggaggaggggagactggagagaggactattcatttccacttgtttgagtcggggttcatgccaagctataattgttggacatcccacggagagcaaggtgttgaaatggaagaagatgaagtggaagacgacaatattccggactttgctcagtatgttggatttgaaggaaatcaaacgggcgaggaggaaatagctgctgatggtaacgacgttgcggatgatcttggtcagatgttgcaggacgccagggaggactgcgaaagtgaaaaggaggcccataaattggacaagatgttggaggaccacagaacttcgttgtacccaggttgcgagcaggggcacaaaaagttggataccactctggagttgttgcaatggaaggcaaaaaatgggaggaagtacataatgatgccgattattattcaaggccccaagcaacctggtaacgacatcgacgtgtacctaagaccactggtcgaagatcttaaacagttgtggaagaaggaaggtgtccccgtgtgggacgaggacaaacaggaggagtttaacctacgagcgctgctgttcgtaaccatcaacgattggcctgcacttagcaacctatccggacagtccaacaaggggtacaaggcttgcactcactcaaaccacccggtacggaagaaaggcaagcacttcgaacataaggccgaccaccgtacgaagcctaaacatcgcagcgggaaaacagtgtttgctatggttaaagatcttaaagtagtgtttggaaaggggcctggaagccagcatatagagagcgaagatggtcacgcggcgatgtggaaaaagaactctatattttgggagttaccatattgggaattcttggacgtacgccacgcaatcgacgtgatgcacctcactaagaacctttgcgtaaaccttcttggcttcctaggtgtatacggaaagtcgaaagatacactggaagcacgtaatgatctgaagcatatggaacaacgcggcgaccttcacccggaaccaaaggagaaaggaagccattacttgagtccagccagctacactcttagcaaggcagagaaggaaagtatgtttgaatgcttggagagcataaaggtaccgtctggatactccacgaatatcaagcgaataataagcacgaaggagaagaagttcacaaacctaaagtctcatgactgtcacgtgttgatgacacaactgctaccagttgtaataaggggtatccttccagacaatgtccgggcaacaataacaaagctatgtgcattcatgaacgcaatttcgcagaaggtcatcgatccggatagattagaagcccttcagaatgaagtggtgcaatgtctcgtcagttttgagttgatatttccaccttcatttttcaatataatgacgcatctgctttgtcaccttgtgaaagagatccgtattctcgggcctatgtacctacacaacatgtttcctttcgagaggtacatgggcgttctgaagaagtatgttcgtaaccgtgctcgtccagaggcaagcatcgccaagggttatggaacagaggaggtcatcgaattttgcgtagaatttatcgaagaccttcgcccaatcggggtacctgaatcacgccatgaagggagactacggggaaagggaactctcggaaggaaagcaataatgacggtagacaacaatttattccgtaaagcccatttcactgttctgcaacactcttcattggtagctccttacatcgaggagcacttggctctagttcgcgccaggaacatcggtaagtccgatgcatggattacacggtatcacattgatactttccccgcgtggctacgacaacatctcatgggtaacgagtcgatcaaccaacaacttgccttcctggcgaggggaccgtctgggtcgattgcgacattccagggatatgagatcaatgggtacacattctacacgagagcccaagacatgaagagcacgaaccaaaacagcgctgttcgtgtcgatgccatgggacacgatggaacaactgccacgtattacagtgccatcgaggacatatgggaacttgactatggtcctctcaaggttcctctgttccggtgccaatgggttaggttgactagtggaggcgtaatgatttatgacagtgggatgacaactgttgaccttaacaaggttggatactcggacgaaccttttgtccttgccaatgatgtaacgcaagtctttttcgtgaaggacatgtctagcaaaggaaagaagggcagagggcctgatgagcctaagcgtcaagtggttctcccaggcaaaagaaaaatcgtcggagttgaggacaagactgacgaggattacgatcagttggatgggcaaccccctttcacggtgacgattgaccctagcatcctcctatcaaatgaagacaccccttactcacgcagcgatcacaaggagggaacaatagtgaggagaaagtacgtgcggtcaaccgtcaccgccgatgtaatgccggcaaatccccgtgccgacgccgccgtatctcgccgtcgtctcgagctcgtcgtcctagccgctgcctccgcctcctccgctgccgccgcatctctggggtgagagccgccgccgccagatctcccttcatctcgatctctccgatctcgatctctctccgtcgcgccgcccgccacgagacgccgcgccacgacgacgacgcgccacgccgacgccgcgccaagccgccgccggcacgccacgccgccgtcttcgccgccgcgcgcgcaatgccgccgccggcacgccacgccgccgcctttgccaccgcgcaacgccgccgccgcatgccaacgccacgccgccgccgccgccgtcgccacgccgccgccgccttcgccgccgcgcgcgcaatgccgccgccgccatgccacgccgccgccgccacggccccgcaacgccacgccgccgccgccgtcgccacgccgccgccgccgccgccgccgccgccacgccgccgcgccaaccgccgccccgatgccgccacaccgccgttaacgaacgagaacgagaacgatcgaacgaacgagagcgagaacgaacacgtcaacgtacgttgccgcgagaacgtgaacaagaacgagaacgatcgaacgaacgagagcgagaacgagaacaatcgaacgaagacaagcgagaacgagggaacgcacgtgaatgagaacaagcgaacgaacgtgaacgagcgaacaaaagacgtgttgtcggagtcgtccgtcaagcctgagtggaagagctag

SEQ ID NO: 93324 - DNA, 1646 bp, Oryza sativa
  Clone ID: PAT_MRT4530_9171C.1
cgcgggaaggaggagaggtgctccgatttgattgcggcggggcgccgcccgccgcggggtgattttgggcggccggggaatgctctacctcaagcagccgggcgcggatttagggttccggccggcggcggcggcggggctgtgatctgctgaccaggtcggcggatgcgaggttgagccgtgggtagtcggccggccatggcggtggaggcggaggcggaggtggaggtggaggtggaggcggggggatgcctcctgcagagcttcgagctctacgaggccgagtcggtgagcgcctcgcgtccgaatcgcaatggctgttgtccctgtcgcgtggtggtgctccccccagatttttgttgtgctgatgcttggtgtgctttgcttgattcggggaaggatggcgcgagttttgagaaattctatattctcggaactaacactgacaaaacatcatggaaactactcaagattgatagaatcgaaccatcagagctcaacattgatgagagttcaactgtgtactcacatagtggatatcttgatctgctaaaggttcttgatgaagaccacaggtcaactggtggagtaaaatttgttacaaaatgttttggaatcatcggtttcattaagttcctcggaccttattacatgctaatcatcaccgagcagagaaaaattggggctatatttggccatccagtttaccaagttactaggactgcaatgattgagctgtcaaattccgagtcgagggcaaaatttctaaattccaaggatgaagacagatacaagaagctcttgcagacaattgatcttagaaaggacttcttttttagccactcgtataatatcatgagaagtttccagaagaattttaatgatccaaaggaaggatgggacctgtatgacacaatgtttgtatggaatgagtttctaacacgaggggttcgcaacattctaaaaagtaccatatggactgttgcgttggtctatggcttttttaaacaggataaactcgcaatatctgggaaagacattatgctgacgcttgttgctagacgctcgaggcattatgctggcaccaggtatttaaagagaggtgtgaatgacgagggtagtgtagcaaatgatgttgagactgagcaaattatttttgaggacatgcttggaccaaagcaaataagctctgttgtgcagaacagaggttccattcccctattctggtctcaggagacatccaagctgaatcttaagcctgatatcatattgcatgaaaaggacaagaattatgaagctaccagacttcattttgaaaatcttaggataagatatggaaatcctataatcatcctaaacttgattaagaaacgtgagaggaggccacgtgaatctatactccgcagtgaatttgataaagcaataaagattataaataatgatctaccaggggaaaatcatctgcgatttttacattgggatcttcataaaaactctcaaagcaagttgtatttcagaaaaagtacaaatgccctccaaatgcttttgaaagtggcttttgaagctctgaacttgacagagttcttttactatcaagttcctccagctcgaagggctgagagttccttcaatttgcatgctccatt

SEQ ID NO: 93325 - DNA, 1105 bp, Oryza sativa
  Clone ID: PAT_MRT4530_91720C.1
gaagctccggctccactcccacaggcagctcaactggggtataagccaaacgtcttctcctcctagatctttttcttcaactgaggttgattgattattgcaagaatgagcatatgacatactcaacaagccacccagcaaatatgcaagtgcccaaggataccaaaggatggcataatataggctcatttgcaaaagcagcatttagcaaaacatttaagagaaataaaccagtggagtaattaatcagaaattttaatcaacactgaacaacacacccatgctgcacaggcccaaccatcctgaacaaccatacccggctgtacagatctaactctaaaccaggagctaagcaaattattaccaggtataacatctataattattgtgagaggtgtgagactaatcacgaaaaacattgctcaactcgcccataaccgcgggcacggctattcgaatagttttactctgatcagaggtgtaccactgtacccacaagacacgattccacacatgttgccatgccccgaaataccaccacggcattgcaaagggggaaatcgtgacaataccctttgcacaacacaactcaaaacagtgcaccgttcctggatcataatcacccccttataaacaaggcatggactccccagcgacccccacggacttctcgccgcttctcagtctggtgccccgtaatgaatcatgctatacaaaagcggccgacgacctcgccggcgctatggaccttggccgggcgattggagggcacctacgcgtagaggacgacgaggcgaacccaacggtactcaccaaaacgacaaacgacgcacgacgacggccggcgacgaagaggacggcggcggcggctcggcttgacggcgacggcggagctccggtggccggcggcgaaggggaaggtgcggccgaggttctcctcaccacggcgcacctaacggcagcggcggcaagcggcggcgacggctagggcgacggcgcggcgcgactggagatcgccggcgacggctagcggctagggcaacgtggcggcagcgctacgggcgacgagggagctcgggacttggggcaaacggaagaggacgac

SEQ ID NO: 93326 - DNA, 5983 bp, Oryza sativa
  Clone ID: PAT_MRT4530_91721C.1
atggaagaagatgaagtggaagacgacaatattccggactttgctcagtatgttggatttgaaggaaatcaaacgggcgaggaggaaatagctgctgatggtaacgacgttgcggatgatcttggtcagatgttgcaggacgccagggaggactgcgaaagtgaaaaggaggcccataaattggacaagatgttggaggaccacagaacttcgttgtacccaggccccaagcaacctggtaacgacatcgacgtgtacctaagaccactggtcgaagatcttaaacagttgtggaagaaggaaggtgtccccgtgtgggacgaggacaaacaggaggagtttaacctacgagcgctgctgttcgtaaccatcaacgattggcctgcacttagcaacctatccggacagtccaacaaggggaaggttgtatacatgggtcatcgtcgattccttgcagcaaaccacccggtacggaagaaaggcaagcacttcgaacataaggccgaccaccatacgaagcctaaacatcacagcgggaaaacagtgtttgctatggttaaagatcttaaagtagtgttcggaaaggggcctggaagccagcatatagagagcgaagatggtcacgcggcgatgtggaaaaagaactctatattttgggagttaccatattgggaattcttggacgtacgccacgcaatcgacgtgatgcacctcactaagaacctttgcgtaaaccttcttggcttcctaggtgtatacggaaagtcgaaagatacactggaagcacgtaatgatctgaagcatatggaacaacgcggcgaccttcacccggaaccaaaggagaaaggaagccattacttgagtccagccagctacactcttagcaaggcagagaaggaaagtatgtttgaatgcttggagagcataaaggtaccgtctggatactccacgaatatcaagcgaataataagcacgaaggagaagaagttcacaaacctaaagtctcatgactgtcacgtgttgatgacacaactgctaccagttgtaataaggggtatccttccagacaatgtccgggcaacaataacaaatctatgtgcattcatgaacgcaattttgcagaaggtcattgatccggatagattagaagcccttcagaatgaagtggtgcaatgtctcgtcagttttgagttgatattttcaccttcatttttcaatataatgacgtatctactttgtcaccttgtgaaagagatccgtattctcgggcctatgtacctacacaacatgtttcctttcgagaggtacatgggcgttctgaagaaatatgttcgtaaccgtgctcgtccagaggcaagcatcgccaagggttatggaacagaggaggtcatcgaattttgcgtagaatttatcgaagaccttcgcccaattggggtacctgaatcacgccatgaagggagactacggggaaagggaactctcggaaggaaagcaataatgacggtagacaacaatttattccgtaaagcccatttcactgttctgcaacactcttcattggtagctccttacatcgaggagcacttggctctagttcgcgccaggaacatcggtaagtccgatgcatggattacacggcatcacattgatactttccccgcgtggctacgacaacatctcatgggtaacgagtcgatcaaccaacaacttgccttcctggcgaggggaccgtctgggtcgatcgcgacattccagggatatgagatcaatgggtacacattctacacgagagcccaagacatgaagagcacgaaccaaaacagcgctgttcgtgtcgatgccatgggacacgatggaacaactgccacgtattacggtgccatcgaggacatatgggaacttgactatggtcctctcaaggttcctctgttccggtgccaatgggttaggttgactggtggaggcgtaatgattgatgacagtgggatgacaactgttgaccttaacaaggttggatactcggacgaaccttttgtccttgccaatgatgtaacgcaagtctttttcgtgaaggacatgtctagcaaaggaaagaagggcagagggcctgatgagcctaagcgtcaagtggttctcccaagcaaaagaaaaatcgtcggagttgaggacaagactgacgaggattacgatcagttggaggggcaaccccctttcacggtgacgattgaccctagcatcctcctatcaaatgaagacaccccttactcacgcagcgatcacaaggagggaacaatagtgaggagaaagtacgtgcggtcaaccgtcaccgccgatggcaaatctccgcgccgacgccgccgtatctcgccgtcgtctcgagctcgtcgtcctcgccgccgcctccgcctcctccgctgccgccgcatctctggggtgagagccgccgccgccagatctcccttcatctcgatctctccgatctcgatctctctccgtcgcgccgcccgccacgagacgccgcgccacgacgacgacgcgccacgccgacgccgcgccaagccgccgccggcacgccacgccgccgtcttcgccgccgcgcgcgcaatgccaccgccggcacgccacgccgccgccttcgccggcgcgcgcgcaatgccgccgccagcacgccacgccgccgccttcgccgccgcgcaacgccgccgccttcgccgccgcgcaacgccgccgccgcatgccaacgccacgtcgccgcgcgcgcaatgccgccgccgccacggccacgccgccgccgccacggccccgcaacgccacgccgccgccgccgtcgccacgccgctgccgccgccgccacgccgccgtgccaaccgccgccccgatgccgccacaccgccgttaacgaacgagaacgagaacgatcgaacgaacgagagcgagaacgaacacgtcaacgtacgttgccgcgagaacgtgaacgagaacgagaacgatcgaacgaacgagagcgagaacgagggaacgaacatggctgaccgcgatgaggaacagatattgtacgatacaatcgcggagggaagcagccagtactggaatgaagaagaggggaacgaggatccaaaccagtacttgaacgaggaagggaacgtggagagggatgcggaggggaaccagcaggggcacgtggaaagggatgtggaggggaaccaggaggaggaggctagtggtagtcaaccctccgttggacagaacagggcacgcgggcaacgaggtgcagcgaagaagcttgagggtcggcacatcataacggaagtggaagaagatggacgtcctagtgccccggccaaagccgccaagaactatgtacgtcacagcggttgggttgtgcgggataacgtgcctgtcagtacggtgtactggcgaagaacaagggcacgcggagatcatgagagctttgtcccagattcggagaaagagatgctgtggaccacaatgctcgagacattcacccttcctgcgggtacagaggacaaagtgaaaaggtggactctgaagaaaatggcagaacagtttcagagcttcaagggagatctgtaccggaactatatactgaaggggcagacaccgaacttcgacacattcccaaagctaagggatcactgggacgagttcgttgcatataagacaggtgaacaagggcaggcgatgatggaaagaaacaaagaaaatgccgccaagaagaagtaccatcaccacttggggtcaggaggctatagcgtcgcgatgccgaagtgggagcagatggatgctagcttgattgagaggggtatcgaaccggcaacagccaattggccggaacaatcgaagttctggtactctgctcacggtggaacgctcaacccagctgatggctcactggtcttcggcgatcagatacgagaggctgcgcgacgactaacagatgcagtggaagcctcctctcagggcacgttccgaccagacagagatagggacgagctgacactcgccctgcagactccagagcatccaggacgaacacgagggaaaggggtgattccttggaagattggtttcaaggaggacatccacacgtacaggagtcggatgaggagcaagagagataccgaggcgaagattgcagacctagagttccgggtatcgagctacgaactcaacatgcaagaggaggtggcaaggaaggttgatgaacgcatggccgcacatcggtcccatgatccccagccaaccattccttctgcaatggtgagcccgtcaggaaaccgtagcagctgcgcctcaacggggcaggtggcgtcgggcatggccatcccaacggacccttcaggtacttaccactgcaggccgattccagcaggatactcgaaggtcgaagttgtgttggtcgaaggcgcgtacgaggacctcgagctggattaccctggaggagacggtgagacgcatctacgagacacatgccatgccattattctatggcgcaggcggtacatcatcctccctgggcgacaagcggcatctcgtgcaccatctcctccggctccgccatctcctcctcaggatcctgcaccgtttcctcctcatgctccgccagcaccgtctccacctcaggctccagcatcgactcctcctcaggatcctgcaccgactcctcctcgtgctcctacacctactcccccgcaagctcctcttccggcaccttcaaagtcaagggcccccccagctgcaccgcctgcccacacaagggcaacgaagaaggcgaaagttgacgccgccaagaacaaggacccggggtacgattgcacgcaagaggagcttgacgcttacgttgcatcagaagtcaagagacaattcaagcctcgaagtccagaaaagaagattcttatagaccccagtgtcaggaacttcttcaggggtatgtctgcatctgtcaaggaggccatcaagctatcggactatgagcgaacgctgaagaaagcatcttctggaaagtccaaaccagtccctcagcttggagagcaaccaaaacaggagatcgagccgttggttaccgggaaagaaatgacgatagaagaatttattactgacaccgatctaactacggatcaattgataggagtcgcaccaatcgaaaaggcggaagtgaaatacatgtacgaactcggtaaaccgcttgtcaagcttgagctgctgcagtccctacccacacaaatgtacaagttccatcagctgtacatggagatgagcgccgccggtagagagatgatcggagcgaggatcagggacacggacttcttgcaaggagatgacattctctggatcaatttcaagggaatctacgaactataccagctggacgccctcgacgtctctattatgagttgctggattttaatggagatcaaaggggcccgacggcggagggttttcgatactggattcatcgaccctcggagagtaaacgtcgcaatgctcgaccaatatccacaagaaacagaggacaatctcgtccatctcctgaaggcgcagcattacaagacgttcatactgttgccatacaacacagaattccactgggtgcttttactcttcgacctggaggcctgcaccgtcaacgtatatgactcaatggataaaaaagagtctacgtttgacaaggttttcgaacttatagacagggcttggtatcggttccgtcatttggtccgcggcaattggagagaaagacttaggcggaagtttaattttccttgcgcaaagcaagcccagggaactaacttgtgcggctactacgtgtgcgagtattgccactgccttgcagaccaaatcatcaccacaagagagctcgattttattcgtataagggataatctcacacacaaggaatttatcgcggtggttcaagaacaacttatgggattcatcaacgaacaaatccttgatcccaacg

SEQ ID NO: 93327 - DNA, 718 bp, Oryza sativa
  Clone ID: PAT_MRT4530_91722C.1
atgagtagtgtgagactaatcacgaaaaacattgttaaactcacccataaccgcgggcatggctattcgaatagttttactctggccagagatgtgccactgtacccacaagacacaactccacaacatgtcaccatgcgcctcagtaccaccacgataccttggaaaggaattctgacaatacctctcacacaacacaactcaccacagtgcaccgttcttggatcataatctccccctcaaaaccagaggcaatggactccccagcgacccccacggacttcgcgccgcttcacagtctggcaccccgtaatgaatcatgctatacaaaagcacggctccacgcgaccaccggcactagagagctcggttgagctatccgaggacacctacgcgtagaggacaacgacgcgaactcaccggtgcaagaaactatgacggacgacgacgaacgacggccggcgacgaggtccaacggcggctcggctcgggtcggcggcggcggcggcgctccagtggcttgcgacaacggcgaaggggcggccgaggtactcctctgtgcgcacccgacggcagcgacggacggcaacggcgacggcgctagcggcggcgcgacgcgaccggaggatcgccggtgacggcggcggctaaggcaacgtggcgggcggcgctatgggcgacggctcggcttggaacttgatgcaaacgggaggacgac

SEQ ID NO: 93328 - DNA, 777 bp, Oryza sativa
  Clone ID: PAT_MRT4530_91723C.1
ctacttggccgcgacccccacgcggtgagtgccgctcttatagttgagcgcgacgagggcgacccgcgttgcgagcctttccttctcgccgccggtcgccgtgggcctccgtcgccgctcgctagcccctttaaaaggacccccgagctctcctctacccgccgcctctttcgccttcgcccgccgtcgtgtgtagcgccctagcctctgagcttttgcgccgccgtcgccgccgttcgtccagccgtgcgccgccgtcgctatggtcgtcgtcgtcactcgggaaggccaccgtcgggatcgccaagtcgccgccgtccccgtccaccgtttcgccgtcgctgaagaccgccggagcaccgtcgccgccgtcgacccgatcttctccgccgccttttcctcgacgccgccgccgtccgttggtcttccgccgacgttttggtcatcggtgagttcgccgcgccgtgatctacgtcttggtgccctccgtttgtgccgtagagccgccgagccgccgccggaggtgacttcgtcgctgacgtcatcgtccccgtctcccgtgagccggtcgtggaccgatcgatctcggccgtccgtttggatcaagtcgatctcggccgtccgttcgcgtgaaccgctgccgtgcacccggtccaccgcaaaccctagccgctgacgcaataatccttcttttccttttgtatagcatgattcattgcggagcaccagactgagaagtggcggagataagcccacgggggtcgctggggagtccat

SEQ ID NO: 93329 - DNA, 3492 bp, Oryza sativa
  Clone ID: PAT_MRT4530_91724C.1
gggtcaaatatctttatagaaaattactgccaccagaaataagttcattcttttcgttccattctgtaatcacgtgtttacagttttaaatatgtatatgcaaatttgttggattcctatcaaggtattcacaattttacataggcgataggttggcagcagaagagtgaacagagctaaaggaagcagtgataccgtcgagctaacacagatcgtgttggctactgagctttgctgccttcgtttagtcttctaattgttcagaacacatgaatcaatctactactcatcttgcacgggatgtcagctcacacctttttttgatgcaagctccttctcaacttctgaaaatatctccctcaacctgttggcagaattcgacataacattcttcacaaccttcttctgctgcttagctcccttcaaccaggcaatccctaacaatacctgaatgctgcaggtgcttggttttaaggacgtgctagtcatctgatacttgagctggatactggagtagtcttcatgttggactccttggagggtcatcacctcctcaatgacccacccatctcgattcgctaagttatattttcgttgagtggttgatgcctctccaaagcgcgacaagattttgtcaaacttaaagctgatttgcctctggtatatgttttggtttagtagctcccattctgtaggcgagtaatcgacgcaaccagctttctgcatcaccttgtgctccaatggacctccggagaacatatccatcaaggaattgatatcaacagaaagaaccgccgagtagacttctgacattttcacatcttcattggctaatagagaaccttcttcacaagggagctgtttcagttcagaatttttgtcaatcatctctcccttctgttctggatccactgacctcattttccaaagtgccataataattctgtgagcatcattgaatgaaacaaatgtctggaaatggtatttcagttttccttgaggatccagtgttttggctccatgtctggcttctagacctctgtccttgcggagaatgatcatcaaggatggacttccaacttttgctagggttggtggagcaacctgaagtggcattttccgctttagataacaagtgaaatcatcgataagaaattcttctggaggaagactaaagagcttacggaacgctgaatttgtctgagcagaccgcaggtgtatcttcttacctacttctttccccatctttgccagataattcataacaatttcagtcccacgcgagttgttcaaaaagattcgcaagtgtaacttaggctcacatccctggggaaaccttccatcaagaggaagccacatgtcacccaaatctgacaaattgtttttcaaaaagttcacttctgtttgaccaataggaattttattatgtggtccctctgaatcatgcacaactacttccaaccttgatggaggatcatccattgcattgaattcaaatatctctgaacctactacaccgcttccctcaataagtgcaacagtcagcaaccaaccatcaccatgagctttcaccccatgatcactacctctttgtttccatgcatacaaaaaccgccgtcctgatttgaagatattctgcccctgaattatcaaaatggcacaaaatacaacctcccaaattgaatctgggagatcaataccaaaatattcgagcccatgcaccatatttggcttaactagacgaagatgtgcagtggcatacagtgctatacagagagagaatatgaatgcaaagtttccaaggaagcgggcagccagtttccaaattgattcttcctgtgtctgcaatgagcttaaaatctcgtctttgcttaagttagaatcatcaggcgcaatcactttggtcttctgggacagtacttcagtaaactgtgcatatccctctcggagtccttgttttgtcccgctctcgatcatccctttcaacattgtactctggacaaagttcagacgccaacttatagtaagatgtgatgtttgttctttagatggcaactgtggacctggtgttatacagtacagaatctccaccttgaaacaattaccacagggaacctcaggactgctaacactggaaagaacagcaaaagaatttccagctgcctttaagtatgtctgctcttcagtaatttttacagctttaactaatttgcttgcagcttttgtataacttaaagttcttttcaaacaatcattgcttacaagtttccaggggtcagtttggaatccgcttaacccttgaacttctgcaactgctggccagaaatctgaatgtgcagaaaacaacatggaattcatttcagttggttgaagaacataagattggtccacgagtataccaccacgcaagttttctggcatttcagaacctttatctttagactccagggatttcattagctcatttaaactagtttcagggagcgccccattatcaccattttcacaagattcagagttcatttgtgtatcttgaaactgctcatgatctgatgtggcagaaggtgcggcgtcaacaggtttccgacaaaagtagcgagacatgacttccactactgatgatgcattggtggtggcatcattgtcatcttcctcgggctccaaaagaatagatctttctgtgctgatacaagacagttgccctgggcttcgacggccttgctgatccatgatgccctggctcaacttatccatactgctgcaggatgccctttccatgctaggacaggctgacagatcaaggctactaacagaagccgataaggacgaggcagtggttccaactgacctcgctgataaggacgaggcagtggttcctactgacctcgctgataaggacgaggcagtggttccaactgacctcattgagctgcatggtgtatcattgataagttgcattggcatgtttctcggttcgtcgcaaatggctgtcctagataagtaaatcctcaagcgaatttcacccgcaacgcgccgtttcttcctgaacctgccgcccttggagtggaggtggtaccacgccgtgccgagggagaggccgtccgccgccatgacggtcgagaggggcaccttgacccgccccaggaaccccccgccgaagtacccctcctcgttgagcacggacacgacgagctcctcctcggcgtcgccgacggcgaacccgaactcctcgtcccacagggggctgaggcacctcttcaccaccgtcgtcttcgccctccgcctccccatctgcagccgcacgtaggggtcgctgtgcccggtgaggtacgccgcctggagcccccgcgcctccagcacgtgcacgcacagccgcatcggcgcgctccccggccgctccccgccaccgccgctgccgccgcccaccgatctcgccattcgaggaggaggaggaggaggcggcaatggcgatggcgatctccggacgcgtgg

SEQ ID NO: 93330 - DNA, 10783 bp, Oryza sativa
  Clone ID: PAT_MRT4530_91725C.1
tcataaccacgcggggaaagtatcaatgtgatgccgtgtaatccatgcatcggacttaccgatgtttctggcgcgaactagagccaagtgctcctcgatgtaaggagctaccaatgaagattgttgcagaaccgtgaaatgggctttacggaataaattgttgtctaccgtcattattgctttccttccgagagttccctttccccatagtctcccttcatggcgtgattcaggtaccccgattgggcgaaggtcttcaataaattctacgcaaaattcgatgacctcctctgttccataccccttggcgatgcttgcctctagacgagcacggttacgaacatacttcttcagaatgcccatgtacctctcgaaaggaaacatgttgtgtaggtacacaggcccgagaatactgatctctttgacaaggtgacaaagcagatgcgtcattatattgaaaaatgaaggtggaaatatcaactcaaaactgacaagacattgcaccacatcattctgaagggcttctaatctatccggatcaatgaccttctgcgaaattgcgttcatgaaagcacatagctttgttattgttgcccggacattgtctggaaggataccccttattacaactggtagcagttgtgtcatcaacacatgacagtcatgagactttaggtttgtgaacttcttctccttcgtgcttattattcgcttgatattcgtggagtatccagacggtacctttatgctatccaagcattcaaacatactttccttctctgccttgctaagagtgtagctggctggactcaagtaatggcttcctttctcctttggttctgggtgaaggtcgccacgttgttccatatgcttcaaatcattacgtgcttccagtgtatctttcgactttccatatacacctaggaagccaagaaggtttacgcaaaggttcttagtgaggtgcatcacgtcgattgcatggcggacgtccaagaattcccaatagggtaactcccaaaatatagagttctttttccacatcgccgcgtgaccatcttcgctctctataggctggcctccaggcccctttccgaacactactttaagatctttaaccatagcaaacactgttttcccgctgcgatgtttaggcttcgtacggtggtccgccttatgttcaaagtgcttgcctttcttccgtaccgggtgatttgctgcaaggaatcgacgatgacccatgtacacaaccttcctacagtgcttaagatacgtactttcggaaaggctgctaagtgcaggccaatcgttgatggttacgaacagcagcgcttgtaggttaaactcctcctgtttgtcctcgtcccacacggggacaccttcctttttccacaacagtttaagatcttcgaccagtggtcttaggtacacatcgatgtcgttaccaagttgcttggggcttaaaccaaaccgtatgtttcgtgcgtcctttccaaagtctttaaattttctgtcgatgtttcgccactgcgaaccatcggcggggtgtctcaacatcccgtcctgttgacgctcttcagcgtgccatcgcatcattctagcattccccttattcccgtcaacttctcctggatcgtctcgtctaatcttgtatcgtagtgctttgcaaacaggacatgcttctaggttctcgtactcctcaccgcgatataggatacaatcattcggacatgcgtgaatcttctgaacttccagtcctagagggcagactatcttcttagcctcgtacgttgtctcaggcaatttgtttccctccggaagaatgttgttgacgagtttcaataaatcgccaaatgccttgtcactaacaccattttttgccttccattgcaagaactccagagtggtatccaactttttgtgcccctgctcgcaacctgggtacaacgacgttctgtggtcctctaacatcttgtccaatttatgggcccccttttcactttcgcagtcctccttggtgtcctgcaacatctgaccaagatcatccgcaacgtcgttaccatcagcatccctttcctcctcgcccgtttgatttccttcaaatccaacgtactgagcaaagtctggaatattatcgtcttccacttcatcttcttccatttcaacaccttgctctccgtgggatgtccaacaattatagcttggcatgaaccccgactcaaacaagtggaaatgaatagtcctggatgcagaatactccttctgattcttacacttattgtatggacaacaaataaaacccttatgcctgttagcttcggccactctcaaaaaataatgcatgcctttaataaactctttggaccgccggtcagcgtacatccatcgccgatccatcctcttcgctgcttccccactaccatcaacgtcttccacccgcaagcttcgttgtgctgcccccatcgttctcctttgctgttgtgcatccaatgcgggggcccggtcgggttccggggacccgcctggggcgggggtgggggtagatttcgccccgaactcttggtctgggtcgggggcggggcgaagaatgctgggccagggccgggggcattctacctccacccacccccgacccgtcccgttgccttcctcctccctcttctctctatcagtgtcagcaaattgacgaggagcaaatccactaagggcccatttgaattggaggaaaaacataggaattgtcacgtccggaaattcactagtaatttccgaacttatttgtgcataaaatcctcgtccaggaatcagccgaggtacacaaactgacaatttaatatacaaatccatcataataataacgttacatacttacaaaagaaaagaaaacagcagcggaattaaaatgagcatatgacatactcaacaagccacacagcaaatatgcaagtgcacaaggataccaaaggatggcataatataggctcatttgcgaaagcagcatttagcaaagagttaagagtagtaaaacagtagagtaattaattaaaaattttaatcaacactgaacagcacacccatgctgcacaggcccaaccatcctgaacaaccatacccggctgtacagatctaactccaaaccaggagctaagcaaattattaccaagtataacatccataattattgtgagaggtgtgagactaatcacgaaaaacattgctcaacccgcccataaccgcgggcacggctattcgaatagttttactctggccagaggtgtaccactgtacccacaagacacaaccccacatcatgtcaccatgtgcctcaataccaccacggtacctcggaaaggagttgtgacaataccccttgcacaacataatccattacagcgcacctttcctggatcataatcacccctttataaacaaggcatggactccccagcgacccccgtggacttctcgccacttctcagtctggcgcactataatgaatcacgctatacaaaagataaagccgttgcccacgctggcttgtggttggcacgataaatgtttcacaacagtaactttgaaataaatagagaatttaaatataggatcaacatgctcaaaggattgtgtttaggatctgtgtgacttgccttgcaataatcggtcttcaattaatcttctcgaatacttccggcgcactcacgaaccttcgcaacgacggaaacgacaagctaacacgcaaaacgaagaaaaagactaataaaaaccaaataaacagtacatataaagtaaacaaacatgtagatcatgattttagatgaatttagcaacttgaaccactcaaaaccgagttacgatgatttagttatgaatttccgaagatttaatctattagaaaaacaggaaaaagaaaaacgatgatgacgtcatgatgacctcatcaatgattggatggtcggctgcgactttggaggacatgaacacgtagaggacgacgagacgaacccaacggtactcaccctcgaaccaaacgacgaacgacgacggccggcgacgaggtctagcggcggcacggcttcggtcgacggcggcgacggggctccggtgaccggcgacagcggggagagagcggccgggcttctccacacctcggcgcaccttacggcggtgacggcgaccggcggcgacgacggaggcgacggcgcgacgcggatggagctcggccggcgacgacggcggggtggagcacgtggcggcggcgctacgaggcacgggagaccacgggagagggggcaaacgaaagaggaggactagggggtcctatttatagccttggattgaagagatcggactcctcccgcaagaaatcgatccgggaaatcaaaaactcggttttggagataaactcgaaaacgagtttgattcggataagatactcaacgatttgctccgatttttggaggtaaagatagaggaggataagaggaatatttcccctcaactaattttagaaaaacacaaggggaaaggtcagatttggaggggaaaaccgcggctatacaggtactgtgcggctggctcgggctctgtctccagccggctggagattgaagatgacactgtagcagggaggcaaactagactttttgctgggcttctacttcttggcccgattgaaaaagggacacaaagcagactttggaggagggataaggccagccgaaaggaagggagaatgggccgaggatagaagctgaacttttcctatttcggcccgaaaaggagaaggggattttaaatacttttccaattaaattaatcactgaaatgatctttgaattgtgaaaaatacttcctatgctcaaataattccaagaaaaatcttgaaaatacttggacactcaaagtacttaacaaaattataattagaccatttaatgattaatttaatatgtgggtaattactgaaatgctctttgtaaaagatatttactcccggttgttgagaacaaccgggactaaagatccaggggtatatatattcccggtgcgccctcgtcttcttcaccaacacttaaacgttttcggccgatcgatctctctcggcctctctccttcgccgccactgcctagggcaaatccccgcgccgacgccgccgtatctcgccgtcgtctcgagctcgtcgtcctcgccgccgcctccgcctcctccgctgccgccgcatctctcagatgtttcttgtatcaacagatggctgaccgcgatgaggaacagatattgtacgatacaatcgcggagggaagcagccagtactggaatgaagaagaggggaacgaggatccaaaccagtacttgaacgaggaagggaacgtggagagggatgcggaggggaaccagcaggggcacgtggaaagggatgtggaggggaactaggaggaggaggctagtggtagtcaaccctccgttggacagaagagggcacgcgggcaacgaggtgcagcgaagaagcttgagggtcggcacatcataacggaagtggaagaagatggacgtcctagtgccccggccgaagccgccaagaactatgtacgtcacagcggttgggttgtgcgggataacgtgcctgtcagtacggtgtactggcgaagaacaagggcacgcggagatcatgagagctttgtcccagattcggagaaagagatgctgtggaccacaatgctcgagacattcacccttcctgcgggtacagaggacaaagtgaaaaggtggactctgaagaaaatggcagaacaatttcagagcttcaagggagatctgtaccagaagtatatactgaaggggcagacaccgaacttcgacacattcccaaagctaagggatcactgggacgagttcgttgcatataagacaggtgaacaagggaaggcgatgatggaaagaaacaaagaaaatgccgccaagaagaagtaccatcaccacttggggtcaggaggctatagcgtcgcgatgccgaagtgggagcagatggaggctagcttgattgagaggggtatcgaaccggcaacagccaattggccggaacgatcgaagttctggtactatgctcacggtggaacgctcaacccagctgatggctcactggtcttcggctatcagatacaagaggctgcgcgacgactaacagatgcagtggaagcctcctctcagggcacgttccgaccagacagagatagggacgagctgacactcgccctgcagactccagagcatccaggacgaactcgagggaaaggggtgattccttggaagattggtttcaaggaggacatccacacgtacaggagtcggatgaggagcaagagagataccgaggcgaagattgcagacctagagttccgggtatcgagctacgaactcaacatgcaagaggaggtggcaaggaaggttgatgaacgcatggccgcacatcggtcccatgatccccagccgaccattcctcctgcaatggtgagcccgtcaggaaaccgtagcagctgcgcctcaacggggcaggtaggatcacagagcatggacgccatgcaaacacaggacgaatcgacctgtcccgttgatgacatcactcagcggacaccatgtgagctgcatattcctttgaagaacttatcaataaaggtggcgtcgggcatggccatcccaacggacccttcaggtacttaccactgcaggccgattccagcaggatactccaaggtcgaagttgagttggtcgaaggcgcgtacgaggacctcgagctggattaccctggaggagacggtgagacgcatctacgagacacatgccatgccattattctatggcgcaggcggtacatcatcctccctgggcgacaagcggcgtctcgtgcaccatctcctccggctccgccatctcctcctcaggatcctgcaccgtctcctcctcatgctccgccagcaccgtctccacctcaggctccagcatcgactcctcaggatcctgcaccgactcctcctcgtgctcctacacctactcccccgcaagctcctcttccggcaccttcaaagtcaagggcccccccagctccaccgcttgcccacacaagggcaacaaagaaggcgaaagttgacgccgccaagatcaaggacccggggtacgattgcacgcaagaggagcttgacgcttacgttgcatcagaagtcaagagacaattcaagcctcgaagtccagaaaagaagattcctatagaccccagtgtcaggaacttcttcaggggtatgtctgcatctgtcaaggaggccatcaagctatcggactatgagcgaacactgaagaaagcatcttctggaaagtccaaaccagtccctcagcttggagagcaaccaaaccaggagatcgagccgttggtgaccggtaaagaaatgacgatagaacaatttattactgacaccggtctaactacggatcaattgctaggagtcacaccaatcgaaaaggcggaagtgaaatacatgtacgaactcggtaaaccgcttgtcaagcctgagctgctgcagtccctacccacacaaatgtacaagttccatcagctgtacatggagatgagcgccaccggtagagagatgatcggagcgaggatcagggacacggacttcttgcaaggagatgacattctctggatcaatttcaggggaatctacgaactataccagctggacgccctcgacgtctctattatgagttgctggattttaatggagattcaaagggcccgacggcggagggttttcgatactggattcatcgaccctcggaaagtaaacgtcgcaatgctcgaccaatatccacaagaaacagaggacaatctcgtccatctcctgaaggcgcagcattacaagacgttcatactgttgccatacaacacagaattccactgggtgcttttactcatcgacctggaggcctgcaccgtcaacgtatatgactcaatggataaaaaagagtctacgtttgacaaggttttcgaacttatagacagggcttggtatcggttccgtcatttggtccgcagcaaatggagagaaagacttaggcggaagttcaaatttccttgcgcaaagcaaaagcagggaactaacttgtgcggctattacgtgtgcgagtattgccactgccttgcagaccaaatcatcaccacaagagagctcgattttattcgcatgagggataacctgaccacacacaaggaatttatcgcggcggttcaagaacaactcatgggattcatcaacgaagaaatccttgatcccaagggtgacttcatcaatatgccgctagatgaggatcttccccctactggctcacagcctaatcctgctgctgatgatgatgaagatcctgatggtggccacatctggcaaatgggtcatccccaagtaggtccgggtgattgggatgatttagtccaacagcaagatgcagcaaatgggaaggtagaagatgcttggggccaagatcaccctatgggccagatcatggaagcaaaccctgatggacaaattgatttggctgctgctaaccctggacatgaaaatgtagtggtcccctttgttcctgctgcagacaaggggaaaaaggcccatgaagacatggaaattcttgaagtcttgcctttggcggttcacccaccctccagtccagtctgccaaacagctgctcctttgatgcttccaaaagccctagttaagaaaagggatggcaaaactcttttatataatccatacaggaggcagagtgcaagacttcagcatatcaaaggggattctgaactaaaggtagatcctagaatgggcattggtaagccaagaggaaagtttgcaagaaaactcaaagaattggcaggaatgaatgctgaatccaagttgctctctttgaggcagaaaattgaggatagtggttgtcagtggagttttaggaggtatcctgattatttggtcatctcgagtttttgtggggacagtggtagagtgaaaattgacacaaaaatccccaaatcccctattttcatatttgaaaattattgggtagagatggatgggtttttcgatattgttcaggtagtttggtctttagatcctggtttcaatgatcctgccaagtgcatttctttcaaattgaaagtgcttaggaaaaagctccttgcttggagtaagaatctgtctaagttgatgggattgctaaaaaactgcaacaaagtggtggactttctggatttagtcgaagaaaacagaatgctctcaatctatgagtggaattttagagaaacagttaaggaaatagatagtctcatgtccattattccagctgacaaagcaccagggccggatggtttcaatggctttttcatgaaaaagtgttggcatattatagctcaggactattatagactggtagctcattttcatgctggaaatgttgatttggaaatccttaatagctcttttataaccctggttccaaagaaaacttccctagagactgttaatgatttcagacccatttcccttatgggtataagtctaaaaatcgtaactaaattgctagctggcagacttcaaggggtaattcttaaactggtgagtgataatcattatggtttcatcaaaggaaaaaccatacaggattgtcctgcctggccttttgaatatattcaccagtgtcagcaatcaaaaagagaaatcgtcctcttgaagttagactttgaaaaagcctttgataccattgagcattctgcaattctttcagttatgcagcatatgggttttcctctaaaatggattgagtgggtacagatggttttctctactgcttcttctgctgtgctattgaatggggtgccagggaattctttcaaatgcagaagaggggtcagacaaggagttcctctctcacttctgctttttgtgttgggggcagagctgttgcaaagaataatcaacaaagcttttcatcaaggccttctgtcaaaaccaattaatgaaagcagtggggagggtttcccaatcatacagtatgctgatgacaccttgatcttgctaaaaacatctcagaaagaagtcttctgtttcaaggctattttgaatatgtttgctcaatccacaggcctcaagcatatggtcaagttctataatggtgctgatttaccatgggtgaaattaatctcacaatcatattatgattctaaagttccacacttgatgatgaataagggttctttttggtggagggacgtcacatctcttgtagacatattcagggggatagcaaaatgcgaaatcaggacaggaagaactgcccttttctggaatgatctatggaatgatgattttaaatgtatcagctaccccaatctctttgctgtgaccatgtataagtctgattcagtcaaggccatgtgttcaagacccttagaagattcttttgccttacccctctcagatgaggcttattctaaatttttgcagcttcaggaggttctggacagtttgaatttacaatcaaggatgggggatgcttggaattttatctggggttcagataagtacacagctaagaaattttataagctaaattattctgcattgcaaccccccaggcccatgatttggctatggaaaacaaaatgtgtcatgaagatcaaagtctttgcctggctaatgttctgtgataggctcaatacaagagatatgctggatagaagacattgtgcctaa

SEQ ID NO: 93331 - DNA, 3209 bp, Oryza sativa
  Clone ID: PAT_MRT4530_91726C.1
gctcaagggctggcccaacacactcagttaatgaacatgatgatacagcagatgcagaattagctcaaccaagggaacaacaatgctccaccgccgcagaacaagttagctgattttcttcgtgtgaggccgcctaccttttctagcactaccaacccagtagaagcaggtgattggctacacgctgttgagaagaagttggaactgctccagtgcacggatcaggagaaagtcgtgttcgcttcacatcagttgcaaggacctgttggagttgttgctttgaagaagcgtgagtttagggcattgaagcacaaggatcgtaccgtggcagagtatcttcatgagttcaatcgtctggcacgttatgctccagaagatgtgcgtactgacgaggaaaggcaggagaagtttttggaaggcttaaaggatgagctgtcagttatgttgatctctcatgactatgttgattttcagcagctggttgacaaagcaattcgacttgaagacaagaagaacaggatggataaccgtaaaaggaaaatgactgtatcccaggaggcacaaggtagtagccagaggcagcgtatcaagccactccaaattagtgaatcttcttccgctggtcaaggacaatcgcaacagttgaacatcggtggtgagatcaaatcagagactaatgaaagcaatgaagttaacatcgagcaagcaaatcagccggtgctagttcagcaggatcagtcgaataacagtagtggaagggagcagcaggagccaatgcagtgccagttgcgtcttcaagagttgcgtcttcaagtgttacaactcagccaccagtttcaaagcggcatgccccgtagcctcgtcgccgcgtcgtccaactcgccgccgccgccggccgagcttcggcgaggtcgcgccgccgcccttgccgtcgccgccgcttgccgccgccgccaagaggtgcgccgaggagagaggaagcccggccgcccgtccttcttcgccgccggtcgccgtagctcgccgccgtcggtcaacccgagccgccgcccgttccccgtcgttgccggccgtcgtcggacgtcgtttgtcgttgtgtgcgccagactgagaagtggcgagaagtccacgggggtcgctggggagtccatgcctctggtttttgagggggtgattatgatccaggaaagggctttgaagcacaaggatcgtaccgtggcagagtatcttcatgagttcaatcgtctggcacgttatgctccagaagatgtgcgtactgacgaggaaaggcaggagaagtttttggaaggcttaaaggatgagctgtcagttatgttgatctctcatgactatgttgattttcagcagctggttgacaaagcaattcgacttgaagacaagaagaacaggatggataaccgtaaaaggaaaatgactgtatcccaggaggcacaaggtagtagccagaggcagcgtatcaagccactccaaattagtgaatcttcttccgctggtcaaggacaatcgcaacagttgaacatcggtggtgagatcaaatcagagactaatgaaagcaatgaagttaacatcgagcaagcaaatcagccggtgctagttcagcaggatcagtcgaataacagtagtggaagggagcagcaggagccaatgcagtgccagttgcgtcttcaagagttgcgtcttcaagtgttacaactcagccaccagtttcaaagcggcatgccccgtagcctcgtcgccgcgtcgtccaactcgccgccgccgccggccgagcttcggcgaggtcgcgccgccgcccttgccgtcgccgccgcttgccgccgccgccaagaggtgcgccgaggagagaggaagcccggccgcccgtccttcttcgccgccggtcgccgtagctcgccgccgtcggtcaacccgagccgccgcccgttccccgtcgttgccggccgtcgtcggacgtcgtttgtcgttgtgtgcgccagactgagaagtggcgagaagtccacgggggtcgctggggagtccatgcctctggtttttgagggggtgattatgatccaggaaaggtgcgctgtaatggattatgttgtgcaagggtggtacacctctggccagagtaaaactattcgaatcagcgttctggaatccaattcggcctcctaagatagtgctgaattcaaacggtcgccaaatctccatatggcctacgttttgggcccacgagtactttatggaaagctctcggaatcctctttccaacgaatccaacctcattgtcaaattccatccgagtcatcggcattgaaaaaacaaggcacgcgtgtcggctagaccgtccgtctgcttgttcggaaccccactttatcgtatatcaattcatctttgtgcgtcttgtctatctagcaattcagttgctttctatctcgttcttacttgttctcgattgcttgcaggaatagggttgatctgcaccagcaagatcaacaacccacggagagggatatgcaagatcattggagataacatagcttgacatcgacatcttcgtcgagacataacgagtgatcaacatgatgctaatgaggtacgcgatgatgttctaactaagatcaatagagaatttcaaaagcatgtcttgtctgagaacaaaaaggttatgtgtgcctctagtgttttaattaaacatgcttcaaatgattggaaaacatctttataggcataacaaaataccacaatcttggaaagacctgaaatgatattttagagatgtttatgttcccatgtattatgctgatattctgctcatcaaactgcaatgtttaaaacaagatacctgtcgaaagggatcctctagagtcgacctgcaggcatgcaagcttattccccacactcaaatgtcacacacactcaagcttttaaccaagctcttacaagatcttaccaatgcaagtggaatggtgatgtacaccgactcaaccaagcagcccaatagagatctcgaaaccgacaccaaacaaaaattcgccaaggtgtttgacacaactcggaaccgtggaagagagggagggagtcggactcggccaaaggggcgagtgggactcggccaggaggtggagtggatggcagccgaatttggtagacacggtggcagcgacgactgtggtacaaaacgtgaccagaactcgaaactctaa

SEQ ID NO: 93332 - DNA, 300 bp, Oryza sativa
  unsure (1)..(300): unsure at all n locations
  Clone ID: PAT_MRT4530_91727C.1
gnnanncccntnttatgcccggnangagcgtnnacaggcngggntagcgctcaggaggatttccnttggtgtctaaagagtttgggaaagtnccttntcagctntaatctgncttggttcttcttttggcatctagcgggcgctcaggagtgggaagatngtcctggcgatttccttttgcaaagctgggatntcagttttataattaatcatgcctgtaatgatgcctncgctccatatgagctttcnnggnaccagatgattancatttccaaaaaaaaaaaaaaaaaaaaaaaaaaa

SEQ ID NO: 93333 - DNA, 6515 bp, Oryza sativa
  Clone ID: PAT_MRT4530_91728C.1
atggatcggcaatggatgtacgctgaccggcggtccaaagagtttattgacggcgtgcactattttttgagagtggccgaagctaacaggcaaaggggttttatttgttgtccatgcaataagtgtaagaatcagaaagagtattctgcatccaggactattcatttccacttgtttgagtcggggttcatgtcaagctataattgttgggacatcccacggagagcaaggtgttgaaatggaagaagatgaagtagaagatgacaatattccggactttgctcagtacgttggatttgaaggaaatcaaacaggcgaggaggaaagggatgctgatggtaacgacgttgcggatgatcttggtcagatgttgcaggacaccaagtaggactgcgaaagtgaaaagggagcccataaattggacaagatgttagaggactacagaacttcgttatacccaggttgcgagcaggggcacaaaaagttggataccactctggagttcttgcaatggaaggcaaaaaatggggttagtgacaaggcatttggcgatttattgaaactcgtcaagaacattcttccggagggaaacaaattgcccgagacaacgtacgaggctaagaagatagtctgcccgctaggactggaagttcagaagattcacgcatgtccgaatgattgtatcctatatcgcggtgaggagtatgagaacctagaagcatgccctgtttgcaaagcactacgatacaagattagacgagacgatccaggagaagttgacgggcagctaacaaagaagagaattcctgctaaggtgatgtggtatttccctataataccacagctaaggcgtttgttaggaacaaggggaatgctagaatgatgcgatggcacgctgaagagcgtcaacaggacgggatgctgagacaccccgccgatggttcgcaatggtgaaacatagacagaaaatttaaagaatttggaaaggacacacgaaacatacggtttggtttgagtatggatggcatgaatccttttggagagatgagcagcggccatagcacttggcccgttatgatgtgtatctacaacctccccccctggctatgcatgaagaggaagtacataatgatgccgattattattcaaggccccaagcaacctggtaacgacatcgatgtgtacctaagaccactggtcgaagatcttaagctgttgtggaagaaggaaggtgtccccgtgtgggacgaggacaaacaggaggagtttaacatacgagcgctgctgttcgtaaccatcaacgattggcctgcacttagcaacctatccggacagtccaacaaggggtacaaggcttgcactcactgtatggatgaaacagaaagtacgtatcttaagcactgtaggaaggttatatacatgggtcatcgtcgattccttgcagcaaaccacccggtacggaagaaaggcaagcactttgaacataaggctgaccaccgtacgaagcctaaacatcgcaacgggaaaacagtgtttgctatggttaaagatcttaaagtagtgttcggaaaggggcctagaagccagcctatagagagcgaagatggtcacgcggcgatgtggaaaaagaactctatattttgggagttaccctattgggaattcttggacgtacaccacgcaatcgacgtgatgcacctcactaagaacctttgcgtaaaccttcttggtttcctaggtgtatacggaaagtcgaaagatacactggaagcacgtaatgatttgaagcataaggaacaacgcggcgaccttcacccggaaccaaaggagaaaggaagccattacttaagtccagccagctacactcttagcaacgcagagaaggaaagtatgtttgaatgcttggagagcataaaggtaccgtctggatactccacgaatatcaagcgaataataagcattaaggagaagaagttcacaaacctaaagtctcatgactgtcacgtgttgataacacaactgctaccagttataataaggggtatccttccagacaatgtccgggcaacaataacaaagctatgtgcattcatgaacgcaatttcgcagaaggtcatcgatccggatagattagaagcccttcagaatgatgtggtgcaatgtctcgtcagttttgagttgatatttccaccttcatttttcaatataatgacgcatctgctttgtcaccttgtgaaagagatcagtattctcgggcctgtgtacctacacaacatgtttcctttcgagaggtacatgggcgttctgaagaagtatgttcgtaaccgtgctcgtccagaggcaagcatcgccaagggttatggaacagaggaggtcatcgaattttgcgtagaatttatcgaagatattcgcccaatcggggtacctgaatcacgccatgaagggagactacggggaaaggtagctctcggaaggaaagcaataatgacggtagacaacaatttattccgtaaagcccatttcacggttctgcaacaatcttcattggtagctccttacatcgaggagcacttggctctagttcgcgccaggaacatcggtaagtccaatgcatggattacacggcatcacattgatactttcctcgcatggatacgacaacatctcatgggtaacgagtcgatcaaccaacaacttgccttcctggcaaggggaccgtttgggtcgatcgcgacatttcagggatatgagatcaatgggtacacattctacacgagagcccaagacatgaagagcacgaaccaaaacagcgttgttcgtgttgatgccatgggacacgatggaacaactggcacgtattacggtgccatcgaggacatatgggaacttgactatggtcctctcaaggtccctctattccggtgccaatgggttaggttgactggtggaggcgtaatgattgatgacagtgggatgacaacggttgaccttaacaaggttggatactcggacaaaccttttgtccttgccaatgatgtaacacaagtctttttcgtgaaggacatgtctagcaaaggaaagaagggcagagggcctgacgagcctaagcgtcacgtggttctcccagcgcgccctcgtcttctccaccaacacttagaagtttttgcccgatcgatctctctcggcttctccttcgccgccactgcctagggatccccgctccgacgccgccaccgtatctcgccgtcgtctcgcactcgtcgtcgtcgccgccgcctccaccttctccgccgccgccgcatctctcaaatgtttcctatatgaacagatggctgatcgcaatgaggaacagatattgtacgatacaatcgcggagggaagtagccagtactggaacgaagaagaggggaacgaggatccaaaccagtatttgaacgaggaagggaacgtggagagggatgcggaggggaaccaggagtggcacgtggaaagggatgtggaggggaaccaggaggaggctagtggaagtcaaccctccgttggacagaagagagcacgcgggcaacgaggtgccgcgaagaagcttgaggggtcggcacatcataacggaagtggaataagctggacgacctagtgccccggcagaagccgccaagaactatgtatgtcacagcggttgggttgtgcgggataacgtgcctgtcagtaccgtgtactggcgaagaacaagggcacacggagatcatgagagctttgtcccagattcggagaaagagatgctgtggaccacaatgctcgagacattcacccttcccgcgggtacagaggacaaagtgaaaaggtggactctgaagaaaatggcagaacagtttcagagcttcaagggagagctatacaagaaatatatcctgaaggggcagacaccgaacttcaacacattcccaaagctaagggatcattgggacgagttcgttgcatataagacaggtgaacaagggcaggcgatgatggaaagaaacaaagaaaatgccgccaagaagaagtatcatcaccacttggggtcaggcggctatagcgtcgcgatgccgaagtgggaggagatggaggctagcttgcttgagaggggtatcgaaccggccaccgctaattggccggaacgatcaaagttctggtactatgctcacggtggaatgctcaacctagctgatggctcactggtcttcggcgatcagatacaagaggctgcgcgtcgactaacagacgcagtggaagcctcttctcagggcacgttccgaccggacagagagagggacaagctgtcactcgccctgcagactccagagcatctaggacgaacatgagggaaaggggtgattccttggaagattgggttcaaggaggacatccacacgtacaggagtcggatgaggagcaagagagataccgaggaaaatattgcagaatcttgagttcagggtatcgagctacgagctcagcatgcaagaggaggtggcaaggaaggttgatgaacgcatggccgcacatcagtccaatgatccccagccgaccattcctcctgcaatggtgagcccgtcaggaaaccgtagcaactgcgcctcaacggggcaggtaggatcacagagcatggacgccatgcaaacccaggacgaatccacctgccccgttgatgacatcactcagcggacaccatgtgagctgcatattcctttcaagaacttatcaataaaggtggcgtcgggcatggccatcccaacggacccttcaggtacttaccattgtaggccgattccagcaggatactccaaggtcgaagttgagttggtcgaaggcgcgtacgaggacctcgagctggattaccctggaggagacggtgagacgcatctacgagacacaagccatgccattattctatggcgcaggcggtacatcatcctccctgggcgacaagcggcgtctcgtgcaccatctcctccggctccgccatctcctcctcaggatcctgcaccgtctccacctcaggctcctgcaccgactcctcctcaggctcctgcaccgactcctcctcggtctcctacaccgactcctccgcaagctcctcttccggcaccttcaaagtcaagggccccccaagctccaccgcctgcccacagaaggacaacgaagaaggcgaaaattgacgccgccaagaacaaggacccggggtacaattgcacgcaagaggagcttgacgcttacgtggcatcagaagtcaagagacaattcaagcctcgaagtccagaaaagaagattcctatagacccgagtatcatgaacttcttcaggggtatgtctgcacctgccaaggaggccattaagctatcggactatgagcgaacgctgaagaaagcatcttctggaaagtccaaaccagtccctcagcttggagagcaaccaaaccaggagatcgagccgttggtgaccggtaaagaaatgacgatagaagaatttattactgacaccagtctaactacagatcaattgttaggagtcgcaccaatcgaaaaggcgaaagtgaaatacatgtacgaactcggtaaaccgcttgtcaagcctgagctgctgcagtccttacccacacaaatgtacaagttccatcagctgtacatggagatgagcgccaccggtagagagatgatcggagcgaggatcagggacacggacttcttgcaaggagatgacattctctggatcaatttcaagggaatctacgaactataccagctggacgccctcaacgtctctattatgagttgctggattttaatggagattcaaagggcccgacggcgggggttttcgatactggattcattgacccccggaaagtaaacgtcgcaatgctcgaccaatatccgcaagccacagaggacaatctcgtccatctcctgaaggcgcagcattacaagacgttcatactgttgccgtacaacacagaattccactgggtgcttttactcttcgacttggaggcctgcaccgtcaacgtatatgactcaatggataaaaaagagtctacgtttgataaggttttcgaacttatagacaggtgctatgcacgccttccccccaggtctacaaactgccgcaagaagaagtgtggtcacagcaacaagctgctgtcagttgaatacttgaatgggatgtctttaagtcttaacatgatagaactaccgctgcgtctgcagatctctgatatccaaatacgatatgtccgcttcccacgatactaccaaatgttgctaatagtgatcagatttacatattttaacatattcgatggcgctgaacgtaacatcccaaatcatgaattgctggtggccagatgcttgattggagttatcctgctcctgccacaaacaggaaatgaaattcatgaaatagacatttgcatgacatctggaatggttatcttctttgttgaatgttctttcaagaacttgcacctttttgtttaa

SEQ ID NO: 93334 - DNA, 2733 bp, Oryza sativa
  Clone ID: PAT_MRT4530_91729C.1
atgtcaacgcccggcgcaaacccgccctccccaacacctgcgaggatccaggaagaagcaaacccagccacagaggcaattgccgaaggtcatcccgggacaacggcggtccaacaacccgaaattcatggaacaacatacgtcgatgtcgggcgagacaagtgcaagcccacggcgcccaggactgtcattggaagatggtctaactgctgcgggctagtggcacgtgagaacttcgggatcctctataaagatatcgggaaggtcacagaagccgagaaagagcgagcttggacggcaatggagaaatggttcacatttccagccgaagcaaaggataggctcaagtggaaggcattccataagatgggcaaaggttggaagaattggaagtcgaagctcttcaccgagtttgtcaacccgcccggcaatcatacgccattcgatgaataccctcaaataaccgaagcggtgtgggaggaattctgctctctcaagaacacccaagagtttagggaatcaagcgaggcacatcgcctactgcaacagcggaatgagcacccgcatcggctaggcactgcatggtacatcggcaagtaggcaatatgggcccaagaagatgcagccgctgcagcagcgaatgtccctgccccgttttcagacatccctgaacaaagagctcgcaactgggcgcgggcaaggggtaaggtcaacccggacggctctgtcacatttgagaacaaaagtgatgctgtcgtctatcaggaactgttgggcttggttgctgaacaagcttcacaaagcgatgttgagtccacgccaaagaggcgtgaagatgacatcctcacaaaggcgctcggaaccaaaggacatcctggccggactaggggaattggtagcgatgtgccctggaagcatggactccctcagtacagctcccaatacaggaaacggaaagtctccaaggaagagagggacgctcgtttgaaggctgaacttaaggttgaggtcattcaagaactagaagctagcatgaatgcaagggtggaagaaagggttaacaaggtgctcgccgacatgaatataccccgagtcacaacacctgctgtgcaaccaactcctcgtgtacaacacgacgcgagtccgtcacagcataggagtagttgtgcatccacagaggtgccggcccctggtctcccgatcgcaccactagctgcagtggaccacatcgagggcgcagcacagtgtgtcctactagcgagagtccacccaactttcgctcctgaagtcgctgagggcatggctttcaagccctcggttacagacaaggtccacggcgcagacctgctagctgggtatgccaaggtgtccatcgatacagtaaaggacacctggtcaggctatccgctgcccgtgcccccaaatgatgaaatcatgactttgggcgatgcgcgcaagacgttcatacaatggcccaaagaagacatagttgtgaagatgactcctcgtccaagtcgaccgacggagcttacacctcccaagtgtaagctatcaattgaggctccccgtggaccggcattgtcagtacctcattctcctggtggagctgatatggacttggcagatatagctcaaagcttggctccaataaagaccacaagaaaggccgatagctccccaccacttgtcaagggccagaagcgtgaacgcggcaaggggaaggtcggggagttggcgccggagccaaaaaggggcaaggctgcgacgtcgatgccggtgagcaaatcggggaaggtcgtgagggcgccagcccaatttgagctaggcatgccattggtggaggacaatgtgttagctgtgatgggtattgcttgccgagagctacataagcaatacatggagctaagcaatgccaagcggaaaatgagggagtcatccatagttggacatcacgaccaccagccgttcctatcgtcgcctgcctatataactataggctttgatgacctcttcgaccttttcaggatccggaagttggacactggtcttctaaaatgctactcctttgaaatcaccaaggccttaaatatggcttggggcccatatgtggaaaagggtggtaggcacaaggagggcaagaatgaactttatcatgacaccaagtttgcatgcgcacaacagatcggagaccaatgtggtttccacgtgtgccacaacatgtcaacacttctaagagaggtgaaagatttcgaccctgaggttgtgcaggtcgatgacattatggctttaatccatttgtatccccgagtagccggttgcatcaacggtggcgatatcaagcgctcctactcggcgcacgtccatgtcgtcttcatcctcaacatccccctacagacgctgccgcttggtactcgggcgtgttttcacacctccgagcgcgtgcacacccacccgcaccgccgcacgctcaaccgggccacttatcttacagaaagctgggctacgagagaccaccaccaccgccacggcccgcgctgcgtcagccgacgaacccaccgtggccacgcccccggaggcatcgagggcagcacagttgcgccgcgccgacggtgccggacgagcagccgaccggccgtcgaccagtggctcccaccgagtccaggttcctcccgcggcgccacccaaaggcgcagccgcgcgaggtaccccgggcggcggctgcggcaagtgtag

SEQ ID NO: 93335 - DNA, 222 bp, Oryza sativa
  Clone ID: PAT_MRT4530_9172C.1
atgtggggccggaggcagttgatcccctatagtgacatcgcctgtcggttgctcctatcgcggcgtcaccctgttggcaggctgctcccatttcaacgccgcccctttgtctactcccgtcgcaacgacaaccgtcaagagaagaagagaggggatgagggaggaggcggaggtggagaaggagaagtcgagggacagagggagaaaagctctgttgagtaa

SEQ ID NO: 93336 - DNA, 342 bp, Oryza sativa
  Clone ID: PAT_MRT4530_91730C.1
atggcgatggcggcgctgcgtgaggcctcccgccgtctggtctccaggagggagtccccggcggcctacgcgcgccccttcctcctcacgcactcccggggcatcacctacaggctcttcatcggagggctgtcccaattcgcgaccgaggatagcctggcagaagctttctctcagtatggccaggtactagaagcaacaattgtcaccgataagatgaccaacagaccaaaaggattcggctttgtgaaatttgcctccgaagaagccgccaataaagcaaaggaagagatgaacggcaaggcaagctttttgaaacagtgtatttttagttcagcctag

SEQ ID NO: 93337 - DNA, 1137 bp, Oryza sativa
  Clone ID: PAT_MRT4530_91731C.1
gaagctccagctccactcccacaggcagctcagctggggtataagccaaacgtcttctcctcctagatcctttttcttcaactgaggttgattgattattgcaagaatgagcatatgacatactcaacaagccacacagcaaatatgcaagtgcacaaggataccaaaggatggcataatataggctcatttgcaaaagcagcatttagcaaaacatttaagagacgcactcacgaaccttcgcaacgacggaaacgacaagctaacacgcaaaacaaaagggaattattgcgtcatcaaaggcggtccgggtgcacgggacggtctaaggaaacgaacggccgagatcgattctatccaaaacgggcggccgagttcaaaatggtccacagcgggtctacggggacagcgacgatgacgtcatcaccggcggcggctcggcaacacatgctcgccggcgaacgacggcgcgacgacgcaaaaggaggacaccaacgggtagagagcgacgcggcgaactcaccgggcgacgaggttgaagcggcggcggtcttcgggtcgacggtgacggcggtgctccggcgtgctacagcggcggcgaagcggtggatggggacggcgacgcaacggcgaccacgatggcgacctccccgagcgacggcgacgactggagcgacggcggcgcacggctggaccgacggcaacgacggcgacggctagggctacgcggaggcggcgctagacgcgatggcgggctaaggcaaaggtggcggcggtggctaggaggcggcgacggaggcccacggtgaccggcggcgagaaggaaactctagggttagaggagagagatgaatccgaatccaactcaaatccactggtttccaaagaaaattagccaatgtttccaaaagagaaaaggaagaggagatctcaaggatcatttgccctcaatcaatttgaccggaaatagagaggggcagtgggtcccgcctgtcagcggctgagagagaggagggaggggcgcggcggactgggccggctgggccagatgcaagcagtccgaggagagggagaaagagagacttgggctgactttcggcccaaaaccaaaagaaagattttaaaacctttttctat

SEQ ID NO: 93338 - DNA, 2712 bp, Oryza sativa
  Clone ID: PAT_MRT4530_91732C.1
ttattcgccattagcaacaacctcagggtcgaaatctttcacctctcttagaagtgttgacatgttgtggcacacgtggaaaccacattggtctccgatctgttgtgcgcatgcaaacttggtgtcatgataaagttcattcttgccctccttgtgcctaccacccttttccacatatgggtcccaagccatatttaaggccttggtgatttcactgaaatcataatctttggacttattggagttaaggtaggtaaccctactccacttaggtacgatgactaggagaatccaatgtcgctcttggttgtgtgcgcacatgatgtactccttgtcttgatgggcccataaacaccggttgacatagtcaaccacctcagtgaagctctgtcgtaaattaacctcattcaccatggatggatcaaggaacccaacctgattaccatggcgacgactctcgatccaacacaacaaggagtagcattttagaagaccagtgtccaacttccggatcctgaaaaggtcgaagaggtcatcaaagcctatagttatataggcaggcgacgataggaacggctggtggtcgtgatgtccaactatggatgactccctcattttccgcttggcattgcttagctccatgtattgcttatgtagctctcggcaagcaatacccatcacagctaacacattgtcctccaccaatggcatgcctagctcaaattgggctggcgccctcacgaccttccccgatttgctcatcggcatcgacgtcgcagccttgcccctttttggctccggcgccaactccccgaccttccccttgccgcgttcacgcttctggcccttgacaagtggtggggagctatcggcctttcttgtggtctttattggagccaagctttgagctatatctgccaagtccatatcagctccaccgggagaatgaggtactgacaatgccggtccacggggagcctcaattgatagcttagacttgggaggtgtaagctccgtcggtcgacttggacgaggagtcatcttcacaactatgtcttctttgggccattgtatgaacgtcttgcgcgcatcgcccaaagtcatgatttcatcatttgggggcacgggcagcggatagcctgaccaggtgtcctttactgtatcgatggacaccttggcatacccagctagcaggtctgcgccgtggaccttgtctgtaaccgagggcttgaaagccatgccctcagcgacttcaggagcgaaagttgggtggactctcgctagtaggacacactgtgctgcgccttgcataaggtgaaagtttgaatttaatattggaatgtgtaaatgtcttttattagatatggattggataacaacaattacctcgatgtggtccactgcagctagtggtgcgatcgggagaccaggggccggcacctctgtggatgcacaactactcctatgctgtgacggactcgcgtcgtgttgtacacgaggagttggttgcacagcaggtattgtgactcggggtatattcatgtcggcgaggaccttgttaaccctttcttccacccttgcattcatgctagcttctagttcttgaatgacctcaaccttaagttcggccttcaaacgagcgtccctctcttccttggagactttccgtttcctatattgggagctgtactgagggagtccatgcttccagggcacatcgctaccaattccccgagttcggccaggatgttctttggttccgagcgcctttgtgaggatgtcatcttcgcgcctcttcggcgcggactcaacctcgctttgtgaagcttgttcagcaaccaagcacaacagttcctgatagacgacggcatcacttttgttctcaaatgtgacagagccgtccgggttgaccttaccccttgcccgcgcccaattgcgagctctttgttcagggatgtctgaaaacggggcagggacattcgctgctgcagcggctgcatcttcttgggcccatattgcctccttgccgatgtaccctgcggtgcccagccgatgcgggtgctcattccgttgttgcagtacgcgatgtgcctcgcttgattccctaaactgttgggtggtcttgagagagcagaattcctcccacaccgcttcggttatttgagggtattcatcgaacggcgtatgattgccgggcgggttgacaaactcggtgaagagcttcgacttccaattcttccaagctttgcccatcttttgaaatgccttccgcttgagcctatcctttgcttcggctggaaatgtgaaccatttctccattgccgtccaagctcgctctttctcggcttctgtgaccttcccgatatctttatggaggatcccgaagttctcacgtgccgctatcccgcagcagttagaccatcttccaatgacaatcctgggcgccgtgggcctaccactagcgtcaacctctcttataacttgcactgtggtcggccatatattttgtgaccgcggatttctactagacctacttgcacttgtcccgcccgacatcgacgtatgttgttcatgcggcaattcatgaatttcgggttgttggaccgccgttgtcgcgggatgaccttcggcaactgcctctgtggctgggtttgcttcttccttgatcctcgcaggtgttggggagggcgggtttgcgccgggcgttgacat

SEQ ID NO: 93339 - DNA, 1134 bp, Oryza sativa
  Clone ID: PAT_MRT4530_91733C.1
atggtgaacactcgcgccagtggaagtggaaacaataacaatgaagggaacccaattcttgctcaagttctggctcaacagactcagttaatgaacatgatgatacagcagatgcagaaccagctcaaccaagggaacaacaatgctccaccgccgcagaacaagttagctgattttcttcgtgtgaggccacctaccttttctagcactactaacccagtggaagcaggtgattggttgcacactattgagaagaagttggaactgctccagtgcacggatcaggagaaagttgttttcgcttcacatcagttgcaaggacctgcatcagaatggtgggatcattttcggatgaacagagcagaaggacaaccaatcacttgggtggagttcacggaagcattcaagaagacacacatacctgtaggagttgtttctttgaagaagcgtgagttcaggacattgaagcaaaaggatcataccgtggcagagtatcttcatgagttcaatcgtctggcacgttatgctccagaagatgtgcgtactgacgaagaaaggcaggagaagttcctggaaggcctgaaggatgaactgtcagttacattgatctcccatgactatgttgattttcagcagctggttgacaaagcaattcgacttgaagacaagaagaacaggatggataaccgtaaacggagaatgactgtattccaggaggcacaaggtagtagccagaggcagcatatcaggccactccaaattggtgaatcttcttccgctggtcaaggacagtcgcaacaattgaacatcgctggtgagatcaaatcagagactaatgaaagcaatgatgttaacatcgagcaagctaatcagccggtgccagttcagcaggaccagtctcaggagaataacactagtggaagggagcagcaggtatgtttcaactgttacaagccaggccactttgcaagagagtgtccgaagccgaagcgtcagcagccgcaaggtcaggtcaacaacattgtcgtcacaggagccaatgcagtgccagttgcgtcttcaagagttgcgtcttcaagtgttacagctcagccactagtttcaaagcagcagcagttttcattaaagccttag

SEQ ID NO: 93340 - DNA, 500 bp, Oryza sativa
  unsure (1)..(500): unsure at all n locations
  Clone ID: PAT_MRT4530_91734C.1
aatagtaattgatggatattttacaaaatgtatatggccacttccaagaggtttttgcatactgaagtgttgctgttccagacgaacaaaggttcaagtcatggccattacttctcaagcaagggcctacacagtgcagtttcagctggtggtggtcatctcaccttcctgtagtgaaaaaactctctaaactggagcaattgatcatagacgttcctctctctatctctctctctctntntctctctctctctctctctctctttctctaaaattaattgatcaagattgcctggggttttacagcaacgttattgggcgaagaaccgcttatggcgatcctggtggaaatcacaatatggcgactttcgggggcaacacgttcgcccgttggtttcactgcagtggcaaattccttggatctttttgtaaaaggtccagaggcttttgaataacccacaaaggtttttttttcattgttgaaaaagaaaacatttttt

SEQ ID NO: 93341 - DNA, 1379 bp, Oryza sativa
  Clone ID: PAT_MRT4530_91735C.1
atggtgaacactcgtgccagtggaagtggaaacaataacaatgaagggaacccaactcttgctcaagttctggctcaacagactcagttaatgaacatgatgatacagcagatgcaaaaccagctcaaccaagggaacaacaatgctccaccgccgcagaacaagttagctgattttcttcgtgtgaggccacctaccttttctagcactaccaacccagtagaagcaggtgattggctacacgctgttgagaagaagttggaattgctccagtgcacagatcaggagaaagtcgtgttcgtttcacatcagttgcaaggatctgcttcagaatggtgggatcatttccggataaacagagcagaaggacaaccaatcacttgggcggacttcacggaggcattcaagaagacacacatacctgtaggagttgtttctttgaagaaacgtgagtttagggcattgaagcaaaaggatcataccgtggcagagtatcttcatgagttcaatcgtctggcacgttatgctccagaagatcagctagttgacaaagcaattcgccttgaagacaagaagaacaggatggataaccgtaaaaggaaaatgactgtattccaggaggcacaaggtagtagccagaggcagcgtatcaagccactccaaattggtggatcttcttccgctggtcaaggacagtcgcaaccgttgaacatcggtggtgagatcaaattagagactaatgaaagcaatgaagttaacattgagcaagctaatcagccggtgccagttcagcaggatcagtctcaagagaataacagtagtggaagggagcagcagccgtgcgccgccgtcgctacggtcgtcgtcgtcactcgggaaggccaccgtcgggatcgccaagtcgtcgccgtcctcgtccgccgcttcgccgccgccgaagaccgccggagcaccgtcgccgccgtcgacccgatctccgccgccgcttcttcctcgtcgccggcgctgtccgttgcccttccgccgtggttttggtcaccggtgagttcgccgcgtcgccctctacccgttggtgccctccgttcgcgtcgccgcgtttcttcgttttgcgtgttagcttgtcgtttccgtcgttgcgaaggttcgcgagtgcgttctcttaaatgttttgctaaatgctgcttttgcaaatgagccaatattatgccatcctttggtatccttgtgcacttgcatatttgctgtgtggcttgctgagtatgtcatatgctcaccttgcaataatcaatcaacctcagttgaagaagaaggatccagaaggagaagacgtttggcttataccccagttgagctgcctgtgggagtggagccagagcttc

SEQ ID NO: 93342 - DNA, 171 bp, Oryza sativa
  Clone ID: PAT_MRT4530_91736C.1
atgcgcccatctattctgattgatctcatcacgaagccagtggctgcacagcgccaccggactcatgcccacaaagcaatcgcccccagcgagcgtggcgagagcggcgtcgagcctgggccggtggccgccctggggtccctggacggtgggggaaagaagtggcactag

SEQ ID NO: 93343 - DNA, 563 bp, Oryza sativa
  Clone ID: PAT_MRT4530_91737C.1
ccggccgggagggattggtggatcgatcgatggctcgtcggttcggtttcatggcgacgacgacggcgtgggcggcggtgatcatgcttcttcttgttgcagtcaccggcggccatggtggtaacctcgccgccggcgtcgagagagaaggcggcaagccgttcccgcctgtcccgacggagccattcccacctccaccggcgtcgacgacggctgaagttctccgggcggcgaagccatcgtcgacgaatccaccgtgctgggttgctccgccgacggagcctttcctgccggctccgccgtgccaccggcgaccccccgccgggacgccggagacgaagacgaacacctcgccgtcgacattggcgtccacggtggtctagccgtacattcgacagtcgaaatccctatctaaattttgctttcgtttttctataataataataatgagaatatcaagaaatccatgaggagattgccatatatgaaaattggatggatatatgcagtttttttgctgtaatcatttaaaaaacaaaaaaaaaaaaaaaaaacccgcggcc

SEQ ID NO: 93344 - DNA, 666 bp, Oryza sativa
  Clone ID: PAT_MRT4530_91738C.1
atggagtttggtgttgtgatggaaatgcacatgctagatgctaggagcgacatgatcaagatcgcaagggtggcggggaggatgaccgggagggcggtcgggcgcctcatgttgttccgcaggcagatggatgagatcctggagcagactgcagcaaagcaggttaacaaggagcttaaagatgctatgacacagctagattcaattcgttatgaagtccagaacttatctaggtttactcctggacagttcatgaggcagcataaccctggcccagttgaaggtaaagaagctgatgtagctgttatccccacaatgttggcatcaaaggtttgcagctctagtttctgctcgccgtcgacgggccgtctcgccgaccgccggccgccgcagggcgccgccgcgccgcttccggcgatggcacggaggccgtcccgcgtggcgcccccgggatactcccccgtcggaggaggccgtgggacaggaagcgccgccccacgcagtaccggccgctgccaggctctcccgccggactggacgctcgtcgccgccggcgccacggtcgacgcgtcggcgcaggccgaggatgcggatgaggaggaaccggagccggtggccgctccggtcgtcgaggtggtggcggccccggccgccgccgacgactga

SEQ ID NO: 93345 - DNA, 495 bp, Oryza sativa
  Clone ID: PAT_MRT4530_91739C.1
atggcgacaagggtgacgacggcgatggacatggccaccacaaatcgctgcctcctccctctccaacactcctttgcccgagacgtctgtgtctccctccacctcgcaccgccatcggcctcctcctgcgcggagctccacatgaacgacgatgtcacagtggggcccgcagtcctcgccgccaacaacgcctggtcagtggctatgaccaaggaaagagcggcaaagagtggtcacttctctccggcgagctccttcacctcccttcctccctcaccacaccaccatcgcctcctctggtccagcagctgtctcgtcaacctcgtcgccgatgaccacctcgacaccctacatagcgaggaaggccttcgtgaagagcctcggtggacctgcgtggttttgtctggtgctccgaacttcctgtacgaacgcgtatgggtcgacccagtcggggaacagcggggaggcgtcaccagcgacaagatttgggtttga

SEQ ID NO: 93346 - DNA, 708 bp, Oryza sativa
  unsure (1)..(708): unsure at all n locations
  Clone ID: PAT_MRT4530_9173C.1
atgggtggcgaccaccaccgccttcctccctcctccgcctcgccaccgcccgagctggggggcgtggttggcgccagggcggcgcggagaccggcaggcagggncggcgtcgcggtgggcgggcgtcggcagcggcggctcgctcccgtcgtggtcgcggcgccaccgtcggcctctgtcaagcgtccgtccgcggccagatccgtcgcctccacaccggatggcagctggtcggtggggcggctgcgtgtggactccagcaagcgcggcggcggctcgctggcggccagctcctgctcggcatggggcttctactgccattggtggatctcgtcgtcgttgatgggcggcgatgtgtggatgtggagttggtgggatgacgacttgtgctggcgtgaagcaggaatggggcttgacgtccgtgacggtgacttcttcattgtcggccgagtgttctccctcccttcggtttcccccttctttggccggacccttttcttgtcgtggggaatgctagggggagggtggaggcttcggcttactgtagaagtttacggcggatggatggcgtttcgagggtggcaaaggtcgaagctgctcgctgatgggggtgcggcgacgcttggcaacgatgacatgttgcagtctcttctaagaagttctggtgcaggccgtgtgaaggaagtggctcctcggtggcttggttga

SEQ ID NO: 93347 - DNA, 331 bp, Oryza sativa
  Clone ID: PAT_MRT4530_91740C.1
ggacggcggcggtggggcgctcctcgtctcctcgcgcttggacagcctggggagccgctcggagatgggctggtggcggggtcggcggtggggtcggcggcggcagcggcggggtcgatgacggcggcggggacgggcgacggtggcggctgaggtgagtgcgccgggtggtgatgtgggtggcgacggctttgggacggcggtggtggaggccgcggatccggcggcggtgcggcgcccggcggtggcgtgagcacgcaggctccccgcggcggtcactggcgtcctccggcgcccctttaggcgttggcccggcgttggtggtgagggg

SEQ ID NO: 93348 - DNA, 286 bp, Oryza sativa
  Clone ID: PAT_MRT4530_91741C.1
cagggaattaagtttggttcagtgcgtgtaatagctcgctagccaggatgctacaatcaattgttgcgggaacaacacaatccgacgttggtacagtagaaaagtaatcggcgtcacgcatggggctactgcctgacacacagagactaaaatcgttgcgattctgcccttatcaatgtaagtccaacaaagctccaaggcgacctctatttactgagatcgggataatgaacaatgtctactattttcaactgtacgaaacaacatatgcaatttgctgctatat

SEQ ID NO: 93349 - DNA, 186 bp, Oryza sativa
  Clone ID: PAT_MRT4530_91742C.1
tactgcgtgctggatggccagacccgagagcacgctcttgttgctttcactctaggagtgcagcaaatgatctgctgttgcaacacgatggatgccaccactcccaagtactccaatgcccgctatgaagaaatcgcgacggaagtgtcatgctacctgaagaaggtctgcttcaaccctgacaag

SEQ ID NO: 93350 - DNA, 594 bp, Oryza sativa
  Clone ID: PAT_MRT4530_91743C.1
atggccggcctcgacaccgacacgtccacgtccaccacgtcgaatatccatggctccatggcccatgcaagcagacgcgcgcggcggtggcgctgtacatgccgcaggagtgcaaactgcaaaggcaagagcaagttcgtcctggagcaccaggccatgtgggagaaggaagggaggaacaaaggctacgacaccaccgtgcaccgctggcgctttgccaccgtgcctgaaggcaaaatccttgccggctgggagaaatcggacattctgccactgtcaaagagggatttcctagtggccgacgacgcgccaagcctgcagcacctcggctgcgacggacggggtcttgccgtcttggtatgcctcacggacgacgagctgaaagtccaagacaaggtgtactatgatgggttgttggagagcaggtgggcagaggacactggctcatcctatgctccaaggacggcggcggtggcgagctccgtcactggacgacggcatgaccaacgtggacagaggcacgatggcggtgatgaggagcacagcggcggtaaggtgccacagggccaggacagtggcgaagctaggatttga

SEQ ID NO: 93351 - DNA, 233 bp, Oryza sativa
  Clone ID: PAT_MRT4530_91744C.1
tcgttctccctcgcaaggggtctcccacgcatcgtcgtccgccgctgacgcgtgggacccaccccttccaagatatacgaggccttctacaagaatctcaagcttggcatccattatgactccaccaacaggaccaatattgctgagctcctgaggtataactccaccaagagtaatgatgagatgaccagacacaaagactacacaacccaaaagaaagagggccagattga

SEQ ID NO: 93352 - DNA, 402 bp, Oryza sativa
  Clone ID: PAT_MRT4530_91745C.1
atggatgagggtggcgggggaaaggatgcagaatttgccagagctattgaaggaagggaaagcagctggaggcggtggagaggggtgaccaatgcacgcgttgggagcgagtactggcagtggtggttcgatgggaggaggaagtggattaagataagccatcaagaagtgactggtggattaggaaaatacattacagataatcatgtgttcgtaggctttgacactacaccaatggtggcccccgccatgagcccatttatccacatattgacatcacttagttttatcccttattcacatagatgtcgtaacattaatgttcaagatacttgctcttcctcaatcattccctatacaaatcgcatgagcatcgatattcgtacaagggtgaatagctaa

SEQ ID NO: 93353 - DNA, 8661 bp, Oryza sativa
  Clone ID: PAT_MRT4530_91746C.1
atggtggagaggcgggcggcggcgctcgccattgtggcgctggcggagaggcgaagctcttttctcacagaaaattgcaaatcaaacataaaactaatgcgctcaagaaaggccattaagtgcttcttgccgcgatggtgcaaactctatgcgcgatgcatattgggaggccatgatgcccaacctgaagccaccggtgaccacgacggcacgagctttggagtacagggaggagatcctcagagcgctgcgccgctgcctccgggcctgtccgcatgcatggatcggcaatggatgtacgctgaccggcggtccaaagagtttattgacggcgtgcactattttttgagagtggccgaagctaacaggcaaaggggttttatttgttgtccatgcaataagtgtaagaatcagaaggagtattctgcatccaggactattcatttccacttgtttgagtcggggttcatgccaagctataattgttggacatcccacggagagcaaggtgttgaaatggaagaagatgaagtggaagacgacaatattccggactttgctcagtatgttggatttgaaggaaatcaaacgggcgaggaggaaatagctgctgatggtaacgacgttgcggatgatcttggtcagatgttgcaggacgccagggaagactgcgaaagtgaaaaggaggcccataaattggacaagatgttggaggaccacagaacttcgttgtacccaggttgcgagcaggggcacaaaaagttggataccactctggagttgttgcaatggaaggcaaaaaatggggttagtgacaaggcatttggcgatttattgaaactcgtcaagaacattcttccggggggaaacaaattgcccgagacaacgtacgaggctaagaagatagtctgcccgttaggactggaagttcataagattcacgcatgtccgaacgattgtatcctatatcgcggtgaggagtatgagaacctagaagcatgccctgtttgcaaagcactacgatacaagattagacgggacgatccaggagaagttgacgggcagctaacaaagaagagaattcctgctaaggtgatgtggtatttccctataataccacggctaaggcgtttgttcaggaacaaggggaatgctagaatgttgcgatggcacgctgaagagcgtcaacaggacgggatgctgagacaccccgccgatggttcgcagtggcgaaacatcgacagaaaatttaaagaatttggaaaggacgcacgaaacatacggtttggtttgagtacggatggcatgaatccttttggagagatgagcagcggccatagcacttggcccgttacgatgtgtatctacaacctccccccctggctatgcatgaagaggaagtacataatgatgccgattattattcaaggccccaagcaacctggtaacgacatcgacgtgtacctaagaccactggtcgaagatcttaaacagttgtggaagaaggaaggtgtccccgtgtgggacgaggacaaacaggaggagtttaacctacgagcgctgctgttcgtaaccatcaacgattggcctgcacttagcaacctatccggacagtccaacaaggggtacaaggcttgcactcactgtatggatgaaacagaaagtacgtatcttaagcactgtaggaaggttgtatacatgggtcatcgtcgattccttgcagcaaaccacccggtacggaagaaaggcaagcacttcgaacataaggccgaccaccgtacgaagcctaaacatcgcagcgggaaaacagtgtttgctatggttaaagatcttaaagtagtgttcggaaaggggcctggaagccagcatatagagagcgaagatggtcacgcggcgatgtggaaaaagaactctatattttgggagttaccatattgggaattcttggacgtacgccacgcaatcgacgtgatgcacctcactaagaacctttgcgtaaaccttcttggcttcctaggtgtatacggaaagtcgaaagatacactggaagcacgtaatgatctgaagcatatggaacaacgcggcgaccttcacccggaaccaaaggagaaaggaagccattacttgagtccagccagctacactcttagcaaggcagagaaggaaagtatgtttgaatgcttggagagcataaaggtaccgtctggatactccacgaatatcaagcgaataataagcacgaaggagaagaagttcacaaacctaaagtctcatgactgtcacgtgttgatgacacaactgctaccagttgtaataaggggtatccttccagacaatgtccgggcaacaataacaaagctatgtgcattcatgaacgcaatttcgcagaaggtcatcgatccggatagattagaagcccttcagaatgaagtggtgcaatgtctcgtcagttttgagttgatatttccaccttcatttttcaatataatgacgcatctgctttgtcaccttgtgaaagagatccgtattctcgggcctatgtacctacacaacatgtttcctttcgagaggtacatgggcgttctgaagaagtatgttcgtaaccgtgctcgtccagaggcaagcatcgccaagggttatggaacagaggaggtcatcgaattttgcgtagaatttatcgaagaccttcgcccaatcggggtacctgaatcacgccatgaagggagactacggggaaagggaactctcggaaggaaagcaataatgacggtagacaacaatttattccgtaaagcccatttcactgttctgcaacactcttcattggtagctccttacatcgaggagcacttggctctagttcgcgccaggaacatcggtaagtccgatgcatggattacacggcatcacattgatactttccccgcgtggctacgacaacatctcatgggtaacgagtcgatcaaccaacaacttgccttcctggcgaggggaccgtctgggtcgatcgcgacattccagggatatgagatcaatgggtacacattctacacgagagcccaagacatgaagagcacgaaccaaaacagcgctgttcgtgtcgatgccatgggacacgatggaacaactgccacgtattacggtgccatcgaggacatatgggaacttgactatggtcctctcaaggttcctctgttccggtgccaatgggttaggttgactggtggaggcgtaatgattgatgacagtgggatgacaactgttgaccttaacaaggttggatactcggacgaaccttttgtccttgccaatgatgtaacgcaagtctttttcgtgaaggacatgtctagcaaaggaaagaagggcagagggcctgatgagcctaagcgtcaagtggttctcccaggcaaaagaaaaatcgtcggagttgaggacaagactgacgaggattacgatcagttggatgggcaaccccctttcacggtgacgattgaccctagcatcctcctatcaaatgaagacaccccttactcacgcagcgatcacaaggagggaacaataatggctgaccgcgatgaggaacagatattgtacgatacaatcgcggagggaagcagccagtactggaatgaagaagaggggaacgaggatccaaaccagtacttgaacgaggaagggaacgtggagagggatgcggaggggaaccagcaggggcacgtggaaagggatgtggaggggaaccaggaggaggaggctagtggtagtcaaccctccgttggacagaagagggcacgcgggcaacgaggtgcagcgaagaagcttgagggtcggcacatcataacggaagtggaagaagatggacgtcctagtgccccggccgaagccgccaagaactatgtacgtcacagcggttgggttgtgcgggataacgtgcctgtcagtacggtgtactggcgaagaacaagggcacgcggagatcatgagagctttgtcccagattcggagaaagagatgctgtggaccacaatgctcgagacattcacccttcctgcgggtacagaggacaaagtgaaaaggtggactctgaagaaaatggcagaacagtttcagagcttcaagggagatctgtaccagaagtatatactgaaggggcagacaccgaacttcgacacattcccaaagctaagggatcactgggacgagttcgttgcatataagacaggtgaacaagggaaggcgatgatggaaagaaacaaagaaaatgccgccaagaagaagtaccatcaccacttggggtcaggaggctatagcgtcgcgatgccgaagtgggagcagatggaggctagcttgattgagaggggtatcgaaccggcaacagccaattggccggaacgatcgaagttctggtactatgctcacggtggaacgctcaacccagctgatggctcactggtcttcggctatcagatacaagaggctgcgcgacgactaacagatgcagtggaggcctcctctcagggcacgttccgaccagacagagatagggacgagctgacactcgccctgcagactccagagcatccaggacgaactcgagggaaaggggtgattccttggaagattggtttcaaggaggacatccacacgtacaggagtcggatgaggagcaagagagataccgaggcgaagattgcagacctagagttccgggtatcgagctacgaactcaacatgcaagaggaggtggcaaggaaggttgatgaacgcatggccgcacatcggtcccatgatccccagccgaccattcctcctgcaatggtgagcccgtcaggaaaccgtagcagctgcgcctcaacggggcaggtaggatcacagagcatggacgccatgcaaacacaggacgaatcgacctgtcccgttgatgacatcactcagcggacaccatgtgagctgcatattcctttcaagaacttatcaataaaggtggcgtcgggcatggccatcccaacggacccttcaggtacttaccactgcaggccgattccagcaggatactccaaggtcgaagttgagttggtcgaaggcgcgtacgaggacctcgagctggattaccctggaggagacggtgagacgcatctacgagacacatgccatgccattattctatggcgcaggcggtacatcatcctccctgggcgacaagcggcgtctcgtgcaccatctcctccggctccgccatctcctcctcaggatcctgcaccgtctcctcctcatgctccgccagcaccgtctccacctcaggctccagcatcgactcctcctcaggatcctgcaccgactcctcctcaggatcctgcaccgactcctcctcgtgctcctacacctactcccccgcaagctcctcttccggcaccttcaaagtcaagggcccccccagctccaccgcttgcccacacaagggcaacaaagaaggcgaaagttgacgccgccaagaacaaggacccggggtacgattgcacgcaagaggagcttgacgcttacgttgcatcagaagtcaagagacaattcaagcctcgaagtccagaaaagaagattcctatagaccccagtgtcaggaacttcttcaggggtatgtctgcatctgtcaaggaggccatcaagctatcggactatgagcgaacgctgaagaaagcatcttctggaaagtccaaaccagtccctcagcttggagagcaaccaaaccaggagatcgagccgttggtgaccggtaaagaaatgacgatagaacaatttattactgacaccggtctaactacggatcaattgctaggagtcgcaccaatcgaaaaggcggaagtgaaatacatgtacgaactcggtaaaccgcttgtcaagcctgagctgctgcagtccctacccacacaaatgtacaagttccatcagctgtacatggagatgagcgccaccggtagagagatgatcggagcgaggatcagggacacggacttcttgcaaggagatgacattctctggatcaatttcaggggaatctacgaactataccagctggacgccctcgacgtctctattatgagttgctggattttaatggagattcaaagggcccgacggcggagggttttcgatactggattcatcgaccctcggaaagtaaacgtcgcaatgctcgaccaatatccacaagaaacagaggacaatctcgtccatctcctgaaggcgcagcattacaagacgttcatactgttgccatacaacacagaattccactgggtgcttttactcatcgacctggaggcctgcaccgtcaacgtatatgactcaatggataaaaaagagtctacgtttgacaaggttttcgaacttatagacagggcttggtatcggttccgtcatttggtccgcggcaaatggagagaaagacttaggcggaagttcaaatttccttgcgcaaagcaaaagcagggaactaacttgtgcggctattacgtgtgcgagtattgccactgccttgcagaccaaatcatcaccacaagagagctcgattttattcgcatgagggataacctgaccacacacaaggaatttatcgcggcggttcaagaacaactcatgggattcatcaacgaagaaatccttgatcccaagggtgaattctactacgacggaaacacaattcaccggtccttagcttctgagctagcagcggagtgcataggattacaagcatttacaccaaattggtatagggatattaagtctaaaaaggatatagaaaaaattgttcaaagattagaggatatccaaattataggagaaattcctatgaaatattgggagaaaaatgctatcgagtgtaaaattaatataataaacccagaatatattattaagaccagcccaatagaagcaactccgaaagatatagaagaatttaagatgcatatagaagaactgctgaaactaggagcaataagagagagtagaagtccacataggtctgcagcatttatagtaagaaatcatgcggaagaagttagaggtaaatctaggatggtcataaattataaaaggctaaatgataatactatagaagatgcctataatatcccaaataagcaagaatggattaataggatacaaggtagcaaatatttctcgaaatttgacttaaaagctgggttttggcaagtaaaaatggcagaagagtctatagaatggactgcattcacctgtccccagggacactatgaatggctagtaatgccactaggattaaaaaatgcacctgccctatttcaaagaaaaatgcaaaacatttttaacgataatcaagaatttgtgttagtatatatagatgacttgttaatattttcaaaaacttataaggatcatattgctcacctagaattattttttagaaaggttgagcaaaatggtttaatcctatcaaaaaagaagatggagatatgcaaagaaaaagttaacttccttggacatgaaataggagaaggcaaaattcatttgcaagaacatattgctaagaaaattttacaatttcctgatgctatgaatgacaaaaagaaattacagcaattcctaggacttgtaaattatgctagaaatcacatcaacaatttagcaaagctagcaggacctttatacactaaattaagaaaaaatggtcagaaatattttaattctgaagacattaaattagtaagattaataaaagaaaaagtgaaagaactaaaacctctagaattaccattagaagaaagttactttatcattgaaaccgatgcatcacaacaaggtatgaaaagatcaatgaattacgccggagtcgagtgcttcacatttggagatgacaacaaactcagaatattcccaccaaattcatataaatttaagccaaaggaccatataatcctagatgaagttcaagagtgcatcttggataatttctggtaccaatacaataataaaagggaagaaaaagggtatttgttatcaatattgaatagcctctctgaatattttcacctaataaatgggtcattaatgcctgccaatgaagatcatgaagtaatccaacaaaagcctatatatgtagtatttgatggaaagctccctggggtctacatttcttttgaagaaattgtggctcaaaaaatagatgctaaattaatgggaggaatatcttggaagaaatataaggatattgatgaagcattaagccaagctagaaaaatattaggaataaattattatctagagcctgctgcaaaagaatatattcaaaaatgcaaaaaagctaaaggaaagaagacttcagaaatacccattaagatgactataaaagaagaagggttttttaaaaaacccacatacaaggaatgcttaacaaaaggagtggatccattagatggggaatatattgattggaagataatagaaaaatttgaagaagcctccccacagttaaagaaggaattgaaggaagaaatacttaaagaattaaaacaagaaatggatcagaaatttgagcaaataaaaaaggcagtagatgagaaattagaagtttctttttctgatttggacacaatggatcttggtggccatgggcaaccagatgaataa

SEQ ID NO: 93354 - DNA, 502 bp, Oryza sativa
  Clone ID: PAT_MRT4530_91747C.1
atttcaattgtaatgggggggcctccttgctgccgctataactctggtgcattgaaatttgtgaaaatttcgtgcgtaacattataagttaattaactgaaaatccttccaaccgtacaaatttgataattttactgtcgaagaacctgcaatctcatgaaatttacagttcggtaatttaggtaactacagatgaagctatgatcattcttagctgaggtgcaagcgaagcgaaaacccgacgtgacgatacagtagttgcagtgttctgaacgacctaacaagcaagcaagtcaaccaaaggtccgatagggcgtcgaaacaaagcctgaaccgaagtagcagtcgaaagttcagtaaactgaacgcgatggaattggacgagatggaaaaatcggaccaaggaagctgctggcctgcggcgtgcgggcggtggcggcggcggcggcggccatcgccgccgcggcggtggggggtgggacgcgatgctctcccctcgtgc

SEQ ID NO: 93355 - DNA, 6758 bp, Oryza sativa
  Clone ID: PAT_MRT4530_91748C.1
atgggaagaagcttatgtgcaagcagctttgtggccgtagggcttgttgttcttgtgtgttcagcggcagcagctgctgctgagacttatgtcgtgggagactccaagggatggggcttctccgtcgcatggatcggcaatggatgtacgctgaccggcggtccaaagtttattgacggcgtgcactattttttgagagtggccgaagctaacaggcaaaggggttttatttgttgtccatgcaataagtgtaagaatcagaaggagtattctgcatccaggactattcatttccacttgtttgagtcggggttcatgccaagctataattgttggacatcccacggagagcaaggtgttgaaatggaagaagatgaagaggaagacgacaatattccggactttgctcagtatgttggatttgaaggaaatcaaacgggcgaggaggaaatagctgctgatggtaacgacgttgcggatgatcttggtcagatgttgcaggacgccagggaggactgcgaaagtgaaaaggaggcccataaattggacaagatgttggaggaccacagaacttcgttgtactcaggttgcgagcaggggcacaaaaagttggataccactctggagttgttgcaatggaaggcaaaaaatggggttagtgacaaggcatttggcgatttattgaaactcgtcaagaacattcttccggggggaaacaaattgcccgagacaacgtacgaggctaagaagatagtctgcccattaggactggaagttcataagattcacacatgtccgaacgattgtatcctatatcgcggtgaggagtatgagaacctagaagcatgccctgtttgcaaagcactacgatacaagattagacgggacgatccaggagaagttgacgggaacaaggggaatgctagaatgttgcgatggcacgctgaagagcgtcaacaggacgggatgctgagacaccccgccgatgtttcgcagtggcgaaacatcgacagaaaatttaaagaatttggaaaggacgcacgaaacatacggtttggtttgagtacggatggcatgaatccttttggagagatgagcagcggccatagcacttggcccgttacgatgtgtatctacaacctccccccctggctatgcatgaagaggaagtacataatgatgccgattattattcaaggctccaagcaacctggtaacgacatcgacgtgtacctaagaccactggtcgaagatcttaaacagttgtggaagaaggaaagtgtccccgtgtgggacgaggacaaacaggaggagtttaacctacgagcgctgctgttcgtaaccatcaacgattggcctgcacttagcaacctatccggacagtccaacaaggggtacaaggcttgcactcactgtatggatgaaacagaaagtacgtatcttaagcactgtaggaaggttgtatacatgggtcatcgtcgattccttgcagcaaaccacccggtacggaagaaaggcaagcacttcgaacataaggccgaccaccgtacgaagcctaaacatcgcagcgggaaaacagtgtttgctatggttaaagatcttaaagtagtgttcggaaaggggcctggaagccagcatatagagagcgaagatggtcacgcggcgatgtggaaaaagaactctatattttgggagttaccatattgggaattcttggacgtacgccacgcaatcgacgtgatgcacctcactaagaacctttgcgtaaaccttcttggcttcctaggtgtatacggaaagtcgaaagatacactggaagcacgtattgatctgaagcatatggaacaacgcggcgaccttcatccggaaccaaaggagaaaggaagccattacttgagtccagccagctacactcttagcaaggcagagaaggaaagtatgtttgaatgcttagagagcataaaggtaccgtctggatactccacgaatatcaagcgaataataagcatgaaggagaagaagttcacaaacctaaagtctcatgactgtcacgtgttgatgacacaactgctaccagttgtaataaggggtatccttccagacaatgtccgggcaacaataacaaagctatgtgcattcatgaacgcaatttcgcagaaggtcatcgatccggatagattagaagcccttcagaatgaagtggtgcaatgtctcgtcagttttgagttgatattttcaccttcatttttcaatataatgacgcatttgctttgtcactttgtgaaagagatccgtattctcgggcctatgtacctacacaacatgtttcctttcgagaggtacatgggcgttctgaagaagtatgttcgtaaccgtgctcgtccagaggcaagcatcgccaagggttatggaacagaggaggtcatcgaattttgcgtagaatttatcgaagaccttcgcccaatcggggtacctgaatcacgccatgaagggagactacggggaaagggaactcttggaaggaaagcaataacgacggtagacaacaatttattccgtaaagcccatttcactgttctgcaatactcttcattggtagctccttacatcgaggagcacttggctctagttcgcgccaggaacatcggtaagtccgatgcatggattacacggcatcacattgatactttccccgcgtggctacgacaacatctcatgggtaacgagtcgatcaaccaacaacttgccttcctggcgaggggaccgtctgggtcgatcgcgacattccagggatatgagatcaatgggtacacattctacacgagagcccaagacatgaagagcacgaaccaaaagagcgttgttcgtgtcgatgccatgggacacgatggaacaactgccacgtattacggtgccatcgaggacatatgggaacttgactatggtcctctcaaggttcctctgttccggtgccaatgggttggatactcggacgaacattttgtccttaccaatgatgtaacgcaagtctttttcgtgaaggacatgtctagcaaaggaaagaagggcagagggcctgatgagcctaagcgtcaagtggttctcccaggcaaaagaaaaatcgtcggagttgaggacaagactgacgaggattacgatcagttggatgggcaaccccctttcacggtgacgattgaccctagcatcctcctatcaaatgaagacaccccttactcacgcagcgatcacaaggagggaacaataatggctgaccgcgatgaggaacagatattgtacgatacaatcgcggagggaagcagccagtactggaatgaagaagaggggaacgaggatccaaaccagtacttgaacgaggaagggaacgtggagagggatgcggaggggaaccagcaggggcacgtggaaagggatgtggaggggaaccaggaggaggaggctagtggtagtcaaccctccgttggacagaagagggcacgcgggcaacgaggtgcagcgaagaagcttgagggtcggcacatcataacggaagtggaagaagatggacgtcctagtgccccggccgaagccgccaagaactatgtacgtcacagcggttgggttgtgcgggataacgtgcctgtcagtacggtgtactggcgaagaacaagggcacgcggagatcatgagagctttgtcccagattcggagaaagagatgctgtggaccacaatgctcgagacattcacccttcctgcgggtacagaggacaaagtgaaaaggtggactctgaagaaaatggcagaacagtttcagagcttcaagggagatctgtaccagaagtatatactgaaggggcagacaccgaacttcgacacattcccaaagctaagggatcactgggacgagttcgttgcatataagacaggtgaacaagggcaggcgatgatggaaagaaacagagaaaatgccgccaagaagaagtaccatcaccacttggggtcaggaggctatagcgtcgcgatgccgaagtgggagcagatagaggctagcttgattgagaggggtatcgaaccggcaacagccaattggccggaacgatcgatgttctggtactatgctcacggtggaacgctcaacccagctgatggctcactggtcttcggcgatcagatacgagaggctgcgcgacgactaacagatgcagtggaagcctcctctcagggcacgttccgaccagacagagatagggacgagctgacactcgccctgcagactccagagcatccaggacgaacacgagggaaaggggtgattccttggaagattggtttcaaggaggacatccacacgtacaggagtcggatgaggagcaagagagataccgaggcgaagattgcagacctagagttccgggtatcgagctacgaactcaacatgcaagaggaggtggcaaggaaggttgatgaacgcatggccgcacatcggtcccatgatccccagccgaccattcctcctgcaatggtgagcccgtcaggaaaccgtagcagctgcgcctcaacggggcaggtaggatcacagagcatggacgccatgcaaacacaggacgaatcgacttgtcccgttgatgacatcactcagcggacaccatgtgagctgcatattcctttcaagaacttatcaataaaggtggcgtcgggcatggccatcccaacggacccttcaggtacttaccactgcaggccgattccagcaggatactcgaaggtcgaagttgagttggtcgaaggcgcgtacgaggacctcgagctggattaccctggaggagacggcggtacatcatcctccctgggcgacaagcggcgtctcgtgcaccatctcctccggctccgccatctcctcctcaggatcctgcaccgtctcctcctcatgctccgccagcaccgtctccacctcaggctccagcatcgactcctccttaggatcctgcaccgactcctcctcgtgctcctacacctactcccccacaagctcctcttctggcaccttcaaagtcaagggcccccccagctccaccgcctgcccacacaagggcaacgaagaaggcgaaagttgacgccgccaagaacaaggacccgggcctcgaagtccagaaaagaagattcctatagacccagtgtcaggaacttcttcaggggtatgtctgcatctgtcaaggaggccatcaagctatcggactatgagcgaacgctgaagaaagcatcttctggaaagtccaaaccagtccctcagcttggagagcaaccaaaccaggagatcgagccattggtgaccggtaaagaaatgacgatagaacaatttattactgacaccggtctaactacggatcaattgctaggagtcgcaccaatcgaaaaggcggaagtgaaatacatgtacgaactcggtaaaccgcttgtcaagcctgagctgctgcagtccctacccacacaaatgtacaagttccatcagctgtacatggagatgagcaccaccggtagagagatgatcggagcgaggatcagggacacagacttcttgcaaggagatgacattctctggatcaatttcaggggaatctacgaactataccagctggacgccctcgacgtctctattatgagttgctggattttaatggagattcaaagggcccgacggcggagggttttcgatactggattcatcgaccctcggaaagtaaacgtcgcaatgctcgaccaatatccacaagaaacagaggacaatctcgtccatctcctgaaggcgcagcattacaagacgttcatactgttgccatacaacacagaattccactgggtgcttttactcttcgacctggaggcctgcaccgtcaacgtatatgactcaatggataaaaaagagtctacgtttgacaaggttttcgaacttatagacagggcttggtatcggttccgtcatttggtccgcggcaaatggagagaaagacttaggcggaagttcaaatttccttgcgcaaagcaaaagcagggaactaacttgtgcggctattacgtgtgcgagtattgccactgccttgcagaccaaatcatcaccacaagagagctcgattttattcgcatgagggataacctgaccacacacaaggaatttatcgcggcggttcaagaacaactcatgggattcatcaacgaagaaatccttgatcccaaggtgttcaactactaggcgggcgtgcataacgtggtggcggcgagcgcggcggagtaccggagctgcaaggtgcgcaactcggcggacgcggcggccacggcggccgggagcgccaagctcgacctcaagaagggcgtcaactacttcatctgcggcgtcccaggccactgcgccaccgggatgaagctccgtgtcgtcgccaactaatatttattaacgtaattcccctttgcagagaccaaataaatatgcacccaccggccttactttgttcgggagattaatatgtatccgtgtatctgagtgtgtattgctagtagtcttcatcagctgcatgctgcaatgcgcctactacggtcctagctcctaataatttctggttttctagaatatactaagccctaaataaccaacttggctatcaacagtgacgtgtactcgtgttaatttaaaaacaagtactatactatacaataaatattctccacttattgctgcatcgcatcttgagggggggcccggaccca

SEQ ID NO: 93356 - DNA, 270 bp, Oryza sativa
  Clone ID: PAT_MRT4530_91749C.1
atgatatcaccattcgtcacaaaaagtgtggctgtaatcaagcccaaactctctgacagaaagctcgatcagaaatacacagaaagctggggaagtgaggagctgaccaaccaaaaggcagatgcagatgatgagattgtgctgcactttggacggcgaattcagcagccgtgtggatggatattctgcatgcgatcccgggatcctgtaaagggggatggatgcactttcatgggtatggagtgcagccagcatgctatttctgaatga

SEQ ID NO: 93357 - DNA, 390 bp, Oryza sativa
  Clone ID: PAT_MRT4530_9174C.1
tcaccatcgggtcacctcaccaccaccgagcggcctcagcgcgaggctttgcggcgccacccagccactgtaagcctgcacctccctaccgagcgtccgagcactggattccccaccgaggacgacgactatcacggtccctcggctatggctgagctccaacgccagggcctctggtccctcggcctcgtccacttcacagagtcgaaccatgatccacgccggagtaaaggtgaagggggtgtccttagccgaggttcaccggcgaaaaatgggaaggaagaaatcaagctgcccgacctagatccagaaggggaagaaagggaggaagaagatgaacaggagagatgggaggagacagaggaaaaggacaagggcaatttggtctaa

SEQ ID NO: 93358 - DNA, 7728 bp, Oryza sativa
  Clone ID: PAT_MRT4530_91750C.1
atgacctccatccctgatcaccttgtgtcaccaatattcttccgagttgcgagagatggcgatgtggggcgggctggggcaagcggcgacggtggcgcagctggtcggggcggacgtcggtggcctcatctccacgatcatccaggcggctggcacggctcggcagaacaagaaaaagtgcgagcagctggcacgccgcgtcttgaattcttgatgatcgccgagctgctgccacacctgcaggatccggaggtgatgcggcggccggaagtccggcggccactggccgggctcgaggacacgctccgggaggcgcacgagctcgtcgcgtcctgccaggagagcagcgcggcgtaccggctggtgatggccggacggcaggccgagaggttcagagatgttgagagcagcatcgattgttacctcctcgtcttccccttcatcagccacatcgaggtcacccgtcgactggatctcatccacaacatcctcgttccaaacgacacgacggtgccaccatctccatcagtaggctcctcgactcatgacctggtatttgtagatgtcgttagaaaggtggcatcccatggaaagggaggcgaggtgttcaccctggtggagctggcggcggcgaccaacaacttcgccgctgacagagagattggttatggcagcttcggcactgtgtacaagggaacctttcccgacgggagaaaggtggccatcaagcacgaaggcgcggactcagtgcaggggcaccgggacgcgttcctatcagaggtcgacatcctccccacccttcgccacaggcacatcatacgcctcttgggctggtgcgtggccgagaaggagaactcgctcgtctacgagtacatgaagaacggctcgcttcacgaccatctgcacggtggtgctccatcgtcttcatcaccctctccggtgacaacttcgtggaggaagcacatggagatactgctgggcatttcgcgggccatagagtacctccactcgcacgccgtaacgccggtgatccaccgcgacgacaaggcgagcaacatcctactcgacgacacctgggcgccacgcttggcagatttcggtttgtcactcaaaatctcatgggacgatataaagtgtagaaatgcccccgtcatgggcacctctcgatatgccgacccggagtacattagcaccgggagattgacgttggccatggatgtctacagcttcggcgttgtgatgctggagatgttgacggggaagacggcggcggggcttgtttcgaacaacaagaacagcttggtgtcgtttgcgctgccaaagatcgaggccaagaaactcgaggaagtgctggataggcgcccggcgcagaagccgacagcgaggcagctccaggccacggacctcgtggcggcgacggcggcgcgatgcctgtgtcttcaggggaagaaacgaccggctatttcggaagtcgtggccgaacttacactgatggatcggcaatggatgtacgctgaccggcggtccaaagagtttattgacggcgtgcactattttttgagagtggccgaagctaacaggcaaaggggttttatttgttgtccatgcaataagtgtaagaatcagaaggagtattctgcatccaggactattcatttccacttgtttgagtcggggttcatgccaagctataattgttggacatctcacggagagcaaggtgttgaaatggaagaagatgaagtggaagacgacaatattccggactttgctcagtatgttggatttgaaggaaatcaaacgggggaggaggaaatagctgctgatggtaacgacgttgcggatgatcttggtcagatgttgcagaacgccagggaggactgcgaaagtgaaaaggaggcccataaattggacaagatgttggaggaccacagaacttcgttgtacccaggttgcgagcaggggcacaaaaagttggataccactctggagttgttgcaatggaaggcaaaaaatggggttagtgacaaggcatttggcgatttattgaaactcgtcaagaacattcttccggggggaaacaaattgcccgagacaacgtacgaggctaagaagatagtctgcccgttaggactggaagttcataagattcacgcatgtccgaacgattgtatcctatatcgcggtgaggagtatgagaacctagaagcatgccctgtttgcaaagcactacgatacaagattagacgggacgatccaggagaagttgacgggcagctaacaaagaagagaattcctgctaaggtgatgtggtatttccctataataccacggctaaggcgtttgttcaggaacaaggggaatgctagaatgttgcgatggcacgctgaagagcgtcaacaggacgggatgctgagacaccccgccgatggttcgcagtggcgaaacatcgacagaaaatttaaagaatttggaaaggacgcacgaaacatacggtttggtttgagtacggatggcatgaatccttttggagagatgagcagcggccatagcacttggcccgttacgatgtgtatctacaacctccccccctggctatgcatgaagaggaagtacataatgatgccgattattattcaaggccccaagcaacctggtaacgacatcgacgtgtacctaagaccactggtagaagatcttaaacagttgtggaagaaggaaggtgtccccgtgtgggacgaggacaaacaggaggagtttaacctacgagcgctgctgttcgtaaccatcaacgattggcctgcacttagcaacctatccggacagtccaacaaggggtacaaggcttgcactcactgtatggatgaaacagaaagtacgtatcttaagcactgtaggaaggttgtatacatgggtcatcgtcgattccttgcagcaaaccacccggtacggaagaaaggcaagcacttcgaacataaggccgaccaccgtacgaagcctaaacatcgcagcgggaaaacagtgtttgctatggttaaagatcttaaagtagtgttcggaaaggggcctggaagccagcatatagagagcgaagatggtcacgcggcgatgtggaaaaagaactctatattttgggagttaccatattgggaattcttggacgtacgccacgcaatcgacgtgatgcacctcactaagaacctttgcgtaaaccttcttggcttcctaggtgtatacggaaagtcgaaagatacactggaagcacgtaatgatctgaagcatatggaacaacgcggcgaccttcacccggaaccaaaggagaaaggaagccattacttgagtccagccagctacactcttagcaaggcagagaaggaaagtatgtttgaatgcttggagagcataaaggtaccgtctggatactccacgaatatcaagcgaataataagcacgaaggagaagaagttcacaaacctaaagtctcatgactgtcacgtgttgatgacacaactgctaccagttgtaataaggggtatccttccagacaatgtccgggcaacaataacaaagctatgtgcattcatgaacgcaatttcgcagaaggtcatcgatccggatagattagaagcccttcagaatgaagtggtgcaatgtctcgtcagttttgagttgatatttccaccttcatttttcaatataatgacgcatctgctttgtcaccttgtgaaagagatccgtattctcgggcctatgtacctacacaacatgtttcctttcgagaggtacatgggcgttctgaagaagtatgttcgtaaccgtgctcgtccagaggcaagcatcgccaagggttatggaacagaggaggtcatcgaattttgcgtagaatttatcgaagaccttcgcccaatcggggtacctgaatcacgccatgaagggagactacggggaaagggaactctcggaaggaaagcaataacgacggtagacaacaatttattccgtaaagcccatttcactgttctgcaacactcttcattggtagctccttacatcgaggagcacttggctctagttcgcgccaggaacatcggtaagtccgatgcatggattacacggcatcacattgatactttccccgcgtggctacgacaacatctcatgggtaacgagtcaatcaaccaacaacttgccttcctggcgaggggaccgtctgggtcgatcacgacattccagggatatgagatcaatgggtacacattctacacgagagcccaagacatgaagagcacgaaccaaaacagcgctgttcgtgtcgatgccatgggacacgatggaacaactgccacgtattacggtgccatcgaggacatatgggaacttgactatggtcctctcaaggttcctctgttccggtgccaatgggttaggttgactggtggaggcgtaatgattgatgacagtgggatgacaactgttgaccttaacaaggttggatactcggacgaaccttttgtccttgccaatgatgtaacgcaagtctttttcgtgaaggacatgtctagcaaaggaaagaagggcagagggcctgatgagcctaagcgtcaagtggttctcccaggcaaaagaaaaatcgtcggagttgaggacaagactgacgaggattacgatcagttggatgggcaaccccctttcacggtgacgattgaccctagcatcctcctatcaaatgaagacaccccttactcacgcagcgatcacaaggagggaacaataatggctgaccgcgatgaggaacagatattgtacgatacaatcgcggagggaagcagccagtactggaatgaagaagaggggaatgaggatccaaaccagtacttgaacgaggaaggaaacgtggagagggatgcggaggggaaccagcaggggcacgtggaaagggatgtggaggggaaccaggaggaggaggctagtgtggaagaagatggacgtcctagtgccccggccgaagccgccaagaactatgtacgtcacagcggttgggttgtgcgggataacgtgcctgtcagtacggtgtactggcgaagaacaagggcacgcggagatcatgagagctttgtcccagattcggagaaagagatgctgtggaccacaatgctcgagacattcacccttcctgcgggtacagaggacaaagtgaaaaggtggactctgaagaaaatggcagaacagtttcagagcttcaagggagatctgtaccagaagtatatactgaaggggcagacaccgaacttcgacacattcccaaagctaagggatcattgggacgagttcgttgcatataagacaggtgaacaagggcaggcgatgatggaaagaaacaaagaaaatgccgccaagaagaagtaccatcaccacttggggtcaggaggctatagcgtcgcgatgccgaagtgggagcagatggaggctagcttgattgagaggggtatcgaaccggcaacagccaattggccggaacgatcgaagttctggtactatgctcacggtggaacgctcaacccagctgatggctcactggtcttcggctatcagatacaagaggctgcgcgacgactaacagatgcagtggaagcctcctctcagggcacgttccgaccagacagagatagggacgagctgacactcgccctgcagactccagagcatccaggacgaactcgagggaaaggggtgattccttggaagattggtttcaaggaggacatccacacgtacaggagtcggatgaggagcaagagagataccgaggcgaagattgcagacctagagttccgggtatcgagctacgaactcaacatgcaagaggaggtggcaaggaaggttgatgaacgcatggccgcacatcggtcccatgatccccagccgaccattcctcctgcaatggtgagcccgtcaggaaaccgtagcagctgcgcctcaacggggcaggtggcgtcgggcatggccatcccaacggacccttcaggtacttaccactgcaggccgattccagcaggatactcgaaggtcgaagttgagttggtcgaaggcgcgtacgaggacctcgagctggattaccctggaggagacggtgagacgcatctacgagacacaagccatgccattattctatggcgcaggcggtacatcatcctccctgggcgacaagcggcgtctcgtgcaccatctcctccggctccgccatctcctcctcaggatcctgcaccgtctcctcctcatgctccgccagcaccgtctccacctcaggctccagcatcgactcctcctcaggatcctgcaccgactcctcctcgtgctcctacacctactcccccgcaagctcctcttccggcaccttcaaagtcaagggcccccccagctccaccgcctgcccacacaagggcaacgaagaaggcgaaagttgacgccgccaagaacaaggacccggggtacgattgcacgcaagaggagcttgacgcttacgttgcatcagaagtcaagagacaattcaagcctcgaagtccagaaaagaagattcctatagaccccagtgtcaggaacttcttcaggggtatgtctgcatctgtcaaggaggccatcaagctatcggactatgagcgaacgctgaagaaagcatcttctggaaagtccaaaccagtccctcagcttggagagcaaccaaaacaggagatcgagccgttggttaccggtaaagaaatgacgatagaacaatttattactgacaccggtctaactacggatcaattgctaggagtcgcaccaatcgaaaaggcggaagtgaaatacatgtacgaactcggtaaaccgcttgtcaagcctgagctgctgcagtccctacccacacaaatgtacaagttccatcagctgtacatggagatgagcgccgccggtagagagatgatcggagcgaggatcagggacacggacttcttgcaaggagatgacattctctggatcaatttcaagggaatctacgaactataccagctggacgccctcgacgtctctattatgagttgctggattttaatggagattcaaagggcccgacggcggagggttttcgatactggattcatcgaccctcggagagtaaacgtcgcaatgctcgaccaatatccacaagaaacagaggacaatctcgtccatctcctgaaggcgcagcattacaagacgttcatactgttgccatacaacacagaattccactgggtgcttttactcttcgacctggaggcctgcaccgtcaacgtatatgactcaatggataaaaaagagtctacgtttgacaaggttttcgaacttatagacagggcttggtatcggttccgtcatttggtccgcggcaaatggagagaaagacttaggcggaagttcaaatttccttgcgcaaagcaaaagcagggaaataacttgtgcggctattacgtgtgcgagtattgccactgccttgcaaaccaaatcatcaccacaagagagctcgattttattcgcatgagggataacctgaccacacacaaggaatttatcacggcggttcaagaacaactcatgggattcatcaacgaagaaatccttaatcccaagggtgaattctactacgacggaaacacaattcaccggtccttagcttctgagctagcagcgagtactactacgtcgaaatga

SEQ ID NO: 93359 - DNA, 2008 bp, Oryza sativa
  Clone ID: PAT_MRT4530_91751C.1
cagaagcaagattaaactgtttctccagaataatataaccttgcctgatcttatcactaaaatctgttttacaacacctgatctaatacaaacgatcaagtggcatatagtcacaagtcgcaacacgctcggaagagcagttgaactgatcatcccgttgaggttacactccaaattgaatgatgaggcaacgaataacaaagcagcactcagaaatccatgatggtccaggcatctacaaatgatatatcgcgcaactccatttgagtacaaatgggtccaagccctggcaacaggtgtatggatctcagatgatcaagcctcttaaggggtgttcttggaatataatgaggaaagatgtccaaacagtattctttcaacaattgtaaaggaagttagaacatgcgccgccggttgggagcaatctcagggttgttgttcctcatcatggcgacaaactcctggtagttaattcttccatcatgatcagtatctacttcagcgatgatttccttaatcgttttatcgtcccccatatcatacttcttcagagcttcttccaactcatctactgttatgtatccgctgtggtccttatcaaaatactcaaatgctttaagtatgtggtcttccttctccaatctgttcatgtgcattgtcgctgatatgaactcagcatagtcaatggttccatttccatcaacatcagccgcctccatcagctgtctaatttctgattcagaaattttggtgccaagttttggtaaaccagatcttagctcctcaagagttattgtcccactgttatcagtatccaaggatctgaacatttcttttaagcctgtaatctcttcatctgacaagttctctgcaacaaccttcaatgcaactttcttaagcttgttcattgccctgaactgcttcatcctgctgataactgtaatgtcaagtggcttgtctggggcttctccatcctctctaatccatgggtggttcaaaatttcagcagaagtaaggcgctcttttgggtcttgccgcaacatcttcttaaccaaatcttttgcaccattggatatcgaaggccaaggttcagacgagaaatcaatgtgaccacgtaatacggcatcaaatataccatcttcactctctgcccaaaaaggtggaacaccagaaagaaggatgtaaagaataacgccagcactccatatgtcagcctctgctccatagtttcgtttcagcacctcaggtgcaacataatacgcacttccaacaaggtccttaaaatgctccccaggcttgaagaaaacggaaagaccgaagtcagtggccttgagcggcgagtcctcgcttttactgaggaacaaaaagttctccggcttgagatcccggtggaagacccccatggagtggcagctgtgcacgacggcgacgatctcgcggcagagcgcggcggcggcgcgctcggagtagtgccccctggcgatgatgcggtcgaagagctccccgccctcgcagagctccatgatgaggttgaccgagtggcggtcctcgtaggcgccccggagctcgacgatgttgcggtggcccgtgaggtggtgcatgatctgcacctcccggcgcacgtcctcgatgtcgtcgcggtgggcgagcttccgcgtggcgatggacttgcaggcgaagcgcttccccgtggccttgtgggtgacgaggtaggtgaccccgaactggccccgcccgagctcgcgcccgaaggtgtaggtcgcgcggacgtcctccatcggccgccccagcaccctccccatcgccgcgtccggcgccgccgccggcggcggggtcggctgctgcggcctcggccactgctgctgctgctgctgcggctgaggcttcggcttgggctggggcggcggctgctcgggagcggcgcggtggtggcgcgacgtgcggttgcccatggctactggaggctgggtcagtcggggtggggaacgcaggcgatcccacgcgtccg

SEQ ID NO: 93360 - DNA, 6477 bp, Oryza sativa
  Clone ID: PAT_MRT4530_91752C.1
atggatcgacaatggatgtacgctgaccggtagtccaaagagtttattgacggcgtgcactattttttgagagtggccgaagctaacaggcaaaggggttttatttgttgtccatgcaataagtgtaagaatcagaaggagtattctgcatctaggactattcatttccacttgtttgagtcggggttcatgccaagctataattgttggacatcccacggagagcaaggtgttgaaatggaagaagatgaagtggaagacgacaatattccggactttgctcagtacgttggatttgaaagaaatcaaacgggcgaggaggaaagggatgctgatggtaacgacgttgcggatgatcttggtcagatgttgcaggacgccaaggaggactgcgaaagtgaaaagggagctcataaattggacaagatgttagaggaccacagaacttcgttgtacccaggttgcgagcaggggcacaaaaagttggataccactctggagttcttgcaatagaagacaaaaaatggggttagtgacaaggcatttagcgatttattgaaactcgtcaagaacattcttccggagggaaacaaattgcccgagacaacgtacgaggctaagaagatagtctgcccgctaggactggaagttcagaagattcacgcatgtccgaatgattgtatcctatatcgcggtgaggagtatgagaacctagaagcatgccctgtttgcaaagcactacgatacaagattagacgagacgatccaggagaagttgatgggcagctaacaaagaagagaattcctgctaaggtgaagtggtatttccctataataccacggataaggcgtttgttcaggaacaaggggaatgctagaatgatgcgatggcacgctgaacagcgtcaacaggacgggatgctgagacaccccgccgatagttcgcagtggcgaaacatagacagaaaatttaaagaatttggaaaggacgcacgaaacatacggtttggtttgagtacggatggcatgaatccttttggagagatgagcagcggccatagcacttggcccgttacgatgtgtatctacaacctcccccctggctatgcatgaagaggaagtatataatgatgccgattattattcaaggccccaagcaacctggtaacgacatcgatgtgtatctaagaccactggtcgaagatcttaagctgttgtggaagaaggaaggtgtccccgtgtgggacgaggacaaataggaggagtttaacatatgagcgctgctgttcgtaaccatcaacgattggcctgcacttagcaacctatccggacagtccaacaaggggtacaaggcttgcacttactgtatggatgaaacaaaaagtacgtatcttaagcactgtaggaaggttgtatacatgggtcatcgtcgattccttgcagcaaaccacccaatacggaagaaaggcaagcactttgaacataaggctgaccaccgtatgaagcctaaacatcgcaacgggaaaacagtgtttgctatggttaaagatcttaatgtagtgttcggaaaggggcctggaagccagcctatagagagcgaagatggtcacgcagcgatgcggaaaaagaactctatattttgggagttaccctattgggaattcttggacgtacgccacgcaatcgacgtgatgcacctcactaagaacctttgcgtaaaccttcttggcttcctaggtgtatacggaaagtcgaaagatacactggaagcacgtaatgatctgaagcatatggaacaacacggcgaccttcacccggaaccaaaggagaaaggaagccattacttgagtccagccagctacactcttagtaaggcagagaaggaaagtatgtttgaatgcttggagagcataaaggtactgtctggatactccatgaatatcaagcgaataataagcacaaaggagaagaagttcacaaacctaaagtctcatgactgtcaagtgttgatgacacaactgctaccagttgtaataaggggtatccttccagacaatgtccaggcaacaataacaaagctatgtgcattcatgaacgcaatttcgcagaaggtcatcgatccggatagattagaagcccttcagaatgatgtggtgcaatgtctcgtcagttttgagttgatatttccaccttcatttttcaatataatgacgcatctgctttgtcaccttgtgaaagagatcagtattctcgggcctgtgtacctacacaacatgtttcctttcgagaggtacatgggcgttctgaagaagtatgttcataaccgtgctcgtccagaggcaagcatcgccaagggttatggaacagaggaggtcatcgaattttgcgtagaatttatcgaagatcttcgcccaatcggggtacctgaatcacgccatgaagggagactacagggaaagggaactctcggaaggaaagcaataatgacggtagacaacaatttattccgtaaagcccattccacggttctgcaacaatcttcattggtagctccttacatcgaggagcacttggctctagttcgcgccaggaacatcggtaagtccgatgcatggattacacggcatcacattgatactttccccgcgtggatacgacaacatctcatgggtaacgagtcgatcaaccaacaacttgccttcctggcgaggggaccgtctgggtcgatcacgacattccagggatatgagatcaatgggtacacattctacacgagagcccaagacatgaagagcacgaaccaaaacagcgctgttcgtgtcgatgccatgggacacgatgaaacaactggcacgtattacggtgccatcgaggacatatgggaacttgactatggtcctctcaaggtccctctgttccggtgccaatgggttaggttgactggtggaggcgtaatgattgatgacagtgggatgacaacggttgaccttaaaaaggttggatactcggacgaaccttttatccttgccaatgatgtaacacaagtcttttttgtgaaggacatgtctagcaaaggaaagaagggcagagagcctgacgagcctaagcgtcacgtggttctctcagcgcgccctcgtcttctccaccaacacttagaagtttttgcccgatcgatctctctcggcttctccttcgccgccactgcctagggcatccccgcgccgacgccgccgccgtatctcgccatcgtctcgcgctcgtcgtcgtcgccgccgcctccgcctcctccgccgccgccgcatctctcagatgtttcctgtatgaacagatggctgatcgcgatgaggaacagatattgtacgatacaatcgcggagggaagcagccagtactggaacgaagaagaggggaacaaggatccaaaccaggatttgaacgaggaagggaacgtggagagggatgcggaggggaaccaggaggggcacatggaaagggatgtggaggggaaccaggaggaggaggctagtggaagtcaaccctccgttggacagaagagggcacgcgggcaacgaggtgccgcgaagaagcttgagggtcggcacatcataacggaagtggaagaagatggacgacctagtgccccggcagaagccgccaagaactatgtacgtcacagcggttgggttgtgcgggataacgtgcctgttagtatggtgtactggcgaagaacaagggcacgcggagatcatgagagctttgtcccagattcggagaaagagatgctgtggaccacaatgctcgagacattcacccttcccgcgggtacagaggacaaagtgaaaaggtggactctgaagaaaatggcagaacagtttcagagcttcaagggagagctgtacaagaaatatatcctgaaggggcagacaccaaacttcgacacatttccaaagctaagggatcactgggacgagttcgttgcatataagacaggtgaacaagggcaggcgatgatggaaagaaacaaagaaaatgccgccaagaagaagtaccatcaccacttggggtcaggcggctatagcgtcgcgatgccgaagtgggaggagatggaggctagcttgcttgagaggggtatcgaaccggccaccgctaattggccggaacgatcgaagttctggtactatgctcacggtggaacgctcaacccagctgatggctcactggtcttcggcgatcagatacgagaggctgcgcgtcgactaacaaacgcagtggaagcctcttctcagggcacgttccgaccggacagagagagggacgagctgtcactcgccctgcagactccagagcatccaggacaaacacgagggaaagtggtgattccttggaagattgggttcaaggaggacatccacacgtacaggagtcagatgaggagcaagagagataccgaggcgaagattgcagatcttgagttcagggtatcgagctacgagctcagcatgcaagaggaggtggcaaggaaggttgatgaacgcatggccgcacatcggtccaataatccccagccgaccattcctcctgcaatggtgagcccgtcaggaaaccgtagcagctgcgcctcaacggggcaggtaggatcacagagcatggacgccatgcaaacccaggacgaatccacctgccccgttgatgacatcactcagtggacaccatgtgagctgcatattcctttcaagaacttatcaataaaggtggcgtcgggcatggccatcccaatggacctttcaggtacttaccactgcaggccgattccagcaggatactccaaggtcgaagttgagttggtcgaaggcgcgtacgaggacctcgcgctggattaccctggaggagacggtgagacgcatctacgagacacaagccatgccattattctatggcacaggcgctacatcatcctccctaggcgacaagcggcgtctcgtgcaccatctcctccggctccgccatctcctcctcaggatcctgcaccgtctcatcctcatgctccagcaccgactccacctcaggctcctgcaccgactcctcctcggtctcctgcaccgactcctcctcggtctcctacaccgactccttcgcaagctcctcttccggcaccttcaaagtcaagggccccccaagctccaccgcctgcccacacaagggcaacgaagaaggcgaaaattgacgccgccaagaacaaggacccggggtacgattgcacgcaagaggagcttgacgcttacgtggcatcagaagtcaagagacaatttaagcctcgaagtccagaaaagaagattcctatagacccgagtgtcatgaacttcttcaggggtatgtctgcacctgccaaggaggccattaagctatcggactatgagcgaacgttgaagaaagcatcttctggaaagtccaaaccagtccctcagcttggagagcaaccaaaccaggagatcgagccgttggtgaccggtaaagaaatgatgataaaagaatttattactgataccggtctaactacggatcaattgctaggagtcacaccaatcgaaaaggcggaagtgaaatacatgtacgaactcggtaaaccgcttgtcaagcctgagctgctgcagttcctacctacacaaatgtacaagttccatcagttgtacatggagatgagcgccaccggtagagagatgatcggagcgaggatcagggacatggacttcttgcaaggagatgacattctctggatcaatttcaagggaatctacgaactataccagctggacgccctcgacgtctctattatgagttgctggattttaatggagattcaaagggcccgacggcggggggttttcgatactggattcatcgacgctcggaaagtaaacgtcgcaatgctcgaccagtatccgcaagccacagaggacaatctcgtccatctcctgaaggcgcagcattacaagacgttcatactgttaccgtacaacacagaattccactgggtgcttttactcttcgacctgtcggcctgcaccgtcaacgtatatgactcaatggataaaaaagagtctacgtttgacaaggttttcgaacttatagacagggcttggtatcggttccgtcatttggtccgcggcaaatggagagaaagacttaggcggaagttcaaatttccttttattcgcatgagggataacctgaccacacacaaggaatttatcacggcggttcaagaacaactcatgggatttatcaacgaacaaatccttgatcccaagggtgaattctactacgacggaaacacaattcataggtccttagcttctgagctagcgactactattacgtcgaaatcgtagctagctaggacatattcctcctggcgacgtcgaaacgataaggatcatcaaatcgccaaaacataaaatttcgaaatttctccctagta

SEQ ID NO: 93361 - DNA, 797 bp, Oryza sativa
  Clone ID: PAT_MRT4530_91753C.1
ccggccgggaattattttctaaataaaattcccggccaacggagtccggagccgtccaacaagattgttcctcacgccggcgtgccccccgccaccgcgcgccatcgccgtagaggctaccactgggacttcgaggtcgctcctctctccatctgggccgccgccccctctcgcgcaccgcgcggcctctctccctgcccctcaccctcgccacctcgccgatggcctccggctgtgcggcggcggcgggatgctggcttctcccagccgatatctaggccctgatccgagagcagcactaaattaaaaggtgaggagaggctggataagcccaaagggtgcccccacgtctctccgtactacaatgccgccgatcctattatcatcaatggcaaagggattgatccctttgagctgagtgaaggtatggataaaagaagagtggcttcaattcttcaaagtttcacttcaggcaaccgagagaaaccacgctgcttcacaaggcaatggcgattccaatacggacagtagcagcctctggattctagattctggaaataaaagaggtattgctgaccataatgtgagtaaatgaacgaaatcttttatactgctggtgttatctacttggttcagagtttcagacaggaaattgcacctagtcctaggtaatgtgtgattgttttgttagctttatgaagacatcttatgtccaaattgctctgacagagggcattcgtcatgctatctggccagccagtaacattttcaattaaaatatcttgagtttgttttgc

SEQ ID NO: 93362 - DNA, 705 bp, Oryza sativa
  Clone ID: PAT_MRT4530_91754C.1
atggcctcctcgttgtcgtcctcaccctccgccaccgccttctggttgtcgtccccaccctccgccaccggcgccccacgcggcgaaggcgtagtcaccgccgcgctgcaattgccgcagccgccatcgccgcgcgtcgtcgtggttatcgtcggcgtcgctgccgcacccgggacagccgttgctgcacgactcccagcgctcccagtgctacactccgccactgccgttgccgcacgactcccagcgctgtcggcgctccactctgcgaacaacggcgctcgtggtggaatagagatggaggagctggcatgtgggcccaagggcatttttgacatttcacgtgatatcttctctcttcaaccaaaaattattatcttcatcgacgtggtgtccactggcaaattaccacgtttatggagtgttttccccaaaaatttctttatcctgtggcagcagtggcgaagggtagccggctgccggcgaccagaaaccagtgagcagagccggcgtggtgggggcagaggaagctgcggagcgacgagtggtggcgcatccacgcgcggcgcccgtgctggtacggtcggagcaatgggtatcactggccactgggtagtggctgaagacatcgttgctgataggtctgaaagggagcagtacactaggatgtgcaagaacctatcaaacaacacttcgaggctatga

SEQ ID NO: 93363 - DNA, 6931 bp, Oryza sativa
  Clone ID: PAT_MRT4530_91755C.1
atggatcggcaatggatgtacgctgaccggcggtccaaagagtttattgacggcgtgcactattttttgagagtggccgaagctaacaggcaaaggggtggttttatttgttgtccatgcaataagtgtaagaatcagaaggagtattctgcatccaggactattcatttccacttgtttgagtcggggttcatgccaagctataattgttggacatcccacggagagcaaggtgttgaaatggaagaagatgaagtggaagacgacaatattccggactttgctcagtatgttggatttgaaggaaatcaaacgggcgaggaggaaatagctgctgatggtaacgacgttgcggatgatcttggtcagatgttgcaggacgccagggaggactgcgaaagtgaaaaggaggcccataaattggacaagatgttggaggaccacagaacttcgttgtacccaggttgcgagcaggggcacaaaaagttggataccactctggagttgttgcaatggaaggcaaaaaatggggttagtgcacaaggcatttggcgatttattgaaactcgtcaagaacattcttccggggggaaacaaattgcccgagacaacgtacgaggctaagaagatagtctgcccgttaggactggaagttcataagattcacgcatgtccgaacgattgtatcctatatcgcggtgaggagtatgagaacctagaagcatgccctgtttgcaaagcactacgatacaagattagacgggacgatccaggagaagttgacgggcagctaacaaagaagagaattcctgctaaggtgatgtggtatttccctataataccacggctaaggcgtttgttcaggaacaaggggaatgctagaatgttgcgatggcacgctgaagagcgtcaacaggacgggatgctgagacaccccgccgatggttcgccagtggcgaaacatcgacagaaaatttaaagaatttggaaaggacgcacgaaacatacggtttggtttgagtacggatggcatgaatccttttggagagatgagcagcggccatagcacttggcccgttacgatgtgtatctacaacctccccccctggctatgcatgaagaggaagtacataatgatgccgattattattcaaggccccaagcaacctggtaacgacatcgacgtgtacctaagaccactggtcgaagatcttaaacagttgtggaagaaggaaggtgtccccgtgtgggacgaggacaaacaggaggagtttaacctacgagcgctgctgttcgtaaccatcaacgattggcctgcacttagcaacctatccggacagtccaacaaggggtacaaggcttgcactcactgtatggatgaaacagaaagtacgtatcttaagcactgtaggaaggttgtatacatgggtcatcgtcgattccttgcagcaaaccacccggtacggaagaaaggcaagcacttcgaacataaggccgaccaccgtacgaagcctaaacatcgcagcgggaaaacagtgtttgctatggttaaagatcttaaagtagtgttcggaaaggggcctggaagccagcatatagagagcgaagatggtcacgcggcgatgtggaaaaagaactctatattttgggagttaccatattgggaattcttggacgtacgccacgcaatcgacgtgatgcacctcactaagaacctttgcgtaaaccttcttggcttcctaggtgtatacggaaagtcgaaagatacactggaagcacgtaatgatctgaagcatatggaacaacgcggcgaccttcacccggaaccaaaggagaaaggaagccattacttgagtccagccagctacactcttagcaaggcagagaaggaaagtatgtttgaatgcttggagagcataaaggtaccgtctggatactccacgaatatcaagcgaataataagcacgaaggagaagaagttcacaaacctaaagtctcatgactgtcacgtgttgatgacacaactgctaccagttgtaataaggggtatccttccagacaatgtccgggcaacaataacaaagctatgtgcattcatgaacgcaatttcgcagaaggtcatcgatccggatagattagaagcccttcagaatgaagtggtgcaatgtctcgtcagttttgagttgatatttccaccttcatttttcaatataatgacgcatctgctttgtcaccttgtgaaagagatccgtattctcgggcctatgtacctacacaacatgtttcctttcgagaggtacatgggcgttctgaagaagtatgttcgtaaccgtgctcgtccagaggcaagcatcgccaagggttatggaacagaggaggtcatcgaattttgcgtagaatttatcgaagaccttcgcccaatcggggtacctgaatcacgccatgaagggagactacggggaaagggaactctcggaaggaaagcaataacgacggtagacaacaatttattccgtaaagcccatttcactgttctgcaacactcttcattggtagctccttacatcgaggagcacttggctctagttcgcgccaggaacatcggtaagtccgatgcatggattacacggcatcacattgatactttccccgcgtggctacgacaacatctcatgggtaacgagtcgatcaaccaacaacttgccttcctggcgaggggaccgtctgggtcgatcgcgacattccagggatatgagatcaatgggtacacattctacacgagagcccaagacatgaagagcacgaaccaaaacagcgctgttcgtgtcgatgccatgggacacgatggaacaactgccacgtattacggtgccatcgaggacatatgggaacttgactatggtcctctcaaggttcctctgttccggtgccaatgggttaggttgactggtggaggcgtaatgattgatgacagtgggatgacaactgttgaccttaacaaggttggatactcggacgaaccttttgtccttgccaatgatgtaacgcaagtctttttcgtgaaggacatgtctagcaaaggaaagaagggcagagggcctgatgagcctaagcgtcaagtggttctcccagtgcgccctcgtcttcttcaccaacacttaaacgttttcggccgatcgatctctctcggcctctctccttcgccgccactgcctagggcaaatccccgcgccgagcgccgccgtatctcgccgtcgtctcgagctcgtcgtcctcgccgccgcctccgcctcctcctaaggtgtcggcaaatgtttgggacttagcagatgtttcttgtatcaacagatggctgaccgcgatgaggaacagatattgtacgatacaatcgcggagggaagcagccagtactggaatgaagaagaggggaacgaggatccaaaccagtacttgaacgaggaagggaacgtggagagggatgcggaggggaaccagcaggggcacgtggaaagggatgtggaggggaaccaggaggaggaggctagtggtagtcaaccctccgttggacagaagagggcacgcgggcaacgaggtgcagcgaagaagcttgagggtcggcacatcataacggaagtggaagaagatggacgtcctagtgccccagccgaagccgccaagaactatgtacgtcacagcggttgggttgtgcgggataacgtgcctgtcagtacggtgtactggcgaagaacaagggcacgcggagatcatgagagctttgtcccagattcggagaaagagatgctgtggaccacaatgctcgagacattcacccttcctgcgggtacagaggacaaagtgaaaaggtggactctgaagaaaatggcagaacagtttcagagcttcaagggagatctgtaccagaagtatatactgaaggggcagacaccgaacttcgacacattcccaaagctaagggatcactgggacgagttcgttgcatataagacaggtgaacaagggcaggcgatgatggaaagaaacaaagaaaatgccgccaagaagaagtaccatcaccacttggggtcaggaggctatagcgtcgcgatgccgaagtgggagcagatggaggctagcttgattgagaggggtatcgaaccggcaacagccaattggccggaacgatcgaagttctggtactatgctcacggtggaacgctcaacccagctgatggctcactggtcttcggctatcagatacaagaggctgcgcgacgactaacagatgcagtggaagcctcctctcagggcacgttccgaccagacagagatagggacgagctgacactcgccctgcagactccagagcatccaggacgaactcgagggaaaggggtgattccttggaagattggtttcaaggaggacatccacacgtacaggagtcggatgaggagcaagagagataccgaggcgaagattgcagacctagagttccgggtatcgagctacgaactcaacatgcaagaggaggtggcaaggaaggttgatgaacgcatggccgcacatcggtcccatgatccccagccgaccattcctcctgcaatggtgagcccgtcaggaaaccgtagcagctgcgcctcaacggggcaggtaggatcacagagcatggacgccatgcaaacacaggacgaatcgacctgtcccgttgatgacatcactcagcggacaccatgtgagctgcatattcctttcaagaacttatcaataaaggtggcgtcgggcatggccatcccaacggacccttcaggtacttaccactgcaggccgattccagcaggatactcgaaggtcgaagttgagttggtcgaaggcgcgtacgaggacctcgagctggattaccctggaggagacggtgagacgcatctacgagacacatgccatgccattattctatggcgcaggcggtacatcatcctccctgggcgacaagcggcgtctcgtgcaccatctcctccggctccgccatctcctcctcaggatcctgcaccgtctcctcctcatgctccgccagcaccgtctccacctcaggctccagcaccgactcctcctcaggatccagcatcgactcctcctcaggatcctgcaccgactcctcctcgtgctcctacacctactcccccgcaagctcctcttccggcaccttcaaagtcaagggccccccccagctccaccgcttgcccacacaagggcaacaaagaaggcgaaagttgacgccgccaagaacaaggacccagggtacgattgcacgcaagaggagcttgacgcttacgttgcatcagaagtcaagagacaattcaagcctcgaagtccagaaaagaagattcctatagaccccagtgtcaggaacttcttcaggggtatgtctgcatctgtcaaggaggccatcaagctatcggactatgagcgaacgctgaagaaagcatcttctggaaagtccaaaccagtccctcagcttggagagcaaccaaaccaggagatcgagccgttggtgaccggtaaagaaatgacgatagaacaatttattactgacaccggtctaactacggatcaattgctaggagtcgcaccaatcgaaaaggcggaagtgaaatacatgtacgaactcggtaaaccgcttgtcaagcctgagctgctgcagtccctacccacacaaatgtacaagttccatcagctgtacatggagatgagcgccaccggtagagagatgatcggagcgaggatcagggacacggacttcttgcaaggagatgacattctctggatcaatttcaggggaatctacgaactataccagctggacgccctcgacgtctctattatgagttgctggattttaatggagattcaaagggcccgacggcggagggttttcgatactggattcatcgaccctcggaaagtaaacgtcgcaatgctcgaccaatatccacaagaaacagaggacaatctcgtccatctcctgaaggcgcagcattacaagacgttcatactgttgccatacaacacagaattccactgggtgcttttactcttcgacctggaggcctgcaccgtcaacgtatatgactcaatggataaaaaagagtctacgtttgacaaggttttcgaacttatagacagggcttggtatcggttccgtcatttggtccgcggcaaatggagagaaagacttaggcggaagttcaaatttccttttattcgggcatgagggaataacctgaccacacacaaggaatttatcgcggcggttcaagaacaactcatgggattcatcaacgaagaaatccttgatcccaagggtgaattctactacgacggaaacacaattcaccggtccttagcttctgagctagcagcgagtactactacgtcgaaatcagaggccggcgcggcgacggcgttccggcgaaaccgaggagcagccggaggagaggacgataccgcgacgtcgacggaggagacggcgacgtcggtcggcgtaccggcgacgtacaggagccgaccgaagacggggaggtactggatgccgacgaggaggccactccggcgagcttcgggcgaggaggaggtgatgccggggatgagggcggcgtcgcggagccgagggaggtggtggcgacgtcgaccggcgctcaggcagggagatagaggcggctggaggcggccggcgcggaggaaagggaagggcgacggcggaaacgtagcttcgggggtctccgcgcgaaacggagggcaggccggcgaagaggaggtggcggcgacgctggaggaggcgacggcacggccggccggtgcgcgggcgaggcggcacaggcggctggaggcggtcggcggcgtgggagagagaggagggcggcggggagatggctag

SEQ ID NO: 93364 - DNA, 643 bp, Oryza sativa
  Clone ID: PAT_MRT4530_91756C.1
gtccggagccgtccaacaagattgttcctcacgccggcgtgccccccgccaccgcgcgccatcgccgtagaggctaccactgggacttcgaggtcgctcctctctccatctgggccgccgccccctctcgcgcaccgcgcggcctctctccctgcccctcaccctcgccacctcgccgatggcctccggctgtgcggcggcggcgggatgctggcttctcccagccgatatctaggccctgatccgagagattttgacatggatctatgaatatgaccagcagcactaaattaaaaggtgaggagaggctggataagcccaaagggtgcccccacgtctctccgtactacaatgccgccgatcctattatcatcaatggcaaagggattgatccctttgagctgagtgaaggtatggataaaagaagagtggcttcaattcttcaaagtttcacttcaggcaaccgagagaaaccacgctgcttcacaaggcaatggcgattccaatacggacagtagcagcctctggattctagattctggaaataaaagaggtattgctgacctgtgagtaaatgaacgaaatcttttatactgctggtgtatctacttgggttcagagtttcagacaggaaattgcacct

SEQ ID NO: 93365 - DNA, 1294 bp, Oryza sativa
  Clone ID: PAT_MRT4530_91757C.1
atggacgagattgtcctctgtggcttgcggatactggtcgagcattgcgacgtttactttccgagggtcgatgaatccaatacccttgaaattgatccagagaatgtcatctccttgcaagaagtccgtgtccctgatcctcgctccgaatcaatcctcgctccgatcatttctgtaccggtggcgctcatctccatcggagcggcggcgtggcggcgcggctgcggcttggcgcggcggcagcgtggcggcgcggcatcgacgtggcgcagcggcggcgttgcgcggtggcggcgtggcggcgcggcgagggcgtgccgcggcggcgtcgtggtgtctcggcgtcgtgccgccgcggaggcgtggcgcagcccggcgttgtggtgcgcgcagcttcgtcggcactgccggcgcgacgtcgtcgccggtggtggcagcatcgaggaccccctagtcctcctctttcgtgtgccccctctcccgtggtctcccgtgcctcgtagcgccgccgccacgtgctccaccccgccgtcgtcgccggccgagctccatccgcgtcgtgccgtcgcctccgtcgtcgccgccggtcgccgtcaccgccgtaaggtgcgccgaggtgtggagaagcccggccgctctctccccgctgtcgccggtcaccggagccccgtcgccgccgtcgaccgaagccgtgccgccgctagacctcgtcgccggccgtcgtcgttcgtcgtttggttcgagggtgagtaccgttgggttcgtctcgtcgtcctctacgtgttcatgtcctccaaagtcgcagccgaccatccaatctccggcgaggtcgccatcttgagcaccagactgagaagtggcggagataagcccacgggggtcgctggggagtccatgcctctggtttttgagggggtgattatgatccaggaacggtgcactgttttgagttgtgttgtgcaaagggtattgtcacgatttccccctttgcagtgccgtggtggtacttcggggcatggcaacatgtgtggaatcgtgtcttgtgggtacagtggtacacctctggccagagtaaaactattcgaatagccgtgcccgcggttatgggcgagttgagcaatgtttttcgtgattagtctcacacctctcacaataattatagatgttatacctggtaataatttgcttagctcctggtttggagattagatctgtacagccgggtatggttgttcaggatggttgggcctgtgcagcatgggtatgctgttcggtgttgattaaaatttctgat

SEQ ID NO: 93366 - DNA, 6263 bp, Oryza sativa
  Clone ID: PAT_MRT4530_91758C.1
atgccgttgtatgatggatgcaagtcgaagcacagcaagttgtcatgcgtgttggaactcatgaagcttaaggctagtaatggctggtcggacaagagttttacagaactccttgagctgttaaaggatctgttgccagaggggaacaatttacctcagacgacatatgaagcgaagcaagtattatgtccgttgggcctggaggtcagaagaattcatgcatgtccgaacgactgcattttgtattacaaggaatacgctgacttggatgtctgccctatctgtggggcatcaaggtacaaacgagcaaagagtgaaggtgaaggaagtaagtcaaagaggggaggcccagcaaaggtggtgtggtatctcccaattgcggagcgcatgaagagaatgtttgcgaacaaggaacaagctaagcttgtgcgctggcatgccgaagaacggaaagtcgatactatgctgaggcacccagcagattcagtacagtggaggacaatcgataggatttaccaggaattctcaaatgacccaagaaacatgcgtttcgcaatgtgtacggacggcattaatctttttggtgatttgagcagtcgtcacagtacatggccagttctgcttgttaactataaccttcctccctggttgtgtttcaaaagaaagtacattatgcttgtcatgctcattcaaggaccgagacaacctggcaacgatatcgatgtgttccttgaaccgataatcgatgacttcgaaaggctatggaatgagggcacacgaacatgggacgcatatgcacaagagtatttcaacctccatgcgatgctgttttgtaccatcaacgattatccggcccttggcaacctttctggccaaactgtgaaagggaaatgggcgtgttcggagtgtatggaggaaacaagaagcaaatggttgaagcattcacacaagatggtctacatgggtcacaggagatttctcccaaggtatcacccgtataggaatatgagaaagaatttcaatggacacagagatacagccggacccccgacagagctaacagggacagaggtgcacaacttagtgatgggaataaccaacgagtttggaaaaaagaggaaagttggaaagcgaaaagagaagagcacatcgaaggaaaaaacagatgagcatgtggaaaaacaaaagacaaaagagaggagcatgtggaaaaagaagtcaatattttggagactaccatactggaaggatcttgaagttcgccactgcatagatttgatgcatgtcgagaagaatgtatgcgagagtttaatgggattactgcttaacccaggtactacaaaggatggtctcaacgcccgacgagatctggaagatatgggtgttcggtcggagctacatcccataaccacggaattcggcagggtttaccttcctccagcctgctacactctctcgaaagaagagaagattgatttgctaacatgtttgagtggtataaaggttccatctggttactcatcaagaatcagtaggctcgttccactgcaagatcttaagttggttggaatgaagtcgcatgattgccacgttcttatcacacagctgttgcccgttgcaataaggaatattttgcctcctaaggtgcgacacacgatccagcggttgtgttccttcttccatgcaatcggccagaagatcattgatcccgagggactagatgaactacaggcagaacttgtgagaaccctatgtcatcttgagatgtactttcctccaactttctttgacataatggaacatcttccggtgcaccttgtgaggcaaacaaagtgctgtggtccagcattcatgacgcagatgtatccttgcgaaaggtacctggggatccttaagggttatgtatggaaccgttcacaccccgaggggagtatcatcgagagttacaccaccgaagaggccatcgaattttgtgtggactacatgtcagaaacatcttcaattggattaccacgatctcatcacgaagggaggcttgacggtgttggtactgttggaagaaagactattaggttggatcggaaggtgtacgataaagctcatttcacggtactacagcatatgactgaggtggtgccgtacgttgacgaacaccttgcagttatccgacaagagaacccaggccgatcaaagagttgggtcaggaataagcacatgtcttctttcaacgagtggctgaagaaccgaattgccaggttgcagaacttgtctagtgaaacacttcagtggttgtcacagggtcctgaatggagtgccaccacctggcaaggatatgacataaatggatacacctttcacacggtaaagcaagacagcaaatgcacagtgcagaacagtgggttacgcatcgaggctgctagtgacggtggtcgtcgtgatcaatactatggtaaagttgagcaaatattggagctagattacttgaagttcaaagtcccgttgtttcgttgtcgatgggtcgatcttcgcaatgtaaaagttgacaatgaaggtttcaccactgtcaacttggctaacaacgcgtacaaggatgaaccgttcgttctcgccaaacaagttgttcaagtgttctacatagttgacccgtgtaacaagaaactacatgttgttcgtgaagggaaaaggagaattgttggattggacaacattgcagacgaggatgattacaaccagcacgtccacggcataggtcaagaaatacctctagaagaggaggaagaagaagatgaagttcaatatgcacgtgtcgaccatgaggaaggattatttttggccgtcacaggtgaggccacctgtgacggccacataatccaccgccctcctctccaccgcctcgacctcgacctctccgccaccatctctgccgccgccctctacgccgccctccccaccgccgcctcgacctctctgccgccctttccaccaccgccgcctcactcactctctcgaccgccgccgtccatctccatcgacctctccgccgccatctccgccgccctctctaccgccatctccgccctctacgccgtcctccccaccgccacctcgacctctccaccgctgccgcctcactcactctctcgacggccgccgggacctcctctcagtcgccacgccaggaccgtcgtcgccgccactgggatctcctctccgccgcctcctcctctcgaccggacctccacgcgccgccgtgccaagaagccgccgccgcgccgccgtgctgagaagccgtgcgccgtgcgcctgccgggactcgtcgtcgccgtgtgccgcctcctctgctcgtcgtctcctctccagttaaaccatgtcaacgcccggcgcaaaccagccctccccaacacctgcgaggatccaggaagaagcaaacccagccacagaggcagttgccgaagaattgccgcaggaacaacatacgtcgatgtcgggcgggacaagtgcaagcccacggcgcctaggactgtcattggaagatggtctaactgctgcgggctagcggcacgtgagaacttcgggatcctccataaagatatcggcaaggtcacagaagccgagaaagagcgagcttggacggcaatggagaaatggttcacatttccagccgaagcaaaggataggctcaagcggaaggcattccaaaagatgggcaaagcttggaagaattggaagtcgaagctcttcaccgagtttgtcaacccgcccggcaatcatacaccgttcgatgaataccctcaaataaccgaagcggtgtgggaggaattctgctctctcaagaccacccaagagtttagggaatcaagcgaggcacatcgcgtactgcaacagcggaatgagcacccgcatcggctgggcaccgcagggtacatcggcaaggaggcaatatgggcccaagaagatgcagccgctgcagcagcgaatgtccctaccccgttttcagacatccctgagcaaagagctcgcaactgggcgcgggcaaggggtaaggtcaacccggacggctctgtcacatttgagaacaaaagtgatgccgtcgtctatcaggaactgttgggcttggttgctgaacaagcttcacaaagcgaggttgagtccgcgccgaagaggcgcgaagatgacatcctcacaaaggcgctcggaaccaaagaacatcctggccgaactcggggaattggtagcgatgtgccctggaagcatggactccctcagtacagctcccaatacaggaaacggaaagtctccaaggaagagagggacgctcgtttgaaggccgaacttaaggttgaggtcattcaagaactagaagctagcatgaatgcaagggtggaagaaagggttaacaagcataggagtagttgtgcatccacagaggtgccggcccctggtctcccgatcgcaccactagctgcagtggaccacatcgagggcgcagcacagtgtgtcctactagcgagagtccacccaactttcgctcctgaagtcgctgagggcatggctttcaacccctcggttacagacaaggtccacggcgcagacctgctagctgggtatgccaaggtgtccatcgatacagtaaaggacacctggtcaggctatccgctgcccgtgcccccaaatgatgaaatcatgactttgggcgatgcgcgcaagacgttcatacaatggcccaaagaagacatagttgtgaagatgactcctcgtccaagtcgaccgatggagcttacacctcccaagtctaagctatcaattgaggctccccgtggaccggcattgtcagtacctcattctcccggtggagctgatatggacttggcagatatagctcaaagcttggctccaataaagaccacaagaaaggccgatagctccccaccacttgtcaaggaccagaagcgtgaacgcggcaaggggaaggtcggggagttggcgccggagccaaaaaggggcaaggctgcgacgtcgatgccagtgagcaaatcggggaaggtcgtgagggcgccagcccaatttgagctaggcatgccattggtggaggacaatgtgttagctgtgatgggtattgcttgccgagagctacataagcaatacatggagctaagcaatgccaagcggaaaatgagggagtcatccatagttggacatcacgaccaccagccgttcctatcgtcgcctgcctatataactataggctttgatgacctcttcgaccttttcaggatccggaagttggacactggtcttctaaaatgctactccttgttgtgttggatcgagagtcgtcgccatggtaatcaggttgggttccttgatccatccatggtgaatgaggttaatttacgacagagcttcactgaggtggttgactatgtcaaccggctagcggagaccaacacctctgacggccttctagtaacttgcccgtcagaggtgggtgtcacctgtgacggccggccacccgtcaaagccggttgcatcaacggtggcgatatcaagcgctcctactcggcgcacgtccatgtcgtcttcatcctcaacatccccctacagacgctgccgcttggtactcgggcgtgttttcacacctccgagcgcgtgcacacccacccgcaccgccgcacgctcaaccgggccacttatcttacagaaagctgggctacgagagaccaccaccaccgccacggcccgcgctgcgtcagccgacgaacccaccgtggccacgcccccggaggcatcgagggcagcacagttgcgccgcgccgacggtgccggacgagcagccgaccggccgtcgaccagtggctcccaccgagtccaggttcctcccgcggcgccacccaaaggcgcagccgcgcgaggtaccccgggcggcggctgcggcaagtgagcagtatgaaagcattgaaaaaaaaactcctttgctgggccggtggaaaaaagaacaagtacattgagatgttcttgactccagaggatgcatttgagctggctacaaaagagctacagcatactgctgtgtccaggatattattgatttgaagaaaggctatttgaggcatgctgcttgtgatgggacacattttaagcttatactccactatgcccctttacacgtgccaggtgtgatccattgtgagttcttgtcaataagctaattgagtatttattcatatcatgggctcattgctaatctagttttggatatgagt

SEQ ID NO: 93367 - DNA, 255 bp, Oryza sativa
  Clone ID: PAT_MRT4530_91759C.1
atgaggtcctaccggactgaggactggctgcgcaaggaggttgctgcggtgatgcagactgtggtggggagcaaggggaaaaccgacgacacaggaaggaggtcgcgttgggcgatgccgccggcggggaggagcagagaaggagtagcagcacatggaggagggctgaaagaaagtggtgaagcaaacttgcgagagctggatccagcatgtggaggtgctcatcccatgaagtcaatggtggcgatcgagtag

SEQ ID NO: 93368 - DNA, 975 bp, Oryza sativa
  Clone ID: PAT_MRT4530_9175C.1
atggcgcaggagcccatcaaccaccaccagcaccagcacgacccgcccaagcagcccccgccgcgggaggccgacgacgaccaccaccggattcaggagagggagccgctgccgccgccgacgacgacgacgcggaaccagcggctccagctgcagctgggcggagacggacaccacaaccaccaccaccaccaccaccaggaggtcgccgggacgagcggcagcagcagcggcgggagcagcagcaacaacggaggcggcggcaccagggactggctccgcctcgccaccggcccggcatcgccgggggcctccgccggctccgaccacgacctcttcccgtccaccaccacgacggcgcccgcgccgcagccgccgacgccgacgccgacgccgacgccgacgccgacgccgcgccaccaccaccacgacgtgctggtgctcccgggcatgccgccgccgggatccttcctccgccccggccccgccatgcccggcattccgcaggcgtcgatacccacgcacatgctgcgcgccgccccgccctggctgccaccgtggagccccgtggccgcgccgccgccgctcctcccgttcccccaccaacaccgcgcgttctacgccgcgccgccgacgacgacgccgcccgcctcctcgggcttcgacgcgatcagggtcgtcctcccgccgtccgccgtcgccgccgccgccggcgtctggttcgtgctccaggccgcgccgctccaagggagggagccattcttgcctcagattccaaggagctacctacggatcaaggatgggagggtgacagtaaggttgctgaccaagtacctggttaacaagcttggattggaagatgaatcagaggtgaggggtgtgtgtcttgggtggcacatcagccccccctcaccacttgacaagagcttctccatccatgccattccattccattccattccatccatcctctag

SEQ ID NO: 93369 - DNA, 1116 bp, Oryza sativa
  Clone ID: PAT_MRT4530_91760C.1
atggtgaacactcgcgccagtggaagtggaaacaataacaatgaagggaacccaactcttgctcaagttctggctcaacagactcagttaatgaatatgatgatacagcagatgcagaaccagcttaaccaagggaacaacaatgctccaccgccgcagaacaagttagctgattttcttcgtgtgaggccacctaccttttctagcactactaacccagtggaagcaggagattggctgcacgctattgagaagaagttggaattgctccagtgcacggatcaggagaaagttgttttcgcttcacatcagttgcaaggacctgcatccgaatggtgggatcatttccggatgaacagagcagaaggacaaccaatcacttgggcggagttcacggaagcattcaagaagacacacatacctgttggagttgttgcttcgaagaagcgtgagttcagggcattgaagcaaaaggatcataccgtggcagagtatcttcatgagttcaatcgtctggcacgttatgctccagaagatgtgcgtactgacgaggaaaggcaggagaagttcttggaaggcctgaaggatgaactgtcagttacgttgatctctcatgactatgctgattttcagcagttggttgacaaagcaattcgacttgaagacaagaagaacaggatggataaccgtaaaaggaaaatgactgttttccaggaggcacaaggtagtagccagaggcagcgtatcaagccactccaaattggtgaacctttttccgctggtcaaggacattcgcaacagttgaacatcggtggtgagatcaaatcagagactaatgaaagcaaagaagttaacatcgagcaagcaaatcagccggtgccagttcagcaggatcagtctcaagtgaataacagtagtggaagggagcagcaggtatgtttcaactgttacaagccaggccactttgcaagagagtgtccgaagccgaagcatcagcagccgcaaggtcaggtcaacaacattgttgtcacaggagccaatgcagtgccagttgcgtcttcaagagttgtgtcttcaagtgttacaactcagccaccagtttcaaagaagcagtag

SEQ ID NO: 93370 - DNA, 441 bp, Oryza sativa
  Clone ID: PAT_MRT4530_91761C.1
gcttgctgccctttgtgaaaagtcgaacaactagctaacatcttccaattgaactggatttgttatctgatacacatctgccatggtgcaaaccgaggtttgggctgtaataaacaaggaatttcatattctctggtttcttcatcttgttaccctggttgtttgttggctttggtcagacaacttagtttgttttcaaaagcagaagaacaaaggcaagcacaagtgtttacatatatttgacacattccagcattcgttgttcctgatagacatacccttcacatgaagcacccttttgtgaccaagttagttctgttctttaggtttttttattaacctgattgtgattgaataggatttccctattcattttataccatgatagaaacatctatcttgctttgcttctaattgatgctgtaaataatgcatgtgctc

SEQ ID NO: 93371 - DNA, 1536 bp, Oryza sativa
  Clone ID: PAT_MRT4530_91762C.1
atggattcgagttcgaatcggatcggttttcctctctccaagccgagctttccttcgccgtctccgccgccgtgggccttcgccgccgcctccttgcacctatttaaggacccccgagctctcctctacccgtcgccaccctcgccttcgcctctcgtcgtcggaagagctctagcgccgtgtgccctagcttcgccgtcgccgccgccgctccagccgtgcgccgccgtcgtttcagccgtcgccgtcgctcgggaagaccgccgtcgggttcgcaaggtcgtcgccgtcctcgtccgccccttcgccgtcgccggagaccgccggagcttcatcgccgtcgtcaacccgaaggtttccgccgcttcctcctcgtcgccgtcgccgtccgttgcttctccgccgcttctttggtcaccgatggtgaacactcgtgctaatggaagtggaaacaataacaatgaagggaacccaactcttgctcaagttctggctcaacagactcagttaatgaacatgatgatacagcagatgcagaaccagctcaaccaagggaacaacaatgctccaccgccgcagaacaagttaactgattttcttcgtgtgaggccacctaccttttctagcactaccaacccagtggaagcaggtgattggttgcacactattgagaagaagttggaactgctccagtgcacggatcaggagaaagttgttttcgcttcacatcagttgcaaggacctgcatcagaatggtgggatcatttccggatgaacaaagcagaaggacaaccaatcacttgggcggagttcacggaagcattcaagaagacacacatacctgcaggtgttgttgctttgaagaagcgtgagttccgggcacttaagcaaaaggatcgtaccgtgacggaatatcttcatgagttcaatcgtctagctcgctatgctccagaagatgtgcgtactgacgaggaaaggcaggagaagtttttggaaggcttaaaggatgagctatcagttatgttgatctctcatgactatgaggattttcaggagttggttgacaaagcaattcgacttgaagacaagaagaacaggatggataaccgtaaaaggagaatgactgtattccaggaggcacaaggtagtagccagaggcagtgtatcaagccactccaaattggtgaatcttcttccgctggtcaaggacagtcgcaacagttgaacatcggtggtgagatcaaatcagagactaatgaaagcaatgaagttaacatcgagcaagctaatcagccggtgccagttcagcaggatcagtctcaggagaataacagtagtggaaggaagcagcaggtatgtttcaactgttacaagccaggccactttgctagagagtgtccgaagccaaagcatcagcagccgcaaggtcaggtcaacaacattgttgtcacaggagccaatgcagtgccagttgcgtcttcaagagttgtgtcttcaagtgttacaactcagccaccagtttcaaggcagcagtag

SEQ ID NO: 93372 - DNA, 1866 bp, Oryza sativa
  unsure (1)..(1866): unsure at all n locations
  Clone ID: PAT_MRT4530_91763C.1
atgaataccaactttattatatatccaaattatattgattatgatgctaacttatgtgggagatgcaatggggtgggcataatgatcttgtatacgattgctctatgtcatgacgatgatattagagtagtatttggtaatttaagcgtgttgtttagattactagatatcgttatttggggttatatgctgcgggtatgtcgaggtggggcgctgatggtgacagctcagtacaggtattcctctccgtgcgtgtatataatcctaagtgactttcctgaggagggtactcatccgtatttagccccggttggatggtcatgatgggttgtcgtaaggaactcggcaatcaggggtggcttatcaaagcaccaggagggcattggaaattcagccgaggtacacaaactgacaatttaatatacagattcatcaaaataactaaaacgataaatacttacataagagacacttagtcctcaccacgaagaaaactgcagcggaaaataaaatctagcgaantccggctccactcccacaggcagctcaactggggtataagccaaacgtcttctccttctggatcctttttcttcaactgaggtttgattgattattgcaaggtgagcatatgacatactcaacaagccacacagcaaaatatgcaagtgcacaaggataccaaaaaatggcataatatagggctcatttgcaaaagcagcatttagcaaacatttgagaattgtaaaacagtagagcaattaatcatcaatattaatcaacactatacaacatacccatgccgcacaggcccaaccatcctgaacaaccatacccgtctgtacagatctatctccaaaccaggaatgtaccattccaaaccaggagctaatcaaattattaccagttatatcatctttcattatggtgagaagtgtgagactaatcacgaaagacattgttagacctgcccataactgcgggcacggctattcgaatagttttactctggccagaggtgtaccacacagtgcaccgttcctgcatcataatctccccctcaaaaccagaggcaatggactccccagcgacccccacgaacttctcgccgttgccttgagcttccgcaaacgcttcggaatcttcctcaacagaaacactctcctccggaacatcggaaactgctgcttccctctccgccttttcgcggccaggaagggcgccctcctcttggagcttcttcagggtcgcgctggtggaagtcgacttgccaagatccatcgccgccggaggatcaccggagatggacgaagattggcgaagatagggttctttgcggtggcgaagaaggcgaggagcgttaatgagcagtgtttgcttaacgaagtaggcggacttcaaaacgcgcacccaaaatcccattaaataagcgcactcccgacggtgcgaattccaaggaattaagagaaatccccgccggaaatttctaggtccgttgcgcaaggtggtttttggtctggaatgacaacgttctcgacacccctcgatatacatcacgtatcggtatgctcgactacacgtcatctccgtggttctcgcacctggaatgacaacgttctcgacacctatccttttcaacagctccggagagtattctcgcgtgtgagcatactctcggtcactcagcatgtagtaggcttgtctttcccgatcatcgacaaggtcgaggtcggcgtcgttcaggagacgtcgcggagcgtcgacatcatccattgagacatcagctaatgaaccagtactagactcgtcatgatgacttgatgaagagccggactgcttgaacagacaaggcagttgcctcctcat

SEQ ID NO: 93373 - DNA, 707 bp, Oryza sativa
  Clone ID: PAT_MRT4530_91764C.1
ctccccccatgtgcccttttttttttttttgtgtttttttttttttttttttttttcgcccgactttttttttttttttttggagattaaaatgttcatcacggaaacatgccataccatgtgctcaaatgtcgaaacaaaagcgggtcgcggaacatatcatattcgttacagggttcattttgatttgaagttttaggctaccagaaaataacatttggaagccaaccagctgacgatcgatatcagcatcttaagcagtgcgcaggatgatgtgaacaccactgtcagtgtccacagtgtcactcatctcaccaaccttgagagcaaatgtcgcatcttcgaagggtttctgcatctgcctcctcccaaaagtgcccaggtcgccgccacggcgcgcggaggagcagtcggagtggcgggcggcgaggtcggcgaagttggcgcggccggagaggatctggtcgcggaggtcggcgaggcgcgcggcggcgtcggcgcgcgtggtggcggagatgacgcggccgtcgggatccttccaggaggccttgcggcgggagccctcgtgcttgatcaggatgtgcaacgccctcaccgtctccgtctccgtcgccgacgacgccatctcgatctcctcctctactcctccgcctcaccaatacgctttctgcgaatacgcttttccggccgccgggtgccccggccgg

SEQ ID NO: 93374 - DNA, 876 bp, Oryza sativa
  Clone ID: PAT_MRT4530_91765C.1
atggactccccagcgacccccgtgggcttatctccgccacttctcagtctggtgctccgcaatgaatcatgctatacaaaaggaaaaggaggattattgcgtcagcggctagggtttgcggtggaccgggtgcacggcggcggttcacggaaacgaacggccgagatcgatcttatccaaaacggatggccgagatcgaacggtccacgaccggctcacgggaaacggcaacgatgacgtcagcggctacgtcagcgatgacgtcagcaccggcggcggctcggcaacgcatgctcgccggcgaacgacggcgcgacgacgcaaacggaggacaccaacgggtagagggcgacgcggcgaactcactggtgaccaaaacaacggcggaagggcaacggacggcgccggcgacgaggaagaagcggcggcggagatcgggtcgacgacggcgacggtgctccggcagtcttcggcggcggcgaaggggcggacgaggacggcggcgacttggcgaccacgatggcggtcttcccgagcgacggcgatgaccggaacggcggcggcgcacggctggagcgacggcgacgacggtggcgctagatccatggcgctagggctcttccgacggcgagagacaaaggcgagggtggcggcgggtagaggagagctcgggggtcgttttaaaggtgctagcgagcggcgacggaggcccacggcgaccggcggcgagaaggaaagatcggggttcggaggaaagagaccgatccgattcgacctcgaatccacgaacttccaaagcgaaaaagacgacgattccataagagaaaagatagagtggatcgcggagattgtttccacatactcaacaagccacac

SEQ ID NO: 93375 - DNA, 504 bp, Oryza sativa
  Clone ID: PAT_MRT4530_91766C.1
atggcccggatccgtagtcaagaaagaaggaccgcatacgcctttgccgatgaagctcgacaagatgatgaccgcggtggctttgtgtgtggcgatgattatgacgatgttgatgcttgcatgtccatggctgacgtcatcaaggcggggcgcggcgccggcaagcgggccccaccggtcagcggctcgggagagagggaaaaggggcgccggcaagcgggccccactcggcagcggcgcacgagtggtcagtctaccgtggaccgggaccacgcgggtggtccaccgccggtccacgggatcgacggcctggatcggcccggggccgatcggacgggcgatggcgacccggctcggctcaagaccggccaagcggccacggcgacggcgacggcgcgcgcacacgcgttgccagtgacggtaaccggcggcggagacggcggcgcaaaggcggcgccgacgggcggtggtgctagagcggcggctaacgggcggcggcgctaa

SEQ ID NO: 93376 - DNA, 897 bp, Oryza sativa
  Clone ID: PAT_MRT4530_91767C.1
atggcgcagatgggcgccgccgcgttcgcaatccagagctctggggcgagctccaccgctcccccgatgcagagtgccgcggccaccggcgacggactgcaacgtgacaacatcagcttgttggattcattcggtgcggctaccgccggatcgttcatggccgtgcttctttgcgccatgattgcaatgaaaaagggcaagaaacggcggcgcccaagctccgcggagtacccgagccccaagaagaccgcggccatgttagaggtgagcagggacaacaccgatctcggctatgtggaatgcgtgccggatgaggagacggcggcgatgatgatgccggaggagatggcgcggcggctggagcagagcggctgcctaacgttctgtgcgggcgagggcgcgagcaaagctgccactccccaccgcaacagctgccgccgctccccgccaccatcgtccccaccgccaccgcagccgctccccaccgccactgccactgccgcagctgactgtcgccgccgccgctccccaccgcctcgtccccaccgcaaccgccgctgccgccgaccgtcgccgccaccgctgccgccgccgaccgtcgctgccgtcgctccccaccgccaccgctgctgccgcagccgaccgtcgccgccgccgctccccaccgctaccgccgctgccgcagcaactgaccgtcgccgcaaccgttccccaccgcctcgtccccaccgccaccaccgcccgctccccaccgctgttgtcccgaccgccgctccccactgtcgtccccgccgcatgccacgtaagcgccacgttggacaaagacttagtcaagaccgccatgtaggcgccacgtcctccaaaaccactgaggggtattgtttgcaccggttttga

SEQ ID NO: 93377 - DNA, 2544 bp, Oryza sativa
  Clone ID: PAT_MRT4530_91768C.1
atgtcaacgcccggcgcaaacccgccctccccaacacctgcgaggatccaggaagaagcaaacccagccacagaggcagttgccgaaggtcatcccgcgacaacggcggtccaacaacccgaaattcatgaattgccgcatgaacaacatacgtcgatgtcgggcgggacaagtgcaagtaggtctagtagaaatccgcggtcacaaaatatatggccgaccacagtgcaagttataagagaggttgacgctagtggtaggcccacggcgcccaggactgtcattggaagatggtctaactgctgcgggatagcggcacgtgagaacttcgggatcctccataaagatatcgggaaggtcacagaagccgagaaagagcgagcttggacggcaatggagaaatggttcacatttccagccgaagcaaaggataggctcaagcggaaggcattccaaaagatgggcaaagcttggaagaattggaagtcgaagctcttcaccgagtttgtcaacccgcccggcaatcatacgccgttcgatgaataccctcaaataaccgaagcggtttgggaggaattctgctctctcaagaccacccaagagtttagggaatcaagcgaggcacatcgcctactgcaacagcggaatgagcacccgcatcggctgggcaccgcaggatacatcggcaaggaggcaatatgggcccaagaagatgcagccgctgcagcagcgaatgtccctgccccgttttcagacatccctgaacaaagagctcgcaactgggcgcgggcaaggggtaaggtcaacccggacggctctgtcacatttgagaacaaaagtgatgccgtcgtctatcaggaactgttgggcttggttactgaacaagcttcacaaagcgaggttgagtccgcgccgaagaggcgcgaagatgacatcctcacaaaggcgctcggaaccaaagaacatcctggccgaactcggggaattggtagcgatgtgccctggaagcatggactccctcagtacagatcccaatacaggaaacggaaagtctccaaggaagagagggacgctcgtttgaaggccgaacttaaggttgaggtcattcaagaactagaagctagcatgaatgcaagggtggaagaaagggttaacaaggtcctcgccgacatgaatataccccgagtcacaacacctgctgtgcaaccaactcctcgtgtacaacacgacgcgagtccgtcacagcataggagtagttgtgcatccacagaggtgccggcccctggtctcccgatcgcaccactagctgcagtggaccacatcgagggcgcagcacagtgtgtcctactagcgagagtccacccaactttcgctcctgaagtcgctgagggcatggctttcaagccctcggttatagacaaggtccacggcgcagacctgctagctgggtatgccaaggtgtccatcgatacagtaaaggacacctggtcaggctatccgctgcccgtgcccccaaatgatgaaatcatgactttgggcgatgcgcgcaagacgttcatacaatggcccaaagaagacatagttgtgaagatgactcctcgtccaagtcgaccgacggagcttacacctcccaagtctaagctatcaattgaggctccccgtggaccggcattgtcagtacctcattctcccggtggagctgatatggacttggcagatatagctcaaagcttggctccaataaagaccacaagaaaggccgatagctccccaccacttgtcaagggccagaagcgtgaacgcggcaaggggaaggtcggggagttggcgccggagccaaaaaggggcaaggctgcgacgtcgatgccggtgagcaaatcggggaaggtcgtgagggcgccagcccaatttgagctaggcatgccattggtggaggacaatgtgttagctgtgatgggtattgcttgccgagagctacataagcaatacatggagctaagcaatgccaagcggaaaatgagggagtcatccatagttggacatcacgaccaccagccgttcctatcgtcgcctgcctatataactataggctttgatgacctcttcgaccttttcaggatccggaagttggacactggtcttcttaaatgctactccttgttgtgttggatcgagagtcgtcgccatggtaatcaggttgggttccttgatccatccatggtgaatgaggttaatttacgacagagcttcactgaggtggttgactatgtcaaccggtgtttatgggcccatcaagacaaggagtacatcatgtgcgcacacaaccaagatgaaatcaccaaggccttaaatatggcttggggcccatatgtggaaaagggtggtaggcacaaggagggcaagaatgaactttatcatgacaccaagtttgcatgcgcacaacagatcggagaccaatgtggtttccacgtgtgccacaacatgtcaacacttctaagagaggtgaaagatttcgaccctgaggttgttgctaatggcgaataa

SEQ ID NO: 93378 - DNA, 1293 bp, Oryza sativa
  Clone ID: PAT_MRT4530_91769C.1
atgggccaactgccgatcagcttgttctttgccgacaagatccaaagcaggggagagattacatcggcacttatgatggatcggctgctgaacataccaggaccacctctaggcagcattgagaacattaagctgagaatgttgagaagtgcagcatttgaccgatggtggatagaatggaaaaaacatctgttccatcaatcggcttcaatgtacatgacagacttattccctgaagctgtccctcaaacaacagaatcttcccctccccatcatagtgatagcggcttggagatccaacacgctctagggctccttcctaatagtggtggcttagctcccccagtcatcggctactatgcccccaagacttcaacactactacatggtctgccgcttgtgccgattgctcctgatactggcaagaaaaagagaacaaaatcggttgttgctccatcggctgcaacaaagaaatccaagaaggaaaagactgctgttgatgacctgccatctatagatctagatgtggagcaatttctggaaggtgaagaattagaagaagctgtggatgaagcagccgaaaacattagtgaaacaagaaagcaaacacctccagccgatattcctgctcctcaaaaacccccatcatctccagttcatcccacttataaaccaaggcctcgtcgttctccaactcctgttcctgagtcaagtgaacatactccatcggctacgggtagccatcatgtggaggaagaggtagcaccaactcctgccatacctgttttagccaatatattctccattgacatcaggcaatttatggatgaagacagattcctggaaatccatgaccaactcccagatgaactagccgatgtcattactccagcagcatatcttgaacagcatcggctcaagcttgagaaagctaaacaaaggattgccgatcgtcgtgaaagaagatatctcgaagcaaccatccaagctagcagagcttctatcaatgaagaaaaggcaaaacttgatgaattggaagtcggtccaagttccactcaagccaacatagaacagctgaacgctcggaagatagaacttttagccgagttggaacaatgcaacgcacaaattgccattgaagagcagaagcttgccgatctgcccaaagccactgaagaccagagatcaaagctgaaatcatttgtcaaatacttaaccgaattgacaaaatatctgaaggtgatctctggggctgatgcagccgatgcccaaatcatcgatgaagtagactaa

SEQ ID NO: 93379 - DNA, 1809 bp, Oryza sativa
  Clone ID: PAT_MRT4530_9176C.1
gcacgaggcctcctcctgctacctgggagccacgcgcccccggcctccacctcgccgccctcctcgccggcggccgccacgcgcttatggtgagtgcacagtgagctacaagttaccattatcagaatggatggtatgaaggatggccgggatgaggaagttgccactgatgcggttggtgctggtggagttgatgtgggcggtgagacatcaaaattgattgatcaagactgcatggcaatactcgacgtgctggcgaggaggcttatgagtggtgagtctgaaccttacattggaaagataataaagatatggcagcaaaatcaggctaagaaagtaaagattctttggttttttctcccggatgagattcgaaaacatttaagtggccctgtaatggaaaaggagatatttcttgcttgtggtgaaggcgttggccttgctgatatcaacccactggaagctattggtgggaaatgcactgtgctttgcatttcaaaggatgagaggaatcgtcaaccttcccccagggaactagcaatggctgattatatcttctacaggttttttgatgttaacagttgcacactttctgaacaattacctgagaaaattgcaggggtggaaggaaatcttttgcttaattcaaaagttgagcaagtgacatcctgttcagaccaggaagtgcatggtgttgatcagaagatgcttaatgtcccagttccccttccccagtcaacggttatggaggatgaaagtccagttgctgcagtttcccttcccccgtcagtattcaaggaggaaaatgtggcttcagccattccctttccccagccagtggtcaaggaggaaagtgcggctgctgccattccccctccccatgtagcactgaaagaggagagtgtgtccaaatctacagagaacattaccaaacctgcacagaaagttctccctggggagaggccaccaaagagggtcaaattttctgaaaatgttacagtgcaaaatgtgccattagatgttcctgaaagaccaagtcgcactggacctttggaactagcaggtagacaagctgacagaagcaaatggttcaagattccatgggataccagactacgaaatgctgatgagcaggggacacttgtgtacattcaaaatcttgacatacagtttgcagctgctgacatagaggagcttatacgtgatgctttacaactaaattgtatcgctaagcctattaaccacccaacttatgatgatccaaacaatggaaaagcatatgctatattcaaaacaaaaagtgccgcagactctgctatttcaaaaattaattcaggcttggtggtcggtggaagacccctttattgcagcaaaggattgcttaaggttccaaaaccttcagaaactcttctcgggcacttaacaatcaacaatattagaatgggtataagacaacgagaagaacaggtgctgatgttgtcctatgaagtttgctctatttcttttctctgtcttaatatttttgcacaaccattattctttctccagaagaaggcagtttcaacctcgcattgttctcaacccaatacaatggagtatgatttggccttggattggatgcttgtccgagcaaagcaagaaacgaaatttaggacacttcacaagctcctgaatgcagccaccggcctcggtaggttaaaaattgacaccgcaaattctggtgatcgcctggtaggtattgttggtatagctaaagatgatcatgtcttcgttttggatgctcttggtgaaccatatgctggttcttga

SEQ ID NO: 93380 - DNA, 1744 bp, Oryza sativa
  Clone ID: PAT_MRT4530_91770C.1
tattaaccctcactaaatgctggggaagatcttccttgtcgaaaacaagagtaacaattgtcttgcaatacaattggtctccaacatgactagatactttagtgtactttggtggaacctcatatccaagatcatacgtcatacgacaaagctcacttgtaagaccatagttcccatatttctcagcttcctttagaataatgcattgctttccagagcttctcttatctcattaatctgatcaatctttttgggcagatcaccctaaatttcatcaaagcgtgccatcatcttttccaacctctccttgtagggattcatctaaagcaagttgaaagacggggaagggaggatgagaaaagcttttgcaaggagcaatgggataaggaggaaaacagacttttgcaaatagatttttgttttagcaaagacacgtccttaaggtttgaccatttggcttatcctacagtcgagatggctctgataccaacttgtcacgcccagaaattcactagtaatttctgaacttatttgtgcattaaatcctcgtctaggaatcagccgaggtacacaaactgacaatttaatatatagattcatcaaaataactaaaacgataaatacttacataagaggcacttagtcctcaccatgaagaaaactgcagcggaaaataaaacctagcgaagcttcagctccactcccacaggcagctcaactggggtataagccaaacgtcttctccttctggatcctttatcttcaactgaggtttgatgattattgcaagaatgagcatatgacatactcaacaagccacacagcaaatatgcaagtgcacaaggattccaaaggatggcataatatagggttcatttgcgaaagcagcatttagcaaagatttaagataagtaaaacaatagagtaattaatcatcaaaattaaccaacactgaacagcacacccatgctgtacaggcccaaccaaacctgaacaaccagccccggtcgtacatatcaaacctccaaaccaggaattatccattccaaaccaggagtcaaattaattatcacattattaacattgatgagtagtgtgggactaatcacgaaaaacattgctcaactcgcccataaccgcgggcacggctattcgaatagttttactctggccagagatgtaccactgtacacacacgacacgattccacacatgtcgccatgccctgaagtaccaccacggcactacaaaaggggaaatcgtgacaatacctttcgcacaacacaactcaccacagtgcaccattcctggatcataatcaccccctcaataaccagaggcatggactccccagcgacccccacggacttctcgccacttttcagtctggcaccccgtaatgaaccatgctatacaaaagcagctagcgacacagcaacggctgcgctagcgttagagcaacagcggcggtgacacgaccgagggatctaaacctaacccgaggggacacggatagaagtctctccgaaccaaagcgatcggagagggagggtcgacgatgacgatccggtgacacacacagaaacgatgacgacgcggagaagacgacggcgacgcccaagacgacgacggtgaggggtgacggctagcagcagcggcgactagggcagcggcggctaaacaggaggaggaggaggaggctcggggcgactgaaaaaaaacaggaaaaagatggggaggggtt

SEQ ID NO: 93381 - DNA, 219 bp, Oryza sativa
  Clone ID: PAT_MRT4530_91771C.1
atgatgaggacgactagcgtcgactacaacctcgagcaccaaaggaaactctcaactacaagaaaatttgacacacaggacaagtccgacgacggatctacaaagaaaaggagcccccaacctctcttcccccatcgccggcggcgaaccaccggagacgaggagggatcggagagggttctgagaggagaaggagaaaggaatcgaattgtcacataa

SEQ ID NO: 93382 - DNA, 8976 bp, Oryza sativa
  Clone ID: PAT_MRT4530_91772C.1
atggcgcaggtcgcttgtgcgggcgcggcacgccgagcaaactgcgatgtagaagttgcctgcggttcactgctgccaactgaagaagtgttggatcaggatgtagagaacaccgccgcagctcgagaaggcatgttcgtaccttctcctttaggtggagagaccatagatttggacactcaatgtctatctacaatgttgcatgacattgaagacgcagaggataacgacagagattatgagaagtttagtaagttggtggaagattgccagatgccgttgtatgatggatgcaagtcgaagcacagcaagttgtcatgcgtgttggaactgatgaagcataaggctagtaatggctggtcgaacaagagttttacagaactccttgagctgttaaaggatctgttgccagaggggaacaatttacctcagacgacatatgaagcgaagcaagtattatgtccgttgggcctggaggcagaacttgtgagaaccctatgtcatcttgagatgtactttcctccaactttctttgacataatggaacatcttccggtgcaccttgtgaggcaaacaaagtgttgtggtccagcattcatgacgcagatgtatccttgcgaaaggtacctggggatccttaagggttatgtacggaaccgttcacaccccgaggggagtatcatcgagagttacaccaccgaagaggtcatcgaattttgtgtggactacatgtcagaaacatcttcaattggattaccacgatctcatcacgaagggaggcttgatggtgttggtactgttggaagaaagactattaggttggatcggaaggtgtacgataaagctcatttcacggtactacagcatatgactgaggtggtgctgtacgttgacgaacaccttgcagttatccgacaagagaacccaggccgatcagagagtagggtcaggaataagcacatgtcttctttcaacgagtggctgaagaaccgaattgccaggttgcagaacttgtctagtgaaacacttcagtggttgtcacagggtcctgaatggagtgccaccacctggcaaggatatgacataaatggatacacctttcacacggtaaagcaagacaacaaatgcatagtgcagaacaatgggttacgcatcgaggctgctagtgacggtggtcgtcgtgatcaatactatggtagagttgagcaaatattggagctaaattacttgaagttcaaagtcctgttgtttcgttgtcgatgggtcgatctttgcaatgtaaaagttgacaatgaaggtttcaccactgtcaacttggctaacaacgcgtacaaggatgaaccgttcgttctcgccaaacaagttgttcaagtgttctacatagttgacccgtgtaacaagaaactacatgttgttcttgaagggaaaaggagaattgttggattggacaatattgcagacgaggatgattacaaccagcacgtccatggcataggtcaagaaatacctctagaagaggaggaagaagaagatgaagttcaatatgcacgtgacctcacctgtgacggcccagcagtgttgggcctgtcacaggtggccttacctgtgacggctccacggttggcgcccatcacaggtgaggccacctgtgacggccccataatccgccgccacctagacctcttcaccactgccctctccgccatctccgccgccctccccaccgccgcctcgacctctccaccgccctcctcgccgccgccctctccaccgccctctcgacctctccaccgccctcctcgccgccgccctctccaccgccctcctcgccgccgccctctccaccgccacctcgacctctctgccgccctctccaccgccgccgcctcactcactctctcgaccgccgccgtccatctccatcgacctctccgccgccatctccgccgccctctctaccgccatctccgccctctacgccgccctccccaccgccgcctcgacctctccaccgctgccgcctcactcactctctcgacggccgccgggacctcctctcagtcgccacgccaggaccgtcgtcgccgccaccgggatctcctctccgccgcctcctcctctcgactgggacctccacgcgccgccgtgccaagaagccgccgccgcgccgccgtgctgagaagccgtgcgccgtgcgcctgccgggactcgtcgtcgccgtgtgccgcctcctctgctcgtcgtctcctctccagaattgccgcaggaacaacatacgtcgatgtcgggcgagacaagtgcaagcccacggcgcccaggactgtcattggaagatggtctaactgctgcgggctagcggcacgtgagaacttcgggatcctccataaagatatcgggaaggtcacagaagccgagaaagagcgagcttggacggcaatggagaaatggttcacatttccagccgaagcaaaggataggctcaagcggaaggcattccaaaagatgggcaaagcttggaagaattggaagtcgaagctcttcaccgagtatgtcaacccgcccggcaatcatacgccgttcgatgaataccctcaaataaccgaagcggtgtgggaggaattctgctctctcaagaccacccaagagtttagggaatccagcgaggcacatcgcgtactgcaacagcggaatgagcacccgcatcggctgggcaccgcagggtacatcggcaaggaggcaatatgggcccaagaagatgcagccgctgcagcagcgaatgtccctgccccgttttcagacatccctgaacaaagagctcgcaactgggcgcgggcaaggggtaaggtcaacccggatggctctgtcacatttgagaacaaaagtgatgccgtcgtctatcaggaactgttgagcttggttgctgaacaagcttcacaaagcgaggttgagaccgcgccgaagaggcgcgaagatgacatcctcacaaaggcgctcggaaccaaagaacatcctggccgaactcggggaattggtagcgatgtgccctggaagcatggactccctcagtacagctcccaatacaggaaacggaaagtctccaaggaagagagggacgctcgtttgaaggccgaacttaaggttgaggtcattcaagaactagaagctagcatgaatgcaagggtggaagaaagggttaacaagcataggagtagttgtgcatccacagaggtgccggcccctggtctcccgatcgcaccactagctgcagtggaccacatcgagggcgcagcacagtgtgtcctactagcgagagtccacccaactttcgctcctgaagtcgctgagggcatggctttcaagccctcggttacagacaaggtccacggcgcagacctgctagctgggtatgccaaggtgtccatcgatacagtaaaggacacctggtcaggctatccgctgcccgtgcccccaaatgatgaaatcatgactttgggcgatgcgcgcaagacgttcatacaatggcccaaagaagacatagttgtgaagatgactcctcgtccaagtcgaccgacggagcttacacctcccaagtgtaagctatcaattgaggctccccgtggaccggcattgtcagtacctcattctcccggtggagctgatatggacttggcagatatagctcaaagcttggctccaataaagaccacaagaaaggccgatagctccccaccacttgtcaagggccagaagcgtgaacgcggcaaggggaaggtcggggagttggcgccggagccaaaaaggggcaaggctgcgacgtcgatgccggtgagcaaatcggggaaggtcgtgagggcgccagcccaatttgagctaggcatgccattggtggaggacaatgtgttagctgtgatgggtattgcttgccgagagctacataagcaatacatggagctaagcaatgccaagcggaaaatgagggagtcatccatagttggacatcacgaccaccagccgttcctatcgtcgcctgcctatataactataggctttgatgacctcttcgaccttttcaggatccggaagttggacactggtcttctaaaatgctactccttgaaccgctgcgagccgctgcacgtcaagaagccgtccacactgagaacgtgcgagaccaccggccgacagccgccgcacacgacctcgcgcgatttcgcgatcaggccgtccgtcttggttgcatgcaatgcaagtatactcggggaacggcgccggatgcccgggggcttcatccttgcgtggctgacgcggcccgactacacccgtggcgcgtgcgtccgcgggcatcccgccgcgtgctcgggaggtctcaccaaccggcttgcctccgtcgccgccgagtggtgcctccgcctacacggctggcctattatgccgccgctgttgggcgtctacgacttcaccgccggcctgcctccgtcgccgccgagcggtgcctccgcctacacggctggcctattacgccgccgctgttgggcgtccacgacttcaccgccgactggccgcctcgtcagccgccgactgatgtttctgcctgcacggctggcctattatgccgccgttgttgggcgtctacgacttcaccgccggcctgcctccgtcgccgccgactggtgtcctcgcctatacggttggttggtcacaccaccgttcatgggcgtccacgtcttcgccgaccggctggccttcgccgccgccgagtggtgcctccgcctacacggctggcctattatgccgccgctgttgggcgtctacgtcttcaccgtcggcctgcctccgtcgccgccgattggtgcctccgcctacacggctggcctattatgccgccgctgttgggcgtctacgtcttcaccgtcggcctgcctccgtcgccgccgattggtgcctccgcctacacggctggcctattatgccgccgctgttgggcgtctacgacttcaccgccggcttgcctccgtcgccgccgattggtgcctccgcctacacggctggcctattatgccgccgctgttgggcgtctacgacttcaccgccggcttgcctccgtcgccgccgagtggtgcctccgcctacacggctggcctattatgccgccgttgttgggcgtctacgacttcaccgccggcctgcctccgtcgccgccgactggtgtcctcgcctatacggttggttggtcacaccaccgttcatgggcgtccacgtcttcgcgaccggctggccttcgccgccgccgagtggtgcctccgcatacacggctggcctattatgccgccgctgttgggcgtctacgacttcaccgccggcctgcctctgttgccgccgattggtgcccccgcctacacggctggcctattatgccgccgctgttgggcgtctacgacttcaccgccggcctgcctccgtcgccgccgactggtgtcctcgcctatacggttggttggtcacaccaccgttcatgggcgtccacgacttcaccgccggcctacctccgacgccgccgattggtgcctccgcctacacggctggacctattatgcccgccgttgttgggcgtttacgacttcaccgccggcctgcctccgtcgccgccgactggtgtcctcgcctatacggttggttggtcacactaccattcatgggcgtccacgtcttcgccgaccggctggccttcgccgccgccgagtggtgcctccgcctacacggctggcctattatgccgccgttgttgggcgtctacgacttcaccgccggcctgcctccgtcgccgccgactggtgtcctcgcctatacggttggttggtcacaccaccattcatgggcgtccacgtcttcgccgaccggctggccttcgccgccgccgagtggtgtcctcgcctatacggttggttggtcacaccaccgttcatgggcgtccacgacttcaccgccggcctgcctccgtcgccgccgattggtgcctccgcctacacggctggcctattatgccgccgctgttgggcgtctacgacttcaccgccggcctgcctccgtcgccgccgattggtgcctccgcctacacggctggcctattatgccgccgctgttgggcgtctacgacttcaccgccggcttgcctccgtcgccgccgattggtgcctccgcctacacggctggcctattatgccgccgctgttgggcgtctacgacttcaccgccggcctacctccgtcgccgccgagtggtgcctccgcctacacggctagcctattatgctgctgctgttgggcgtctacgctttcaccgccggcctgcctccgtcgccgccgactggtgtcctcgcctatacggttggttggtcacaccaccgttcatgggcgtccatgcctccgcctacacggctggcctattatgccgccgctgttgggcgtctacgacttcaccgccggcttgcctccgtcgccgccgattggtgcctccgcctacacggctggcctattatgccgccgctgttgggcgtctacgacttcaccgccggcctgcctccgtcgccgccgattggtgcctccgcctacacggctggcctattatgccgccgctgttgggcgtctacgacttcaccgccggcttgcctccgtcgccgccgattggtgcctccgcctacacggctggcctattatgccgccgctgttgggcgtctacgacttcaccgccggcctgcctccgtcgccgccgaccgatgtcctccgcctacacggctggcctattatgccgccgctgttgggcgtctacgacttcaccaccggcctgcctccgtcgccgccgactggtgtccccgcctatacggtcggttggtcacaccaccgttgatgggcatcgtcatcttcaccgccggcctgcctccatcgccgccgactggtgcctccgcctacacggctggcctattatgccgccgctgttgggcgtcttcgctttcaccgtcgaccgccttcgtcgccgccgactggtgtcttcattgttattgatggacgactttgttcccacattggccacttctgccatcaccaaggggaatattacaaagctaagtcatcatttattttattctttcgggggctacagatgttatatcatattttttataatatttatcttgattgcttgcgacataatctgagtacaaaagtacctatcgagttatggagttctatcttcctatgctttccgtttggtttgccaatggatggttgcctttgggccgattcctagcacccgggggctcgttggatggaccgagtaacgcaaggtgctaagtattattcggaataaatcaaaagcatagagatgagataaatttattttctgctcttaataattgcaaaagtacccgagtagtaaactccgatccgtgaaactttgttccattaatgacgaactcatgtcactcatatgcatgtttgggaagtgcttaggccgactcccagtgcttggtggctatgactagttgggcagagcgtttaaacttaaaatacttgattttttctcgagtattatatttatatcagatactactcatcctatatgtttgttctgcaggatccagatccagatatgcataaaagggattcatggctttaagcttatctcttacgctctaggaatggatcagtcagaacatcaccaccggccgcctcgtccgccgccgactggtgttttcgcctgcacggttggcctattatgccgccgttgttgggcgtctacgtcttcaccgaccggcttgccttcgccgccgccgactggtgtttccgcctgcacggctggcctattatgccgccgttgttgggcgtctacgtcttcaccgaccggccgcctcgtccgccgccgactggtgtcaccgcctgcacggctggcctattatgccgccgttgttgggcgtctacgtcttcaccgaccggccgcctcgtccgccgccgactggtgtttccgcctgcacggctggcctattatgccgccgttgttgggcgtctacgtcttcaccgaccggcttgccttcgccgccgccgactggtgtttccgcctgcacggctggcctattatgccaccgttgatgggcgtctacgtcttcaccgaccggcctgcctccatcgccgccgactggtgtttccgtctgcacggctggcctattatgccgtcgttgttgggcgtctacgactccaccgaccggcctgcctccatcgccgccgactggtgtttccgtctgcacggctggcctattatgccgtcgttgttgggcgtctacgactccaccaccggcctgcctccatcgccgccgactggtgtttccgtctgcacggctggcctattatgccgtcgttgttgggcgtctacgactccaccaccggcctgcctccatcgccgccgactggtgtttccgtctgcacggctggcctattatgccgccgttgttgggcatctacatcttaatcgccggtcgtctcgtctgttgctgattagtgcccttacctctacgtctggtttatacagctaccactactgatggacatcatcatcttccgtcgccgactgattatgccgccgccgacttgtgcttttatcttcacaactgcgcgtcttcactaccggttcacttcattacggcaatacaactttgtcatcatggtggagcgacttcatctttattatcttcggcaccggcaaactctattgttgctacttcgcaagttttactacttcaccaaccacgacgtctttgtgaacctcgacatctcggcatgcaatgccatgttattttactacaacaagtggctctccaatattcaggatttctacttggacatcttcaacacatatcttcaatcaagcaatgactattcgacgacaagaagctacagttctcgactctatgttcagttgtttcccaac

SEQ ID NO: 93383 - DNA, 389 bp, Oryza sativa
  Clone ID: PAT_MRT4530_91773C.1
gctacatctggtgtgccagtgcgggagcaactttttaatgtttctatctgccattacaacaatggcaagttgtttcatcatggtgagttttcaagaagttttgggaggacatttgatacaactggcttagaggtggcgactcctattctgctccagagagatgatggtcataaacacaggagaggaagccacggggatatcatctttcttacgagtcgtggggaggtgacctcgtactctccaggtctacttggtcatgatgcaatatggagatggcaactgtcaacaggtgcaacatggtccaaccttccgtctccatcagggatgatggaaaacattgtagttccaactttgaaggctttctctctgcgagcctatgacccaaaaca

SEQ ID NO: 93384 - DNA, 568 bp, Oryza sativa
  unsure (1)..(568): unsure at all n locations
  Clone ID: PAT_MRT4530_91774C.1
cccacgcgtccggtgtaaatttttttgcaggcggattgttcttcatgtacctttgtttggttttagtataattggcggggttgttcacagagtcagtggacaaaaaaaatatatagcagaacacagctgcttatccaaatgagattttgatgactggaaaatagcttctgagcaatacaatgcaaaccaagcattgtcatgggtcgaagcaaatgttagatgtgataggagggattaattttttttcagcagagaataaccaagctggagatggctgcatatccagcagcatgccattggaggagcgcagatggctggacagccacacacctaaatcaagcttagacctaatccatgacggagatgatgggggagatcacagagtagaaccatatctagagacattggttagtggagctgactctgtcatgcacattggccatcacacttgctctattccatacccaaaccctaaccgcagatcgcaaccctaaccacagtggcaactcatattgggtatgttttacaattaatctatacagattgccctttagcanaaacaaataga

SEQ ID NO: 93385 - DNA, 1366 bp, Oryza sativa
  unsure (1)..(1366): unsure at all n locations
  Clone ID: PAT_MRT4530_91775C.1
ctacgcgtagaggacgacgaggcgaacccaacggtactcaccacaatgacaaacgacgaacgatgatggccggcgacgaagaggacggcggcggcggctcggcttgacggcgacggcggagctccggtggtcggcggcgaagggggacgggcggccgaggttctcctcaccacggcgcacccgaatagaggctgtgacaataccctttgcacaacacaactcaccacagtgcaccattcctggatcataatcaccccctctcatcaatggccgaaccaagatggcgacctcgccggagattggatggtcggctgcgactttggaggacaagaacacgtagaggacgacgagacgaacccaacggtacccaccctcgaaccaaacgacgaacgacgacggccggcgacgaggtctagcggcggcgcggcttcggtcgacggcggcgacggggctgcggtggtcggcggcttcggggagatagcggccgggcttctccaccctcccgcgcacctaacggtggtgacggagaccggcggcgacggcggaggcggcggcgcgacgcggatggagctcggccggcgactacggcggggtggagcacgtggcggcggcgctacgaggcacgggagaccacgggagagggggcaaacgaaagaggaggactagggggtcctatttatagccttggattgaagagatcggactcctcccgcaagaaatcgatccgggaaatcaaaaactcggttttggagataaactcgaaaacgagttcgattcggataagatactcaacgattagctccgatttttggggataaagatagaggaggataagaggaatatttcccctcaactaattttagaaaaacacaaggggaaaggtcagactttggaggagaaaaaccgagccaaatcggtctcagttcggctgctagaggcagaagataaacagtgtcgagggaggcaaattagacttttcgtcttgggctggctgaaaacaaagcaaagaaagaaagagaagggggaagctcggctgggccgacttggnctgcacggccgtgcagacaaaagagggagatgggctggaaagggcccaagactaggaagaggattattattacttttccaattaaattaatcaatgaaatgatctttgaattgttacgccgctcagaaattcactagtaatttccgaacttatttgtgcataaaatcctcgtccaggaatcagccgaggtacacaaacactgtacccacaagacacagcctcctcatcatgtctaccatgcgtcgcgatactggaaagtacccgaatagaggctgtgacaataccctttgcacaacacaactcaccacagtgcaccat

SEQ ID NO: 93386 - DNA, 183 bp, Oryza sativa
  Clone ID: PAT_MRT4530_91776C.1
atggaccgccaggaaaaatggatcttcactggtggccgagttaggacggccgccagcaaagatgcgctccttttcgctggcggcccactgaaacgtctgcgagcgaaaatcgggttttcgcacgctgctgtcgcctccaccaccgtccagtacaaccgccgcaacggccaacggggaggctga

SEQ ID NO: 93387 - DNA, 1119 bp, Oryza sativa
  Clone ID: PAT_MRT4530_91777C.1
cgtaagcaacagtaacgtttcatgaaaccggaaggtacaccagctcttcaattctacacttatccaacattctaactaatgtttctcgaatgctataccacaaagaaagattgaagcaagagtaggtccaccaatgagatattcacctacttaaaccatagcccatatatatagctgcatgtgtgtttttccttctaagtttgaaataatgaaattgcaactgtttttccttctaaggtcggcaggtacctcagaagggaaataacatggctaattttaattttttttttctgaaaaggatagtttccaatggaatttgtacaatattattatgcaaaggattgttttctggaagtaaagaaactggtcaggacacatgtaaatagatgcatcaagacacaatacgtcttaaaaaggtttgtctattagctcttgaataaaaagtgaataatgtgtttgatagaaatgattttgcaggcggattgttcttcatgtacctttgtttggttttagtataattggcggggttgttcacagagtcagtggacaaaaaaaatatatagcagaacacagctgcttatccaaatgagattttgatgactggaaaatagcttctgagcaatacaatgctgcagcgcaaaagaacagaccactcttcaataaatttaccttgtaaacaatgaatgcaaatcatggattgtagagtaaaggatggtgaaaaaaggcataccaaaccaagcattgtcatgggtcgaagcaaatgttagatgtgataggagggattaattttttttcagcagagaataaccaagctggagatggctgcatatccagcagcatgccattggaggagcgcagatggctggacagccgcacacctaaatcaagcttagacttaatccatgacggagatgatggtggagatcacagagtagacccatatgtagagacattggttagtggagatgcttctgtcatgcgcattggccatgacgcttgctgtattagaagcacaggtgcaaacagcagatggcatcccttccctcagtggcaagtcatattgtgtatgtttctcactttatctattcagattggcgcattagcagaatcagatatgta

SEQ ID NO: 93388 - DNA, 798 bp, Oryza sativa
  Clone ID: PAT_MRT4530_91778C.1
tagcctttttacaaagcagcatttttttccataaaccatcttccaagcttattatgctgattctaatatgctgtatgatgggctaggcaccaatttggttctcatcatataaactataattcatctcccctatgggcaggaggaagcacctgttcagcagaaggcagtgccacggttgcacctgtatttgaatcagtaactgaaggctcccgtttccattgtaaacttctagcaccagctatcattggagcacgccctctgaaggtgctaccagggaggccaccccttgggtatgccattctaccatgcctggcatacattgatgttcgcccaccaccaggccaaccataaaaatgtgcagcttcatgagaacttcgcctgacaaccttgaggatgcgtgccatgaatgatgttccattcaatgaaagagcacgttcagctgattctttatgtaaaaattctacgtaagcagatcctgttggctgccctgttgctgcattagtaacaataactactttgagcaccgcaccaaacttgttgaaatggcgagatagcgcgtccttggtggcaccaaaatgaacattgctaacatagagggttctagagtctgcgtcctcagttgggtgtgcagtgctatatgaactcgtaacagatgatgcaattgcagatcgctgtgaatccttttggacttctccatgagctagttctttgatattactagtcagagaggtaacagtagcattcatgggtgtaatgtccgttttctctacaacatgaacatctttccccacgcgtccg

SEQ ID NO: 93389 - DNA, 582 bp, Oryza sativa
  Clone ID: PAT_MRT4530_91779C.1
atggaggcggaggatgccgccggcggcggcggcgacggaggccggtacttcaaggccgacctcaccggcgccggcgtcgtccagctcagcgagcgcgtgcgggagaagctgcgggagttcgtggacgactacaccaacaacaccctcgtggagtacgtcattttgttgctcgaaggtggaaagcgcaaagatgaggccatcaaggagcttgatgtatttctgggaaaggatagtcgcgcctttatttcctgggtggataataaggatgacgaagccccaaatgaactacctggagaacagaaatcgtcagagttgcagttgagaagcaaagatcaaactcatcctgagtgtgtaagtgaacccagtacaaccagaagtcggactaaaagggattggaaaggaattggtcgggagggtaatgaaaactttccacttagaagtgtactgaaggatattttgcatggtgaggagaaaaggtcgcaaaaggttaatgaaatacgacatcccccatcgtctaatcaacggaatggcagaaagcgtgacagggatgacgaaccgcaacaaataaagctaaacatttaa

SEQ ID NO: 93390 - DNA, 288 bp, Oryza sativa
  Clone ID: PAT_MRT4530_9177C.1
atggcggcggcggctcggcttgcgcggtggtggcgggctacggcggccagcggcggaaaggagagggtggccgagcttccctacggcgtggtgaagcccacgacggtggcgacgaccgacggcgacggcggaggaggcgcggcggcgcggctggagatcgccggcggcgacggcgaggctaggcggcgtcggcgacgagctacggggcacgggaggcaacttgaccaaggctacacctactcctccacaccatcagcttcactgaagaactcttcctctgatgaatga

SEQ ID NO: 93391 - DNA, 3154 bp, Oryza sativa
  Clone ID: PAT_MRT4530_91780C.1
ttgttgcccctgcttgaataaaactagcttgatcaatttctttatgcataggacagattgttctaagtaatgcaaagttcaacacagaaactaaagtctaactaaaaaattatatcaatacattaaggaataaaagtataaaacagtactatgttcaataaaaaaacaaaaaagaaacaaagagagatgtttttccttttctttttttctgttttttttgttgggaaagggactggttctaagaagagtacaaatagatagactgctgtacagtcggagcttacaatgatgaagagcccagactaccgactaaatgccatgtccaaaaactagccctcaaatgctctatttgacaattgatcctcatccatggaagttatttcaaatctcagcaagtcctttcagatgactgaagaaaactgtttgctcaatgtgacgacagttcattgatctccaatacaaccacctccaagtatcagcatggtggtttatcaaattctggctccaaactccttcctcttttcttattttcttctctttttttgtattttcctgcttttagccttttttacaaagcagcatttttttccataaaccatcttccaagcttattatgctgattctaatatgctgtatgatgggctaggcaccaatttggttctcatcatataaactataattcatctcccctatgtggcaggaggaagcacctgttcagcagaaggcagtgccacggttgcacctgtatttgaatcagtaactgaaggctcccgtttccattgtaaacttctagcaccagctatcattggagcacgccctctgaaggtgctaccagggaggccaccccttgggtatgccattctaccatgcctggcatacattgatgttcgcccaccaccaggccaaccataaaaatgtgcagcttcatgagaacttcgcctgacaaccttgaggatgcgtgccatgaatgatgttccattcaatgaaagagcacgttcagctgattctttatgtaaaaattctacgtaagcagatcctgttggctgccctgttgctgcattagtaacaataactactttgagcaccgcaccaaacttgttgaaatggcgagatagcgcgtccttggtggcaccaaaatgaaccatgtgtgatgagaagacatagataccaacattgctaacatagagggttctagagtctgcgtcctcagttgggtgtgcagtgctatatgaactcgtaacagatgatgcaattgcagatcgctgtgaatccttttggacttctccatgagctagttcctgagtggttttctcaacagtcagataaaatctaccaacccagttcaatccaatagaggaaagtagtgacaaatcatttaataatgtgttttcactcgacgatctgtcagccttgcttctcattttgatattactagtcagagaggtaacagtagcattcatgggtgtaatgtccgttttctctacaacatgaacatcttttggtgtctcataattggaaggttccagattgttggcattaactgggacaaccacagttttgctcatacttattactgacaaagaacctggttgctcctccttaatcaagtttgaatgcctcattgtactggtctctggttcaacactgcatttcacgaaaacatctttcttctccacaactgaagggtaagcagctacttgtgaatcggaacttccatatctagtgattccatcatctctgctaacatcatcatcagatgtagaatcaacattcatttcagcttccccatcttctaatgttatgtctccggatatctcatcatcattatcgtatcgatcagaatcatgatcatctgcagttgtagctggtttgaaatcttcgtaatctctctgctgttcacgagaacggggtgtctgattcacagcattcccttggcctaatcgactaaacacgcttccagtagatctaactttggtagaatctgcagcagcctctgcggcagctctgagagctaaagcagctccaggtacttgaagaatttgcctagttctttctggctttttgtcatacaggtggccctctgtagatgtttctattcttttaccatgcaggctgtctgcagatgatgtggaaaccacagaacgtaggcgcttagaagatggttccgtagagctgctggtttgctgtacagctttcacagcatctcgaacagcaaactttagaagacggcaggaggcaccaacgtcacggcgcaaaggcaagtctctctttatttgttgcggttcgtcatccctgtcacgctttctgccattccgttgattagacgatgggggatgtcgtatttcattaaccttttgcgaccttttctcctcaccatgcaaaatatccttcagtacacttctaagtggaaagttttcattaccctcccgaccaattcctttccaatcccttttagtccgacttctggttgtactgggttcacttacacactcaggatgagtttgatctttgcttctcaactgcaactctgacgatttctgttctccaggtagttcatttggggcttcgtcatccttattatccacctgcagttgttcttgtgtttgcacataaaggtgcaaatttacagataaatgatcccacaaccaggaaataaaggcgcgactatcctttcccagaaatacatcaagctccttgatggcctcatctttgcgctttccaccttcgagcaacaaaatgacgtactccacgagggtgttgttggtgtagtcgtccacgaactcccgcagcttctcccgcacgcgctcgctgagctggacgacgccggcgccggtgaggtcggccttgaagtaccggcctccgtcgccgccgccgccggcggcatcctccgcctccatcgcgccgcacgcttccggtcccccccccgccaaacctagatccagcccagtggggtcccggggccgagacgggtgcagacgaagcgggcccgcggcgaccttatccgcgccgctctcatccacggggcccggggagctccgacggcgccgcagcggtcgactgcccggacggcggcggcggcggcggcgacgcgtggaggcggaggtggagatgggggtaggcacctcgtgccgattcctgcagcccggggatccac

SEQ ID NO: 93392 - DNA, 450 bp, Oryza sativa
  Clone ID: PAT_MRT4530_91781C.1
ggcgccgccgccattggtggtgtgcggcgaggcggcggactcggggtcgtcgtagatgtggttgaggacgtccttgacgatgctgatgagaggggtggcgccgatgccgaggccgatgaggaggaggacgtcgtacttccagtagtcctgcgccggcgcgccgtacggcccgtcgatcaggagcttggggaaccttgaatggtgctccatggacatgcagtcagcccggaggaggccgctctggccgttcatcggaggcctgcatatctgagagaagatggccctgaagctcgaggtccagtcaccgcggcaccggatatgcatgctgagatagctgtcgtcgggagccgaggtgatggtgaacgggtgccactcgaatggcgagaccttgccgcagttaacatagatgtactggccactcttgtacttgaacccatggggcttggcatg

SEQ ID NO: 93393 - DNA, 273 bp, Oryza sativa
  Clone ID: PAT_MRT4530_91782C.1
atggaatacaaggtaacaacatgtatcataccatcgcaaggagccaaggtaacaagaaagaccgacattgaagtggttgatctgcgcgggtggcaatggagcttccgacgggaaaagcagcggtcggcggagatcgatgatggcgcggaggagactggccaggcgtgcgagtgcgatgttgattcggcaacggagatcggtggcggcacggagaaggtcgaggagagatcaggggctacgcggaggaggacgggaggggatcgcgaggagtga

SEQ ID NO: 93394 - DNA, 498 bp, Oryza sativa
  Clone ID: PAT_MRT4530_91783C.1
taagctcgggaagaagatcgggagtggatccttcggggagctctatctcgccgtgaaggtacagaatagcgaagaggtggccgtcaaactggagtctgtgaaatcaaggcatcctcagctacactatgaatcaaaactatatatgcttttgcaaggaggaactgggattccacatcttaagtggtttggggttgagggggagtacagggtaatggtgatcgatcttcttggcccaagtcttgaggacctatttaactactgcaacagaaagctctctcttaaatcagtgcttatgcttgctgatcagatgattgctagagtagagtacatgcacacgagaggattccttcatcgtgatattaagccagacaatttccttatgggtttgggtcgtaaagcaaatcaggtttatgtcatcgattatgggcttgcgaaaaagtaccgagatctccaaacacataagcacataccttatagggaaaacaaaaatctaactgg

SEQ ID NO: 93395 - DNA, 105 bp, Oryza sativa
  Clone ID: PAT_MRT4530_91784C.1
atgtcagagatccaggagttgttcgccaggcaaattaaaatgatgatctatgtggattttgacaaggtcgatgtgtgtacccgggtcagatgtccattgggctga

SEQ ID NO: 93396 - DNA, 118 bp, Oryza sativa
  Clone ID: PAT_MRT4530_91785C.1
ccgttacggccggcgaggatatgcaactttgttcaacctcgaacaacaattagatacggagtactacatgggactcccatgcaaactagtcgtgctcctacgacctaaccacaagtaa

SEQ ID NO: 93397 - DNA, 381 bp, Oryza sativa
  Clone ID: PAT_MRT4530_91786C.1
atgacgtcatcgacggcagccacgacatgggtggcgacctcgccggagctagagaggtcggccgggctatctaagggcatctacaccggcggcgactctccggtgaccggcgacggcggggaggggacggccgagctttccctcttccacgcgcacccgacggcggcgagaggaggcagcggcgacggccaaaacgacggcgcgaggcggctgttcgtcggccggcgacggcggcggctaagacgacgtggcggcggctctacgcctcctcatctagttacgaccaggatctgggaggggcgtggccccgacgacggcgaccacgataggcgggaggggcgcgacgtggatgtgcatggcaacgacaacgacagcgactag

SEQ ID NO: 93398 - DNA, 216 bp, Oryza sativa
  Clone ID: PAT_MRT4530_91787C.1
cacttcttgtttttcactgctgctgctgctgctcagctggtgggaatctattggcgcttgctgtccttcttcccccgaaatgtttgcgatcgattgattgatggcatcgacaagccggagcggtgggagcgccctcataacttttagagctaatacgagcaacaaaccccgactttctagagggtcgcctttattcgatttaaggctgccgctgtc

SEQ ID NO: 93399 - DNA, 275 bp, Oryza sativa
  Clone ID: PAT_MRT4530_91788C.1
acgcccacgcgttcgcagctatggcggcgtcatagttgaagcctacaagagccacttcaaggggggcggcccccggctagaaaaacggcggctgcaagtgcggcaccagctgctcctgcaccgactgcaagtgcggcaagtgaagtcacgaagcaaccgaacactcgccgccggcgagtcacctaccttaattagtccacaataaaaaccacccatatgagtgtggtttgtgtgtgtgctgattattgctgaattaaacccgtgtgttatcgatt

SEQ ID NO: 93400 - DNA, 1703 bp, Oryza sativa
  Clone ID: PAT_MRT4530_91789C.1
gaatagggttgatctgcaccggcaagatcaacaacccacggagagttatcacaactcaccgaaagatcgggccaacaacagccttgagtgtcgagaggaactcagggttcagcaggtggtatcagagctttcggtgctcgtttttgctgaaccctgagttcctctcgacactcaaggctattgttggcccgatctttcgggtagaatctaaattgccagtttttgatggtaagtatgattctgccgcttatgttaattgggagctagcagtagaaaaacaatttgatgagtatgatttttctaatgctcaaatgattaaggctgttagtaataagtgtatcggttctgcatctttttggtggcatactgtgggaaataagcttgaaacttgggatgaatgcaaaatactgatgagaaaaagatttgtgttttcatactatagacgtgctctctttgagaaatttgaacatataaaacaaggtgacaaaactgttagggagtactttcatgattttaaaatttgtatcacttatagtggtttacaagaatctaatgagaacacaatgactagatttttcagagggcttaattccaatattcaggttgggcttgttaatgtgacatataatcatataggccaattgttcatgcttgcttgcaatattgagcgcaaaattttggagaacccaatggagcaacaagctatgcttgtgcctcctatcgctgatattttgcaggaagttcagaacagtccccaaaatgagaagaacgatatgtttgagatgtcacttccatcactcgcgaatgaggagaaggctgatgcacctacattatctgaagagggcataaaaggtaaattaaatggtgcagaaattactcaagatgagtatgcttctgatgaattacatttttccacttgtcatgctagtgaagagcaactattagtggaaccaattgctgagatgcctttgtcacaagttgatttacttgctgttccttgtgatagagaagagttgtgtgataatgcttcacttatatccatgccacaactagtgaatgaacatgctatttctagtgttttattgtgtgctgattttaagcatgttgttcacattgctaatgatattgaggaacgtaaattgataacttctttcaatactcgggctatgttcagtttgatgatttttaaacatgtttttgctaatcacactacttcgagtttgtctagttttgattggatgaaacaggttattttgaatggactatatgaagagcaccatatggaaaaaacgacgacgattttccgtgaagaaggggaggatgatgtgaccatagctactatggatacaaacattgctcatatcatggatgaacaagaagacatcaaggtcaaggcctccaaatgctggaatccgattcggccacctgctgcactgctaatttcaaacggccaccaaatctccatacgagctccgtttttggcccgtgagtacttgatggaaagctctcggagtcctctttccaacggatccagcctcattgcgaaattccatcttattgagccgcaattgaagcaacaaggaatagggttcatatgcatcgacaagatcaacaacccacggagaggtgtatcgatcgctaaggcgcaacagaacgtcttgtacggttgtagtcggatcgtcaacgtttctcccaaatcgtag

SEQ ID NO: 93401 - DNA, 3930 bp, Oryza sativa
  Clone ID: PAT_MRT4530_9178C.1
atgcaattcatgatgccattggatacgaatgcttgtgcacaaccaatgagaagggctggtgagggtgctgggactgagaggttgatggaaagattgaatattgggggcatgactcaggagaaagcactgaggaagaggtgctttggtgatggagttactggaactgcacgatgtgtgttcacatcagatgctgatagagacactcctcatcttcggacacaatcctcccgaaagaattatgctgatgcaagccacgtttctgctgtcattttgggtggaggcactggagttcaactctttcctctgacaagcacaagggctacccccgctgttcctgttggaggatgttacaggcttattgacatccctatgagcaattgcttcaatagcggaataaataaaatatttgtgatgactcagttcaattctgcttctcttaatcgccatatccatcatacataccttggtggggggatcaactttactgatgggtctgtgcaggtattggctgctacacaaatgcctgacgaaccggctggatggttccagggtacagcagatgctatcagaaaatttatgtggatacttgaggatcattacaatcaaaacaacattgagcacgttgtaatcttgtgtggagatcagctttacaggatgaattacatggagcttgtgcagaaacatgtcgatgacaatgctgacattaccatatcatgtgctcccatcgacgggagccgagcttctgactatggactggtgaagtttgatgattcaggccgtgtgatccaatttcttgagaaaccagagggtgctgatttggaatcgatgaaagttgataccagcttcctcagctatgcaatagatgacaaacaaaagtatccctacattgcatcaatgggaatttatgtcttgaaaaaggatgttcttttagacattctgaagtcaaaatatgcacacctgcaagactttggatcagaaattctcccgagagctgttttagagcataatgtgaaggcatgtgtcttcacagaatattgggaggatattggaacaatcaaatcattttttgatgctaacttggccctcaccgagcagcctccaaagttcgaattttatgatccaaaaactcctttcttcacctcacctcgatacttacctccagcaagattggagaagtgcaagatcaaagatgcaataatctccgatggctgttcctttagtgaatgcaccattgagcattctgtcattggaatctcttcacgcgttagcatcgggtgtgaactcaaggataccatgatgatgggtgcagatcaatatgaaactgaagaagaaacttcaaagctattgtttgaaggcaaggtcccaattggtataggcgagaacacaaagataaggaactgtatcatcgacatgaatgctagaattggcaggaacgtgatcattgcaaacactcaggtttatgtacttggtttgttttggaatgggaactctattattggtattctgaagtttgcacctctctctcagcagacttgtcctgtaatttgcttcgcttgtttgatgtgtcttcggttttttaattctcacctccttgcaacatatgagacagaagagcttatgggggaagtaaacagctgtaaggaaatgaagagcgtgtgcaattggtttgctcttgctcggcagttgattatcctgctctcagtccttgtttcctgtccaggttgtcaggatttcctttcctctctgaagatgagtcatagttcggatgaagattcggaaatcagtgattctgagatcgacgagtacgcagacaaattttatgcacgactggtggcaggggaattcaaagtaaaggatgggcagagttacagctgcccattttgcagtggcaagaagaagaaagatttcaacataaacaatcttattcagcatgcctcgggagtaggcgctgcgtctaatcggcaggctaaagataaggcaacccatcgtgcccttgccaagcacttgaagaatggcctcactaagtcgtcaggacaacagtcacagacagctgttgtggagccacaaccgcttccaaacagagatgagaagttcgtgtggccctggatgggtgttctagttaatgtgcctaccgaatggaaggatgggcgccaaattggacgaagtggaaatcatttgaaggagcaactgtcacgcttttgcccacttaagatcattccattatggaattttagaggtcattcagggaatgctattgttgagtttggaaaagattggcatggcttcagaaatgcgcttgcctttgaagattactttgggaaagaaggatatggtaggagggactggaaggagaaacagaatcaagggtcaaacctctttggatgggttgcaagagctgaagatcacacttctccagggctaataggcgaccatttaagaaaaaatggtgacctgaagactatcaatgatcttgagaatgaaggagcacgtaaaactgacaaacttgtagctaatttagcaaaccaaattgaggtaaagaacaggcatttgcaggaacttgaagttacatacaatgaaagaactacatcacttgagaagatgatggggcaaagggaacagcttctccagaaatataatgaagaaattcgcaagatgcagcagctagctcagagacattctcagaagataatcgatgagaatcaaaagctgcgttctgaactggagtccaagatgagtgaacttaatacggtatccaaggagcttgatgagattgctgcaaaaagtgattatgaccgaaggatcattgatcaagagaagcagaagaatgctatcaaatcaagccatcttaagttggcaacgttggaacaagagagagctgatgaaaatgtgctgaagcttgtaagagaacataagagagagaaagaagctgctgtaaagaaaattttgaagttagaacagcaggtggatgcaaaacaaaagcttgaattagatatacagcagttaaagggcaaattggaagtgatgaagcatatgccaggggatgaagattcagcattgaaaaataaaattgatgaattgagtgaggagctgcaagaaaagatggatgaactagatgctatggagtcacttaaccaaactttggttattaaagaaagaaaaagcaatactgaaatgcaagatgccaggaaggagcttgaaaatggcttacttgatctcttagatggtcaatcacatataggaataaagagaatgggcgagcttgatctggaagcattttcaaaagcatgcagaaagatgtcatcggaagaggatgcagagattactgctgccattctttgttcaaagtggcaagctgaaattaaaaatcctgattggcacccttttaggtttgtcttggttgatgggcaggagaaggaaattatcgaggatgatgccaaacttcaagaattaaaagaagagcatggcgaagacatatacagattggtgagggacgcgctgtgtgaaattaatgagtacaaccctagcggcagattcccagtaggagagctgtggaacttcaaggataaacggaaggccactctgaaggaaacggtccagttcgtcctgagacagtggcgagcgaacaggaggaagcgctaattgtcctgtaatttgcttcgcttgtttgatgtgtcttcggttttttaattctcacctccttgcaacatatgagacagaagagcttatggggaaagtaaacagctgtaagaaaatgaagagcgtgtgcaattggtttgctcttgctcggcaggtaagatcagagccaatcgctgccatcggttggtataatgctgattataagcaacaatgtaatgtaatttatagttaaaacttttatttacgtgtacctaacgatgtggaattcaatactgacaaataaaccctgataag

SEQ ID NO: 93402 - DNA, 291 bp, Oryza sativa
  unsure (1)..(291): unsure at all n locations
  Clone ID: PAT_MRT4530_91790C.1
atgaccggatcaaatcagggccgaaagctccaagctttccnattttcaagccnggaaggatgagangaatcagtcaatccacccccctgtaaatcagctgtctctctccaaaatccaataggaatcctgcatcttcagagtcatctcatcttgtcgatgttgatctcaacttgtgnatgcngatttcacttgggtngatgctgcaggaaggatcagcagcttatgacaatccattcacagaagagagcnatatgacaactatctgtntnttgcaaaaaaaaaaaaaaaaaa

SEQ ID NO: 93403 - DNA, 1137 bp, Oryza sativa
  Clone ID: PAT_MRT4530_91791C.1
atggcagggatacgcaagataattggggatagctgtgctcaacatcgacatcttcgtcgagacatgaggagggatcaacatgaccattatgaggtaagtgatgatgttctaggtaagatcaaatctgcattgccttatttcgagggaaactatgatcctcgtgcttacattaattgggagctagcggttgatagtgaatttcaaaagcatgtcttgtctgagaaacaaaaggttatgtgtgcctctagtgttttaattaaacatgcttctaatgattggaaacatctttgtaggcataacaaaataccacaatcttggaaatacctgaaacgatatttcagagatgtttatgttcccatgtattatgctgacattttgttcaacaaactgcaatgtttaaaacaagataccagaactgttacttcatactatcatgatatgcaagcttgtttattacgttgtggtttagatgaatgcgaagaagctaaagaattgaggtttttatgtgggctaaacaaagaaattcaggacatgcttgattgtcaaagatatacatctctttctcatttgttacaacttgcttgcaatgctgaaagtaaaatagaggagagagacatgaaagagccgccaatcccattgttcacactcaaagtcaaggcacctccatcatctgaagaggacatcaaaggtaaagtaaatggtattgaaattaatcatggtgagtgcattgttaacgaagtaaatttgtccacctttcatactaaagtagagcaaccgttagtggaatcaaatgctggaattcctttgtcacaagttgatttactcgctgttccttgtgataaagaagagttgtgtgataatgcttcacttatatccatgccacaactagtgaatgaacatgatatttctagagtttctttgtgtgctgattttaagcatgctgttcacattgctaatgaagttgaggaacgaataaggttgatctgcaccggcaagatcaacaacccatggagaggtgtatcgatcgctaaggcgcaacacaacgtcttgtacggttgtagtcggatcgtcaacgtcttttccacaaatcgtagttatctcaactcaccgaaagatcgggccaacaatagcctttag

SEQ ID NO: 93404 - DNA, 1326 bp, Oryza sativa
  Clone ID: PAT_MRT4530_91792C.1
atggcaggattgcgtaagggaatacgagaacatcgacttctacaccttcgacgagatatgacgacttctccacgtgatgcatatgaggtacatgactataattttgaacaagttgcatctaagttaccattctttgatgggaaatatgattctattacatacattgattgggagctagcagtagacaatgaatttgatatatatgatttttctgatgctcaaatgattaaggctgctagtaataagtttacctcttctgcattattttggtggacttatgttagtaataaacctgaaacttgggatgaattgaaaaccatgataagaaaacgctttatgacatcttattacaaatgtactcttcgggagaaattagaacatctgaaacaaggtgatagaactgttagggagtacattcatgaatttaaggtctgtatcatctacagtggtctcaaagagtgcaatgaaaatacaatgcgtagatttttcaatgggcttaattctgaaattcaggttttgcttgataatgtgacatataatcatattgggcacctattcatgcttgctcgtagcattgagagtcagatcatatcaaaggcgaggatgcatgaccaatgtgatttatctcctatttatgaatctccaatatacttatgtaatgatgatgtgcaaacattggaggagcaatcttttgtctcccctgttactaacgttttgcaggaagatcagcacatccaagaaaaggagaatgatatacttgagaagaaagaggatgaagcacctgcgatgtctgaagaaagctcgcaaggtaaattaaatggtgctgagagaaatgaaggtgagtattctcaaggtgagctacacttgtccacttttcatgctatagtagagcaaccattagtggaatcaattgctgagttacctttgtcacaagttgatttacttgctgttccttgtgataaagaagagttgtgcgataatgcttcacttatattcatgccacaactagtgaatgaacatgctattcctgttgttaatactaactgcgctgattttaagcatgttgttcacattgctaatagagtagaggaacgtgaattgacatcttctttaaatactttgggctatgttcagtttgctgattttcatgagctcgataatttgaaggagaaattatttgctaagtctgatttgccatgtccaagaataaggttgatatgcaccggcaagatcaacaacccacagagaggtgtatcgatcgctaaggcgcaacgcaacgtcttgtacagttgtagtcggatcgtcaacgtttctcccaaatcgtag

SEQ ID NO: 93405 - DNA, 105 bp, Oryza sativa
  Clone ID: PAT_MRT4530_91793C.1
ggttgccatttccgattctaaattccataaccttgccgcggttccagagacagttacgaatgacggccacggaaggctgcaccctgccctcagctattctcctac

SEQ ID NO: 93406 - DNA, 1299 bp, Oryza sativa
  Clone ID: PAT_MRT4530_91794C.1
atggcaggattgcgtaagggaatacgagaacatcgacttctacaccttcgacgagatatgacgacttctccacgtgatgcatatgaggatgaattgaaaaccatgatgagaaaacgctttgtgacttcttattacaaatgtactctttgggagaaattagaacatctgaaacaaggtgatagaactgttagggagtacattcatgaatttaaggaagatcagcacatccaagaaaaggagaatggtatacttgagaagaaagaggatgaagcacctacgatgtctgaagaaagttcgcaaggtaaattaaatggtgctgagagaaatgaaggtgagtattctcaaggtgagctatacttgtccacttttcatgctatagtagagcaaccattagtggaatcaattgctgagttgcctttgtcacaaattgatttacttgctgttccttgtgataaagaagagttgtgcgataatgcttcacttatatccatgccacaactagtgaatgaacatgctattcctgttgttaatactaactgcgctgattttaagcatgttgttcacattgctaatagagtagaggaacgtgaattgacatattctttaaatactttgggctatgttcagtttgctgattttcatgagctcgataatttgaaggagaaattatttgctaagtctgatttgccatgtccaagtaacactatttttcatctctttggtgaatataatgatagaggaatatatttggtgcatagagtttacatctgttcagatttagaacctcctgtacttgtggataaaacatgcaagctagagagaaatgttattgctaacaaaattatctcgagtttgtcttgttgtgattggaagaaacaggttgttttaaatagactacacgaagagcaccatatggaaaaaccgaggacggttttccgtgaagaaggggaggatgatgtgaccatagctactatagatacaaccgtcgttcacatcaagatcaagccgtccaagttctgcaatccagttcggccacctgctacagtatggacttcaaacggccgccaaatatgcatgcgagctccattttgggtccatgagtacttgatggaaagctctcggagtcatctttccaatggatccagcttcatcgccaaattccatcctagtcggccgaaatcacaaaaagaaggtgttgcgtcacctataatggcctatgggcttataacttcgtctggaaccccggcccaagtggggcccatgtggggtgcgccccaaccaggtggagcacgaccctag

SEQ ID NO: 93407 - DNA, 3077 bp, Oryza sativa
  Clone ID: PAT_MRT4530_91795C.1
gaacgtcaagtttaaagggacagagagataaacaataccatgcccaggcacgttggttactatttttgttccatgcaaaatcatgtacatctcctccaggaagttgtaaatcttcatattgtgatcgtgtacgggagttagtggttcatttgacggactgtcaaataaaggactgttcatatcgacactgtagggagtcaaagatggtatctgatcactataagaattgtattaacgagcattgtcatgtttgctgcaaagcaaaagaaatgttgcgtcgctcttctgaactggcacataaacagaatcctgctgaacctatacttattactcagcacaatatgaatcaaagaagtgccgatagggtacatggtgatagaatggacattgaccaggcagttgaaacctttgatgaccaaccaccagcagcaaagcgtccaaagttgcagcttgtgtctcccgatgcatctgagaatgtccctgtctgtcaaaaaaacccagggtttatgttgcaggaagcccatcctagacagcttgatcagaacaaaaagatggtccctgatcaagaggtagacgtggggcttgatatccgacatccacaagttactttagtcagctgtcatggtagtgatgagaaaattggtgctgcgcaaaatactgttattcctggtgctttaaacaagatacattgtcatgtccagcaagaaactgttgtggctgataaagagagtgtgactgttgttgatgttaagaaaaaaacaggctctgtggatgtcacgatctccaaaactgggaaaccaaaggtaaaaggtgtttcactcatggaattgtttactccagaacaaatacatgaacacatcaacagtctaaggcagtggattggtcagagtaaggctaaaagctgaaaagaatcaagtgataggatattctgaaagtgagagcttatgccagctttgcaaagttgaaaaccttacgtttgaacctcgaccaatatattgttctccttgtggtgctcggataaaacaaaatgcatcatattatactgggtctactgctatgggtcgcctttttttctgtatctcgtgttacaatgcatctctgggcaacacaattgaggtggagcttattaaactctcaaaagcagatcttgagaaaaagagaaacagtgacgaaccagaggaagggtgggttcagtgtgacaaatgtgaatgctggcaacatcagatctgtgcacttttcaatgccagaagaaatgatgttgaagaagcagaatacacttgcttcaaatgttatattgaggagtttaaacgtggtttgcgcatgcctttaccagagagtgttgttcgtggtgccaaagatctgccaaggaccctgcttagcgatcatatagaagaacgactttttaaacgactcagggaggagagacaggaacgggcaaataagttaaagacaagtttggatgaggttcctggagcagatggacttgtggtcagagttgtttcatcagtggacaagaaactggaagttaaaccacattttttcaagattttgcaagaggacaattatccagctgagttcccttacaagtctaaggctattcttttatttcagaaaatagaaggtgtggaagtatgcttatttggcatgtatgtccaagaatatggtgcagaatgcaaattcccaaaccaacgtcgggtttatctgtcatatcttgattctgttaaatactttagaccagatatagaaacagtgtccgggcaggccttaaggacatatgtgtaccatgaaattctgataggttatcttgagtactataagcagcgtggattcaccagttgttatatatgggcttgccctcctgttaaaggtgaagattacattttgtattgccatccagagattcagaagacaccaaagtctgataaactgcgtcagtggtacttatctatgcttcaaaaggctattaaggagaacattgttgtcgagttgacaaatctctatgatcaattttttgtcactgcaaaagaatgcaagataaaagtatctgcagctcgcttgccatattttgatggagattattggccaggagctgcagaagatattatcaaccaacttcaactagagggtgatggtaagctgctgaagaaggggagagtaaataaaattatcacaaaacgagctttaaaagctgccggccacactgatctaagtgggaatgcttcaaaagaggctatgctgatgcaaaaacttggagaaatcatttgcccaattaaggatgatctcatcatggtccatttgcagtattcgtgcagtcactgttgtacctttatggtgtctggaagacgctgggtctgcaatgaatgcaaaagtttttatatttgtgacaggtgttataatgcagagcagcggcttgaggagaaggagaggcacccaagtaatagtaaatgtttgcatatactccacccagttgaaattgttggggtctctgaagataccaaggacagagatattatcttagaaaatgagatctttgacaccagacaggcattcctgagtttttgtcaagggtatcattatcaatatgacaccctccgccgtgcaaagcattccaccatgatgatgctataccaccttcataatccaactggaccagcttttgttgccacatgtaatgtctgcaattgcgatattgaaaatggtcaagggtggtattgtaaagattgcccagactttgatatgtgtgcttcatgttaccaaaaacatgaggtgccaatcatcatcacaagttaacaaaccatccatcatctgcagaatgtaatgttcaaaacaagggagcttggcagaagcacgtcctgcaggtgcgtgtatggcttgaacttgcactgcatgcatcatcatgtcatgttcgtaattgccaataccctaactgccgaaaacttaagggactctttcatcatggggcgcagtgcaagatacgactaactaaaggttgtaaacaatgtgcgagaatgtggtatataattcgactccactcccaatcttgcagacaatcagattgtgctgtgccaagatgccgg

SEQ ID NO: 93408 - DNA, 3147 bp, Oryza sativa
  Clone ID: PAT_MRT4530_91796C.1
atgggcttgcttcgttgtaatttagaggaaactgaggatgctgtcatggctagatttttgggtggtttaaatcgcgagatttatgacatcgtagactataaagattacattaatatgacccgattgtttcgtcttgcttgcaatgctgaaaataaaatagaggaggacatgaaaaagaaacatgctatgtctttgcctccaattactaaccatttgcaggaagtgcgtaatcacaaaaaggaggagagagacatgaaagagccgccaattccattgttcacactcaagttcgaggcacctccatcatctgaagaggacatcaaaggtgagtgtgttgttaatgaagtaaatttgtccacttttcatgctaaagtagagcaaccgttagtggaatcaaatgctgaaattcctttgtcacaagtggatttacttgctgttccttgtgataaagaagagttgtgtgataatgctttacttatatcaatgccacaacaagttaatgaatttgctattcctaatgctatgttcagtttgatgatttttggggagctcgataatttgaaggagaaattatttgttatgtctgatttgccatgtccaaccgatgttacttttcatatctttggcgaaaataatgatgttggagtatatttggtgcatagagtttacatatattcggatttagaacctcctgtacatgtggataaaacatgcaagctagagagaaatgttattgctaaccaaattatctcgagtttggcttgttttgattggaagaaacaggttgttgtaaatggactacataaagagcaccatatggaaaaactgaggacggttttccgtgaagaaggggaggatgatgtgaccatggctactatggatacaaccattgctcacatcatggatgaacaagaagacatcaaggtcaaggcctccaagtgctggaatccgattcggccacctgctgcactgttgatttcaaacggctgccaaatctccatacgagctccatttttggcccgtgagtacttgatggaaagctctcggagtcctctttccaacggatccagcctcatcgccaaattccatcccagtcaaccgcagatgaagaaacaaggtgcagcatcacctgtgatgggcctttgggcttgtaacttcgtttgggaccccggcccaagtggggccatgtggggtgcgccccaaccaggaatagggttgatttgcaccggcaagatcaacaactcacagagaggtgtatcgatcactaaggcacaacgcaacgtctcatacggttttagtcggatcgtcaacgaggagatgagattgaaactgatgagaggcacaaatcctataagatcaacatacactgttgctgataatagggaatgctacaactgtggacaagtgggtcatgagaccgtggtagctttgggtgacaccgcagtggtagaagaggtgaccgagggggtcgtggtggaggtcgtggtgggggcaaaggtgctccttaggccaatgcaaccattgaggaggtgggaagaatggcagaataacaagaccaataagagctccaacaccaccactcactttggtaactttgccaactacgcccaagtgggcgaagttaaccttctctcagttagttcggctattgatcaactcaagtgcattgttgtatttgatgataactcttgtctgttccaagagaagggaactgagaggaggattgggactgcagtcaggcatgatgagttgtggtacatcaatcatgaggaactgggactagctgcggtggttggagatgttgagaaggagatcagtttgcttcattgtcagttaggacatccatcttttggggttttgagtaagttgtatccagacctctttagtagagtggatatgcatagactggtgtgtgatgattgtgagcttgatgaagggatcattcaccagactacttgtcctggtacccctcctcaaagtggtgtagctgagaggaaaaatcgacatttgctagaagtggcaagatttctaatgttccagatgaacgtgccaaaatatttatggagtgaggctgtgatgacaactgcatatcttatcaatcagatgctgtctaggatacttggtatgaagtcacctgttgaactttttttgggtaagcgagagtacaaggttcctctaaaagtgtttggttatgtatgttttgtgcgagatcatcgaccctttgttggcaagctggatcctcatgcagtaaaatgtgtgtttgttggctatgcttcgagtcagaaagggtataaatgttgggattccattgggaggagactgtttgaattctcgactgtcatggaggatgacagccgagagggggagacagagggaggtgatacacatgaaaaaaatgttggttacaagaatggagaggcagtggtagttggatcaataccatgctcgattgatggtgtgagtaaagaggtggaaaaatttgttgaagctacacaagacaaagatggagaattggttcttcatgagagggatggagaagtggtgcttcatgagggagatggagaagtggttgtagggacaattccatgtcctatggagcaaaccgaaaaggtgaaacaaaaggatatgctagtttaccaaaggaggaggtttgataatcatggggagaaaagaaagaaatcagtgcaagatcaagttgaaagttgccacacccagaatacccagtcccagagtcctctcagagcctctctcctccagcctccttggctcctcttgagacaattgacagtgtccataccaaacgaacggaagtgggcaaaacaagatccaagatggaaagatgcaaagaaagatgagctgaatgctcttgtgaagaacaaaacttgggaacttgtgagacttccaccagtgaaacaaattcctgaaggaaaggtggataggtataaatcaagattagttgcaaaaggctataatcaaacatatggaatccactatgatgagacatttgcaccagtggcaaaaatgggcatagtgaagactttggtatcttgtgcagtaaactttgggtggcctcttcatcaacttgatgtgaaaaatgcatttcttcatggtgatttacatgagaggtctatatggagatccctctag

SEQ ID NO: 93409 - DNA, 2112 bp, Oryza sativa
  Clone ID: PAT_MRT4530_91797C.1
tcagttacaatctgaagagatgcatctgaagcaagaagctagccccttcctggcagcgactggaacacgactgcttctgtttcttttctcattatttggacctggaggtgtagtagggctgtgtgtgagcctgtggcctgtaggagcagctggaacagcttgatttgcattggtctctggtcttgggataggagggacaaaaatatttatacttccatggtatttatgcccttgcttcagtctcatctcagagaactccggggtcatgtagccgccgcacacgcgaaactcttctttcggcctaaatggcgatctccgccacgcaggcggcgcgtcgccaacgccgctgccccgacgcatccgccgcagctccgcctcgggtgctctcgccgccgcgcgcagcgcgttgtcgccatggccggatccagcaaggttgccatcctccttcctgcttaaaccaacaatgcaagcaagcgatgccgtcctggaagcagcgtcggaaatcaggctccttggacacagcgacaactgataggtatcatctgatacctcgcaagtttcacctaatacctgatccaagcccctatgcattgcggcagtgtctattccaagagatgcttcagggaatgcccgccctgtcatttcccgtgctttcacatttccagggtcatactccaatatctcacgatagcggtggtatgcttgttcatagcgttgaagctgattcgcgcactcagcagctttgaaggtaagggaaatcaacatttgtttaatttcttcatctgtttctcctcgtccaaagcgcaggagtatgatctgcctggccttgtaatatctcctgtaagctctcaaaaatttgcttgagctgaacagtttgtctccctccttttccttttcagctgcagcttcgatggtctctgcttgactcatgagccggggaggcttgtcatttacaactgagacaagctcgatttcgtaggtcacggaagagccaacagggacaaccaaaagttgatcctgcacacgatgggggggaatggtgaacaaggagacctctccctcccgcattgtaagaacagcttcctctaggccttcgctaacctgctcttcgtcaaccatgaacttgaacggctcatctccttcgtggcccctctgatcaaatacagccccatcttgcagtttaccaatcagtcgaactccgaccactgcttcattctctgtctgctgtccttccaaatttcctctacaaagggttttcttgaggattgtcccattctctccaatgtgcctcactgttttccatgacatcaattgaaggtacacatagagagttgcatcaggtggcacaccggcttcatcccctatggatggtctaccccgttcaccaaaaccatattcaggtttaacaatgagaacagcttcctctccttctgtcatagtctccacagcacgtgcaaatgcaggacaaaagaagccttccgcaaggttgaactcaataccttcagacatggacactgacatcccatcctccaggcaagcattgtagttcacaagtgcttcatccaaatcacaaggcttatcgctccccagtccacgcttgatgatctttttcagtatgccttcatcatcgaggatgtcagttatggtgacaagagagatgagctcaatatcaaaccgcagtgcttcattgggggcaatattccctgggatatcaactggacaccgagacttggtgcctgctaattctggagggatggtgaacacagctttctcccctgcttgcattgagctaacagccatactgaagcctcgcatcacattctcttgtcctaatataaaagtcagaggcacaccatcttctctggtggatgcaaaccaagtgccatcaagtctttttcctgtaaagtggacttgtgcctcgcagcagtagaacccctctgtttccaaccaatcaaaccgttccccagccggctcttgaacggtccacttcgcaaagccaggagaagagccacggccacccccacgctcgctcccaaaattctctaatcgaccgatttctcctctccacacgaacaggtactcatcaggcttacctagctctgacaacttcat

SEQ ID NO: 93410 - DNA, 1284 bp, Oryza sativa
  Clone ID: PAT_MRT4530_91798C.1
atggtgaacactcgcgctagtggaagtggaaacaataacaatgaagggaacccaactcttgctcaagttctggctcaacagactcagttaatgaacatgatgatacagcagatgcagaaccagctcaaccaaggaaacaacaatgctccaccgccgcagaataagctagctgattttcttcgtgtgaggccacctaccttttctagcactaccaacccagtggaagcaggtgattggctgcacgctgttgagaaaaagttggaactgctccagtgcactgatcaggagaaagttgttttcgcttcacatcagttgcaaggatctgcttcagaatggtgggatcatttccggatgaacagagcagaaggacaaccaatcacttgggcggagttcacggaagcattcaagaagacacacatacctgtaggagttgttgctttgaagaagcgtgagttcagggcattgaagcaaaaggatcataccgtggcagagtatcttcatgagttcaatcgtctggcacgttatgctccggaagatgtgcgtactgacgaggaaaggcaggagaagttcttggaaggcttaaaggatgaactgtcagttacgttgatctcccgtgactatgttgattttcagcagctggttgacaaagcaattcgacttgaagacaagaagaacaggatggataaccgtaaaaggaaaatgactgtattccaggaggcacaaggtagtagccagaggcagcgtatcaagccactccaaattggtgaatcttcttccgttggtcaaggacaatcgcaacagttgaatatcggtggtgagatcaaatcagagactaatgaaagcaatgaagttaacatcgagcaagctaatcagccggtgccagttcagcaggatcagtctcaagagaataacagtagtggaagggagcagcaggagccaatgcagtgccagttgcgtcttcaagagttgcgtcttcaatcatcgtcgtcgctcggggagatcgccgtcgtggtcgccaagtcgccgccgtcctcgtccgcctcttcgtcgccgccgaagaccgccggagcaccgtcgccgccgtcgacccgatctccgccgccgcttcttcctcgtcgccagcgtcgtccgttgcttctccgccgcttctttggttaccggtgagttcgccgcgtcgccctctacccgttggtgccctccgttcgcgtcgccgcgccgtcgttcgccggcgagcatgcgcgtccgagccgccgccgccggtggtgacgtcatcgccgacgtcat

SEQ ID NO: 93411 - DNA, 2542 bp, Oryza sativa
  unsure (1)..(2542): unsure at all n locations
  Clone ID: PAT_MRT4530_91799C.1
ttttttttttttttttttttaaacaaggtgttatgtcacctgtcttgggcctctgggcttgtaactttgtttggaaccatgggccaagtggggcctatgtggggtgcgccccaaccaggtggagaacgacccttggacccatgggtcgtcctcccacccctataaatagttagataccccgttcaggatttctgtgggtttggttagattacagtttagccatgtgtacttgcttgcagcgcgcgtgtcggctagaccgtccgtctgcttgttcttcagaaccccaacttatcattntgtattcaactcctatttgcnatatcagatcgtgcttttatcttgttcttgctctgtttctccgattgtgcttgcaggaatagggttgatctgcaccggcaagatcaacaacccacggagaggtgtatcgatcgctaaggcgcaacgcaacgtcttgtacggttgtagtcgggtcgtcaacgtcttttccacaaatcgtagttatcatcaactcaccgaaagatcgggccaaacaactgccttgagtgtcgagaggaactcacggttcatcaggtggtatcagagctttcgttgctcgccgtacagcaagtgtttgccaaggcatcgatacatccaacctccattggggtgcttggttgagtcggtgtatgtcaccattccgcttgcattggtaagaacttggttacacaaagagtttggagctgttcgtgctcaatgtggacattttcacttgcgacaacacatggcaagtgaccagcatgacgcaaataaggtacatgatcataatcttgcaagagtggagtctgttttgccatcttttgatgggaagtacgattccgctgcatacattaattgggagctagcagtagaaaaacaatttgatgagtatgatttctctaatgctcaaatgattaaggctgctagtaataagtgtaccggttctgcatctttttggtggcatactgtgggaaataagcttgaaacttgggatgaatgcaaaatactaatgagaaaaagatttgtgttttcatactatagacgtgctctccttgagaaatttgaacatctaaaacaaggtgacaaaactattagggagtactttcatgattttaaaatttgtatcacttatagtggtttacaagaatctaatgagaacacaatgactagatttttcagagggcttaattctaatattcaggctgggcttgttaatgtgacatataatcatataggccaattgtttatgcttgcttgcaatgttgagcgcaaaattttagagaaaccaacggagcaacaagctatgcgtgtgcctcctatcgctgatgttttgcaggaagttcagaacaatccccaaaatgagaagaacgatatgtttgagatgtcacttccatcactcgcgaatgaggagaaggctgatgcatctgcattatctgaagagggcataaaaggtaaattaaatggtgcagaaattactcaaggtgagtatgcttctgatgaattacatttttccactttccatgctgacctagagcaaactttagtggaacctacttctgaattgcctttgtcacaggttggtttgcattctgttccttgtgataaagaagagttgtgcgatagtacttcacttatatccatgccacaactagtgaatgaacatgctattcctactgttaattcatactgcgctgattttaagcatgttgctcacattgctaatgaagtagaggagcgtgaattgagatcttctttaaatactttgggctatgttcagtttgatgatttttgtgagctcgataatttgaaggagaaattatttgctaagtctgatttgccatatccaaccaatgttatatttcacatctttggcgaatataatgatcttggaatatattttgtgcatagagtttacatctgttcagatttagaacttcctgtacatgtggataaaacaaacaagctagagagaaatgttattgctaaccaaattgtctcgagtttgccttgttttgattggaagaaacaggttgttgtaaatggactacgcaaagagcaccatatggaaaaaccgaggacggttttccgtgaagaaggggaggatgatgtgaccatggctaccacggatgcaaccattgctcacatcatggatgaacaagaagatatcgagatcacatcgtccaagtgctggaatccgattcggccacctgctacactgctgacttcaaacggccgccgaatctgcatacgacctccattttcggcccgtgagtacttgatggaaagctctcagagccctctttccaacggatccagcctcatctccgaattccatctcgtgtggccggaatcacaggcacaaggtggaccccggcccaagtgggacccaagtggggtgcgccccaaccaggtggagcacgaccctagagtgtccttggtcgtcctcccacccctatatatagctaggaatagggttgatctgcaccggcaagatcaacaacccacggagaggtgtatcgatcgctaa

SEQ ID NO: 93412 - DNA, 2476 bp, Oryza sativa
  unsure (1)..(2476): unsure at all n locations
  Clone ID: PAT_MRT4530_9179C.1
ccggccgggacaagtacaggcattagatccacaagaacacttgggcaggtttgtctgggactttgagtacccatgcaattcatgatgccattggatacgaatgcttgtgcacaaccaatgagaagggctggtgagggtgctgggactgagaggttgatggaaagattgaatattgggggcatgactcaggagaaagcactgaggaagaggtgctttggtgatggagttactggaactgcacgatgtgtgttcacatcagatgctgatagagacactcctcatcttcggacacaatcctcccgaaagaattatgctgatgcaagccacgtttctgctgtcatttttgggtggaggcactggagttcaactctttcctctgacaagcacaagggctacccccgctgttcctggntggaggatgttacccgcttattgacattcctatgagttcacacagttgttgatggcttcacacaattcatctctacctcctgactctttataaggacccccagcatcaccacaattgcacaagtacaggcattagatccacaagaacacttgggcagttgcaggtttgtctgggactttgagtacccatgcaattcatgatgccattggatacgaatgcttgtgcacaaccaatgagaagggctggtgagggtgctgggactgagaggttgatggaaagattgaatattgggggcatgactcaggagaaagcactgaggaagaggtgctttggtgatggagttactggaactgcacgatgtgtgttcacatcagatgctgatagagacactcctcatcttcggacacaatcctcccgaaagaattatgctgatgcaagccacgtttctgctgtcattttgggtggaggcactggagttcaactctttcctctgacaagcacaagggctacccccgctgttcctgttggaggatgttacaggcttattgacatccctatgagcaattgcttcaatagcggaataaataaaatatttgtgatgactcagttcaattctgcttctcttaatcgccatatccatcatacataccttggtggggggatcaactttactgatgggtctgtgcaggtattggctgctacacaaatgcctgacgaaccggctggatggttccagggtacagcagatgctatcagaaaatttatgtggatacttgaggatcattacaatcaaaacaacattgagcacgttgtaatcttgtgtggagatcagctttacaggatgaattacatggagcttgtgcagaaacatgtcgatgacaatgctgacattaccatatcatgtgctcccatcgacgggagccgagcttctgactatggactggtgaagtttgatgattcaggccgtgtgatccaatttcttgagaaaccagagggtgctgatttggaatcgatgaaagttgataccagcttcctcagctatgcaatagatgacaaacaaaagtatccctacattgcatcaatgggaatttatgtcttgaaaaaggatgttcttttagacattctgaagtcaaaatatgcacacctgcaagactttggatcagaaattctcccgagagctgttttagagcataatgtgaaggcatgtgtcttcacagaatattgggaggatattggaacaatcaaatcattttttgatgctaacttggccctcaccgagcagcctccaaagttcgaattttatgatccaaaaactcctttcttcacctcacctcgatacttacctccagcaagattggagaagtgcaagatcaaagatgcaataatctccgatggctgttcctttagtgaatgcaccattgagcattctgtcattggaatctcttcacgcgttagcatcgggtgtgaactcaaggataccatgatgatgggtgcagatcaatatgaaactgaagaagaaacttcaaagctattgtttgaaggcaaggtcccaattggtataggcgagaacacaaagataaggaactgtatcatcgacatgaatgctagaattggcaggaacgtgatcattgcaaacactcagggggtccaagagtctgatcaccctgaagagggatactacataaggtctggaattgtggtgatcctgaagaatgcaaccatcaaggacgggaccgtcatataaaagcatagataggccttggaatcgcacctccagtcatctgaaaactggcatccattgatgtgggattttgatgcatgagttggattcaagacggatagcgtagcctccatggcgaagtggtgtttttggtttagctatatgcctatatgcaataagctgcctgaggaagtcgcgcaaccttttgtgtaatttcaggtttatgtacttggtttgttttggaatgggaactctattattggtattctgaagtttgcacctctctctcagcagacaagtcctgtaaaaaaataaaaaaaattgaaaaaaaaaaaaaaaaaaaa

SEQ ID NO: 93413 - DNA, 1323 bp, Oryza sativa
  Clone ID: PAT_MRT4530_917C.1
atggagcatctctcggaggaactaatcatcgagattctcaagaagattacaaggacaagcgaccttaattctctttccctggtgtcgaagcagctctacactatcgatgcagagcaaagggctgctatacgccttggttgtggacttgcaacagaagatttcttagcactttgttcccggtttcctaatttgctcaaagtagagatcgattactctggttcaacacctggtaatgggaaccatatcgacaaccaaggtctctttgttctttcatcttgttgtactttgcttaatgatattaccttaaccttctgctcaaaaatcaatgatgctggtattgtttgcctatcttactgcaagaagttgatatctctaaagcttaactccctaccagaagtaacttcaagtgggcttctcatgctattttttggttgcaaggccctatcttctctcttcattaatgattgcaagggaattgctggcagcactgagtggctggagtaccttggcactgatggatcattggaagaactcgtcgtcaacaattgccaggaaataagccaatatgatttgtgctgtcagaatttggaggacttaaggctggctcgagttataacagagccagaaggcccagaaactggactacgttttctgctgaggaagtgcaaggcgttagagagactatgcctggagtatgttaacggtgttattgacaaggacatgattgtgctatcccagagctgcaagaaccttaaaagcatctcactttggatgatacctggactctaccatgaacctgatggcatagttttcagaacggatcttacagatgaaagccttgaggctctaaccaacaactgtcctttgcttcaggatgttgagctcgcgtttacaggtgttgatcactgggagcctccagaaataggcttcatacaggagggacttgtgaagctcatgcattattgtccaatccgtactctcacactaaacggtgccctcttcttcaatgacaaggggatgaagggactctcatctgcaccattcatggagacactcagcctcgtcgattgcaaggagattactgattctggaatgtgcttccttgtgcagtacccatgcctgactgatctcaagctccagcattgtcctggtttgacagatgttggaatagctgagcttgtacatgcgcagaaattacagtctctggttgttgatggctgctgtaatatatctgaaaatgctgtgcagtgtgcagctagatcagtccagtactttgtcaactctgccggatcatgtgctgcccattttaaaagactgcattga

SEQ ID NO: 93414 - DNA, 501 bp, Oryza sativa
  Clone ID: PAT_MRT4530_91800C.1
agctcattatttgtaagttcttcttatggtttgcatttcagcagcgctgctggacggtcgatctcctccagaagcatggcattgatagtcactcggcctgccccttttgcgctcaggagcttgagatgacgaattacatcctcctcgactacgtgttcgctcggcaggtctggctccgtatgctgtcacctcctagctgggctgcctctctcctccccatggcagctggcttcaggaatggtggccatcttctagggcctgtttacctgagtatctccgtgctggcttcgactccttggtcctcctgatctcttggcaactgtagaaggaacgaaactccagggttttcgactctgcactctcttcggtctcagtggttctagagtccatcctttggaatggccatctatggtctttagctagcgttgctactttggggatttcatgggagtgtagtttggcttcgccccctttccgctgattggagttacgtttagccat

SEQ ID NO: 93415 - DNA, 735 bp, Oryza sativa
  Clone ID: PAT_MRT4530_91801C.1
atggcttcagctccactcccacaggcagctcaactggggtataagccaaacgtcttctccttctggatcctttatcttcaactgaggtttgatgattattgcaagaatgagcatgtgacatactcaacaagccacacagcaaatatgcaagtgcacaaggataccaaaggatggcataatataggctcatttgcgaaagcagcatttagcaaagagttaagagtacgcactcacgaaccttcgcaacgacggaaacgacaagctaacacgcaaaacaaaagcgaccggctgcggatttggaggacatgaacacgtagaggacgacgagacgaacccaacgatactcaccctcgtgccaaacgacgaccgacgacggccggcgacgaggaggcgacggcggcggctcgggttgcacggggcggcggagctccgatgaccggcgacggaaaaggaagggtggccgagcttcccctcaccacggcgcacccaacggtggtgacggcgaccggcgacgacgatggagacggcggcgcggcggcaccggagatggccggcggcggcggtttgcttggcggcggtggcgacgggactccggtgaccggcgacagcggggagagagcggccgggcttctccaccctctcgcgcacctaacggtggtgacggagctacggagcacggaagaggacgggagagggggcaaacgaaagaggaggactagggggtcctatttatag

SEQ ID NO: 93416 - DNA, 1305 bp, Oryza sativa
  Clone ID: PAT_MRT4530_91802C.1
atggctaccacggatgcaaccattgctcacatcatggatgaacaagaagatatcgagatcaagtactccaagtgctggaatccgattcggccacctactacactgctgacttcaaacggccaccgaatatgcatacgacctccgttttcggcccgaatagggttgatctgcaccggcaagatcaacaacctacggagagggatacgcaagataattggggatagctgtgctcaacatcgacatcttcgtcgagacatgaggagggatcaacatgaccattatgaggaagtgcgtaatcacgaaaaggaggagagagacatgaaagagccaccaattccattgttcacactcaagttcgagacacctccatcatcaaaagaggacatccaagagcaaccgttagtggaaccaaatgctggaattcctttgtcacaagttgatttactcgctgttccttgtgataaagaagagttgtgcgataatgcttcacttatatccatgccacaactagtgaatgaacatgctattcctagtgtttctttgtgtgctgattttaagcatgctgttcatattgttaatgaagttgaggaacgtaaattgctatcttctttaaatactttgggctatgttcagtttgatgattttggtgagctcgataatatgaaggagaaattatttgctaagtctgatttgccatgtctaactaatgctatttttcatatctttggcaaatataatgatagaggaatatatttggtgcatagagttttcatttgttcggatttagagaaacatgttattgctaatcacactatttcaagtttctctagttttgattggatgaaacaggttattttgaatggactatatgaagaacaccatatggaaaaaccgaggacggttttccgtgaagaaggggaggatgatgtgaccatggctactacggatacatccgttgctcacatcatggatgaacaacaagatatcaagttcgagtcctccaagtgccaaaattcaattcggccacctgctacactgctgacttcaaacggccgccgaagctccatacgacctccgttttcagcccgtgagtacttgatggaaagctctcggagtcctctttccaatgcatcaagcctcattgccaaattccatctcagtcggcagcaactgaagaaacaaggaatagggttgatctgcaccggcaagatcagcaacccacggagaggtgtatcgatcgctaaggcgcaacacaacgtctcgtacggttgtagtcggatcgtcaacgtttctcccaaatcgtag

SEQ ID NO: 93417 - DNA, 666 bp, Oryza sativa
  Clone ID: PAT_MRT4530_91803C.1
atggactccccagcgacccccgtggacttctcgccacttctcagtctggcgcactataatgaatcacgctatacaaaagatggcgacctcgccggagattggatggtcggctgcgactttggaggacatgaacacgtagaggacgacgagacgaacccaacggtactcaccctcgaaccaaacgacgaacgacgacggccggcgacgaggtctgttggcggcgcggcttcggtcgacggcggtgacggggctccggtgaccggcggcttcgggggtcaggcggccgggattctccacacctcggcgcaccttacggcggtgacggcgaccggcggcgacgacggaagcggcggcgcgacgcggatggagctcggccggcgacgacggcggggtggagcacgtggcggcggcgctacgaggcacgggagaccacgggagagggggcaaacgaaagaggaggactagggggtcttcagcacatttactctccacatcacccccgaccaagaggatctctagcccaggtttcttgctgttgacagaaaacacgaggccgccctgaaaaatcttcaccccgttacttccgttttcaccgccgaagccaacctcatcccctttctctccggcgatttccccgacgctcaaggcgaccccagacaatcccat

SEQ ID NO: 93418 - DNA, 1542 bp, Oryza sativa
  Clone ID: PAT_MRT4530_91804C.1
atggcagggatacgcaagataattggggatagctgtgctcaacatcgacatcttcgtcgagacatgaggagggatcaacatgaccattatgaggtaagtgatgatgttctaggtaagatcaaatctgcactgccttatttcgagggaaactatgatcctcgtgcttacattaattgggagctagcggttggtagtgaatttcaaaagcatgtcttgtcggagaaacaaaaggttatgtgtgcctctagtgttttaattaaacatgcttctaatgattggaaacatctttgtaggcataacaaaataccacaatcttggaaagacctgaaacgatatttcagagatgtttatgttcccatgtattatgctgacattttgttcaacaaactgcaatgtttaaaacaagataccagaactgttacttcatactatcatgatatgcaagcttgtttattacgttgtggtttagatgaatgcgaagaagctaaagaattgaggtttttatgtgggcttaacaaagaaattcaggacatgcttgattgtcaaagatatacatctctttctcatttgttacaatttgcttgcaatgctgaaagtaaaatagaggagaatatgaaaaagaaacacgttatgtctttgcctccaattactaactatttgcaggaagtgtgtaatcacgaaaaggaggagagagacatgaaagagccaccaattccattgttcacactcaagttcgagacacctccatcatctaaagaggacatccaaggtaaagtaaatggtactgaaattaatcaaggtgagtgcattgttaacgaagtaaatttgtccacttttcatgcaaaagtagagcaaccgttagtggaaccaaatgctggaattcctttgtcacaagttgatttactcgctgttccttgtgataaagaagagttgtgtgataatgcttcacttatatccatgccacaactagtgaatgaacatgctattcctagtgtttctttgtgtgctgattttaagcatgctgttcacattgctaatgaagttgaggaacaacaccatatggaaaaaccgaggacggttttccgtgaagaaggggaggatgatgtgaccatggctactacggatacatccgttgctcacatcatggatgaacaacaagatatcaagttcgagtcctccaagtgccaaaatccaattcggccacctgctacactgctgacttcaaacggccgccgaagctccatccgacctccgttttcggcccgtgagtacttgatggaaaactctcggagtcctctttccaatgcatcaagcctcattgccaaattccatctcagtcggcagcaactgaagaaacaaggtgctgcgacacctgtaatgggcctatgggcttgtaacttcatttgggaccctggcccaggaatagggttgatctgcaccggcaagatcaacaacccacggagaggtgtatcgatcgctaaggcgcaacacaacgtctcgtacggttgtagtcggatcgtcaacgtttctcccaaatcgtag

SEQ ID NO: 93419 - DNA, 878 bp, Oryza sativa
  Clone ID: PAT_MRT4530_91805C.1
ttaggttccccgaaagcggcggcgggctcgggggaacggacagctcggggcgggcgcacgttcgccggcgaaacggcggcatttcggccacaaacggagggcacccagcacgtagaggacgacgcggcgaactcacccggtgaccaaaaccggcggcggaagaccaacggacggcggcggcgacgaggaggaagcggcgaagctcttcgggtcgacgacggcgacggcgctccgacggtcttcggcggcggcgaagcggtggacggggacggcgacgacttggcgaacccgatggtggcgacggcgaccgacgacggcgactgcaacggcggcgcggcgcggctgaaccgacggcaacgacggcggcaactagggctacgcggaggcggcgctagacgcgacggcaggctaaggcaaaggaggcgacgggtagaggggagctcgggggtccttatataggtgcaaggaggcggcggcaaaggcccacggcggccggcgacgagaaggaaagctcgcggcttgaaggaaagaggccgatccgaatcgaactctatttccacgaacttccaaaacgatttagccgatgtttccaaaggagaaaaggtagaggagatcccggagattgtttcccctcaatcaattcggccggagaaggaaaggagcggccggatttggaaggaaacggcgacggcggcgcgctagggtttcaggcggcagcggcggctcgaggaagacgaacctgacaggtggggcccacctgtcagcggctgagagagagagaggagagcggcggcttggcggactgggccggctgggccgagggaaagagagagaagggttttgggccggctttcggcccaaagccaaaagaagacttt

SEQ ID NO: 93420 - DNA, 1317 bp, Oryza sativa
  Clone ID: PAT_MRT4530_91806C.1
atggctactatagatacaaccattgctcacatcatggatgaacaagattatatcaagatcaagtcctccaagtgctggaattcgattcggccacctgctacactgttgacttcaaacggccgccaaatttgcatccgagctccgttttgggcccgaataaggttgatctgcaccggtaagattaacaacccaccgttatcatcaactcttcgaaagatcgggccaaacaactgccttgagtgtcgaaaggagctcagggttcgtcaggtggtatcagagctttcgttgctcggattgtgcaaggggaaacgagatggtcatgctcaacatcaacatcttcaccatcaacaagatatagcgacttcttcacgcatcacatatgaggtatatgataatgatcttgcaagggtagaatctaaattgccagtgtttgatggccaattgttcatgcttgcttgcaatgttgagcgcaaaattttggagaacccaacggagcaacaagctatgcttgtgcctcctatcactgatgttttgcaggaagttcagaacagtccccaaaatgagaagaacgatatgtttgagatgtcacttccatcactcgcgaatgaagagaaggctgatgcacctacattatctgaagagtgcataaaagataaattaaatggtgcagaaattactcaagttgatttgcattttgttcctcgtgataaagaagagttatgcgatagtacttcacttatatccattccacaactagtgaatcaacatgccacttttaatcttgattctccatgtactgaatttaagcatgttattcacacgtccatcgagaatgatgaacttcaattgcaatcttctttaaatacattgggctatattctgtttgatgattcttgtgagctcaattatttgaaggacaaaatatttgctcattctgatttgccaagtcctcgtaatattgttttaaatcgaccacgcgatgagaaccatatggaaaaaccgaggacggttttccgtaaagaaggggaggatgatgtgaccatggctactacagatacaaccattgctcacatcatggatgaacaagatgatatcaagatcaagtcctccaagtgttggaatccgattcggccacctactacactgttgacttcaaacagccgccaaatttgcattcgagctccgttttgggcccgaataaggttgatctgcaccggcaagatcaacaacccacagagaggtgtatcgatcgcaaaggcgcaacacaacgtcttgtacgattgtagttgggtcgtcaacgtttctctcaaatcgtag

SEQ ID NO: 93421 - DNA, 628 bp, Oryza sativa
  Clone ID: PAT_MRT4530_91807C.1
gaagctccggctccactctcacaggcagctcaactggggtataagccaaacgtcttctccttctggatcctttttcttcaactgaggttgattgattattgcaaggtgagcatatgacatactcagcaagccacacagcaaatatgcaagtgcacaaggataccaaaggatggcataatatcggctcatttgcaaaagcagcatttagcaaagatttaagagaacgcactcacgaaccttcgcaacgacggaaacgacaagctaacacgcaaaacgctagggaccttggccgggcgattggagagcacctacgcgaagaggacgacgagacgaacccgacggtactcaccacgacgacaaacgacgaacgacgacggccggcgacgagaagggcgacggcggcggctcggttgaacggcgacggcgagctgtggcggccggcggcgaaagagaggtggcggccggggttctcctcaccacggcgtacctaacggcggcgacaggtcaactggtgtataagccaaacgacttctccctgtggatcctttttcttcaactgacggtgattggttattgccaggtgagcatatgacatactcagcaaggcacacagcaaatatgcaagtgc

SEQ ID NO: 93422 - DNA, 1482 bp, Oryza sativa
  Clone ID: PAT_MRT4530_91808C.1
atggctactacggatacatccgttgctcacctcatggatggacaacaagatatcaagttcgagtcctccaagtctcaaaatccaattcggccacctactaccctgctgacttcaaacggccgccgaagctccatacgacctccgttttcggcccgtgagtacttgatggaaagctctcggagtcctctttccaatgcatcaagcctcattgccaaattccatctcagtcggcagcaactgaagaaacaaggaatagggttgatctgcaccggcaagatcaacaacccacggagagggatacgcaagataattggggatagctgtgctcaccatcgacatcttcgtcgagacatgaggagtgatcaacatgacctttatgaggaagtgcgtaatcacgaaaaggaggagagagacatgaaagagccaccaattccattgttcacactcaagtttgagacacctccatcatctaaagaggacatccaaggtaaagtaaatggtactgaaattaatcaaggtgagtgcattattaacgaagtaaatttgttcacttttcatgcaaaagtagagcaaccgttagtggaaccaaatgctggaattcctttgtcacaagttgatttactcgctgttccttgtgataaagaagagttgtgtgataatgcttcacttatatccatgccacaactagtgaatgagcatgctattcctagtgtttctttgtgtgctgattttaagcatgctgttcacattgctaatgaagttgaggaacgtaaattgctatcttctttaaatactttgggctatgttcagtttgatgatttttgtgagctcgataatttgaaggagaaattatttgctaagtctgatttgccacgtccaactaatgctatttttcatatctttggcaaatataatgatagaggaatatatttggtgcatagagttttcatttgttcggatttagagaaacatgttattgctaatcacactacttcgagtttctctagttttgattggatgaaacaggttattttgaatggactatgtgaagaacaccatatggaaaaaccgaggacggttttccgtgaagaaggggaggatgatgtgaccatgactactacggatacatccgttgctcacctcatggatggacaacaagatatcaagttcgagtcctccaagtgccaaaatccaattcggccacctgctacactgctaacttcaaacggccgccgaaactccatacgacctccgttttcggcccgtgagtacttgatggaaagctctcggagtcctctttccaatgcatcaagcctcattgccaaattccatctcagtcggcagcaactgaagaaacaaggaatagggttgatctgcaccggcaagatcaacaacccacggagaggtgtatcgatcgctaaggcgcaacacaacgtctcgtacggttgtagtcggatcgtcaacgtttctcccaaatcgtag

SEQ ID NO: 93423 - DNA, 283 bp, Oryza sativa
  unsure (1)..(283): unsure at all n locations
  Clone ID: PAT_MRT4530_91809C.1
tgaacagaanaagtcaaaataactttgttcnatgtattanctgttttcacataataagatcctcgttttacattcatgcntgggttatttgagtctttnttgtcctccaagagtgaatnctaggatgatttgtagcctagagaccactattttgcctnagnaatgaattggaagccagatgctgcannttcagngtaactgtttgattgtttgcccgcttgcaatcnagagtgttggtggactnctgtgcacaaaaaancagnagaccaaaaaaaaaaaaaaa

SEQ ID NO: 93424 - DNA, 489 bp, Oryza sativa
  Clone ID: PAT_MRT4530_9180C.1
ctgaagactatcaatgatcttgagaatgaaggagcacgtaaaactgacaaacttgtagctaatttagcaaaccaaattgaggtaaagaacaggcatttgcaggaacttgaagttacatacaatgaaagaactacatcacttgagaagatgatggggcaaagggaacagcttctccagaaatataatgaagaaattcgcaagatgcagcagctagctcagagacattctcagaagataatcgatgagaatcaaaagctgcgttctgaactggagtccaagatgagtgaacttaatacgagatccaaggagcttgatgagattgctgcaaaaagtgattatgaccgaaggatcattgatcaagagaagcagaagaatgctatcaaatcaagccatcttaagttggcaacgttggaacaagagagagctgatgaaaatgtgctgaagcttgttagagaacataagagagagaaagaagctgctgtaagaaaa

SEQ ID NO: 93425 - DNA, 1478 bp, Oryza sativa
  Clone ID: PAT_MRT4530_91810C.1
atggcttcagctccactcccacaggcagctcaactggggtataagccaaacgtcttctccttctggatcctttatcttcaactgaggttgattgattattgcaagaatgagcatatgacatactcaacaagccacacagcaaatatgcaagtgcacaaggataccaaaggatggcataatataggctcatttgcaaaatcagcatttagcaaaacatttaagagaacgcactcacgaaccttcgcaacgacggaaacgacaagctaacacgcaaaacgaagaaaaacggccggctgcggatttggagggcatgtacacgtagaggacgacgagacgaacccaacggtactcaccacaacgacaaacgacgtccgacgacggccggcaacgacggggaacgggcggcggctcgggttgaccgacggcggcgagctacggcgaccggcggcgaagaaggacgggcggccgggcttcctctctcctcggcgcacctcttggcggcggcggcaagcggcggcgacggcaggggcggcgctgcggcgcggctgctgcttccttccactactgttattctcctgagactgatcctgctgaactggcaccggctgattagcttgctcgatgttaacttcattgctttcattagtctctgatttgatctcaccaccgatgtttaactgttgcgactgtccttgaccagcgaaagaagattcaccaatttggagtggcttgatacgctgcctctggctactaccttgtgcctcctggaatacagtcattttccttttacggttgtccatcctgttcttcttgtcttcaagtcgaattgctttgtcaaccagctgctgaaaatcagcatagtcatgagagatcaacataactgatagctcatcctttaagccttccaaaaacttctcctgcctttcctcgtcagtacgcacatcttctggagcatagcgagctagacgattgaactcatgaagatattccgtcacggtacgatccttttgcttaagtgcccggaactcacgctttttcaaagcaacaacacctgcaggtatgtgtgtcttcttgaatgcttccgtgaactccgcccaagtgattggttgtccttctgctctgttcatccggaaatgatcccaccattctgatgcaggtccttgcaactgatgtgaagcgaaaacaactttctcctgatccgtgcactggagcagttccaacttcttctcaatagtgtgcaaccaatcacctgcttccactgggttggtagtgctagaaaaggtaggcggcctcacacgaagaaaatcagctaacttgttttgcggcggtggagcattattgttcccttggttgagctggttctgcatctgttgtatcatcatgttcattaactgagtctgttgagccagaacttgagcaagagttgggttcccttcattgttattgtttccacttccattagcacgagtgttcaccat

SEQ ID NO: 93426 - DNA, 1107 bp, Oryza sativa
  Clone ID: PAT_MRT4530_91811C.1
gaagctccggctccactcccacaggcagctcaactggggtataagccaaacgtcttctccttctggatcctttttcttcaactgaggttgattgattattgcaaggtgagcatatgacatactcagcaagccacacagcaaatatgcaagtgcacaaggataccaaaggatggcataatataggctcatttgcaaaagcagcatttagcaaaacatttaagagaaataaaacagtggagtagttaatcagaaattttaatcaacactgaacagcacacccatgctgcacaggcccaaccatcctgaacaaccatacccggctgtacagatctaactccaaaccaggagctaagcaaattattaccagttataatatccataaattattgtgagaggtgtgagactaatcacgaaaaacattgctcaacccgcccataaccgcgggcacggctattcgaatagttttactctggccaaaggtgtaccacacagtgcaccattcccggatcatagtcacccccttataaacaaggtatggactccccagcgacccccgtgggcttatctccgccacttctcagtctggtgctccgcaatgaaccatgctatacaaaaggaaaaggaggattattgcgtcagcggctagggtttcgcggtggaccgggcgcacggcagcggttcacgggaacgaacggccgagatcaaccctatccaaaacggacggccgagatcgaacggtccacgaccggctcacgggagaggacgacgatgacgtcagcggtgacgtcaccaccggcggcggcggcttggaaggctcgggcggcgcacgctcgccggcgaacggcggctctacggcacaaacagagggcaccaagatgatgcgggcgacgaggcgaactcaccggtgaccaaagaagcggcggaggaacaacggacagcgccggcgacgaggaagaagcggcggcggagatcgggtcgacgacggcgatggtgctccggcggtcttcagcggcggcgaaggggcggacgaggatggcgatgacctcgcgaacccgatggtggcgacggcgaccgacgacggcggctgcaacggcggcgcgacgcggc

SEQ ID NO: 93427 - DNA, 396 bp, Oryza sativa
  Clone ID: PAT_MRT4530_91812C.1
atggctggacacaaagtatttcttcttttcctggctgtcctcggatccttggccattctgtcacaatctgaaagcaccagtgacatggatggtgacaagtccacggtggatctgtgctcagagtcaagtggagggcagtactgctgcttccctggaaatggttgctacccggacagagcacagtgtataagtgctgcaaagactggaagaacaccaactgcaccaaggacattattgcacctccctctccctccctctcaccgtaaccgatgtgcaataacaaggatatgccaagaaatctgtcatctttgtcttgaaacaataagtagacatgatcaggaaatcgcaactttcttggcgtttttgttcgaatttatcttttcacttgtggattag

SEQ ID NO: 93428 - DNA, 468 bp, Oryza sativa
  Clone ID: PAT_MRT4530_91813C.1
atggactccccagcgacccccgtgggcttatctccgccacttctcagtcgggtgccccgcaatgaaccatgctatacaaaagatggcgacctcgccggagattggatggtcggctgcgactttggaggacatgtacacgtagaggacgacgagacgaacccaacggtactcaccctcgaaccaaacgacgaacgacgacggccggcgacggggtctagcggcggcgcggcttcggtcgacggcggcgacggggctccggtgatcagcggcttcgggggtcaggcggccgggcttctccaccctcccgcgcaccttacggcggtgacggcgaccggcggcgacgacggaggcggcggcacgacgcggatggagctcggccggcgacgacggcggggtggagcacgtggcggcggcgctacgaggcacggaagatcacgggagagggggcaaacgaaagaggaggactag

SEQ ID NO: 93429 - DNA, 568 bp, Oryza sativa
  Clone ID: PAT_MRT4530_91814C.1
ccaaaaacctccaaaaagcactttcagccatagttttttttaaccagccaccacatcattacattacattacactacacactggggtacatggggaagggaacaaggtttccttttaagttttttggagggggcaaaaaacaccatttaaacccccctaccttttttcccttttgggggaaaagaattaaaataaaaggaatttccactagagcccgggtcatacaccggagttagaatattaaatagcggaccaccttggttaccagaaacacagccaaaggctttggccaaggaaacctccatcctgaggaaatgttgggagcggaaacagggtagggggccccgggcggtccatccttaatttaaaggctagaggaacagtggtactcagcccagccaaggactggattttccaggtcataaacaactaacttattggaagggaccagatctccaaaaagcaccatacccttcccatccttggatggaaacccaccatttgggaatccaacacaatataagttatccccattttcaaaaaagaaatgggggggatccacattcaa

SEQ ID NO: 93430 - DNA, 1248 bp, Oryza sativa
  Clone ID: PAT_MRT4530_91815C.1
atgagcagtacaaacaagagctcgccagctcgaaatgagagcggcggcgacggcgacggcgacatcgccgtcgacctcttcccgttcctacgcgtgtacaaggacggccgcatcaagaagttcgtgcgccacgccaccgtgccagcgtcgcccgtcgagaggagcccgagtggcgtcgtgacgaaggacgtcgtcgccgtcgacgacgagaccggcgtgtccgtccgcctcttcctccccgtcgacgcggccgcggccgcggtcgccgccggcaggaggctgcctctggtggtctacgtccatggtggcgccttctgctccgggagcgcctccgccccgccgttccaccgctacgccgagtccctcgccgcgcgcgccgccgcggtcgtcgtctccgtggactaccgcctcgcccccgagcaccccatgccggcgggttacgacgacgcgtgggcggcgctccggtgggcggcgtcttcccgccactccgacccttgggtgtccaactacgccgacaccgcgtgcgtgttcctcgccggcgagagcgccggcgccaacatcgtgcacaacgtggcgttacgtgccgccgccgccgccgccgccggcgaggacgacgacgacggcggcggcggcatcgacatcgaggggataatactcctgcagccatgcttctggggcaccgagcgactaccctgcgagagaccggccgcctggaggcgcgccgcgccgccgatgttcctgccggagaggctcgacgcgctctggccgttcgccacggcgggcgccgccggcaacggcgacccccggatcgatccccccgccgaggcggtggcgtcgctgccgtgccgccgggcgctggtgtccgtggccacggaggacgtcctgcgcggccgcgggcggcggtacgcggcggcgctgatgcgcggcggcgcgtggggcggcgaggcgacgctggtggagtccggcggcgaggaccactgcttccacctctcgccaaggcctaaccccaacgccgcggcgctcatggaccacgtcgccgagttcatcgccaagggcaacacctccacgtcgtcgccgatggcgaagcggcggcgtcgccgtcgccggtgcacgttgcatggcgcgggcgcggagaaaacgacgtcaatgcatgcgttgcgaggccaaactgcgccgaaagttcaacatgccggatcaggaataatggccaataaggccgacaagtatgtggtcaggagttgtctctga

SEQ ID NO: 93431 - DNA, 3074 bp, Oryza sativa
  Clone ID: PAT_MRT4530_91816C.1
ctaatgacaaacgccgaccatagcattgcagcagctcttgaggtacgagttcagccaaacctcgcgaccttggagagcttccacgtcctggttcttcttcacgaccaggagtgaccgctcgagttcagcaaccttgaacttcatcctccagtaggcaatacgcctatcttgttcagcgatggcaccgtcgagatctacaaagggtagagcatgtaagggacgccacctctccccatccttaaaaatgttagggaaaggcatgtcgcttgaggagggcaggttgatcatcgcgagatcaggacatccgccttgctggacgtcctcagcactggacatcacgtcctcccgcgtggcatcggccgcccccttcgacaagatctccttgaggtcgacgctagggagagctagcttcacgcaagcgaggaggtgacatgcccctgtatggattccgttggagatctcgtccgcaatgtgggctgtgtgccatgacgggatagcctccatctcacccggcagctccgacaacgccgatgtcagcgacgtctcgtcgaggtgcgttgggatagaggactccacgccgcacgacaacgctagtcggtgcaggttggtgaagctcttgcggagggagtcgtggagggagaagaggatttcctgcgtgtcgttcatcttcttctccatgccctggcgttgcatctcattgccggccacgatctccttcatctccacgcgagggatgacagcggcgggggatccactcgtcgccgcctcactcccgctttgcgcggagatcgccgacgctttcttgccggcaggcagctttaacgtcctcctctttggaggaggaccagactgcccatgtcctgcataagatagcaaatcatgaccccattccagtctccagggcttccgcttcgtcccgctgccccctgcgatggcaggaatggaggagatattggtgaccttgtcggcaaccttctccttcagcgaggcggaggcattgatagcggcagccttctcgactgccgacttgtcgcagagcggggctggtggctcgtcagccgtggaggcagcactgatcaagacctcgtcctcagctcctgtgtagtccaatgcgggatgagcgcgggcttgcagcggttggatctgacgactaacgaagtcttcgacgacttcatagccggtcagtcctcgctcgcgaagctcgctcacggcatcgacaaaggcttggagagagggtgtcaatggaggttttgaggtccagtcctcggaacactccggttggacctcgggcacaacaagaaccgggtcgagttctttgagctcgagggagaaccatctcgatctccaatggctccgggatgtgtggcattggagagggatgtatttcgccttcatgccttcacgaaggcgaaacccacaacatcccgaaacccgattagcggatccaccggagttcgtagaagaagcgaaagaagtaaaggaaaggcactaccccaatgtaggcctcgcagaggtgagcaaaaatgctcaagaaagcgatggaattggggtttaggtgcaagagagaaaggccgtagaagttcaagaccaataaaagaaattcggaaggaggaggtagaaaaccgcatcggacgaaatcctctacaactacgatacgacctaggatgggggaaggattagtacctcctgcttccctcgccataatctgctttggagggacagccccctcagtgtacagcttcttcaacgcagccacgtcggaggaagactggtcaaggtctgccattggaaggaggtcgccgaaagaggatcgccggtggaaagtgtcgaagattggggaaacggagagtccgagagagccggagaataacttcaatttaaattcaaagttcgcatcgatgggctccctcgccgccgccacgtgctccaccccgccgtcgtcgccggccgagctccatccgcgtcgcgccgccgcctccgtcgtcgccgccggtcgccgtcaccgccgtaaggtgcgcgggagggtggagaagcccggccgcttgacctccggagccgccgatcaccggagccccgtcgccgccgtcgaccgaagccgcgccgccgctagacctcgtcgccggccgtcgtcgttcgtcgtttggttcgagggtgagtaccgttgggttcgtctcgtcgtcctctacgtgttcatgtcctccaaagtcgcagccgaccatccaatctccggcgaggtcgccatcttggtccggccattgatgagtctcacacctctcacaataattatggatgttataactggtaacaatttgcttagctcctggtttggagttagatctgtacagccgggtatggttgcattcccatcattggagaagttcattgatgagtgtgttgttgctttgaagaagcgtgagttccgggcacttaagcaaaaggatcgtaccgtgacggaatatcttcatgagttcaatcgtctagctcgctatgctctagaagatgtgcgtactgacgaggaaaggcaggagaagtttttggaaggcttaaaggatgagctgtcagttatgttgatctcccatgactatgttgattttcagcagctggttgacaaagcaattcgacttgaagacaagaataacaggatggataaccgtaaaaggaaaatgattgtattccaggaggcacaggatagtagccagaggcagcgtatcaagccactccaaattggtgaatctttttctgcaggtcaagaacagtcacaacagttgggcatcagtggtgagatcaactcagagactaatgcaagcaatgaagacaatgatgagcaagctactcaatcagtgtcatttcagcaggatcagtctcaagaagataacagtaatggaagggagcatcgggtgtgtttcaattgttatgagccaggtcacttcgtaaaagagtgtccgaagccgaagcgtcaacagccacaaggccaagtcaacaacattgtcctcacaggagcaaatgcagtgccggttgcgtctcaagggatacagctcagccatcagttccaaagcagcagtagctttctttaa

SEQ ID NO: 93432 - DNA, 1578 bp, Oryza sativa
  Clone ID: PAT_MRT4530_91817C.1
atgtcgtactacgtagatccttataccggcgtaccccaatactctctatatccggtctacgggtatcccccgtcgacaccatccattgagcaagctttgcgtgaagaagagattgaagaagatgttgatcaagccgcagccgaagaagtcaccatgttgaggaagaagaacaaccagccgctcctgccatcccaaaaagaaaacagcagcggaattaacggtctagcaatggcttcagctccactcccacaggcagctcaactggggtataagccaaacgtcttctccttctggatcctttatcttcaactgaggtttgatgattattgcaagaatgagcatatgacatactcaacaagccacacagcaaatatgcaagtgcacaaggattccaaaggatggcataatataggctcttttgcaaaagcagcatttagcaaagatttaagagaagtaaaacagtggagtaatttatcagaaattttaatcaacactgaacagcacacccatgctgcacaggcccaaccatcctgaacaaccatacccggctgaacaaatctaactccaaaccaggagctaagcaaattattagcaagtatccccatccatatttattgtgagaggtgtgagactaatcacgaaaaacatttctcaacccgcccatgaccgcgggcacggccattcgaatagttttactctggccagagatgtaccactgtacccacaagacacaattccacacatgttgccatgccccgaagtaccaccacggcactacaaagggggaaattgtgacaatacccttcgcacaacacaactcaccacagtgcaccattcctggatcataatcaccccctcaaaaaccagaggcatggactccccagcgaccccacggacttctcgccgcttcttagtctggcaccccgcaatgaatcatgctatacaaaaggtaaagccgacgcgaccaccggcaaaagagggctcggttgggctatctaagggcacctacgcgtagaggacgacgacgcgaactcaccggtacaagaaaacacgacggacgacgacggacgacggccggcggcgaggttccaaggcggcacggttcgggttgacggcggcgatggcgctccggtggtcttcggcggctgcgaaggggcggccgaggttcttctcctccgtgcgcacccgacggcggcgacggacggcagcggcgacgatgctagcggcggcgcgacgcgaccggaggatcgccggcgacggcggcggcggatttggaggggaaaacggcggctgcacaggtacaggacggctggctcgggctctgtccaagcttgaagacgacactgtagcagggaggcgtactagactttcggctgggcttatggcctcttccttgattttggccagaagggaggtggtcaatagctccttttgctgaaaggttttgcggtttctctcattccagatctcccatgcgaccaacagcgtcagtgtgcgaagagccttcttggtacctcttggatgtttgaggtagcctcccaccattttaacaccgtggaggtttgctgccaccgacat

SEQ ID NO: 93433 - DNA, 3655 bp, Oryza sativa
  Clone ID: PAT_MRT4530_91818C.1
atggcgcccgccgcctccctctccctccacctccgcctcgccccgcccccgccgcctcaccgccgcggcaggccgccgcgccacgcccctttcctccccctctctccctaccaccaccacctccacctccacctccgcgtcgcccaccaccaccacggccggcacccgcacccgccgtcgccgcggtggcgccacgacgtgagggcccgcgcggggaccatccaggcgccggggctcgcgcgccccggcggcgccgtggagaccgaccgcctcccctccggcgtgcgcgaccgcgccatggaggccgtcgaccacttcggcggccgcgtcaccatcggcgacgtcgcgtcccgcgcggggctgcagctcgcgcaggccgagcgcgcgctgcaagcgctcgccgctgacaccggcggcttcctggaggtctcggaggaaggggaggtgctgtacgtcttccctaaagactacagggcgaagcttgctggcaagtcgttcagaatgaaggtcgagccgctgatcgacaaaactaaggaagtgggtgcatatttggtgcgagtgtcatttgggacagcgctcatcgcctccattgtgcttgtatacactaccatcattgccattatctcaagctcgagtccagtgataacacttcttattgtatcagtgatgaagataatcgcggcaggcgacggagatcctatgactctactatcatcataccaacagatttattttgtcgttcacaataatatttcatatgtcttcaacaggtacttggacgctgattactacaggaggcggcggcggatcttttcatttgtatttggagatggtgatccaaatgatggtcttgaagataagaggtggaagatgattgggcaatatatttcatcgaatggtggagttgtcacggcagaagaactagcaccgtatcttgatgtgccaccaatttcagaacaatccaaggatgatgaatcatttattcttccagttctattacgcttccagggacacccagaagttgatgaacagggaaacattctttataggtttccatcactgcaacgtactgcttcatcaaaaggaagtggggttagagaatatgttggtaacaaatggtctgctatgtttagcagtgttgaaaagtacttagaggagaaaccatggaaattcagcaaagcaaatgcatctgaaagggcaatggttgctggtttgggaggactcaatctttttggtgtgatcattcttgggaacctgttgaagcaaatgacagtgccacctggtggacttatctcatttgttgcgcaactgtttcctttgcttcaggtatatgctggttccttttttgcaataccgttgtttagatggtttctactccgcaagaccaacaatgacattgaaaggaggaacaaggccagagaacagcgagctcaggaacttgcattgccagaatcttctctcagaagaaagttactcagtgcacgcgacatggctcaacgtaaggtaattactccagaggagatcgtctacactaccgaaaaggatcttttggatcaggattatgaagtcaaggaatgggaaaagagatttaaggagcttgaatcagactgatggaaatacttggctttcatgctatcccttcatggtcctttggtctgcttggatggtcatttttatcagcacccaattgattggtggatatatctgactaaaccattaaatcaagtggcgcaacgtctaactggactggatggttctgacacccattgataggcgcgcactatttcgaccttgaaatttttgtgtaaactgttagtcaatttgcattgatcaaggtctgcagctgatgtacatatctgtaacgtttagcagcatatttgtataggtagttcagtgcacaggagcagtgaaccacaaagttcagaattcgacatgggtaccagggaccattctttatggatggagaaggatagccggaaaagtaaaagattatgccattactggggcatcagacttggtcattctggtttctgtatcgctgaaactttactggtgatcatgcacaagtcttatgctttacacaggcatgttagaacattcaggggaaaatcaattcctgattggtgagaaacagtaattgtgtataggagctgtgcaagaatatacgtccagattccagaccttagatgccagaatagaacaagatcatttataaatcccaaaagaatgtgatacgcttacaactgatgatttgctatgtattatcgaccaatgacaattcttctgtatgactcttcctctgtaacactgtaagacgaaaggcagcgcaagcctggtgggttaatactttccaaatttctgttagatctatactctaatctaatatcactgagaagccattttcagcttctgaatggcacccccgttaactgcagttgtcacgactcactaagtacagtggctgatactgtcacgataaggcgaaaacgaccgatgcggtggcgataagtaggaaccaatggatcacctgggtcgctgcctcgtgtgatgccatgggcgggaggtagccgcggaggccgacgttgtagaccggcgtgccgtcggggtagaagaggccgtagttccgctccgacgccgggccgggcttgaggttctcgttgaagagcgcgaagacgtagacgtcgatgggcgcctgcggccgcagcggcgtgccctgcttcatctcgatcctccggaggaggttcccgatgtacgtcccggcgttctcgggcgtcgcgccggcctcgtcggggtcgccgcgggacggccacccggtctccgacaccttcacgtcgatgtccgtgtgccccatcgcctggatcgccgcgtacacggcgtccacctgcgcgtacagcatgttgtcgtagacgagcctcgtgcgcgggtcgacgacgccggcgttgggctggaacagcacgtactccagcggcacgcgcgccgggtcgtccttgtaggcgaagtacgggtagcagttgatgaggaacggcgccctcgccgccgacaggaaggccaggaacggctgcaggtgcggcgcggcggaggggtggaacgcaccggcggacggcgggtaggacacgcccatgatgtccagcgagtgcgcggtggtgacgttgacgcggccctggaggccgagcgcgccgagcgcctggtgcacggaccgcaacgccgggaggaggctggcctggagggcggtgtcgttgcccttgaacacctcgttgccgacggtgatgcaggtgatgcgcgcgccggcgcggaggtgcggcaccacgtgcagctgcagccacgactccgccgccgcggggctggccatcgccgggacggcctcgttgccgatgccgaccacgaactccacgcccgtgccgaggaacgcgcgcaggacgtgcgggtcggcgtcgaacagcttcaccttgctgatcttgagcgaccggagcagccacgacacccgcgacggcgacgggaggttgttcgcgatctgcccgtagttcacgccgatggacagcgcctccgcgactcgcactaatacgatattagttaatatacggaagaaaaataaaaataaaatccgtgtggatggctcggggcggcaaccatagccgttgccaccacccctctctct

SEQ ID NO: 93434 - DNA, 117 bp, Oryza sativa
  Clone ID: PAT_MRT4530_91819C.1
gatggtctaaagctgggaaggaaaacgccaatggctcttctaattaaggcgagattgtctgctgacaacaatgatgtcacaacactaatattagagaacctgactaaggagaactag

SEQ ID NO: 93435 - DNA, 899 bp, Oryza sativa
  Clone ID: PAT_MRT4530_9181C.1
ccggccgggttattaaagaaagaaaaagcaatactgaaatgcaagatgccaggaaggagcttgaaaatggcttacttgatctcttagatggtcaatcacatataggaataaagagaatgggcgagcttgatctggaagcattttcaaaagcatgcagaaagatgtcatcggaagaggatgcagagattactgctgccattctttgttcaaagtggcaagctgaaattaaaaatcctgattggcacccttttaggtttgtcttggttgatgggcaggagaaggaaattatcgaggatgatgccaaacttcaagaattaaaagaagagcatggcgaagacatatacagattggtgagggacgcgctgtgtgaaattaatgagtacaaccctagcggcagattcccagtaggagagctgtggaacttcaaggataaacggaaggccactctgaaggaaacggtccagttcgtcctgagacagtggcgagcgaacaggaggaagcgctaagcccacctgttcgatgccattgcgtgtagcgctgctgtttgcgttccacctgatctggacatcatgctacttaagcattagctcattcgagatctgtagtaactatgtagtggggttagaccatggctgtttcattccttgttggacacaaaataagttggtactattgcagtatctgcattggtggccacctatggtccacctgtacaagtagatctgttttcacctgttttaggtatgctatgtacagccatgaaccgaggtactttattcatctgcttggtatgcagatgcagcggaatatgtagtagtatgactgtatgaagtactgcttgtccgattgaagcctgtatgagcaaagtagagagactgtatgaagtgcttctctgattg

SEQ ID NO: 93436 - DNA, 475 bp, Oryza sativa
  Clone ID: PAT_MRT4530_91820C.1
gaggaattgggtttgccatctataccctattattggaaactaacaactcactagcacatgatttttttaattattttttagacttttatttttaaattttatgaatagaccattccaaaaagtatttccaaatctgaaccttttggccacgccaccatggttggcgtggctaaacaacgcaatatttttggaatggtctattaataaaattaaaaaataaaaaaaatcccaccacattaggctaagatcagcatacctagccagtttgatcatttgcagttgcaaactttgcagattgttggatttcttttatcgtccctctacctgtgcagatgtagagatgctcagatgccctatctgtcttctttagcagcgcatcaacatgatcggctcctgggaatatcaatattgacttggccaaatcaatgactactggagctctgtggccttgcaatactcgcactccaaatacacc

SEQ ID NO: 93437 - DNA, 198 bp, Oryza sativa
  Clone ID: PAT_MRT4530_91821C.1
atggcgaccacttctgatgtccctgagtaccttagaaaccagattatgatccccatgttgcaagagccatcacatttctttcttggtctgatgggcaatattaaccctactcattgcatcaacaccgaaaccaatagaatcccatttagacaaaccaagcctaatctagccaagtggtcaacaacctttagagcttga

SEQ ID NO: 93438 - DNA, 936 bp, Oryza sativa
  Clone ID: PAT_MRT4530_91822C.1
atggccaagaacacatgcaagctctgctaccgccgcttcggcaacccccgcgccctcgccggccacatgcgctcccactcagtcgccgcctcgaggtcgcagatctcctcgacgtcctccgcgtccacatccgtcgcggtcggcgacgacgacggcggcggtgatgccaagaggcccatccagggatacgtgctgcgggagaagcccaagcggagggtccgcctcgccgagtccgacttctcggatcgcgagagcgagacggagtactactcctcgccgcctcacggcaagcgcgcgaacaccggatcgggcgatgtcgagcaggtgagctcggtgtccgacgccacgtcggaggaggacgtagcgctgtccctcatgatgctctcccgcgacacctggccagccacgccgccgccgccgccgccctaccgtctccgcggcgcaggctacgacgacgggagcgacggtggcgacgcacctccggctccggccgcagcggccgcgcagaagcggacgcggttccagtgccccgcatgcaagaaggtgttccgatcgtaccaggccctcggcggccatcgcgctagccacatgcgcggcggcaggggcggctgctgcgcgcctccgcctaaccctcctccttctcccgctacgcctctccagccattgccggagtgcgacggcggcgaggaggagggcgcgaagccgcatccgcacgagtgcccctactgcttccgcgtgttcgcgtccggccaagctctgggcggccacaagcggtcccagctgtgctcagccgcggcggcggccgcatcgggcgacgatattccagccatgattaaaagcaacggcttcattgatctgaacctcccggcgccgttcgacgacgtggagctctccgccgtttcagatcctttcctctcctcgaagccaggttcttga

SEQ ID NO: 93439 - DNA, 500 bp, Oryza sativa
  Clone ID: PAT_MRT4530_91823C.1
gggggggtgggggggccctttatttttcgctacagttctagctatgttatacagtgctcgacaagacttgggtgctactcctgcgactgactgacagtgtactctcttgacctttgctcttccactaccaattctctcgacgttgccactccatctaagcgagggggcggtgctttaactcctgcaacccaaaactatggtgctcctcacaacgtgttaaattgggtagggaaatggaacatcccctatgctttatagtggagcattacataaaacaaactctctacctgattgatctgaatcgtgcaacctatctcttatgcactatcattgctgctaggggtgtaccctagcacgtggaccaaggtctaccactacacctgcttgaagataccgaacctggcgtacagattgactaaaccgcactgctgagtgacgctccactgtgccgactttgtgtatgaagactacacagtcgcccatgtcaggctcatgaagct

SEQ ID NO: 93440 - DNA, 754 bp, Oryza sativa
  unsure (1)..(754): unsure at all n locations
  Clone ID: PAT_MRT4530_91824C.1
caccaaaaatttactatgccacaaccccttttgattctgtaatcctagccaccaacttcacaatatatccatttctgtttcagttctcaccaaaaaatttactatgccacaaccccactagataagaagagtacctaatatctaccacagccaaagaaaaggctgcatcacaatatccttacagatctcaccaaaaaatttacgaagtcacggacctaccagagtactagatatggtcaatcaaaaggacattagctgacatttcaaattccttaccacagccaaaaaaacaagcacaggcatagtagcagttggtcacatcgcttgacagactcttttatccataatacctcacggaggaagaacccgctcagaagcatcagaaaactccaatggataggtaatagatctagtagcatgtctaactgcatcatataccacaagctttaaacctacattccaactcgggatcgccacttgcaagtaattccccagccaagagagagaaggaactcttcaagcttgtgtagagtgaaatcgtgcaatccattgtaggaaagaattatgtctccctgagaaatgcctagcctcacagcagtagaatcatcataaaccacagctacgatgaagccatcattaatattgtgatcaagttctatctcctcttgatgggaaacttttattagctcaaaagctcttaactccatattaagcactggacgagcaatacgactgaacgtcccggacncgtggg

SEQ ID NO: 93441 - DNA, 189 bp, Oryza sativa
  Clone ID: PAT_MRT4530_91825C.1
atggatcccttcacgaggaagggtggcaggaggagcgtcgcgccgcatcagcttgggaaggggaggtggcagagcgggctggagaagtcggtggcacggccactactaggagggaggaagcggatctcaagcgccgcaaccaccgctaggaaggaggaggaggctcttgaatggcacagccaccgctag

SEQ ID NO: 93442 - DNA, 1315 bp, Oryza sativa
  Clone ID: PAT_MRT4530_91826C.1
cccacgcgtccgcccacgcgtccgggactctcccccactctctcctctctcccagtctctctttctctctccctcctcaaccggatgccgttctctctccacctctcgtcgtctctctgcccctgctcgcgcggatccgctgccggcgatgacgggatgggccgagccttcaagccatcgtttctgctcgcgtgatccgccgtcgacggcaacgggaggggcggatccggcgactcttcccctcccgcacggataccgtccactcttcggccccctctcacgtggatccaccgtcggcggcgacggtaggggcagatccggcgacctcttcccctcccgcacgtgtcccgtcttctctccgcccgcctctcgcgcggatccgtcgccagcgacgacgagagggttagatccggcgacctcttcccctcccgcaactgctggccttggagctgcatggatcgagggatgagagcaacgtctcctcttcttccccttcttcctcctcacctgaccatcaggaaatcaatcctgtggttttttgaactgttgtactggagattgatgtcaacgtgataatcactgactactacatgcctggcatgacagtatgatctactgaagagggtgaaggtaagttttgtttgcattgaatttattcttatcctgtgagcattcataaatcttgggtcctttgttgctgtaagtggagtaaaatttgctccttttgctcctcattttgggggtacaagtgtcatcttcattgaaggacatacccagttgtgatcatttcttctgagaatgtgcctgcaatgatcaacagggttgacttcaatgataacctggagataatgattggaggtgatttgatgccctacaggaagagacttgcgatctgtattttcttgtgtgcttctattatttctatcccttctaataataatattgtatgtcttgctggcttgcgagagaaatatgtaaaatcatgttagtgggagtgctaaaaatagtggaaaaaaaggcgggacaatcagactgctgggcggatagaaaaggaaaagaaaagcgcccgaactcctgaacggaaagaaaagggaaagaaaagctcctaccggactaatggactgcgatctttttattgcctgatagaaaggtggcttgatgttttagaggaagagccttgtctgcttctatcatttatattgcttgtaatgtaatgtcatgtaatattaatagcatgactcaacataaaatcgggataaaattggagtaggaatcggtgcaggggctctttttagtatatgtgttgttatttaat

SEQ ID NO: 93443 - DNA, 212 bp, Oryza sativa
  Clone ID: PAT_MRT4530_91827C.1
ttaacgctgatagatgattaccaccactggtcgggatgacacaattcgtgtgcactagcgggggagggagcgagctaagtgcaaagccacaacactctctgcgcttgacgatcataaataaagcttgacgcatcatgagctatatcccatctttccggactgaccggggacgaggggccttgctgctgccgcggggcgctatgcaacacaag

SEQ ID NO: 93444 - DNA, 381 bp, Oryza sativa
  Clone ID: PAT_MRT4530_91828C.1
atgacagatctcatgctgcggctaactggacctcaaatgtgggtcacgccggagagtcctttcttagagatgcccagcctgaggaagctgctggtcgtggacatgccgccgcgctgggatgccacatggatctgtgcccttgttgaggaggctccatcgcttgagagactccacgtccacttttcccaacgttgtgaagacgatgatgagatggccgttcgtcggaagttggagatagtgtgggagcaggagccctcaagagcactgcattctcatctggaggagttggtggtcattggttttcagatcaagaaagaaagaaaggttcagcttgtgaggcatatcatggtcgttgcgccgtgttgttctgctcaagcatga

SEQ ID NO: 93445 - DNA, 550 bp, Oryza sativa
  Clone ID: PAT_MRT4530_91829C.1
gtgattagtggccaacatagcacgatgaagatcttattggagcatcatgctgatcctaacagggttttcaatcttgatggtaccccgttgattatgtccatagtttctggatcattggaatgcgtgaagctattaatcaaagttggtgctgacatgaattttagagactccaatggcgttacttgtgtaatggttgcagcaaatcatggctcttctgtcatcatgaagtgcttactagatgctggtgctaatccaaacattccagatgaagtgagtaatattctttcctctatagcctgtgactggatgttgttgcgacaggctgtatggtcttgagagattaggataatctactcacttattctttttatcaactgtaccaatggataagtctgcatgagaagaaggcagtgcttctatgctgctctaaaggaatgcaattgttgaaatgtcatctcaaaggaaattgctcacattccactccaaagggtggatatatggttggattttcaatactgtttgaagcttcttgatataggaatgatgagaa

SEQ ID NO: 93446 - DNA, 1169 bp, Oryza sativa
  Clone ID: PAT_MRT4530_9182C.1
aatgcacagaatcggtattcttttttaagaaaaaaagcttgcctagctacaaaagaattgaattttcaccaccaactactgcatgctacgtactagctagcgagcaaatgtacaggccggcaccgtacgtacatacgtatacgtacggctgttgccctacgtaggatggttgacgaatcggtgtatcatcatcatcagaagagagagagagagaaaaaaaaataatgtgtacatttttttttgttacacttgcctctgttgggttaggaactcctgcacggacacgtagagctgcttgtggcaggagtcgtccatggacagcgacctcctcatcggctgcaccgcgaactcctcgtcgtacttcttcctcgtgtcgatggcctcgtcgcccacgctctccggcttccgccgccgctgcggcgtccgcttggtcgcaggcggcgcggcggcggcgccgccgcggtggctaacccagctctcgtgctcccctctcacctcgatcacgatgctgttgatgagctcgtcgtccggccggtggttgtggttgtggtggtggtggtgcgaatccccccttccctttcttcctcccattttttcccctctcccccagaaggggcagcgcgcgttgccctgcagccacgtgtcgatgcagtcgatgtggaaggcgtgggagcagttgggcagcagccggacgcgctcccgctccacgaactcgctgaggcacacggcgcactccgacacggatatcctcgcgcccacgccgccgccgccaccttcgccgccggcgccgccgcatgccgccgccgtgaacctcacgacggggagcatccgtataaacggcatgccgagcccccgctcctcggtcgccacggtgcggatcaccgacgcctcccgcgcggcccgccgccgcgcgccgccgccgccgtgcccgcgccacggcatcgcgccgcgggaccacagcccgcgcagcgcctggcacttggtcacgaacgcgtagtagctcgcgagcagcgcgaacgccgcgaggatgccgacgacggtgatgacaaccatcgggacgctcgcgttcgacgacgacggcgacgaggagcggaatgccggtggcgcgtccatttttgtagcgctccccgccgtgccgcctaacgagagaggcgatacagttgaagcct

SEQ ID NO: 93447 - DNA, 714 bp, Oryza sativa
  Clone ID: PAT_MRT4530_91830C.1
atggtccaagagtgttcccgacatgtcgggaagaagcgaacgatagagaagggaaaaaaaccgccgtatcgacgtccggttcctcgcgtgcgacgtgccgccaaccaactactccctcctcccgcttccgcatcgtcgccggctccctcctttccatcgcccgatttgccgctagagcagttggggatgatgcccaactcggagttgtgggccacttccagtcccaccccagcatctgtcgtccggatcaacaccctacgctccagctccctccacaccctgcgctggacaccgccgccaccaaaggccctcttctccctgccccgtcgctccgagaggcgagccggcgtgcggaggagcgcagcgcgggtgcggcggctgtgcgggcggcgtggcagcggcggcggctcgcggcgacatcgtgcggggtgcgtccggcggcgaggtgcagtggtgcggtggccgtgcggacacggcggcggacgtcgtcgtggaggcgcgcaagtgcccccgccagcgttcggagacgttcgcggtccaggcaagcgccgcggcgagcgcgacgtagtcggcagtggcgagcacggccaggacggcggcaaggatcgcgtagggcgtctggtggaggccgtgcggcgagaggaggaagacgaacgctatgcggagctgctgacggactgcctcgtgctcgtgttccggcggctggacctggac

SEQ ID NO: 93448 - DNA, 498 bp, Oryza sativa
  unsure (1)..(498): unsure at all n locations
  Clone ID: PAT_MRT4530_91831C.1
caaaattttaaaagtatttagtttaaaagaactagaccaacatatatgtatttgtcgttcaaagttctataataaaaataaacatgtatttatttattctatatattataatagaaaaacaagatcaaagatatattttgaagactgtgttattgtctaaaacgtcaagaattataaaaccgaaggaagtactaaggctgtgttggaggaggagatagagaagattgagaagatacgtaaaacgaggtgagccatttagcacatgattaattaaatattagctattttaaactttaaaaatggattaatatgattttctaaagcaacttttctgtaaaaactttttgcaaaaaatacaccgtttagtagtttgggaagcgtgcgtacggaaaacgaaacanacaatctccctatcaccccagaacgaacgcagcctaagttacttggttggtaactaaatttgtatctggatggatgcagggagagtggcagcagcag

SEQ ID NO: 93449 - DNA, 759 bp, Oryza sativa
  Clone ID: PAT_MRT4530_91832C.1
atggcatggggcagcagcgacgatgtaatctccgtcgctccaagaggcgagccggcatgcggaggagcgcagcgcgggtgcggtggccgtgcgggcggcgcggcgaggcgaggcggcgagtgcctagcgcgggtgcggcgtctgtgcgggcggcgcggcgtggcagcggcgacagctcgctgcaacaccgtgcggggtgcgtccggcggcgaggtgcagtggcacggtggccgtgtggacacggcgacagacatcgtcgtgtccagccgccggaacacgagcacgaggcagtccgtcagcagctccgcatactgcgtcgacggcggtggcgagcgtgtcgtccggcggcgctggccttcgcgctcggccacggcgcgctcctcttcatgctctccttctccgtcttacgcgttcgtcttcctcctctcgccgcacggcctccaccagacgccctacgcgatccttgccgccgtcctggccgtgctcgccactgccgactacgtcgcgctcgccgcggcgcttgcctggaccgcgaacgtctccgaacgctggcgggggcacttgcgcgcctccacgacgacgtccgccgccgtgtccgcacggccaccgcaccactgcacctcgccgccggacgcaccccgcacgatgtcgccgcgagccgccgccgctgccacgccgcccgcacagccgccgcacccgcgctgcgctcctccgcacgccggctcgcctctcggagcgacgctggaagaaggaagatag

SEQ ID NO: 93450 - DNA, 762 bp, Oryza sativa
  Clone ID: PAT_MRT4530_91833C.1
atggcccatatactaaaaacatccagcacgcggaaaaagtacactgaaggccggtcggcgggagagaaggagggcggcaccacgacggcggctgctccgcccgcggagacgacgcggtggtcgtccctggcagccacgaccgcgagcctcgtggcgatcggcctcggcggcgccgcgctgctggtgtggtgggtgctcgcgttccacccggcgaacgcacgcctctggatggtgcctgcggggctcgtcctcctcggcacgcccatcctcgcatggctctccctttgcctgtacgccggcccgtgcactgccgtccgcgacgcgccggtgcacctgcacatacatgttcactactattttgatttctttgtgaattcagctgcgagctgcagcgtgttgatgctagagggagagggacatgttgcattgatatggacatatggtatatatgacctggtgtacacagttgctttccaagattacttcctccgtgtgtgtgatatggtgaatgcgaacttggccacctcctgcgcgaagtgctccgcctcgtgcgccgctagcgccggcgggctccatgagccgcactcgaacctctccagcgacgccagccgtgacacgctgctccgccgcggccaccggtgtgtgacacgctgctccaccgctgcatcgccctcgtcgtcgtgcggcaccatggacctcccctcggcgcaggatgcgctacgtgccagcgcgggggcggcagcgcccggcgcggcgacgtag

SEQ ID NO: 93451 - DNA, 891 bp, Oryza sativa
  Clone ID: PAT_MRT4530_91834C.1
actgtgaatcttaaatggagattaaatctagtgaattaaagcagaatcgaaagggaaaatcatggggaaaataatgagggagtagtagggaatcgatttgtgaaagggcttgtagtctagtggttacagccttggtagtaccttaggtcctgagttcgactgctactatggatatccattgctcacatcatgaatcaacaagaagacatcaagatcaagtcctccatgtgctgcaatctgattcggccacgtgttacattgctgatttcaaacggccgccaaatctacatacgtgctccgttttgggcccgtgagtacttgatggaaagctctcgaagtcctccttccaacggatccagcctcatctcggaattctatctcgtttggccgcaatcacagaagcaaggtgttgcgtcacctgtattgggccaatggacttgtaactttgtttgggaccctggcctatgtggggcccatgtggggtgcgccccaatctggtggagcacgacccttggaccctcttggtcgtcctcccacctctataaatagttaggaatagggttgatctgcaccggcaagatcaacaaccaatggagaggtgtatcgatcgctaaggcgcaacacaacgtctcgtacgcacaactcaccaaaagatcgggccaacaacagtcttgagtgtcgagaggaactcagggtccatcataggctcaaatgattcttctcgcaatttacatgtaaactgtgtaattagttttttcctcacatttaatgctccatgcatatgtctaaacctgctaatcgtgacggtgcatgctgatgatgcatccccacatcgtcacgaggccacgcagaaaaggcaaatcgctcgcgctatactggtgacggcacacg

SEQ ID NO: 93452 - DNA, 1605 bp, Oryza sativa
  Clone ID: PAT_MRT4530_91835C.1
atggctaccacggatgcaaccattgctcacatcatggatgaacaagaagatatcaagatcaagtcttacaagtactggaatccgattcggccacctactacactgctgacttcaaacggccgccgaatctgcatacgacctccgttttcgccgcaattgaagcaacaaggtgttgcgtcacctataatgggcctatgggcttgtaacttcgtctgggaccctggcccaagaatagggttgatctgcaccggcaagatcaacaactcacggagagctgtatcgatcgctaaggcgcaacacaacgtctcgtacggttgtagtcgggtcgtcaacatttctcccaaatctcgtcgtcgcctccgtgtctctgttatcgtcgggacctacgaaaacggaatcggctcgctgccacggttctatttttgtagttttcataagtttctgtcgccgtacaacaggtgtttgccaaggcatcgatacatccaacctccattgggatgcttgattgagtcggtgtatgtcaccattccgcttgctttgaacattcacgaggagaagagcaataggatcgaggtgccatctccatcactcacgaaggaagaagagaagactgatgcagctacatcatccgaacagagaaccacaggtaatcttaatggtgctgcaattaatcaagaagagcaaccattagtggaaccaattgctgagatgcctttgtcacaagttgatttacttgctgttccttgtgataaagaagagttgtgtgataatgcttcatttatatctatgccacaactggtgaatgaacatgctatttctagtgtttctttgtgtgccaattttaagcatgttgttcacattgctaatgaagtacaggaacgtgaattgctatcttctttaaatactttgggctatgttcagtttgatgatttttgtgagctcgataatttgaagaagaaattatttgctaagtctgatttgccttgtccaactagtgctatttttcatatatttggcgaatctgatgatagaggaatatatttggtgcatagagtttacatatgttcagatttagaacctcctatacatgtggataaaacatgcaagctagagtgaaatgttattgctaaccaaattgtctcgagtttgccttgttttgactagaagaaacaggttattgtaaatggactacgcaaagagcaccatatggaaaaaccgaggacggttttccgtgaagaaggggaggatgatgtgaccatggctaccacggatgcaaccattgctcacatcatggatgaacaagaagatatcaagatcaagtcctccaagtgctggaatccgattcggccacctactacactgctgacttcaaacggccgccgaatctgcatacgacctccgttttcgccgcaattgaagcaacaaggtgttgcgtcacctataatgggactatgggcttgtaacttcgtctgggaccccggcccaagaatagggttgatctgcaccggcaagatcaacaactcacggagaggtgtatcaatcgctaaggcacaatacaacgtctcgtacggttgtagtcgggtcgtcaacatttctcccaaatcg

SEQ ID NO: 93453 - DNA, 1116 bp, Oryza sativa
  Clone ID: PAT_MRT4530_91836C.1
atggcagggatacgcaagataattggggatagctgtgctcaacatcgacatcttcgtcgagacatgaggagggatcaacatgaccattatgaggaagtgcataatcatgaaaaggaggagagagacataaaagagccgccagtcccattgatcacactcaaagtcgaggcacctccatcatctgaagagggcatcaaaggtaaacttaatggtgctaaaattaataaagcagagcaaccattagtggaaccaactgctgagattcctttgtcacaagttgatttgtttgttgttccttgtgataaagaagagttatgtgataatgcttcacttatatccatgccacaactagtgaatgaacatgctattcctactgttaattcatactgcgctgattttaagcatgttgttcacattgctaatgaagtagaggagcgtgaattgagatcttctttaaatactttgggctatgttcagtttgatgatttttgtgagctcgataatttgaaggagaaattatttgctaagtctgatttgccatatccaaccaatgttatatttcacatctttggcgaatataatgatcttggaatatattttgtacatagagtttacatctgctcggatttagaacctcctgtacatgtggataaaacttgcaagctagagaggcatgttgttttaaatcgaccacgcgccgagcaccatatggaaaaaccgaggacggttttccgtgaagaaggggaggatgatgtgaccatggctactacggatacatccgttactcacatcatggatgaacaacaagatatcaagttcaagtcctccaagtgctggaatccgattcggccacctactacactgctgacttcaaacggccgccgaatcttcatacgacctttgttttcagcccatgagtacttgatggaaagctctcggagtcctctttctaatgcatcaagcctcattgccaaatactatctcagtcggcagcaactgaagaaacaaggagcttcaacacctgtaatgggcctatgggcttgtaacttcgtctgggaccccggcccaagtggggcccatgtggggtgcgccccaatcaggtggaggacgacctag

SEQ ID NO: 93454 - DNA, 1571 bp, Oryza sativa
  Clone ID: PAT_MRT4530_91837C.1
tcttgctctcctcccacggcgccctcacgcgcgccacctgtctctctctctctctctctctctctctctctcctcgccgctcgctcgctcgctcgctcgcgtggggaggagtcgctagggcttcgacctccgcattccgatctcgcgccgcgtcgctgccgatcggcggggtttggtgtttggtgttttggggatggtgtcgggtgggcgcgtggggggtggagaaggggaggcgggggaggcggcggaggtggcggtggcgatggtggataatgaggaggagatggcgcaggcgcaggcgccacccgcggcggcggtggcggcgagggagctggtggtggggtacgcgctgacgtcgaagaaggccaagagcttcctccagcccaagctccgcggactcgccaggaagaaagggatcctttttgttgctattgatcaaaaacgtccactgtcagatcaaggaccttttgacattgttctgcataagttgacaggaagggagtggcaacaattattggaggaatatagggaggaacacccagaagttactgttcttgacccaccaggtgccatagaacatctgcttaatcgtcaatctatgcttcaagaggtttctgaattggacctctcagattgtcatggtagagtcggtgttcctaagcagctgtttgttaatacagatccatcatcaataccagctgctgttatgagggctggtctatctcttccattagtggcaaagcctctggtggcaaaatcccatgagttatctcttgcttatgatccaatctccttgacgaagcttgagcctccgcttgttcttcaggaatttgtaaaccatggtggtgtcttgtttaaggtctacattgttggggatgcgatacgggttgtgcgtaggttttcgcttcccaacgttgatgtaggtgatttatcaaacaatgctggagtatttcggtttccaagggtctcttgtgcttcagccaacgcagatgatcagatctggacccccatgttgctgaacttcctccaagaccacttctcgagatattggcaagagagctgcgccgacgattgggtcttagattgtttaacattgatatgattagagagcatgggacaagagatcggttctatgtcatagacatgaactattttcctgggtatggtaaaatgcctggatatgaacatgtattcaccgactttctgctgagtctagttcaaaaggagtacaaacggcgaccaagctatagctcatgcgaggggtgaaacgacgagcccttcaccgtgtcagtgtgtctcgaattcgctgtgtgtgtagtacaaatgtgaatgcaagaaggcaagagcaaatcctccgtggtaaagttgggcatcagtagttgcgataaagcagcgatgactgtgtcaagctgtaaattattagctcccgtttgctaacttctcttgttctcaaataattttgctcggctaattaatgaagttaagatgttacctgctaaaaaaaaaaaaaaaaaaaactcgagggggggcccggtacccaattcgccctatagtgagtcgtattacaattc

SEQ ID NO: 93455 - DNA, 537 bp, Oryza sativa
  Clone ID: PAT_MRT4530_91838C.1
atggcttcctcctcctcatcatccaagaagctgtcgctcaccttcgtcgtcctcctcctcgccgggctcgtggtgctcggcgagatggccggggccgcgacggcggcggcggcggactgctcgacggtgcgctgcatccagggaggctacatcacctgcaagaactacccggggaagaagctcgacgggaggccagtggcggagacagctcccgagcaggccgcgtcggagaattattctccgacccttagttgggttcacgccaaccgtctgatcaagaatttgcgggtcgaactgaaccgaaaacgtcgaaaaaccgtgctcggcaaccatgatagagatcctgacctaacacaggaattttcggatgctgccaccatgtgctgccattgccaaccgcggatggcattgcgagacagcaatggtggcacgttagctgcttctagcttacgcatttcttggacaagcaatggatgctgcagaggatggtggcccctcactgctgcttcgtcaagaagacgactgagcgcagtatag

SEQ ID NO: 93456 - DNA, 1662 bp, Oryza sativa
  Clone ID: PAT_MRT4530_91839C.1
atggcgcgcgtgaaaggcagcgggtgcggaggcagcggtggcggcagatgggcgcggaggcggcggcggcggccggtgggcgtggtggagacaggcgatagccgaggggtggaggtaggcgacgggcatggaggggcggaagggagcatggataccacggcgacgttatcttctagatctggaatagggttgatctgcaccggcaagatcaacaacccacggagagttatcacaactcaccgaaagatcgggccaacatcagccttgagtgttgagaggaactcagggttcatcaggtggtatcagagctttcgttgctcgctgtaccgcaagtgtttgccaaggcatcgatacatccaaccttcattggggtgcttggttgagtcggtgtatgtcaccattccacttgcattggtaagatcttggatacgcaagataattggggatagctgcgctcaacatcgatatcttcgtcgagacatgaggagggatcaacatgaccattatgaggaagtgcataatcatgaaaaggaggagagagacatgaaagagccgccagtcccattgatcacactcaaagtcgaggcacctccattatctgaagagggcatcaaaggtaaacttaatggtgctgaaattaataaagcagagcaaccattagtggaaccaactgctgagattcctttgtcacaaattgatttgtttgctgttccttgtgataaagaagagttatgcgataatgcttcacttatatccatgccacaacttgtgaatgaacatgctattcctactgttaattcatactgcactgattttaagcatgttgttcacattgctaatgaagtagaggagcgtgaattgagatcttctttaaatactttgggctatgttcagtttgatgatttttgtgagctcgataatttcaaggagaaattatttgctaagtctgatttgccatatccaaccaatgttatatttcacatctttggtgaatataatgatcttggaatatattttgtgcatagagtttacatctgctcggatttagaacctcctgtacatgtggataaaatatgcaagctagagaaaaatgttattgctaaccaaattgtctcgagtttgccttgttttgattggaagaaacaggttgttgtaaatggactacgcaaagagcaccatatggaaaaaccgaggacggttttccgtgaagaaggggaggatgatgtgaccatggctaccacggatgcaaccattgctcacatcatggatgaacaagaagatatcgagatcaagtactccaagtgctggaatccgattcggccacctactacactgctgacttcaaacggccaccgaatctgcatacgacctccgttttcggcccgtgagtacttgatggaaagctctcggagccctctttctaacggatccagcctcttctctgaattctatctcgtgtggccagaatcacaggaacaaggtgttgcatcacctataatgggcctatgggcttgtaacttcaattgggaccccggcccaggaatagggttgatctgcaccggcaagatcaacaacccacggagaggtgtatcgatcgctaaggcgcaacacaacgtctcgtacggttgtagtcggatcgtcaacgtttctcccaaatcgtag

SEQ ID NO: 93457 - DNA, 362 bp, Oryza sativa
  Clone ID: PAT_MRT4530_9183C.1
gctcaaaatggataatagaatcttcattctccacacacctgcactgctcactaattacaagcccaaacctgattggcttaaatcaggctcatggcctatggctttccacaaacataaacagtgaaactgcctataactgataagtgtactgaaattcctgatgcaaattaaacgatacacataccggaaaactgtaattttggcatcaatgcgactgtcaaacacagagggacaagtgtgccattggaataggcaaaacaacattctgcattgcgaacaacataccataactatatcaatctttagagcgttgctgacaccctctaggtccaaagcgaccatcgcccctcaaaactcttttt

SEQ ID NO: 93458 - DNA, 639 bp, Oryza sativa
  unsure (1)..(639): unsure at all n locations
  Clone ID: PAT_MRT4530_91840C.1
cggacgcgtgggcggacgcgtgggctcccagcgacggcggcatgccttctccacttcttttctcaccactcccagcaatggcggcgcaccttctccctctccgcgccttcttcactcctcacgacggctgcacgctttctctccccgcgacggcggcgcatcttctccattccccagctcgtcactcctcagcgacggcggctcgccttctctactccccgactcgtctctcccctgcggtgaaaccaacggctcaccactccccggcgacatgatggtgcggcctccacagatctggagccgcctcttccttgtctccatcacaacaccaggcacgcgtcatccccgacaccgatgccaaaggtcagtttcccccctcatcttctcccttcccccatcctctatacctctaatgtcgtcggaagcggttgtctgcagggtagcgagtggccagaattctccacggtgagcaacggccacaagtggtcttgaatttccaaatccgtgtgataaattttgtaatattgattatgtgatgtgtgatcgattatttaatgtgtatattatgtgatttgttttgttggaaaaaaaaaaaaaaaaaaaattgttcgggggtgcnnnnnnnnnnnnnnnnnnnnn

SEQ ID NO: 93459 - DNA, 1753 bp, Oryza sativa
  Clone ID: PAT_MRT4530_91841C.1
ttgctactaaccatgacaggattgcgcaagggaataacagatcatcgacttgttcatcttcgacaacaaatggcaggtgatccacatggcgcatataaggtacatgataatgatcttgcaagggtagaatctaatttgccagtttttgatggtaagtatgattctgccgcttacgttaattgggagctagcagtagacaaacaatttgatgagtatgatttttctaatgctcaaatgattaaggctgctagtaataagtgtaccggttctgcatcttttttgtggcatactgtgggaaataagcttgacacttgggatgaatacaaaatactgatgagaaaaagatttgtattttcatactatagacgtgctctctttgaaaaatttgaacatctaaaacaaggtgacaaaactgttagggagtactttcatgattttaaaatttgtatcacttatagtggtttacaagaatctaatgagaacacaatgactagatttttcagagggcttaattccaatattcaggctgggcttgttaatgtgacatataatcatataggccaattgttcatgcttgcttgcaatgttgagcgcaaaattttggaaaacccaatggagcaacaagctatgcttgtgcctcctatcactgatattttgcaggaagttcagaacagtccccaaaatgagaagaacgatatgtttgagatgtcacttccatcactcgcgaatgaggagaaggctgatgcacctacattatctgaagagggcataaaaggtaaattaaatggtgcagaaattactcaagaagagcaaccattagtggaaccaattgctgagatgcctttgtcacaagttgatttacttgctgttccttgtgatagagtagaggtgtgtgataatgcttcacttatatccatgccacaactagtgaatgaacatgctatttctagtatttctttgtgtgctgattttaagcatgttgttcacattgctaatgaagtaaaggaacgtgaattgctatcttctttaaatactttgggctatgttcagtttgatgatttttgtgagctcgataatttggaggagaaattatttgctaagactgatttgccatgtccaactaatgctatttttcatatcattggcgaatatgatgatagaggaatatgtttggtgcatagagtttatatatgttccgatttagaacctcctgtacatgtggataaaactggcaagctagagagggatgtaatttctaatcatattacttccagtttgtcttgttttgattggatgaaataggttgttttaaatcgaccacgcgatgagcaccatatggaaaaaccgaggacggttttccgtgaagaaagggaggatgatgtgaccatggctactacggatacaaccattgttcacatcatggatgaacaagaagatatcaaggtcaagtcctccaagtgctggaatccgattcggccacctactacactgctgacttcaaacggccgccaaatctccattcgagctccgttttcggcccatgagtacttgatggaaagctctcggagtcctctttccaacggatccagcctcattgtgatattccatctcagttatctgcaattgaagaaacaaggaatagggttgatctgcaccggcaagatcaacaacccacggagaggtgtattgatcgctaaggcgcaacacaacgtctcttgcaactttgtgtccaaaaactgcaattcaacatctc

SEQ ID NO: 93460 - DNA, 287 bp, Oryza sativa
  Clone ID: PAT_MRT4530_91842C.1
gagcaattccagactgaaggacaagggccaccatttacatgaacatcacctgctgtttggccaaaaaaaaacattctctggaaatgcaccgcgccacagctaacagttgcttgtccaccaattctcctagaatctctctatgcaggcattcacatctgtaagaactctaaaggcgcatgatccacgaccgattaggccctcaatggtgaagactacatgaatcaaagacccagcatacgggtcgctcccatagataagcagcagacgctatcgaaatctgtacaatc

SEQ ID NO: 93461 - DNA, 8134 bp, Oryza sativa
  Clone ID: PAT_MRT4530_91843C.1
ttaaaagatcttggagacttgcactactttcttgactcgtccagatatttctttctgccagatcctcacacctctgacgggataccggtgaggcatctggccgcggcccgtcacaggtatcccctcacctgtgacgggccgaaaggaaaacccatcagagaagccgtcagaggtgatgggccgccacctgtgacggctttcatttctggcccgtcacagatgatcgaagacaaggatgaagtgcatgctcatttgataatgaatggattcatgaagaaatatacctgctggaccaagcatggagagcaagaggcgcctgatgtcgcagctgaagaagtgttggatcaggatgtagagaacaccgcagcagctcgagaaggcatgttcgtaccttctcctttaggtggagagaccatagatttggacactcaatgtctatctacaatgttgcatgacattgaagacgcagaggacaacgacagagattatgagaagtttagtaagttggtggaagattgccagatgccgttgtatgatggatgcaagtcgaagcacagcaagttgtcatgcgtgttggaactcatgaagcttaaggctagtaatggctggtcggacaagagttttacagaactccttgagctgttaaaggatctgttgccagaggggaacaatttacctcagacgacatatgaagcgaagcaagtattatgtccgttgggcctggaggtcagaagaattcatgcatgtccgaacgactgcattttgtattacaaggaatacgctgacttggatgtctgccctatctgtggggcatcaagatacaaacgagcaaagagtgaaggtgaaggaagtactacaaaggatggtctcaacgcccgacgagatctggaagatatgggtgttcggtcggagctacatcccataaccacggaatccggcagggtgcgacacacgatccagcggttctgttccttcttccatgcaatcggccagaagatcattgatcccgagggactagatgaactacaggcagaacttgtgagaaccctatgtcatcttgagatgtactttcctccaactttctttgacataatggaacatcttccggtgcaccttgtgaggcaaacaaagtgctgtggtccagcattcatgacgcagatgtatccttgcgaaaggtacctggggatccttaagggttatgtacggaaccgttcacaccccgaggggagtatcatcgagagttacaccaccgaagaggccatcgaattttgtgtggactacatgtcagaaacatcttcaattggattaccacgatctcatcacgaagggaggcttgacggtgttggtactgttggaagaaagactattaggttggatcggaaggtgtacgataaagctcatttcacggtactacagcatatgactgaggtggtgccgtacgttgacgaacaccttgcagttatccgacaagagaacccaggccgatcagagagttgggtcaggaataagcacatgtcttctttcaacgagtggctgaagaaccgaattgccaggttgcagaacttgcctagtgaaacacttccgtggttgtcacagggtcctgaatggagtgccaccacctggcaaggatatgacataaatggatacacctttcacacggtcaagcaagacagcaaatgcacagtgcagaacagtgggttacgcatcgaggctgctagtgacggtggtcgtcgtgatcaatactatggtagagttgagcaaatattggagctagattacttgaagttcaaagtcccgttgtttcgttgtcgatgggtcgatcttcgcaatgtaaaagttgacaatgaaggtttcaccactgtcaacttggctaacaacgcgtacaaggatgagccgttcgttctcgccaaacaagttgttcaagtgttctacatagttgacccgtgtaacaagaaactacatgttgttcgtgaagggaaaaggagaattgttggattggacaatattgcagacgaggatgattacaaccagcacgtccacggcataggtcaagaaatacctctagaagaggaggaggaagaagatgaagttcaatatgcacggccgtcacaggtgacctcacctgtgacggcccagagtgttgggcccgtcacaggtggtcttacctgtgacggctccacgatccggcgcccactctcactcactcactctctcgaccgccgcctcgcctctctcgacctctctgccgccctctacgcgccctcctctccaccgccgccctcgccgccgccaaatccgccgccctctccgccctctccgccaccctctacgccctcctctccaccgcctcgacctcgacctctccgccaccatctctgccgccgccctctacgccgccctccccaccgccgcctcgacctctctgccgccctctccaccgccgccgcctcactcactctctcgaccgccgccgtccatctccatcgacctctccgccgccatctccgccgccctctctaccgccatctccgccctctacgccgccctccccaccgcctcgacctcgacctctccgccaccatctctgccgccgccctctacgccgccctccccaccgccgcctcgacctctctgccgccctctccaccgccgccgcctcactcactctctcgaccgccgccgtccatctccatcgacctctccgccgccatctccgccgccctctctaccgccatctccgccctctacgccgccctccccacgcgccgcctcgacctctccaccgctgccgcctcactcactctctcgacggccgccgggacctcctctcagtcgccacgccaggaccgtcgtcgccgccaccgggatctcctctccgccgcctcctcctctcgaccgggacctccacgaattgccgcaggaacaacatacgtcgatgtcgggcgagacaagtgcaagcccacggcgcccaggactgtcattggaagatggtctaactgctgcgggatagcggcacgtgagaacttcgggatcctccataaagatatcgggaaggtcacagaagccgagaaagagcgagcttggacggcaatggagaaatggttcacatttccagccgaagcaaaggataggctcaagcggaaggcattccaaaagatgggcaaagcttggaagaattggaagtcgaagctcttcaccgagtatgtcaacccgcccggcaatcatacgccgttcgatgaataccctcaaataaccgaagcggtgtgggaggaattctgctctctcaagaccacccaagagtttagggaatccagcgaggcacatcgcgtactgcaacagcggaatgagcacccgcatcggctgggcaccgcagggtacatcggcaaggaggcaatatgggcccaagaagatgcagccgctgcagcagcgaatgtacctgccccgttttcagacatccctgaacaaagagctcgcaactgggcgcgggcaaggggtaaggtcaacccggacggctctgtcacatttgagaacaaaagtgatgccgtcgtctatcaggaactgttgggcttggttgctgaacaagcttcacaaagcgaggttgagtccgcgccgaagaggcgcgaagatgacatcctcacaaaggcgctcggaaccaaagaacatcctggccgaactcggggaattggtagcgatgtgccctggaagcatggactccctcagtacagctcccaatacaggaaacggaaagtctccaaggaagagagggacgctcgtttgaaggccgaacttaaggttgaggtcattcaagaactagaagctagcatgaatgcaagggtggaagaaagggttaacaaggtgctcgccgacatgaatataccccgagtcacaacacctgctgtgcaaccaactcctcgtgtacaacacgacgcgagtccgtcacagcataggagtagttgtgcatccacagaggtgccggcccctggtctcccgatcgcaccactagctgcagtggaccacatcgagggcgcagcacagtgtgtcctactagcgagagtccacccaactttcgctcctgaagtcgctgagggcatggctttcaagccctcggttacagacaaggtccacggcgcagacctgctagctgggtatgccaaggtgtccatcgatacagtaaaggacacctggtcaggctatccgctgcccgtgcccccaaatgatgaaatcatgactttgggcgatgcgcgcaagacattcatacaatggcccaaagaagacatagttgtgaagatgactcctcgtccaagtcgaccgacggagcttacacctcccaagtctaagctatcaattgaggctccccgtggaccggcattgtcagtacctcattctcccggtggagctgatatggacttggcagatatagctcaaagcttggctccaataaagaccacaagaaaggccgatagctccccaccacttgtcaagggccagaagcgtgaacgcggcaaggggaaggtcggggagttggcgccggagccaaaaaggggcaaggctgcgacgtcgatgccggtgagcaaatcggggaaggtcgtgagggcgccagcccaatttgagctaggcatgccattggtggaggacaatgtgttagctgtgatgggtattgcttgccgagagctacataagcaatacatggagctaagcaatgccaagcggaaaatgagggagtcatccatagttggacatcacgaccaccagccgttcctatcgtcgcctgcctatataactataggctttgatgacctcttcgaccttttcaggatccggaagttggacactggtcttctaaaatgctactccttgttgtgttggatcgagagtcgtcgccatggtaatcaggttgggttccttgatccatccatggtgaatgaggttaatttacgacagagcttcactgaggtggttgactatgtcaaccggtgtttatgggcccatcaagacaaggagtacatcatgtgcgcacacaaccaagagcgacattggattctcctagtcatcgtacctaagtggagtagggttacctaccttaactccaataagtccaaagattatgatttcagtgaaatcaccaaggccttaaatatggcttggggcccatatgtggaaaagggtggtaggcacaaggagggcaagaatgaactttatcatgacaccaagtttgcatgcgcacaacagatcggagaccaatgtggtttccacgtgtgccacaacatgtcaacacttctaagagaggttgtggaggttcacaacgaacagaatacaagaaattttggtaatcatttgaggactttcatggggtttagagatattaaaagccgatgttttagtttgagaataactgacaaagatttggccaacattgcatatgatggattgcttgattctattaaagagaaattaaatggccaaatatttcttgatgttgatcatgtgttgcatgaagctctggctcagaaaagccaagtggatgataatagtttaaatgctagtttagatgatagtgcaatatcatgtatagctgagccaagagatggttcggattgtggtaataatttgtgcaatgatgccgtgacaagtatagccgaatcaaatgttggtccggattgtcttactaacttggatgataatgttacaaccattatagccgaaccaagtgttggttcggattgtgttactaatttagacaatgatggaatagccgaaccaaataatggtttagattgtgttgctagcttagagaataacatcattgaaaatatagccgaactaagtgacggttcggattgtatcacaagcgaaagtgaaatagcattgtcacctaagatcgaatcacaaatcggtcatgtggatgttagaaaagatgatgacaatgtcttgcgggatagtggtgcaatagaatccaaagtagttatgcatacatatcaaaggccgtatcctgaatatgtagattcggtcccatacccgcaaggatttgaggtgcccaacttcacgaaattcacaggtgagaatgctaggactacaatggagcatatcggccactttattgatcaatgtggtaaggccggtagcgatgatttgcttaagttgaagttgtttcccctttctttattaaactttgcatctacatggtatagtttgcttgctcctagttcaatttctacatggtcacaaatggagcatgagtttcatgattatttcaaagatgcaagtttgatggagcaaagaccgattgatacttcatcggtcacttgtgaaactatttcggttacatctatgcctaaaaccggaattgttagtgatcctctccctattagttctattaatgttgacaaaaagaaagggaaaagtgttattattggggatcctcggcccaagaataggatcaataatgcaaaggccggagatcataaaattgccaaggatgagtcatctagttcccaaaagaccaaaaagccgaagctcacttttgagatgcttatggctaagtacaagaaaggattagccggtcagcgatttgataatcaaacttgtgattcaaaaagaccaagatcatctcgtagaaagagatttggtcaaacatcaaagcaatcggagccatcaaccataccaactccatataaacctccgattgtgatgccatggtatccatatccaatgtcactatatggttatccttttatgtattatatgccatggatgcctcaaccacctatgccgtgtcatcaaggatggaagcaatcacctaggacggtaccaagtcattctaactcaagacaagaccgtttcccacgaaagaatcggtccggtggatcaaaggtgaaaaaggtgaagaaggtgtgggtgagaaaagaagccaaagctccagaggtcgttgctatcaaagaggagtctcaagatgttcatgtacctactggagatgcggtggaaaccacgcaagcaaaggagatcgaagccgacgccgtgactatcaacattggtggtctaaccgagacagctggccggtctaaccgccaatctacggccggtctgaccgaccttactggccggtctgaccgacggcttgtggccggtctgaccgggctcagtggccggaggctacaacgtcttcgagtcataggtcaaaaagaagaagaggccgaagatgtggagaacaagacatgcaataatttggagcctcgaaaggcacctaggcaaatgtggagatccaaagaggggcggtctgactggaattacacggccggtctgaccagtgatgaccagtggtctgaccggctctgcatggccggtctgatcggcattccgtggccgatttatccttcgttatcaaaagggcattggctcgtgctagttgcaatgggttacttcactaagtgggccgaagccgtgccactcgacaatgttacttttgaggtaaatcttggctctcttcggtatttcaagcaagacgacatgtcggttgaagattacaagaccttgatgggaagcaattttgaagacgtcattgacaagcgtttgaagacttcgaaggagatgaagacacttcaagacggtgttttcagagagcaattaatgggagatagcttgaagaaatacttcccgagcatttggcaggggggcatgtgtttacacccaaatttggcacctatggacgaaatagggaaaaattgccaaagtttggaaagtgccgggtttccttcacagggccggtcagaccgcaggtatatgggcggtctgaccagctatagggccggtctgaccgcagaaattgaactaggagcaagcaaactataccatgtagatgcaaagttcgacaaagaaagggaaaacaacttcaacttaagcaatgcgcggtcgggccggcctgagagccggtctgaccgctgggataaaacccggtcggaccggccatctggccattcgggaaacctgtcagcccaccggattaatgaattcgcgcaaccccccggcggagagggcggttggcggggtgtttttaagctaagctggaaattttattacggtgagcgtgtcatccaactggcttgtgcggcaaacactctaacagctctcgggcccttcg

SEQ ID NO: 93462 - DNA, 960 bp, Oryza sativa
  Clone ID: PAT_MRT4530_91844C.1
atggcaggattgcgtaagggaatacgagaacatcgacttctacaccttcgacgagatatgacgacttctccaaatgatacatatgaggtacatgactataattttgaacaagttgcatctaagttacccttctatgatgggaagtatgattctgttgcatacattgattgggagctagcagtagacaatgaatttgatatatatgatttttctgatgctcaaatgattaaggctgctagtaataaatttacctcttctgcattattttggtggacttatgttagtaataaacctgaaacttgggatgaattgaaaaccatgatgagaaaacgctttgtgacatcttattacaaatgtactcttcgggagaaattagaacatctgaaacaaggtgacagaactgttagggagtacattcatgaatttaaggtctgtatcatctacagtggtctcaaagagtgcaatgaaaatacaacgcgtagatttttcaatgggcttaattctgaaattcaggttttgcttgataatgtgacatataatcatattgggcacctattcatgcttgctcgtagcattgagagtcagatcatatcaaaggcgaggatgcatgaccaatgtgatttatctcctatttctgaatccccaatatacttatgtaatgatgatgtgcaaacattggaggagcaatcttttgtctcccctgttactaacgttttgcaggaagatcagcacatccaagaaaaggagaatggtatacttgagaagaaagaggatgaagcacctgcgatgtctgaaaaaagttcgcaaggtaaattaaatggtgctgagagaaatgaaggaatagggttgatctgcaccggcaagatcaacaacccacggagaggtgtatcgatcgctaaggcgcaacacaacgtctcatacggttgtagtcggatcgtcaacgtttctcccaaatcgtag

SEQ ID NO: 93463 - DNA, 1452 bp, Oryza sativa
  Clone ID: PAT_MRT4530_91845C.1
gacctgtcagaccttgtcaggcccccgggatctttactcccggttggtaaaggaaaattttcacaaatcatgttttcggaaaatttgtccttaaggtttgaccatttggcttatcctacagtcgagatggctctgataccaacttgtcacgcccggaaattcacaagtaatttccaaacttatttgtgcataaaatcctcgtccaggaatcagccgaggtacacaaactgacaatttaatatacagattcatcataataataacgttacacacttacaaaagaaaagaaaacagcagcggaataacgatctagcgatggcttcagctccactcccacaggcagctcaactggggtataagccaaacgtcttctccttctggatcctttttcttcaactgaggttgattgattattgcaagaatgagcatatgacatactcaacaagccacacagcaaatatgcaagtgcacaaggataccaaaggatggcataatataggctcatttgcaaaagcagcatttagcaaagatttaagagtagtaaaacagtagagtaattaatcagaaattttaatcaacaccgaacaacacacccatgcagcacaggcccaaccatcctgaacaaccatacccggctgtacagatctaactccaaaccaggaatataccattccaaaccaggagctaagcaaattattaccagatataacatccataattattgtgagaggtgtgagactaatcacgaaaaacattgctcaacccgcccataaccgcgggcacggctattcgaatagttttactctggccagaggtgtaccactgtacccacaagacacgattccacacatgttgccatgccccgaagtaccaccacggcactgcaaagggggaaatcgtgacaatacccttcgcacaacacaactcaccacagtgcaccattcctggatcataatcaccccctcaaaaaccagaggcatggactccccagcgacccccacggacttctcgccgcttctcagtctggcaccccgtaatgaaccatgctatacaaaagataaagccgacgacctcgccggcgatagagaggtcggcagggctatctaaaggcatctacacgtagaggacgacgacgcgaactcaccggtactagcaaacgcgatggacgacgacgaatggtggccggcggcgagctctagcggcggcacggctcgggtcgtcggcggcggcggctctccggtgaccggcaacggcggcgagggggcggccgaggttccccgcctccgtgcgcacctaacggcggcgacgggaagcggcggcgactgctaacgcgacggcgcggcgcggctggacgtcggccggcggcggcggcggcggcggcttggacggcgtggcggcggcgctacgggggacgagaaggctcgggagttggggcaaacgaaagaggacgcc

SEQ ID NO: 93464 - DNA, 2106 bp, Oryza sativa
  Clone ID: PAT_MRT4530_91846C.1
atggtgggcatggattggcatatcttacttgtctgcaagcaccacatcaagctatggagacatggagtaaacaacggaaagacatgcacagaggacgccgctggtgcaggcgcaatggctgtgaggatctcacctggtgccaatgcagtttctagtgctgctactacggatacaaacattgctcacatgatggatgaacaagaagacatcaaggtcaaggcctccaagtgctggaatccgattcggccacctgctgcactgctgagttcaaatggccgccaaatctccatacgagctccgttttcggcccgtgagtacttgatggaaagctctcggtgccctctttccaacggatccagcctcattctgaaattccatcttattgagccgcaattgaagcaacaaggtgctgcgtcacctgtcatgggcctttgtgcttgtaacttcgtttgggaccccggccccaagtggggcccatgtggggtgcgccccaagctggtggagcacgaccctaggaccctcttggtcgttctcccacatcctaaaatagctaggaataaggttgatctgcaccagcaagatcaacaacccacggagaggtgtatcgatcgcaaaggcgcaacacaacgtcttttatcatcaactcaccgaaagatcgggccaacaacagccttgagtgccgagtggaactcagggttcatcaggtggtatcagagctttcgttgctcgtgtctagttcgtgtagagtttcgagttctggtcacgttttgtgccactgtcgtcgccgccgccgtgtggatacgcaagataattggggataacggtgctcaacatcgacatcttcgtcgagacatgaggagtgatcaacataccattatgagttatagctcttttgctcatttgttacagcttgcttgccatgcggaaaaacaaattgaggatgtgaacaagaaacaagttgtggacgtacctcctattactaatattttgcaggaagtgaacaactgcaacaaggaggagagagacatgaaagagccgtcagtcccattgttcacattcaaagtcgaggcacctccatcatctgaagagggcatcaaaggtaaacttaatggtgctgaaattaatcaaggtgagtgtgttgttaatgaattgaatttgtccacttttcatgctatactagagcaaccattagtggaaccaactgctgagattccattgtcacaagttgatttgtttgctgttccttgtgataaagaagagttgtgtgataatgcttcacttatatcaatgccacaactagtgaatgaacatgctatttctagtgtttcattgtgtgctgattttaagcatgttgttcacattgctaatgatattgaggaacgtaaattgataacttctttcaatactttgggctatgttcagtttgatgatttttgtgagctcaataatttggaggagaaattatttgctaagtctgatttgccatgtccaactaatgctattttttatatctttggcgaatataatgatagaggaatatatttggtgcatagagttttcatttgttcggatttggagaaacatattattgctaatcacactacttcgagtttctctagttttgattggatgaaacaggttattttgaatggactatgtgaagagcaccatatgaaaaaaccgaggacggttttccgtgaagaaggggaggatgatgtgaccatagctactacggatacaaacattgctcacatcatggatgaacaagaagacatcaagatcaaggcctccaaatgctggaatccgattcggccacctgctgcactgctgagttcaaacggccaccaaatctccatacgagctccgttttcggcccgtgagtacttgatggaaagctctcggagtccttccaacggatccagcctcatttcgaaattccatcttattgagccgcaattgaagcaacaaggtgctgcgtcacctgtcatgggcctttgtgcttgtaactttgtttgggaccccggccccaagtggggcccatgtggggtgcgccccaagctggtggagcacgaccctaggaccctcttggtcgttctcccacattct

SEQ ID NO: 93465 - DNA, 177 bp, Oryza sativa
  Clone ID: PAT_MRT4530_91847C.1
atggcgacggcgggacaagtttcggaacctcctaacgaacataaggaaagggcgcacgacggggatggggctccggcggcgaatctctacggaggaggggtggacggggtggatctcggccacgcgaacccgacggcggcgacggcgcggtgcggcggtgagcctagcggcggctag

SEQ ID NO: 93466 - DNA, 3742 bp, Oryza sativa
  Clone ID: PAT_MRT4530_91848C.1
attgaaaaaggtttttaaaagtctcttttggctttgggccgaaagtcggcccaaaaccttctctctctccctcggcccaagtcggcccagtccgcagtcgcagccgcccgcgcgagcgccctcggtcgctgacaggtgggtcccaccgctcctttcccgatccggtgaaatcgattgaggggaaacaatcttcgggatctcctctaccttttctcttttggaatcaccggctaaaatcgtttggaaattcgtggattcgaggtcgaatcggatcggtctctttcctccaaaccccgatctttccttcgtgtcaccggtcgccgtgggccttcgtcaccgcctccttgcccccgtcgccacccttgccttcgtctctagccatcggaagcgccctagtgccgtgtgacctcgagccgccgtcgtcgccgccgctccagccgtgcttcgccgtcgctccagtcgtcgccgtcgctcggggaggtcgccatcatggtcgccaagtcgtcgccgtccccgtccaccgcttcaccgccgccgaagaccgccggagcaccgtcgtcaccgtcgacccgaagaccgtcgccgcttcttcctcgtcgccggcgccgtccgttgcttttccgccgttgttttggtcaccggtgagttcgccgcgtcgccctctacccgttggtgccctccgtttgcgtcgtcgtgccgtcgttcgccggcgagcatgcgttgccgagccgccgccggtgctgacgtcatcgctgacgtagtcgctgacgtcatcgtcgccgttccccgtggctcggtcgtggaccgtttgatctcggccgtccgttttggataggatcgacctcggccgtctgttcccgtgaaccgcttttgtatagcatggttcattgcggagcaccagactgagaagtggcggagataagcccacgggggtcgctggggagtccatgcctctggtttttgaggggatggtgaacactcgcgccaatggaaagtggaacaataacaatgaagggaacccaactcttgctcaagttctggctcaacagactcagttaatgaacatgatgatacagcagatgcagaaccagctcacccaagggaacaccaatgctccaccgccgcagaacaagttagctgattttcttcgtgtgaggccacctaccttttctagcactaccaacccagtggaagcaggtgattggctatacgctgttgagaagaagttggaattgctccagtgcacggatcaggagaaagttgttttcgcttcacatcagttgcaaggacctgcatcagaatggtgggatcattttcggatgaacagagcagaaggacaaccaatcacttgggtggagttcacggaagcattcaagaagacacacatacctgtaggagttgtttctttgaagaagcgtgagttcaggacattgaagcaaaaggatcataccgtggcagagtatcttcatgagttcaatcgtctggcacgttatgctctagaagatgtgcgtactgacgaggaaaggcaggagaagttcctagaaggcctgaaggatgaactgtcagttacattgatctcccatgactatgttgattttcagcagctggttgacaaagcaattcgacttgaagacaagaagaacaggatggataaccgtaaacggagaatgactgtattccaggaggcacaagtcgcaacaattgaacatcgctggatcagtctcaagagaataacagtagtggaagggagcagcaggtatgtttcaactgttacaagccaggccactttgcaagagagtgtccgaagccgaagcgtcagcagccgcaaggtcagcttcgcgccgccgtcgccgccgtcgctccagccgtgcgccgccgccgttccggtcgtcgttgtcgctcgggaaggccaccgtcgggatcgccaagtcgtcgccgtcctcgtccgccgcttcgccatcgccgaagatcgccggagcaccatcgccgccgtcgacccgatctccgccgccgtttcaacctcgtcgccgtcgccgtccgttgctcctccgccgctcctttggtcaccgcgccgccgttcgccagcgagcgtgcgccgtccgagccgccgagccgccgccgccggtggtgacgtcatcgccgacgtcatcgtcgccctctcccgtgagccgagcaccagactgagaagtggcggagataagcccacgggggtcgctagggagtccatgcctctggtttttgaggggggtgattatgatccaggaatgactgagccacaaactaagccttacccactagacatgtggaagtacggtagtgctttttgcaacagaggcccgaagaccggtccttatatggccgagccgaggggaggggcgcgcggaccgggtccacgggagtggggcccacgcggcagcctcacggtccacggtggaccgggtgcacccgggctcgcaccggccagcgccgtggaccccacacgtcagccgcacccgatggcgcgggcggctgacggccgggccccacgcggcagccactcggcgcgcccgggggcggccatgccggcacagccgacgggaggtggcgcactcgcgccccgatggtcgccggcagcggccataggcacggcgtagaggcggccgagagaggggaagggaagggggaaaagaggcggcggtccacggctcaccctaggtcgacggcgacgacgaaaaaggcggccggagcagaggaaggcggcggcgcggcttgggtcgacggggacggcggcgctccggcggttggcgagctcgacgagggggtgaacgggacggcgacggtgcggcgaagccgaaggaggcgacgccggggcgggaaacggtccggggcgacgacggcggcggaccggagctcggcggcgatttcttgcacgcggggacggcgggatgtggcggatttggcggcggcggcggcgcttggcgcgggcggagcggcgggagcggcgggaggtcggggatgacgggtgggccccacccgtcagcgagggtggcgggcgggcccgcccgtcagcggcgcgcgcatggggagggaggccgaccgacgctgggggcggtgggttgtcggcgatcgtatgtcctccgtggatatctatcggatgacaagaatgaaaaggatgatgatgatgacgatgggtcactcggctccggtgtccgattccgaggacgacgttcgggttctcaagagttctgtcgtcgtccaccattgttgtcctggcgctgatccccattatcatcgtcgtcatgtcggcgtcctcgaccagtatcgtccggcgtccgctgttcgcgatcatcgcggtcgtgggggttgtgacgattatcatggtgtcggtcttcgttcgagcggcctcctcgttcttcgttctcgcgacgtcgtgaagagacacgatgtcgggagcgattctcgttgtctcgcgcgcgtccttctcaggctcgtatgacgtcgacgtttcgttctccgctacggcgggaggatccttcgacatggagttgcccggggttatagccacggcgttctcatttccggtcattgatggaccagccgagataggtaccgtggtgtaaaccgggaagacgatttcgtcgacttgagtccacactagcattgttgaagtagggactccttggatggggccggtgttgacgccgtagaccggatatagagggtattgggatacgctggtatgaggatctacgtagtacgacat

SEQ ID NO: 93467 - DNA, 1602 bp, Oryza sativa
  Clone ID: PAT_MRT4530_91849C.1
atggctactacggatacaaccattgctcacatcatggatgaacaaggatatatcaggatcaattcctccgagtgctggaatccgattcggccacctgctacactgctgacttcaaatggccgccgaatctgcatacgacctccgttttcggcccaatcacataaacaagatgctacgtcacctgtcttgggcctatgggcttgtaacttttgtttgggaccccggcccaaatggggcccatgtgggcaccggtaagatcaacaactcacagagaggtgtatcgatcgctaaggcgcaacgcaacgtgttgtacggttgtagtcggatcgtcaacgtttctcccaaatctcgtcgccacccccgtgtctcagttgtcgtcgagacctacgaaaacagaatcagctcgctgccacggttctattttcgtactttgaagaagtttctatcggttagttcaagcgtttggccaaggcatcgatacatccaacctccattggggtgcttgattgagtcagtgtatgtcaccattccgcttgctttgaacatatcaaatgcgaggaagcatgaacaatgtgatttatctcttgcttctgaatctcttatatccttaaagcatgaagaacctgcgatctctgaagatagtttgtaaggtaaattaaatggtgctaagttaaatgaagtagagcaaccattaggggaaccaactgctgagattcctttgtcacaagttgatttacttgctgttccttgtgataaagaagagttgtgtgataatgcttcacttatatctatgccacaactggtgaatgaacatgctatttctagtgtttctttgtgtgctgattttaagcatgttgttcacattgctaatgaagtagaggaacatgaattgctatcttctttaaatactttgggctatgtttagttcgatgatttttgtgagctcgataatttggaggagaaattatttgctaagtctggtttgccatgtccaactaatgctatttttcatatctttggcgaatatgatgatagaggaatatgtttggtgcgtagagtttatatatgttcggatttagaacctcctgtacatgtggataaaacctgcaagctagagaggcatgttatttctaatcatattacttctagtttgtcttgttatgaaacaagttgttttaaatcgaccatgtgatgagcaccatatggaaaagccgaggacggtttttttgtgaagaaggggaggatgatgtgacaatggctactacggatacaaccattgctgacatcatgcatgaacaaggagatatcgagatcaagttctccaagtgctagaatccgattcagccacctgctacactgctgacttcaaacagccgccgaatctgtatacgacctccgttttcggctcaatcacataaaaaaggtgttgcgtcacatgtcttgggcctatgggcttgtaactttgtttgggaccccggcccaagaatagggttgatttgtaccgacaagatcaacaacccacggagaggtgtatcgatcgctaaggcacaacgcaatgtcttgtacggttgtagtcggatcgtcaacgtttctcccaaatcg

SEQ ID NO: 93468 - DNA, 618 bp, Oryza sativa
  Clone ID: PAT_MRT4530_9184C.1
cccacgcgtccgctcataaaatccacaagctttctctctctctatctctctctctatctctctcctccggcggcggcgggggggccttcccatcaccaccatcttctccggccgtacaccatctctgctaaccgcagcatccgcacccacagcttctccgacgccggctacggccgtatccacccccgagaatacgaatacggaacattgtgaatcatcaacggaggcgtcaagccgcacacccctccgggtatcagcagcagctgaagcacgcctgtggactgtaagccttctagccaccacctcacgtccatccaccactgcgccagcagcactcgcatcaccatcccaaccgcataatccgacctgagtgcagggacgctctgcttgatctcgcccacagacatactccctggcttcctgccaatgttccgttccggcagctgctcctatatccgtaccaaatcgtacatggaggactagcatgtgtgcgtccattacctcatcaagcacctggcagtgcgtacacctgtcatccctgcaccggttgccttctacggcgtgaatgatggtcatggtggttccgacgccgcttgatatgttccgaaaacttactga

SEQ ID NO: 93469 - DNA, 2725 bp, Oryza sativa
  Clone ID: PAT_MRT4530_91850C.1
ttattcgccattagcaacaacctcagggtcgaaatctttcacctctcttagaagtgttgacatgttgtggcacacgtggaaaccacattggtctccgatctgttgtgcgcatgcaaacttggtgtcatgataaagttcattcttgccctccttgtgcttaccacccttttccacatatgggccccaagccatatttaaggccttggtgatttcacggttgacatagtcaaccacctcagtgaagctttgtcgtaaattaacctcattcaccatggatggatcaaggaacccaaccccctcaaaaaccagaggcatggactccccagtgacccccgtggacttctcgccacttctcagtctcatcaatggccggaccaagatggcgacctcgccggagattggatggtcggctgcgactttggaggacatgaacacgtagaggacgacgagacgaacccaacggtactcaccctcgaaccaaacgacgaacgacgacggccggcgacgaggtctaacggcggcgcggcttcggtcgacggcgacgacgggactccggtgaccggcgacagcggggagagagcggccgggcttctccacacctcggcgcaccttacggcggtgacggcgaccggcggcgacgacggaggcggcggcgcgacgcggatggagctcggccggcgacgacggcggggtggagcacgtggcggcggcgaaggagtagcattttagaagaccagtgtccaacttctggatcctgaaaaggtcgaagaggtcatcaaagcctatagttatataggcaggcgacgataggaacggctggtggtcgtgatgtccaactatggatgactccctcattttccgcttggcattgcttagctccatgtattgcttatgtagctctcggcaagcaatacccatcacagctaacacattgtcctccaccaatggcatgcctagctcaaattgggctggcgcactcacgaaccttccccgatttgctcaccggcatcgacgtcgcagccttgcccctttttggctccggcgccaactcctcgaccttccccttgccgcgttcacgcttctggcccttgacaagtggtggggagctatcggcctttcttgtggtctttattggagccaagctttgagctatatctgccaagtccatatcagctccaccgggagaatgaggtactgacaatgccggtccacggggagcctcaattgatagcttacccttgggaggtgtaagctccgtcggtcgacttggacgaggagtcatcttcacaactatgtcttctttgggccattgtatgaacgtcttgcgcgcatcgcccaaagtcatgatttcatcatttgggggcacgggcagcggatagcctgaccaggtgtcctttactgtatcgatggacaccttggcatacccagctagcaggtctgcgccgtggaccttgtctgtaaccgagggcttgaaagccatgccctcagcgatcgcgtcgtgttgtacacgaggagttggttgcacagcaggtgttgtgactcggggtatattcatgtcggcgagcaccttgttaaccctttcttccacccttgcattcatgctagcttctagttcttgaatgacctcaaccttaagttcggccttcaaacgagcgtccctctcttccttggagactttccgtttcctgtattgggagctgtactgagggagtccatgcttccagggcacatcgctaccaattccccgagttcggccaggatgttctttggttccgagggcctttgtgaggatgtcatcttcacgcctcttcggcgcggactcaacctcgctttgtgaagcttgttcagcaaccaagcccaacagttcctgatagacgacggcatcacttttgttctcaaatgtgacagagccgtccgggttgaccttaccccttgcccgcgcccagttgcgagctctttgttcagggatgtctgaaaacggggcagggacattcgctgctgcagcggctgcatcttcttgggcccatattgcctccttgccgatgtaccttgcggagcccaaccgatgcgggtgctcattctgctgttgcagtacgcgatgtgcctcgctggattccctaaactcttgggtggtcttgagagagcagaattcctcccacaccgcttcggttatttgagggtattcatcgaacggcgtatgattgccgggcgggttgacatactcggtgaagagcttcgacttccaattcttccaagctttgcccatcttttggaatgccttccgcttgagcttatcctttgcttcggctggaaatgtgaaccatttctccattgccgtccaagctcgctctttctcggcttctgtgaccttcccgatatctttatggaggatcccgaagttctcacgtgccgctagcccgcagcagttacaccatcttccaatgacagtcctgggcgccgtgggcctaccactagcgtcaacctctcttataacttgcactgtggtcggccatatattttgtgaccgcggatttctactagacctacttgcacttgtccctcccgacatcgacgtatgttgttcctgctgcaattcatgaatttcgggttgttggtttgccgttgtcgcgggatgaccttcggcaactgcctctgtggctgggtttgcttcttcctggatcctcgcaggtgttggggagggcgggtttgcgccgggcgttgacat

SEQ ID NO: 93470 - DNA, 1404 bp, Oryza sativa
  Clone ID: PAT_MRT4530_91851C.1
atgactactaccgatacaaccattactcacatcatggatgaacaagcagatatgaagatcaagtcctccaagtgctggaatctgattcggccacctgctgcattgctgacttcaaacggccgccgaatctgcatacgacctccgtttttggcccgaacaaggttgatctgcaccgacaagatcaacaacccacaaagaggattgagcaagggaatacgagaacattggcttcttcaccgtctacaagatatgacaacgtctccatgtgatgcatatgaggatggtaagtatgattctgttgcatatattgattgggaactagcagtagataatgaatttgacaaatatgatttttctgaagctcaaatgattaaggctgctagtaataagtttacctcttttgcattattttggtggagttatgttagtaatcaacctgaaacttgggatgaattcaaaaccatgatgagaaaacgctttgtgacatcttattacaaatgtactcttcgggagaaattagaacatctgaaacaaggtgatagaactgttagagagtacattcatgaatttaagggagttcagaacattcaacaaaaggaggagaatggtgtacttgagaagaaaggggatgaagcacctgcggtttcagaagaaagtttgcaagaagagttgtgtgataatgcttcacttatatccatgccacaactagtgaatgaacatgctatttctagtgtttatttgtgtgctgattttaagcatgttgttcacattgcaaatgaagtagaggaacatgaattgctatcttcattaaatactttgggctatgtttggtttgatgatttttgtgagctcgaaaatttgaaggagaaattatttgctaaatctgatttgccatgtccaactaatgctatttctcatatctttggcgaatataatgatagaggaatatatttggggcatagagtttacatatgttcgtatttagaaccttctgtacatgtggataaaacaagcaaactagagagaaatgttactgctaacaaaattatctcgagtttggcttgttttgattggaagaaacaggttgttttaaatggactacgtgaaaagcaccatatggaaaaaccggggacggttttccataaagatggggaggatgatgtgaccatggctactacggatacaaccattactcacatcatggatgaacaagcagatatgaagatcaagtcctccaagtgctggaattcgattcggccacctactacattgctgacttcaaacggccgccgaatctgcatgagacctccgttttcagcccgaataaggttgatctgcaccggcaagatcaataacccatggagaggtgtatcgatcgctaaggcacaacacaacaacgtctag

SEQ ID NO: 93471 - DNA, 1806 bp, Oryza sativa
  Clone ID: PAT_MRT4530_91852C.1
atggcaggattgcgcaaggggaaacaagatggtcatgctcaacgtcaacatctacaccttcgacgagatatgacgacttcttcacgtgatgcatatgaggtacatgactataattttgcacaagttgcatgtaagttaccagtctatgatggaaagtatgattccgctgcatacattaattgggagctagcagtagaaaaacaatttgatgagtatgatttttctaatgctcaaatgattaaggctgctagtaataagtgtaccggttctgcatctttttggtggcatactgtggggaataagcttgaaacttgggatgaatgcaaaatactgatgagaaaaagatttgtgttttcatactatagacgtgctctccttgagaaatgggaacatctaaaacaaggtgacaaaactgttagggagtacttttatgattttaaaatttgtatcacttatagtggtttacaagaatctaatgagaacacaatgactagatttttcagagggcttaatttcaatattcaggctgggcttgttaatgtgacatataatcatataggccaattgttcatgcttgcttgcattgttgagcgcaaaattttggagaatccaatggagcaacaagatatgcttgtgcctcctatcactaatgttttgcaggaagttcagaaaagtctccaaaatgagaagaacgatatgtttgagatgtcacttccatcactcgcgaatgaggagaaggctgatgcagctacattatctgaagaaagttcgcaaggtaaattaaatggtgctgagagaaatgaaggtgagtattctcaaggtgagctacacttgtccacttttcatgctatagtagagcaaccattagtggaatcaattactgagttgcctttgtcacaagttgatttacttgctgttccttgtgataaagaagagttgtgtgataatgtttcacttatatccatgccacaactagtgaatgaacatgttagttctactatttctttgtgtgctgattctaagcatgttgttcacattgctaatgaagtagaggaacgcgaattgctatcttctttaaatactttgggctatgttcagtttgatgatttttgtgagctcgataatttgaaggagaaattatttgctaaatctgatttgccatgtccaactaatgctatttttcatatctttggcgaatataatgatagaggaatatttttggtacatagagtttacatttgttcagatttagaacatcttgtagttccggataaaatatgcaagctagagagacatgttactgctagtcatattgtctcgagtttgtcttgttttgattgcaagaaacaggttgttttcagtggactgcgcgaagagcaccatatggaaaaaacgaggacggttttctgtgaagaaggggaggatgatgtgaccatggctactatggatacgaccattgctcacatcatgaatcaacaagaagacatcaagatcaagtcctccatgtgctgcaatctgattcggccacgtgttacattgctgacttcaaacggccgccaaatctacatacgtgctccgttttgggcccatgagtacttgatggaaagctctcgaagtcctccttccaacggatccagcctcatctcggaaatctatctcgtttggccgcaatcacaaaagcaaggaatagggttgatctgcaccggcaagatcagcaacccacggagaggtgtatcgatcgctaaggcgcaacacaacgtctcgtacggttgtagtcggatcatcaacgtttctcccaaatcgtag

SEQ ID NO: 93472 - DNA, 2769 bp, Oryza sativa
  Clone ID: PAT_MRT4530_91853C.1
cagaactagtactcggctatgctaatattcagaactcacaaccgagagaagaaaacaaactcaagagtaaggcaaaaccagtaacacaactgtgatagaccactagttacagggagaagaattccaaagaaacacaaatggaaaatgaccaaaccaaaaggaacagatgatctacatatcctaagctccaaaatccagtctacgacaggattcagcctcatgatgtacagccaaatcatctctttaggctcactgcattttgatctcttccaagattctttaacaaagcatccatcacaggtttaacccgcagcgcgatttggaagcaacaaaattaccaccagcaatctgattgatcacttgatccgagcaactagtcctccttggcctgctttgctccgacagagaagaactcggtgatgacttcaagaggcatgccctttgtctccggcaccttcatgaagacaaacaggaaagccagtatgcagaccactgcgtagattccaaacactccagcgagtccaatggcgttgagcatcacggggagggtgtatgtcacaatgatatcaccgatccagaatgttagggcacagatggctatgcagatgccacgaacggtggtcgggaaaatctctgcacagagaatgtttggaataggcccgaaccccatgacaaagaagcagaagtagagtatgacactgactgtggacagtgaggcatgaaccatggtccccacatccagaatattgaccagaatcaagatagctagtgctactatcaggatagggattgttgcaaggagaagaaaccttcttccagacatatccatgagcctcatagcaataccaatgctgggaagcatcagcaaggttgtcagtccgctaataagaatagatgcagatgaggagctaagtccaatgtttgcaagaagaacaccaacaccagcttgctcaagaatttgtggagtgtagtacagaactccattaatgccagcaaactgttgcaggatttgtatccctatgccaacaaacagagcatgcttcactccaggttcgaataagtctgcccattttggacctttagcaactgcctgagatggatgcaccatagcagggccagcaaggcgttgctccatcaattccttagagtaaagagcaggttggctgacaagagcagctgcctggacgaactcaccaccaggaggaacatcacctccaggcaatgacagtatagagcccctgcgatcacctgtcacaccctcttcatgcaagtagatacgttggaagccaccttctttttcgccatctgcaccttctctctcagtccatttccaagccaactgccatcccccaccaatgcccatgctgcttactgcctccccgccctgcatgagactactacttcttcccacagcacccattatactgccatgaggtgcagcgatctcctttccttccacgcttgtcgcttgacgagaaataagtgggctttggaggctatcttcaatgtcatccccaccatggtctgatccataatcttcaccctcccgttgactctcagcatcccaatcacctttagcttgctgctgttccgccacactaaacatgctgccaaagttaggaaacaatgtgctccgcatgcttcccattatctcaggcatcttctcatggacacttccaaaaagggtgacaacaggatccacaaggggcttaccctgactgaccatactaccatgacgagagatgagacctaatgcacttccaagtgcactttgcccgtgaacaggacgggcaacccacgataagccttcttcaggaccatacagtttgatcttctctggatctggagccagcccttcatcagcaagctcatcatcaggtccaattatgtattcctcaatttttgtgtctttcccaacccccagaccttcaacgagaagggccatttctcctgaaacatcttctcttccacgcaggccttgcaacacacgcttggcctcagccattcttcctttgctcacgagccacctcggcgattcaggtaagtaaaagatggtcaatgcaaagtatataagtgatggtattgatagaacgccaagcatgatcctccaatctggctgtggcatgagggacatgccaaataccatgcagtatgaaaggaacatccctccagacccactgaactgcggcagcgtgtttagcagtcctctgatgtccgtcggggcagtctcagagatgtacaatggtacaagcgtgacagccaaaccgatcccgaacccgtcaatgagcctcgccaagagcaacacatacacatttggcgcccaaagcatcactagcccactaacaaagtagaggacagccgacgcgatcagcatgggccgcctaccaaaagaatcagccactgctccagagaacgtcgtgatgatcgtcgccccaatgagcgacatggccacgatcaggccttcgataaggggctcgctctgcaagttgaattccttcttgatgtacagtaccgcacctgcaatggttgcattatcccagccctgcagcaagttgccgatggaggccgcgatggcgaccagcacggcgcccgccatggccggcgaatcttaccaccaagtctctcgtccaccgagatttcggatcccctaacaagaagagaggcggctgggaatctggaagggctcgttgggacgccgagatggggcaaatatatggggaattctcgccaaattgggaagcttttaggggagatttggaggagggagtc

SEQ ID NO: 93473 - DNA, 1076 bp, Oryza sativa
  Clone ID: PAT_MRT4530_91854C.1
gcacgaggtagaccaaccccccactcccgcgcgctcatccatctatccatccatccatacacgcagcgcacgaacaagacagagtcacgggcacgaagtcactcatggacggcggcggctcaggcgccgggcgcaagaagctgaagcacaggctcgctgccatcctctcggtcttcaccaggcgggcaggtgacaggaagcgccgcggcgaggagggggcggcggcgccgccgccgccgccgccgccgctggcattcccctcttactcccgcctcggcggcgcgggcggcaagaaggcggccgcggggaagcacgagcgccggctctccctgtcggtgccgcgcccgccgccgctggtcaatatcaccatcgactgcgccggccgccgctccgtcgacgcggcggacccgtccctcctcgcgccgctcgacctcgacgccaggaagatggagaggcggctcacggggacggggctgccgtacgagaccggcgagtgggagggccgcaagtgcccgccctccacgcctttcgccgcggctccaccgctggcgcgatggaaggagcgggccagcgtctcgtcgcggaggctctcgacgcactcgtcgcgcaggctgatgagcagctcgtcctccgacgacgagtacgacgaggactcgaggaacctcttctcctccaggagcttttcctccgactcgtcggacttctacaactgcccgcgcaagaacaccagggcgcgcgcctcagtgtccggcccgtgccgcgcgccgccgccatcctcgcgccgcggcacgtcgcagagctgccggtacagcttcgagcttccgcgcggctcgacggcttcggcggcaaccgacggcgggttcgcggtggtgaagcggtcgtccgacccctacgaggacttccgcaaatcaatggaggagatgatcgccgagggggcggcgtgcggcggcggcgacggcgacggggagctcagcgcggagcggctgctggagacctacctcgtgctcaactcgccgcggcattaccccgcgatcctcgcggcgttcgccgacgtgcgggagacgcttttcccctga

SEQ ID NO: 93474 - DNA, 549 bp, Oryza sativa
  Clone ID: PAT_MRT4530_91855C.1
atggcatatggtcaagccggaacaagcaagctgtacacacccattatatttgaagcattccaagctgaatatgaacgtttcatggcagcatgtgctgaagtgttggatggagataataaatatcttgttgcaattggagatgagaatttagcatttgaagaggagtacatggttgctgacaacacgcttaacatcctcaccaaggaagttgaaaataaaatggctacaagtccatgtattaatttgggagacccatgtgcagctcgtgttgatgttcaagaaccaaatgtttcacttactaatgcaagcctaaagaagaaagaattccgtacaagaaatttgaagaggaatagatcatggacagataagaatgggacaaggaggaaaaaacaaagtacaactaaaaaaactaagcaacaagatgttgagaatgctggactgcaggcacaagctgtagaagagagcagttctaggaccaacatcagtgatgttggacaatatggggtcataaataccttcacccaattgttgatgactggcaatcactga

SEQ ID NO: 93475 - DNA, 761 bp, Oryza sativa
  Clone ID: PAT_MRT4530_91856C.1
aagctgacatgaataggcaagatcacacaaactaaagtgctccagaacaaaaacatgcagattaggctaccaacaccagcctgaaactgttcatggacttgctgcatacaaacaacacagtatataccatgagccctacaaggctatatgaatactgctgagaaagggagaaaaaggtgaggtaagaatgtagaaattaatagatactgtaaacaaactgatattccaatactaccatcatcttgacaacagcttgcttaaatcagaaatccacagttaccaacagtaatataacaagagttaacttcaacagtatttatttgtgcaacttaaaagacaccataggaagccttgaagctatcacccctatgctgaagtactgaaatgagaggaaaccatgtcgttcactcctttttcccgactccatgagacatgttgtacaccccacggcctatcataaacaagctggaggcggcaagagcgaggggaatggcaacggaggtgaccacatcataacgccctttcagatacgtgtgcttggtcaagttctgaaaatactgctgctgcttaaagagcctctcgcgcggcaaaaacggtgattctgtcattcttgagacggaggcggaggaggaggacgacgacggattgattggacgatccttgcagcggcttgggggattttggatggatcgcggcgagaggtgaaacgaaatggggggaggaggaggcaacgacgaagaagcctcttctctccaccacac

SEQ ID NO: 93476 - DNA, 298 bp, Oryza sativa
  Clone ID: PAT_MRT4530_91857C.1
cccacgcgtccactaacgcgtccgagaaaggaagagactagaggagagagatggctcactgcatgatgctcccatggcgagccaactgatgaagagcaccttggtgtgctccaagccgtgggggctagctggctgactgcaatgacaaggaggccccgcttcacacacaaggtacatacacgtatgagaagccacacgtaccaagtggagcatgccatcaatggctaccttttcatacgtagtcaggagacgcctgtgacctgaagaccgctggtagcctgggacgcttgcaacctga

SEQ ID NO: 93477 - DNA, 701 bp, Oryza sativa
  Clone ID: PAT_MRT4530_91858C.1
gacccataacataccaagttaggttaccaacatcaaccaatcctttttgctgcagaagcactcatactacacacacatttgcagcctcctctataccacccttattacacgacaatcaaggggaccaaaaggacaaaagatgtgaatttgggaaatttttcagatgctaccccctcctttttcttctgtacagtggagggaatttgcatctttctgttgctttcgggaggagcgatttgagtcgctgcccaccttttgtgaattaatcttgatacagctgaacaaacttcacttgcatttttatctcctttctactaaccagagcatccacctacccttgctgtggtgtttttggtggtatgcttccagattggactattagcaagacaaggatggatgtagtcgtgaaatcttctgctgctctatttattgttatgtaaaatctgctgtaatccggagtttattctgcaactctgcatgtgtaaataccagatcagaataaactggtagatgtaaagttttctttattttctcaagtcgatgacattggaacccatgtaaccggccaccaacttttttgtttcactatgctcaaatattcgaaaacttcagactggcttaatgctattatttgtactaagcatatgcttgaatatgcggtcctttttgttacaagtaatattcttttaaaaaaaaaaaaa

SEQ ID NO: 93478 - DNA, 4163 bp, Oryza sativa
  Clone ID: PAT_MRT4530_91859C.1
tctatcaaagaaaaaacaaacatttcatcagagagagagaatctactagcctactactatacaaagttggggggaaagggagagatttttgttcatagtttgggaacaaagtttagttcttttcttgggggagtctccaggcgaatgttgcagcggccaaggtaggaatgaagaggaggatgagaggaggaggaggtgcagccatggccgtggccactggagctgtgatgctgttcttggcagctactctctctggggttagtgccaacacagactcagatgatgtgaatgctctcaatgtcttgtacacaagcatgaattctccatcccagctgacgaattgggtgtcacaaaatggagacccctgtggacagtcctggcttgggatcacttgctcgggttccagggtgacagcaataaaattatccggcatggggatcaacgggactttgggctacaacatgaatctactgacttcactagttgaacttgatacgagcaagaataatcttggaggcagtgacattccttataaccttcctccaaatcttgagagattaaaccttgcagaaaacaacttcaccggaagcataccatactctatatcgcaaatgattgcacttagaattttaaatcttggacataatcatcttgcaaccaccaatgatatgttcaaccagctaactaacctaacaacatttaatctgcagaacaacggattcaatggcacaatagatgtccttgctgatcttccgcttactgacttaaatgttgcaaataaccaattcaccggatggatacctgataagctaaagaaaataaagaatctccagacaaatggaaactcgtttggaagtggtccttcaccaccacctccaccatatcaatctccaccttataaatctcctccatacaaatctccacaatctcgacaacctgctcctccaactactactgttaacaataatccgtctgatgatggtcgcaaacactctaaactaagtggtggtgccatagccggaattgtagtatgtttggtagttgtgggtgcaatagttgccttctttgtgatcaagaagaaatattggtcattgccacgaggaggagatcctgaacagaaggaacctctcagccctattgtttcaggatttaaagacagtcttaaacagatgaagtcaatcaagatcatctcaacaattggcaaggaagaattacagaaaactgtttcaatgaatttaaaacctccaacaagaattgacttgcacaagtccattgatgaaaatgatgtcaccagcaagtctttcacaaggaaaataagttttagttccatcagaacacctgcatacactgtggcagacctacaggtggcaacaggcagcttctgtgctgacaatttaattggagaggggttattcggtcgtgtttacaaggcgaaattcaatgaccacaaggtcctggctgtgaagaaaatcaatttctctgcattcccgggccatccttcagatttgttcattgagttagttgcaaatatttcaaggttaaatcatccaagcctttctgagttagttggctactgttcagagcatgggcagtgcttactggcatatgagttctaccgaaatggttctcttaaagacttgcttcatctagtggatgatcaaagccaaccgttgtcttggaatagccgtgtgaagattgcccttggatctgcgagggcattagaatatctacatgaaacttgttcaccttccgtgatacacaagaatttcaagtcatccaatatttttctggataacgagctaaatccccatctttcagattctgggtttgctgaccttattcctaaccgggaatctcaggtgtcagatgaggactcaggatacagggcccctgaggtgaccatgtctggccagtactccgtgaagagtgacgtgtacagcttcggtgttgtcatgctagagctcctgactggccggaaaccttttgacagatcccggccacggtcggagcagtcactggtcgggtgggcaactccccagctgcacgacatcgacgctttggaccagatggtcgaccctgcactccaggggctgtacccttcgaaatcgctctcccgcttcgctgacgcgatcgcgctctgcgttcagtccgaaccggagttcaggccgccgatgtcggaggtcgtccagttgctggtccgccttgtgcagagagccaacatgacgaggatgtgcggcgccgacggtcactcatggcggcgcgacggcgaatcccgggaccaagaaccatgggtatgcatagctgtggctagggtgcaagcgaggatggtaggttcaaaaggacaacgatggaggaggcgcaacaaacatagaggagtatctgctcttgggcgttctctgaaaccctcgcggaaagcatcgaggcatgttgttccgtgcagggcgcgctcgtttacgcagtgttccctagggggtggttctgcggaccaggagattgtgattgcactgggcagcaatgtgggggatagaatcagtacgtttgacagggcattgcgtatgatgaagaactcgggtgtaaatatcaccaggcatgcctgcttgtatgagacttccccggcttatgtgactgatcagccgcggttcctgaactctgctgttaggggcacaaccaagctggaacctcatgaattgctcaagaagctaaaggaaattgagaaggatatagggcgcactgacgggataaggtatggtcccagaccgatcgatctggacattcttctatatggcaaatcacatattagtactgagaatctaactgtgccacatgaacgcatccatgagaggccgttcgttttagcacctcttgttgaccttctaggctcatccactgatgataacgtggaaaaaagttggcattctcttgcaaagtgcactggtgggttctttgaatcatgggataaacttggaggtgaatctataattggaacagaaggaattaaaagggtattgccagtcggaaatcgtctgttggattggtctgagaggactcttgtcatgggggtgcttaatttgacaccagacagcttcagtgatggtggtaagtttcaggaagtggaagctgccattgctcagaccaagttattaatatcagaaggtgcagacatcattgatattggtgctcaatccactaggccccttgcaagaagattatctgcagacgaagagcttgagaggttggttcctgttctagatgcgatcacaggaattcctgagatggaaggcaagctgctctcagtggatacattctatgcagaagtcgctgctgaagctgtgaaaagaggagtacacattgttaatgatgtatctggtggacagattgacccaagaattcttgaagttgtagctgaacttggagttccatatgtgactatgcatatgagaggagatccatctactatgcaaagtgaacagaatctactatacggtgatgtttgtaaagaagttgcttctgagctatataaaagggtgagacaagcagagttgtctgggattcctttgtggaggatagttcttgatcctggtattggattctccaagaattccaaacataaccttgaagttatcatgggtttggaatctattagaacagagataggtaaaatgagtttaggtgcttcacatgtgccaattttacttggaccctcaaggaaaagatttttaggtgaaatatgcaatcgtgtcaatcccactgagagagatgctgctaccatggtcgttgctactgctgggatattgaatggtgctaatatatccttcatggacctgcagttccccaatggacaactaacatatgttactggcgacaggattacagcaagtggttttcttccattatttggtgggttgcttcaagctcatgggaaatacccaggagaaactagagtcagcttctcttgcaagaataagcaaggcaccaagttcactcctatgtttcaatggcctgataagtctctgtcatttggagttactcaagccttagcatggaaaagagctggtctcatgccttggtatcatgctaaaggcatgcatctatttcggatgaaactgtcagaatgcaagtgccggatgattaagctggtcataaccggaatggttgttccatga

SEQ ID NO: 93479 - DNA, 351 bp, Oryza sativa
  Clone ID: PAT_MRT4530_9185C.1
atggcgagtggttccaactcgtcatgttggtgtggcaggctggtggctccagctagactaaacccgtgcctctgtgaggtttctagttccttgcagagggcgacgattatctaccccagggcaatgagtatggaagacaacgcctgtcactttagtcgtgttgaatctgacactagtgttggcaatggcatgcgggccctgtgtccaggttcaacacggctaaggagatgtggtcaggttctaccataccccatcgagacccatgccttttattgggcaatggcaggcggaccccatgtccagctaggcatggtgaatcctattcatcgtgtcgttgcgtggattaagtag

SEQ ID NO: 93480 - DNA, 1047 bp, Oryza sativa
  Clone ID: PAT_MRT4530_91860C.1
atgaacgcggcggcgcggaaggccgccgccgcggcgcggctgccggcggcggtgctggtggtggtagcggtgggggcgttcctgatctcctacaacctcctggccatcgtgctccggggtggcggcggcgcggccaccggggcggggagggagagggacccggtggtggcgatgccggggtggatgcgggcggctgggtcggcgggcggggggcggcggcggccgttccacgtggcgctcacggcgaccgacgccgcgtacagccggtggcagtgccgggtgatgtactactggtacaagcggatgcaggcgcggccggagggcgccgacatgggaggcttcacccgcgtgctccactccgggaagcccgacgccctcatgggcgagatccccaccttcgtcgtcgaccccctccccgccggcaaggaccatggctatgtcgtactaaataggccctgggcatttgtacagtggctggagaaagcaaagattgaagaagaatacatattgatggcagaaccagatcatatatttgtgagacctttaccaaatttagcccgcgatgatccagcagcattccctttcttttacattacaccatcagaacatgaaagtgttctcaggaaatattatcctaaagaaagaggccctgtcacaaatatcgaccctattgggaattcccctgtaatcattaagaagatacaacttgagaagattgcccctacatggatgaatgtatcgattcaaatgaaagaagatcaggagacagataaagcttttggatgggtcttggaaatgtatgcatatgctgttgctagtgcactccatggggttcaacatatccttcgaaaagatttcatgattcagggtgtactaacctatggaaaaattggtgaatggagatttgacaagagagcataccaagacaggccaccgccacgaaatcttacattgccccctccaggagtaccagaaagtgtggttacacttgtaaagatggtaaacgaggctaccgcaaaccttccagggtgggatgatggaagatag

SEQ ID NO: 93481 - DNA, 660 bp, Oryza sativa
  Clone ID: PAT_MRT4530_91861C.1
cccacgcgtccggatgaatgtatcgattcaaatgaaagaagatcaggagacagataaagcttttggatgggtcttggaaatgtatgcatatgctgttgctagtgcactccatggggttcaacatatccttcgaaaagatttcatgattcagccaccttttgataccaaacttgggaatacatttattatccacttcacttacggatgtgactatacactcaagggtgtactaacctatggaaaaattggtgaatggagatttgacaagagagcataccaagacaggccaccgccacgaaatcttacattgccccctccaggagtaccagaaagtgtggttacacttgtaaagatggtaaacgaggctaccgcaaaccttccagggtgggatgatggaagatagactatgacgacaaatgttgctgattagtgattactcattctgatagctgccccattcctctctattcaggggcaatacaccataaatgatagaaatcgatagttttcccagtatacttacagaaagaaaacaatatagcagcccaaaagtttttttgatgaaattatatcgaaatgctactagtataaacacctaaagtatagttatgccagtaaaatggtgattgcacctctgacatctctatagagttactgagc

SEQ ID NO: 93482 - DNA, 2800 bp, Oryza sativa
  Clone ID: PAT_MRT4530_91862C.1
acggcccgccctttttttttttttgtttggcaagatctcagtgttactgtttgcttgctcatgtagatatatatatgccagttaactcatggattgtatagccagtttaaaacggttacatataccattagctaagcttcctaagaagcagaaatttggcctatatgctgatgaaagacagctgcctccttagcttccattgcgtcaggtgcaccttccctttgtctactccactaattatctcatcaataagatccttaaagatggatttttcaatggccaaaacaattccttgccgttctctgtcggagctattccactctttcatgccttgcattgcatcctctgctagcctgccatctccctcttcagagcaccttatcattgaggaccgagactggatcatgtcaatctctgcacataagtccttgaaaagttgccacccacttaacttctttgactgaaagaactgcactgatgaattcacagtgtggttggcatccatttgctgggcgaggagttcatttgcaagatcacatatgaatctagggtgcagcttttcttcgtctggttttgcttgttcaaggatgaggaaaagctctggattaatcgggtagcttgatggtcgcagctgatgaggcatcatttgaaaatttagtttgttgtgtaggatccctgatgctgaaagtatctcgtagaggtactggtgatctttattggcagcaactgatgaaaaagtgtcatcggttttcagagcttcctcactcaacatttgcaagagctcaagcttttggatgagggctttcatgttttctgcctttatctggttgccatcgttgcttgcctttgaaggtggtgtatcagggaggcttgttgggttccaactctcatctgaagtatgcgtctcgccgtctttgaaggaatctgagattctcttcagagaaggcgatgacccctcatgataaaatgttgcatcaagaactgacacaggacttgggatgttctcctgtggatggatcttcttcttgtctgcaggtagaattgtaggcatttcctcacgattgggtgttgaagctattttgctttgatggatatatggtgagttggcattcagaggattcggatgatcaacgacacccacatcgatgttggcaaaaccggtggaccacctcctttcagagtccgccttcttctgtgccagcctggggctcaatgagctggaaagccttggtgatcttgcagaatttacaggttcctcaccactggaatgagcactttcattcggagaatgatttctcttgctatcactgttttcattcttcctggtgaaagatgtctcttcatgccgtagtcttcttatgccttttggccttgaaaggggagcaaccaaagtatctgaagcatcaggttttgtgatgcatcttgctggtttcatgatcacaattggagactggaaattttcagaatcaactatttgttcagaggccttcttttgaatggctgttaattcaggattgttgtcgctctggcttgggccatcctttttgtgcagtgtgctcaatatcctgagagccctcagttccttgttgcattccgacaactctagacccctgagtcttctctgtatgtcagcatagatggatgcagttcttggcttcacttcagctgcacgtcctgttacagctctctcattctgtctccatggggctgcttcagggataattcttggagaaggattggttttcagtactggagagtgattcttctgcaccgggacactatgatcttggttcttgatcctttgacagtgtgacggctgatcaatttgcgtgccatggacaggtgtaggtgaccttgccgtctcatggatgtcaggagtagttccttccaaccccatgagcttggcaacgacgctgctggcccgctgatggctcggcgattcttggtgcttcagaacatccaggaggttgtcatcagttcttatgtagccagagttcttcagacgtgaacatggattcatggattcttttctgctgtccaaggacagcctgggaagctccttgagctttgctgaaggcttcttgctgtcttgcgcttcgaccgacctcaggagttgccgatcgtcgcatgagaagcgtggtggcctgctggattcatgaacatatccaggaacgccggtgctcctgtcgatcccaatcacgtaagttccatcggttgatttggagatcagcaacggccttggtgagtctttgtgcaatccttttctggactcctttgtcgacgtcttgatggtcataccatgggtttcccggttgatggactccttgacaatgtctctaaagccagtgtgtgggtctttggttttggcctctgtcttggaacatttcacactctttgtctgtgagcttcttggtggcttcccagcaaaacgctctttgttgatgtaggagagctcttgttgtattggtctgttgatgtctgtggacgagaacgaagagcacgatgaggaagaagaagatgcccgcgatgattccatggagaggctactgttctcggtcatacttttgctgaaggttttgtccagagtgttgtttgaagcaactgggttttgaatcgagacattgctgttgctgtttggcaaaacatggcctggtggcgccgtgcctcgggctccgccgcgttgacgcgcggtgaggaggcggcggcggtcgaagatctggaacatgccggccatgcagcccatctgccggtcgaagtcggaagcctcctgcgcgaacgcctgcatcatccgggacggcat

SEQ ID NO: 93483 - DNA, 344 bp, Oryza sativa
  Clone ID: PAT_MRT4530_91863C.1
cccacgcgtccgaaaaatttgcagccaccttttgataccaaacttgggaatacatttattatccacttcacttacggatgtgactatacactcaaggtattgaaatcccagatctgtgatgtttttctacagatataaatattcatcggaagctaaaatttctgaggcgataaaagtaagaagtcactattgtttttggtttgctaacataatgtaattgacattacactggcaaatgatttcagggtgtactaacctatggaaaaattggtgaatggagatttgacaagagagcataccaagacaggccaccggcacgaaatcttacattgcccccttcagga

SEQ ID NO: 93484 - DNA, 348 bp, Oryza sativa
  Clone ID: PAT_MRT4530_91864C.1
atggcgagcagtggggatggcgacgagccccgcagtggcgcggagccaagggtggaccgccttccgcagcaggagcacaaggttgccggcgccataggggtggcaatccgaggcatccatgtcgaccggtggcgccgcaccggcaagcaagggaggaggggcggggaggccaacggcgacctcctcaccgaccacgagggggagcaaggccgtggcggtggcgaggcggttcttggccgcggccagctcaacccggagtctcttgagctcttcgccgagtggcatggagggacgacgcggcggcggcacgccaagcgcaggagggatgacaccgcggcggcaagctga

SEQ ID NO: 93485 - DNA, 222 bp, Oryza sativa
  unsure (1)..(222): unsure at all n locations
  Clone ID: PAT_MRT4530_91865C.1
cgtttgttagttggaaattttagtgatnttggtggtgtccnccttgtgttcgtgagaatncccgagtnggaactngcatgtaaacgtntgtgttntcttggatanttttnattgntaagntattatatgtgatgctggtactgttgttaaactnttaaaaaaaaaaaaaaaaaaaaaaaaaaaaaaaaaaaaaaaaaaaaaaaaaaaaaaaaaaaaaaaaaa

SEQ ID NO: 93486 - DNA, 275 bp, Oryza sativa
  Clone ID: PAT_MRT4530_91866C.1
ctcaggcagcaacggaaccatattacgggggggtataaaagacataaattgggggatacccctcaacattccgacaccttatgttcttcttctacttacatagagacaatgttgtactaaaatatcaccataacatttccagtaacacgatctaccatatcaaattactattttctaattttgaagaaatcgccgtcctccaccgtcgacggggccgcgccggcggcggagaacgggtacttcagcaccgtcttctccgagttgcccacggcaaa

SEQ ID NO: 93487 - DNA, 379 bp, Oryza sativa
  Clone ID: PAT_MRT4530_91867C.1
cagatggtaataacacttggcctgaggaaacaacttacttggttgaggagttatttcattcaacagcaccaaaagttgtggatgtcatacgcttagttaagattgctcaggttcacaccgctgcttccgagtgtctccttgagttgagcaaattgtatagagactttccattggttgacagaaaagggcccaagttctcaggcgaacttgctgaactttgtgagtcggaaaaaagcgagcaagcaaaggcatttttgaagcaatgcatggatattctcaaagacttcgaagatgccactggattagccatggagatggattaagtgaagctctcaaggttaaatcgtcttagtaaatgtcaaaaacaaggccgcacatg

SEQ ID NO: 93488 - DNA, 510 bp, Oryza sativa
  Clone ID: PAT_MRT4530_91868C.1
gtgaaatcaaaagggggtttttggggttttttggtattaatataaggaaggaggggatgaaatctatgggggagaggaataccgagtctttttatgggggatatacattttcgaggggtctaggagagacatttttttgctctgggggagggagaggggggttttaccacaagggtttgggggggtttctggaaaaccaaaaagatgggggggggttaacaaaaaaacgggactgggggacgggataaaaaggtggggggggcaggggaaaaaaatggaattttggggggggggggggacagggggtaaatatacggggggggcccccctcagggacacaaaaacgaaggttttgcaccggttgacacccaaatccaaaggcggaggcttgggtcattgcgggggcctgggcgggaaattgggaggacgcccggggggcccccggaatttccgaacggggagtgggaggggaacaaggtttcctaaagggaaagggtttaaaccgtgggg

SEQ ID NO: 93489 - DNA, 7337 bp, Oryza sativa
  Clone ID: PAT_MRT4530_91869C.1
tccggaattcccgcgtcgaccacgcgtccgccattttcttcgctctgctctctcctttgcgtcggattcaagtaaggcttgttgagttcggtgccccatatccctcaatctcgggtgcgattcgatcgggtttgcttcgaattcgtcgttcgattgagaatgtcaagcctcgaggagccacttggtcttggggacctgccaaagttgagtattaacagacttgaaaggttctctccaagtgcctgcagagcaagtgttgatgacagcaacaccaacaattacaagcatcgcaatggtggcaacaatcagacgatctttcacagcagtgctcattcatggcatatgcaaggccaatatactgattcatcctgcaatggggtggatatggagttcagagctcttccacggaaggttttatgggaccttccaaggtttgtgaagatagttgaagttggaccacgggacggtctgcaaaatgagaagaatactgtacccacatctgtaaagattgaactgatacacaaattggtggcttctggtctatcagtagttgaagccacaagttttgtgtccccaaaatgggtgccacagctagcagatgcaaaggatgtggttgaagggattaagcatgtgccagatgtgcggtttccagtgttaactcctaacctcagaggatttgaggctgctgttgcagctggtgcaaaagaagttgcagttttcgcatctgcctctgaatccttttctaagtcaaaccttaattgtaccatcaaggaaagccttgttcggtaccatgatgttgtaacttctgccaagaaacatggaatacgaatccgtgggtatgtttcatgtgtggttggttgccctgttgaaggcacaattcatccatcaaaggtagcatacgtagctaaggagctttatgacatgggttgctcggagatctcactcggagacacgattggtgttggtacaccaggtagcgtacttgctatgcttgaagctgtaatgtcttttgttccagtggacaagatcgccgtccatttccatgacacatacggccaagcccttgccaacatactggtctctctccaactggggatcaacatagtggactcatcagtgtcaggactgggaggctgcccatatgcaaagggcgccaccggcaatgtcgcgacggaggacgttgtgtacatgctccatggactggggatagagaccaatgttgacctcaacaagctcatggatgctggagattacatctccaagcatctgggaaggcagtcaggctccaagaccaccactgctctccgcaagctaaccacttaagtccctgatgatcataatagggattcagaaaagaagtccgaagatacatcggttggcgtcagtttaatgtttttacacaagtcatatgtgattgtaacctgtaaaccgtctcaatttagtcccaatatgggtgaaagtaaacagaaaccatatatgtatacacacatttgtgtttaatttcttggattgaataatcaatgcccttcatacaaaaatcgttcttggatttgagtatatgtttcctagcataagtatcactctcgggtctaattaggtcttggttccttttgcactcaaagttgagactcgaaagaatcatgaaaccaatctctggtagctcaccgctactccattctggagaataacaataaatcgtaacagcggcaggacatgttgcacaagtgggttgcggatgcaaagcttcagaatttccttcggatgcaatcagtaatgaaacgctcatcctattacacggtgattccagtttgcgagaataacccaccttccctggtgctcgcgccctttatacatgtgcggccttgtttttgacatttactaagacgatttaaccttgagagcttcacttaatccatctccatggctaatccagtgggatcttcgaagtctttgagaatatccatgcattgcttcaaaaatgcctttgcttgctcgcttttttccgactcacaaagttcagcaagttcgcctgagaacttgggcccttttctgtcaaccaatggaaagtctctatacaatttgctcaactcaaggagacactcggaagcagcggtgtgaaccttgtaactgtttgttctaaaatcagtgaagccaaaaacaagcatatgaactgttacataaagaagcaaagcagtaatctgagcaatcttaactaagcgtatgacatccacaacttttggtgctgttgaatgaaataactcctcaaccaagtaagttgtttcctcaggccaagtgttattaccatctgaattctggaatttatagcacaactctttgatacacaagaacgatgacaacttaatctgccaactctcctcgggggatagagaatttaaaataatttccaggatattcttcctttggttgataatatcttgcaggaaagcaacagtgattgaagatgctacacagttgagcaccttatcaagagaaacagaaacaccttcagtttcatcttgctcagcactagaggatgcagtgagtgaagatgagttccttgttttacaaatgacagatcgattagaaacctcatacagcataggaaaaacaatattgaagaatcctggatctttgaatgctgtaatcacttgctgcaaacacgagaaagctgcttcacggtacaattttgacttcctactgcatgcagcacaaacagcatttagaataacactaggcatgccagagtcttctgcactcatagcagtatggcagctcgaacaaagtgcagcgagtgcatccagaatagcatcttttccctcccaaaatcgaccaggtagttctttcaaaagtgattcaagaatattattgtggtgcacagacagggattctcctagagcatcacatagtttttttatagccttggctgactttctcttcccagcccatgatgacgaggacatggaatcacacaaaagagagataatttctggtaagtataactgtagggttactctttcgctactaggaatatcctcccaaagttctccatacaatgcaccgatgtctttgtcatcatcaaatcttgaagcaaaaattactgggagaacaactgcattgtatccactaagaatatctgctgcattgcttaaataagatttaataagaattgcagcagacaactgagcatttttttcacctaaatgcagagaagtggtatcttcaataagtttctgagcctgagaagggctggcatattttaagactgcagcacaagatgatgcaaaggcccttttagctgcagaactcttttcctccagaacagcactatacagtaacctcagcaatgctgccgcatatggcttgatttcaaccatgaccttctgtactaacaaggtgatgaagctagcaacaccaacccttgtattaagaccaacagcagatttaaccatttgagccagacgaggaactaaaagatccagtgattctttgtcaacaacttttaaacagatatcaagggtttcccacatcggagaatctttagccacagctatacgcaagctctcaagcttttcagtttggatgccagcatttcctgcatgcatctcaacatagttcaatctttgatcctccagacttgataagcattcgagcatacagctgacaagttctgacagatgtggcttaagtgcagggccagcccccttagcaagcttcataaccaaacttatagatgccttttgaacacttgaaactttactgagtatgccttcagaaagcaagtatggcagtacaatgttcattgtttcatttgcatcagatgaagtagtaagtgacacatcacagagcctaactgtcaacaagcttacagctcggcacaaactgtcaccagcatttcgcacagtttccttaatatcatccattgctcggaaggtggtaatccatatttttctcaaatgcttagaaacctgaccatatcttcgaccttgaataatgtctgcaagtgcaagacatgaagcttcacgtgaacgccaaagcctcgatccagattgaaccaataaatcttctactattagatcataatgttcatctattgttttttttggatctgcaacaattaatttccatatgtgtgccatagaatcctggatgttcttatcaggatcatattggtaacggacaagcctgggaattaaggtatgcagatgaggctgaagtgcctcaccagcttgcttggctatcttggaaaacccaaaagcagcacccctcttggaattgatagcagcctgatagttagctagatccataaacttgtatattaagtcaggttggcccatctcgttggcaaggctacaaagttccttgtatgtgctaagctttcctccagtaggattattgccaatagttccttcttgaaaaacctctgaatcctccatcagcttgatggcccttttcttttttgctgcgccagacagtgtattcacgagagcatgaaccagctgctccttcatagatgcatcaccaagctcatatacaatactcatgccttgggatgccagatcttgtgtaagatcattctgatcaccaagaaggtgggtaagggcttcctgaatttgtggaagtagttccaggatctttggatgctgaccacagtacattgtaagtgagaccaaccagacagtacctgcgcacctttcctcttttctactgctataaattagtgtatcaaataaccgttttataatttcttctcgagccattgcgtgtgcttcttcacaatcacttcctttattagagttactcgagacaagtaggggtgcatcaccagtaagatagtttgtggcctgggaaagggagacaaagttcgtttctagtattacatctgtggtcacaggaacttccccccatataaaagatagggcctccccggctgcaaaaagaacatcttccaccttagagcgtgaaagactaaaaattaagtccaatgcattattcaggtgtgcaaatgacaactcgttccaagataggtgtcccagcgatatcaaaatcttttgtatagctttagtatcattttctgaaagcagcttagccagcttctcattcaggattgttaaaagtgcagcttgagaggaatttcgattaatagaaggcaataaacaacggagaccaatatgaccaagagcttccatcgcagtggatgccaatgctgaaccctcagactcgacaacttttacaagaacatcaattgatttctgcactatttcttcagttatataagattcctttaaacaaccagcagttatatacccaattgcacataacaatccatggtaattttcgaatcttgatgggcgattttgatcaaatgttgaagtgagctcagagagaagatccagtgcagcagtgcttgaaagggctgaagaagtaataccaagcagacgtgaagttgcttcacgagcatcagcatcaacatggcccagtaaagttcttagccaaagtaaacggttcacatagcgcgatgacaccaacatgtctgcaatatcaggatagttggaatcagttgctattgcagatgactccctttcatcatttaacagattcagaccagttaaagccatttcccttatgtccagttttacatctgaagcaccaagcatgcaaatgtatcggcttgggcagtgcttcatatcgtatagtgttgttgcccatcttacagcagaaaatcggacctcactttgctccatttgagaattttccaagagaagtgcctcaagatccttcaatattacaaccgaagcaccaagtatgtaaaacccaaaaatgtcaacactcaacagaacatttgccttcttgtatcttccctctgtgccgaatacattctctagtggcatgtttggaccatggggcgtcacgatccgttcatgtgcttcatcaacaaaactaataagtttgttccgcatcaagtcattagtcaacttatatgctgtagcaagggcagtagctgcctcctgaattgtcaaacgaagagattgctcctctaatcttaaagcagtaaagagtcgtatagccatgtcagttttgttgctgaataaattaggcatgcgagtggcaagcaaaccaattgcctggtatgcaaatattttaatatccctactggaagaatctgcttcagtagtggaagaaccatcaagtgaacgtaatattccactgagaatgactggaccaattaactttagctggtcatttgctgcatgtttgaaaacccagacagtgaactccatccctaactgcttcagccttgaagtagtcccgtttccatagatgcagccaaagatgcactgaagtgtgtacgggaatgcgtttgctgcagcaatcgatcggcagaaaacacccataaggcggactcgcagtgaactatgtgctggggcgactttcagctctgcagctatattttctgcacttgcagtaccattgaacagtgtgaacagtttcttcataaggttggaatcttctaggttcacagctgaagctttgcgctttaataactcctctcctctcttagtaactgactcttgactatccgaagcagcagctaaataaagagggtaaacaatctctggtgccaactgcatagcttcaatgacgttcaagattcctagctttcttgatgtaagtgtgtcaccttttagtggctgctttccagtaacacgatctgattgagcaaccgaaagtccagccgggcatccaacaccttgaggtggtgtttgatacactactgtgtgaaaacagaagtcagcgaagactagatcatcattagatccacttatggattgatattttgaagcaacattgtcacccaccttatgtgtgttacattcaccaatagccttcaccacaagtctcaagatgattccctgatgctgctctgtaacatttgatatgttgattaaaagatcaggtgctatgcttcccttgtcctcacttagcagacgttcaaatgccatctcaatataaacaatgcaaaaattccggactattgtggaggaagtagattcagtataaatcctccataaatccagcatgggcagtgaaatctcaggcctgtgcttcacccgtttgttaatgtggctgagaatttccataacgagcttgcggacggatgcggtgggggaggcgagcgaggtgatggcgtaggggaggacgcgggcgagcagcggcgcgagccgcgcgtcttcggcgagggccagccgcgtcagcatccggtccagcgcctcctccctctccgcgtcggtctgcgccgccgccgccgcggcggccgcctgcgacgttgtctccgccat

SEQ ID NO: 93490 - DNA, 243 bp, Oryza sativa
  Clone ID: PAT_MRT4530_9186C.1
atgtcaagggacccacttgtcgtaggacatgttgttggggatatcttagacccattcaacaaatcagcatcactcaaggtcctatacaacaacaaggaattaacaaatgggtctgagctcaaaccgtcacaggtagcaaatgaaccaaggattgaaattgctggccgcgacataaggaacctttacactctgaatcatgaagatgcattagtagtgacacaaccattgaagctaacaaaataa

SEQ ID NO: 93491 - DNA, 419 bp, Oryza sativa
  Clone ID: PAT_MRT4530_91870C.1
ccccccccgcatcctgagctcgtctgccctacccgccgcaggtcgcgtcggcagccacccggccgtcgtcagctggatcgccgacggcgggcgccgctacgggtaccgcgtgcacgccgtggcagccggcggcgacgccgaggacatcgacctttctctcaagttgtaagctatactgctagccggtgtcgcgtccacacgcttgtcatgcgtgtgcatggttactgccactactaccactagtccacactatcaccagcttgctagtgctttaatgttacttgtgtccgtttgacacaaaaaagctagccaaatcgacaggtaatttgtgtgtatgcaatgcatatcttgtgtttcaacttcccattccatcgatttgtgaaatgtgtgctcgctctcaaaaaaaaaaaaaaaaaaaa

SEQ ID NO: 93492 - DNA, 189 bp, Oryza sativa
  Clone ID: PAT_MRT4530_91871C.1
atgcccgtcctggcgccgggagctcgcgctgttcaaggcgacgcgagcgggggttggagcttaaggctagggcacgggctaccaccgggcaccgacgacgaggacgatcccgccgaggccgtggtgtacaccacgtgtccccatgcgcccacgatgaggaggcacccaccacgtgttcgcacgcgcccg

SEQ ID NO: 93493 - DNA, 497 bp, Oryza sativa
  Clone ID: PAT_MRT4530_91872C.1
ttagtcaataggaacttcaacctccatcttcacatcagaattgtcaagaatcttcataaagtctggcagagtaaaatttgaatcttttgtatagccagcttcttctaaaacatggatcaaaactttctgcctctgctgctcagtcataaaagaaccagacagatcccgcaagatgctcaagatatcatcaaatgccaccttcccattgcagtcagtgtcataaaccctgaaaataaaggcgtggtcgcagtggtcctggacctcctcgatgtcgtactgcgtcagcatcgacgaggtgctccccatctcggcggaggagacggggatcccggtcggccaaaattcggatccgggcggggatcctcccggaatcgaagtccaatccttcaggcggattcctctgcaggcgatgcttggtcccctcgaatccggagctccgccgccgccgccgcttgctgccgccgacgagaggaagggagaggcggcggacgcgtggg

SEQ ID NO: 93494 - DNA, 2005 bp, Oryza sativa
  Clone ID: PAT_MRT4530_91873C.1
atggctactacggatacatccgttgctcacatcatggatgaacaacaagatatcaagttcgagtcctccaagtgccggaatccgattcggccacctgctacactgctgacttcaaacggccgccgaatctgcatacgacctccgtttttggcccgaataaggttgatctgcaccggcaagatcaacaacccatggagagggatacgcaagataattggggatagctgtgctcaacatcgacatcttcgtcgagacatgaggagggatcaacatgaccattatgaggtaagtgatgatgttctaggtaagatcaaatctgcattgccttatttcgagggaaactatgatcctcgtgcttacattaattgggagctagcggttgatagtgaatttcaaaagcatgtcttgtctgagaaacaaaaggttatgtgtgcctctagtgttttaattaaacatgcttctaatgattggaaacatctttgtaggcataacaaaataccacaatcttggaaatacctgaaacgatatttcagagatgtttatgttcccatgtattatgctgacattttgttcaacaaactgcaatgtttaaaacaagataccagaactgttacttcatactatcatgatatgcaagcttgtttattacgttgtggtttagatgaatgcgaagaagctaaagaattgaggtttttatgtgggctaaacaaagaaattcaggacatgcttgattgtcaaagatatacatctctttctcatttgttacaacttgcttgcaatgctgaaagtaaaatagaggagagagacatgaaagagccgccaatcccattgttcacactcaaagtcaaggcacctccatcatctgaagaggacatcaaaggtaaagtaaatggtattgaaattaatcatgtagagcaaccgttagtggaatcaaatgctggaattcctttgtcacaagttgatttactcgctgttccttgtgataaagaagagttgtgtgataatgcttcacttatatccatgccacaactagtgaatgaacatgatatttctagagtttctttgtgtgctgattttaagcatgctgttcacattgctaatgaagttgaggaacgtaaattgctatcttctttaaatactttgggctatgttcagtttgatgatttttgtgagctcgataatttgaaggagaaattatttgctaagtctgatttgccatgtccaactaatgctatttttcatatcattggcaaatataatgatagaggaatatatttggtgcatagagttttcatttgttcggatgtagagaaacatgttattgctaatcacactacttcgagtttctcttgttttgattgaatgaaacaggttattttgaatggactatgtgaagaacaccatatggaaaaaccgaggacggttttccgtgaagaaggggaggatgatgtgaccatggctactacggatacatccgttgctcacatcatggatgaacaacaagatatcaagttcaagtcctccaagtgctggaatccgattcggccacctgctacattgctgacttcaaacggctaccaaatctgcatacgacctccgtttttggcccatgagtacttgatggaaagctctcggagttctctttccaacagatccagcctcatcaccagactccatctagtttagccgcaaacacaaaaacaaggtgctgtgtcacctgtcatgggcctttgggcttgtaacttcgtttgggaccctggcccaagtggggcccatgtggggtgcgccccaaccaggtggagcacgaccctagagtccacttggttgtcttcacacctttataaatagttaggaataaggttgatctgcaccggcaagatcaacaacccacggagaggtgtatcgatcgctaaggcgcaacacaacaatgtctatcttcaactcaccgaaagatcggtccaacaacagccttgagtgtctcgagtggagctcagggttcatcatg

SEQ ID NO: 93495 - DNA, 1785 bp, Oryza sativa
  Clone ID: PAT_MRT4530_91874C.1
atgcccggattgcgtaagggaatacgagaacatcaacttctacaccttcgacgagatatgacgacttctccacgttatgcatatgaggtacatgactataattttgaacaagttgcatctaagttaccattctatgatgggaagtatgattctgttgcatatattgattgggagctagcagtagacaatgaatttgatatatatgatttttctgatgctcaaatgattaaggctgctagtaataagtttacctcttctgctttattttggtggacttatgttagtaataaacctgaaacttgggatgaattgaaaaccatgatgagaaaacgctttgtgacatcttattacaaatgtactcttcgggagaaattagaacatctgaaacaaggtgacagaactgttagggagtacattcatgaatttaaggtctgtatcatctacagtggtctcaaagagtgcaatgaaaatacaacgcgtagatttttcaatgggcctagttctgaaattcaggttttgcttgatagtgtgacatataatcatattgggcacctattcatgcttgctcgtagcattgagagtcagatcatatcaaaggcgaggatgcatgaccaatgtgatttatctcctatttctgaatccccaatatacttatgtaatgatgatgtgcaaacattggaggagcaatcttttgtctcccctgttactaacgttttgcaggaagatcagcacatccaagaaaaggtgaatggtatacttgagaagaaagaggatgaagcacctgcgatgtctaaagaaagttcgcaaggtaaattaaatggtgctgagagaaatgaaggtgagtattctcaaggtgagctacacttgtccacttttcatgctatagtagagcaaccattagtggaatcaattgctgagttgcctttgtcacaagttgatttacttgctgttccttgtgataaagaagagttgtgtgataatgtttcacttatatccatgccacaactagtgaatgaacatgttagttctactatttctttgtgtgctgattctaagcatgttgttcacattgctaatgaagtagaggaatgcgaattgcgatcttctttaaatactttgggctatgttcagtttgatgatttttgtgagctcgataatttgaaggagaaattatttgctaagtctgatttgccatatccaactaatgctatttttcatatctttggcaaatataatgatagaggaatatatttggtgcatagagttttcatttgttcggatttagagaaacatgttattgctaatcacactacttcgagtttctctagttttgattggatgaaacaggttattttgaatggactatgtgaagaacaccatatggaaaaaccgaggacggttttccatgaagaaggggaggatgatgtgacgatggctactacggatacatccgttgctcacatcatggatgaacaacaagatatcaagttcgagtccttcaagtgctggaatccgattcggccacctgctacactgctgacttcaaacggccgccgaatctgcatacgacctccgtttttggcccgaatagggttgatcttcaccggcaagatcaacaacccacggagaggtgtatcgatcgctaaggcacaacacaacgtctcgtacggttgtagtcggatcgtcaatgtttttccacaaatcgtagttatctcaactcaccgaaaaatcgggccaacaacagccttgagtgacgagtggaactcagggttcatcaatacttaa

SEQ ID NO: 93496 - DNA, 1205 bp, Oryza sativa
  unsure (1)..(1205): unsure at all n locations
  Clone ID: PAT_MRT4530_91875C.1
ggcttgtgcatgaatcatcgtccgatgatgacgatgatttttttgggtcgcagcacaaatcatgcatagctattggtactctgtcaatacatcaaaacatggtgggtatgtcatgggacatgaagtggttgatcgcaacagagaaacatgacacttgaaattttaccaagattactttttcgataatcctacctatgacctagttttattcaagcacaggaatagaatgagcagacccctgtttctttgcataattaatgcaatagaggatcaagatgactattttgtgcagaagataaatgcaatcagtatacttgggttaagttgtcatcaagagatcactgcagcaatccgtcagtcagcttatggtatagcagcagatgctttggatgaatatgttggtcttgcagaaagtaccgctatagagaatctgagaaggtatgtgaaagcaattgttgaagtttttgaacatgagtacttaagatcatccaatgagaacgatacaactcgattacttgcacttggagagaatagaggtttccctagtatgttaggctctgtagaccgtatgcattgaaagtgtaagaactgccctacggaatgctagggtatgtactaagggcacgtgcatgagcctataatgattctagagtcgttgcttcgaaagatctctggatttgacacgcttcacttttttttgtttgcacggatctcataacgatatcaatgtacttcatcgaatccccactatttgcaaaagtagctgcagctaaacttacatccaaacaaaacccaaagtgcaaaatggtggctgctaggagtttatataggtgaaggaatgaccaggagaggaggtgggagcaaaccctaggttntgtggacccccaatgggctgtaatgaaacaaggcccaagcccaagtttctgatgtaaagaactattttcgtcattctgagcagcctgggtcaaagttgatggtgaggccacacatagctgaaagtagacgacgagatctttcccacaagtactcatttgccccgtttgccctccggagtgaagagcattgacttcatcaaatcagcgctgctagtgctgcttgcgatttggttcctctcccatattcctaacaacaagtatttcacaacaaccatttagtagcacccaattctgagaagaacttgtatattagctaggaatgaaattacc

SEQ ID NO: 93497 - DNA, 1602 bp, Oryza sativa
  Clone ID: PAT_MRT4530_91876C.1
atggctactacggatacaaccattgcttacatcatggatgaacaagaagacatcaaggtcaaggcctccaagtgctagaatccaattcggccacctgctgcactgctgatttcaaacagccgccaaatctccatacgagctccgtttttggcccagatgaagaaacaaggtgcagcgtcacctgtcatgggcctttgggcttataacttcgtttgggaccccggcccaagaatagggttgatttgcaccggcaagatcaacaactcacggagaggtgtatcgatcgctaaggcgcaacacaacatctcgtacggttgtagtcggattgtcaacgtttctcccaaatctcatcgtcatcgtcgtgtgcttgttgtcgtcgggatcttcgaaaacggaaccgcctcgctgccagtgttctatttttttagttttcagaagtttttgtcgccatacagcaagtgtttgccaaggcatcgatacatccaaactccgttggggtgcttggttgagtcggtgtatatcaccattccgcttgcattggaagtgcgtaatcacaaaaaggaggagagagacatgaaagagccgccaattccattgttcacactcaagttcgaggcacctccatcatctgaagaggacatcaaaggtaaagtaaatggtgctgaaattaatctagtagagcaaccgttagtggaatcaaatgctgaaattcctttgtcacaagtggatttacttgctgttccttgtgataaagaagagttgtgtgataatgctttacttatatcaatgccacaacaagttaatgaatttgctattcctaatgttaattctgctaattttaagcatgttgttcacattgctcatgaagttcaggaacgtcaattgatatcttctttaaatactttaggctatgttcagtttgatgatttttgtgagctcgataatttgaaggagaaattatttgttatgtctgatttgccatgtccaaccgatgttacttttcatatctttggcgaaaataatgatgttggagtatatttggtgcatagagtttacatatattcggatttagaacctcctgtacatgtggataaaacatgcaagctagagagaaatgttattgctaaccaaattatctcgagtttggcttgttttgattggaagaaacaggttgttgtaaatggactacataaagagcaccatatggaaaaactgaggacggttttccgtgaagaaggggaggatgatgtgaccatggctactatggatacaaccattgctcacatcatggatgaacaagaagacatcaaggtcaaggcctccaagtgctggaatccgattcggccacctgctgcactgttgatttcaaacggctgccaaatctccatacgagctccatttttggcccagatgaagaaacaaggtgcagcatcacctgtgatgggcctttgggcttgtaacttcgtttgggaccccggcccaagaatagggttgatttgcaccggcaagatcaacaactcacagagaggtgtatcgatcactaaggcacaacgcaacgtctcatacggttttagtcggatcgtcaacgtttctcccaaattg

SEQ ID NO: 93498 - DNA, 572 bp, Oryza sativa
  Clone ID: PAT_MRT4530_91877C.1
atggctactacggatacatccgttgctcacatcatggatgaacaacaagatatcaagttcgagtcctgcaagtgccggaatcctattcggccacctgctacactgctgacttcaaacggccaccgaatctgcatacgacctccgttttcggcccaatcacaggcacaaggtgttgcgtcacctataatgggcctatgggcttgtaacttcatttgggaccccggcctaggaatagggttgatctgcaccggcaagatcaacaacccacggagaggtctatcgattgctaaggcgcatcacaatgtctcgtacggttgtagttggatcgtcaacgtttctcccaaatctcgtcgtcgcctccgtgtctctgttatcgtcgggacctacgaaaacggaatcggcttgctgccacgattctatttttgtagttttcaaaagtttctaccgccgtacagcaagtgtttgctaaggcatcgatacatccaacctccattggggtgcttggttgagtcggtgtacgtcaccattccgcttgctttggtaagaatttgtaagagctcagttaaaagctt

SEQ ID NO: 93499 - DNA, 229 bp, Oryza sativa
  Clone ID: PAT_MRT4530_91878C.1
cgttcgtcattaacaagaattctttttttccttcccccaaatccttctcgagcaacagctagggggagtggttcgcttcgtaagaagccggctacctctgctcgatcccgcctttgcctgcggattcccaccctgattttcgccgcacgtttgtttagtttcttggggcaaattcgagacgaggggaggagagtttttttgggggggagctgatgaggccttgcaggcg

SEQ ID NO: 93500 - DNA, 1701 bp, Oryza sativa
  Clone ID: PAT_MRT4530_91879C.1
atggctaccacagatgcaaccattgctcacgtcatggatgaacaagaagatatcaagatcaagtcctccaagtgctggaatccgattcggccacctactacactgctgacttcaaacggctgccgaatctgcatacgacctccgttttcggcccgtgagtacttgatggaaagctcttggagtcctctttccaatggatccagcctcattgcgaaattccatcttattgagccgcaattgaagcaacaaggtgctgcgtcacctataatgggcctatgggcttgtaacttcgtctgggatcccggcccaggtggggcccatgtggggaatagggttgatctgcaccggcaagatcagcaacccacggagagttatcacaactcaccgaaagattgggccaacaacagccttgagtgtcgagaggaactcagggttcatcaggtggtatcagagctttcgttgctcgggatacgcaagataattggggatagctgtgctcaacatcgacatcttcgtcgagacatgaggagggatcaacatgaccattatgaggaagtgcataatcatgaaaaggaggagagagacatgaaagagccgccagtcccattgatcacactcaaagtcgaggcacctccattatctgaagagggcatcaaaggtaaacttaatggtgctgaaattaataaagcagagcaaccattagtggaaccaactgctggaattcctttgtcacaagttgatttactcgctgttctttgtgataaagaagagttgtgtgataatgcttcacttatatccatgccacaactagtgaatgaacatgctatttctagtgtttctttatgtgctgattttaagcatgttgttcatattgctaatgaagtacaggaacgtaaattgctatcttctttaaatactttgggctatgttcagtttgatgatttttgtgagctcgataatttgaagaagaaattatttgctaagtctgatttgccttgtccaactactgctatttttcatatatttggcgaatctgataatagaggaatatatttggtgcatagagtttacatatgttcagatttagaacctcctatacatgtggataaaacatgcaagctagagcgaaatgttattgctaaccaaattgtctcgagtttgccttgttttgactggaagaaacaggttgttgtaaatggactacgcaaagagcaccatatggaaaaaccgaggacggttttccgtgaagaaggggaggatgatgtgaccatggctaccacagatgcaaccattgcttacatcatggatgaacaagaagatatcaagatcaagtcctccaagtgctggaatccgattcggccacctactacactgttgacttcaaacggctgccgaatctgcatacgacctccgtttttggcccgtgagtacttgatggaaagctcttggagtcctctttccaatggatccagcctcattgcgaaattccatcttattgagccgcaattgaagcaacaaggtgctgcgtcacctataatgggcctatgggcttgtaacttcgtctgggatcccggcccaggaatagggttgatctgcaccggcaagatcagcaacccacggagaggtgtatcgatcgctaaggcgcaacacaacgtctcgtacggttgtagtcggatcgtcaacgtttctcccaaatcgtag

SEQ ID NO: 93501 - DNA, 269 bp, Oryza sativa
  unsure (1)..(269): unsure at all n locations
  Clone ID: PAT_MRT4530_9187C.1
ctgggtagattcttatactgccacagtgccacttcatgtgctctttggcaataccttccatcccaggttcttttctaccaattcaaactcagcaggctgaagtagttctactataatcagagcaattcattacagatcaggaatcactgatntgtccctttattacattgggcatagtgatatgtgatcgagtcctaatggcagagattgttagttctgtggttgttcatgaggcagtcaancaaatcatacatggcttggtgaactgg

SEQ ID NO: 93502 - DNA, 498 bp, Oryza sativa
  Clone ID: PAT_MRT4530_91880C.1
ttttttttttttttttttttttttttttttttaaccgaagtgcccctacagaggacatgccataaacgaggtactgaaccatgattacatttagacctagattcgtagtgagacatttatagtcctagattcaaagtgggaaaaattacaaaattacagttgtgcttagcttcttacatattcaaaagaaacatatagaaaaggcggtaaaaaaaaagaagataaaaaaaatgtgaagaaagtaaaagagcccactgacttctactggtctacaccaagaaggccctatacacatcttatcttatagggtagtagtacaccatatgccagttccagtctagcttcagctgcagctgccatctgaattgttctctcatgttcggttcttgaaagatcacactgcaaaatgtttgcttcatgtaatgtttcccgctgaattgccggtgctggtctcgcctcaacctgcaggctatgatggagtatcatctacagatctac

SEQ ID NO: 93503 - DNA, 2988 bp, Oryza sativa
  Clone ID: PAT_MRT4530_91881C.1
atggcaggattgtgcaaggggaaacgagatgatcatgctcaacatcgacttcttcaccatcaacgagatatagtgacttcttcacgcatagcatatgaggtacatgataatgatcttgcaaaggtagaatctaatttgccagtttttgatggtaagtatgattccgccgcttatgttaattgggagctagcagtagacaaacaatttgatgagtatgatttctctaatgctcaaatgattaaggctgctagtaataagtgtaccggttctgcatctttttggtggtatactgttggcaataagcttgaaacttgggatgaatgcaaaacaatgatgaggaaaaatattgtgttttcatattataagcgtactctccttgagaaattagaacatataaaacaaggtgataaaaccgtgcgggagtactttcatgactttaaaatttgtatcacttatagtggtttaaaagaaaatgagaacacaatgactagattttttagagggcttaattctgatattcaggctgggcttattaacgtaacatataatcatataagccacttgttcatgcttgcttgcagtgttgagagcaatattttaaagagcccaagggagaaacgagctatgcttgtgcctcctattagtgacattttgcagggagctcagaacattcaccatgaggagaagagcaatatgatcgagatgccatctacatcgctcacgaaggaagaagagaagattgatgcacccacatcattcgaagagagaatcacaagtaatcttaatggtgcagcaataaatcaagtagagcaaccattagtggaaccaattgctgagatgcctttgtcacaagttgatttacttgttgttccttgtgataaagaagagttgtgtcataatgtttcacttatatccatgccacaactagtgaatgaacatgttagttctactatttctttgtgtgctgattctaagcatgttgttcacattgctaatgaagtagaggaacgtgaattactatcttctttaaatactttgggctatgttcagtttgatgatttttgtgagctcgataatttgaaggagaaattattagctaaatctgatttgccatgtccaactaatgctatttttcatatctttggcgaatataatgatagaggaatatttttggtgcatagagtttacatttgttcggatttagaacaccttgtagttctggataaaatatgcaagctagagagacatgttaatgctaatcatattatctcgagtttgtcttgttttgattgcaagaaacaggttgttttcagtggaccaagcgaagagcaccatatggaaaaaccgaggacggttttccatgaagaaggggaggatgatgtgaccatggctactatggatacgaccattgctcacatcatgaatcaacaagaagacatcaagatcaagtcctctatgtgctgcaatctgattcggccacgtgctacattgctaacttcaaacggccgccaaatctacatacgtgctccgttttgggcccgtgagtacttgatggaaagctctcgaagtcctccttccaacggatccagcctcatctcggaattctatctcgtttggccgcaatcacagaagcaaggaataaggttaatctgcaccggcaagatcaacaacccacggagaggtgtatcgatcgctaagttgctgactaaagtgattgctaatagactgtctaaggtggcccaaaagacaattagtgaaagccagacagctttcattcctggaagacaaattttagatggagtggtaattttacatgaggtcctgcacgaggtaaagatcaagaaacagtcgggtatcattgtaaagtttggctttgagaaagcgtacgataaggttcaatggcagttcctatttgatgttctagagagaaagggttttgatgaaaaagtgattgggtggataaaacatgcaacattgaatggtaaagtggcaattaacatcaatggtaatactgaggagtttttcaggacttataaaggggtgagacaaggggaccctctgtcccctctcttgttcaattatgttgctaatgcactatccgaaatgttgaccagagccaaagaggcagatcatattagaggtttagtaccacatttagttgaaggaggattgacatatttgcagtatgcagatgacactactctttttatgtctctgtcagatgaaaatatttgcacggcgaagttcttgctgttttgctttgaagaaatgtcggggttgaagattaattaccaaaagagtgagatgaactctatcagatccaggttcttttgggaaggactggagatgaaaaggaagtaccacatggtcagatgggaggctctctgcagaccaaaggactttgggggcctgggcttctcaaatactagagtgatgaacattgcacttttgagcaaatggattattaagctggagtcgggttgtaatgatgcttgctgcaagttgctaaggaataagtacatgcaggaaggggggttttttcaatcaaatgctaggggagcttcacagttctggaaggggttatacgaaatcaaaaagtggttaagtctaggcagtgcctacgaactgggtaatgctaagttcctttggtgttgtgtaagggatgctttactgtggaaggaaattccaacttctagagttgaactattggatattactaagagtgtgagcaacaggagggctatactttgcctctttgcagcttgtttttgggctatttggcttgttcgtaatgattgggttttgaatgataaattgttaaaagacgtgacgcaattacctcataaggtgatgtcgttcttgatgcagtggagaagtttggcgcaacagaagctgatggggagttggatacggttcaggtattactgcgtgccagcattcactcgttgggggtccaaggggatgcggcaagctccaggacaggggtag

SEQ ID NO: 93504 - DNA, 240 bp, Oryza sativa
  Clone ID: PAT_MRT4530_91882C.1
cggacgcgtgggcgtggagacgctcgacgccgtcatggccaagaacgccgtcatcgtgcgcaagtcccgcgagaagctcacctgcgaacaacaccatcacccgccggcgaggcagcagcagcagcaagctcaccaacaccatcagcagctcgcggcggggcagacgcggtgagagatgttcgacctgctgtcctcgctgccgtcgacgtcgtcggcctccttaaacgaccaaccgtcagc

SEQ ID NO: 93505 - DNA, 400 bp, Oryza sativa
  Clone ID: PAT_MRT4530_91883C.1
gatgtgaccatggctactacagatacaaccattaatcacatcatggatgaacaagaagatatgaagatcaagtcctccaagtgctggaatccgattcggccacctaatacattgctgacttcaaacggccgtcgaatcagcatacgacctccgttttcggcctgtgagtacttgatggaaagctctcggagtcctctttaaaatggatccagcctcattgccaaattccatttcagtcggcaacaactgaaggaacaaggtgccacgacacctgtaatgggcctatgggcttgtaacttcgtctgggaccccggcccaagtggggcccatgtggggtgcatcccaatcaggtggaggacacactatctctataatcaggtaagaactcctaggtccatta

SEQ ID NO: 93506 - DNA, 1424 bp, Oryza sativa
  Clone ID: PAT_MRT4530_91884C.1
tgctttttttattttgttgcctctacatctatcctttcccttgtgctgcagttgtgtatagtaggagaagctgatttctatatctctcttcccctctctcctaaagatcactaccagaaagaagtcatgctctcctgcttgatcgtatgctagctcatcctacagacaattctttgattcgtatccaaacagacaagattattgatcttgtttcattttccgtttctactgtttctcctctattttccattctgcagcttggatatcagtggatcttggaagaaacaagcagcaactaagaaaatctgccacatattgctgttgtctttcttcgtcagatcatcagatctatcctcttcgaccacaaataggtgtagctagctagctcgccggaaatggcatcctcgtcgagcaccagcaactccgccatctcctcggtggtcgcgtcggcggtggccacgacgacgccgggcgccggatcgccgtgcgcggcgtgcaagttcctgcggcggaagtgcctgccgggctgcgtgttcgctccttacttcccgccggaggagccgcagaagttcgccaacgtccacaaggtgttcggcgccagtaacgtcaccaagctcctcaacgagctgctgccgcaccagcgggaggacgccgtgagctcgctcgcgtacgaggccgaggcccgcgtcaaggaccccgtctacggctgcgtcggcgccatctccgtcctccagcgccaggtccaccgcctccagaaggagctcgacaccgcgcacgccgagctcctccgctacgcctgcggcgaggtcggcatccccaccgcgctccccgtcaccgccgccccgaggctcgccgcggcaatgccggcaccaggccagctcgccgccgccgtcagtgccgggatgtacggcggcggccggaggctcggggtcatcgacggcggcgggatagcgccgccttccccccacacggccgggtgctactacgcccgcaacaacaacgccgggagcatcggcgctgacgtggcgcccgtcctaccttacgcttccgtggctaattggacagtgaacgccattagcaccaccaccaccaactcaggatcagagagcattgggatggatcacaaggaaggaggagacagcagcatgtgaattgaagcgcggcaaataatgtggagatctgcgctttggccttgatgagagaggatcggagaggcttcaggaagatggcagcccattcatcccaggttaattaagagttaagaagcaacctatctatctatctatatatagccagcatgaattatatatatcatctccccgtccctttttgcatgttgtgcaaaaccatactttggagttctatatgtaatcgaatcgagatcttgatctctcgtcttttcatgattaattcgcgtttttcgc

SEQ ID NO: 93507 - DNA, 191 bp, Oryza sativa
  Clone ID: PAT_MRT4530_91885C.1
tgttggcccgatctttcggtgagttgagataactacgatttgtggaaaagacgttgacgatccgactacaaccgtacaagacgttgtgttgcgccttagcgatcgatacacctctccatgggttgttgatcttgccggtgcagatcaaccttattcctgcaagcaaatcgaagaaacaagcaagaacaaga

SEQ ID NO: 93508 - DNA, 567 bp, Oryza sativa
  Clone ID: PAT_MRT4530_91886C.1
atgtgccctgacactgaatttatccaggactacagggttgagatactgaatttcttcaggcagtattattccgactacggatccggcggggcgacgacagcgggactgagccgaccgagtggcgctggaggcggaggtgcgagcaccaggcgctcgcagtggctacgagcgcaggtggcagcgggatcgggggtggcagggagcggcgaggttgggggtggcggtgaggaatggggagatgtggcgcgccggccgacaaagcggtggtgggcggtgaggttgggggtgagcgccgaggataggagtggcggtggggagaggtggcgcacaggccggcagagtggtgggtgtggcggtggagcggcaacacgcgacgaggaggtccgcggtaaaggtggcacggggcgcggcgaggaggccgcaagcgacggcacggcggttgcaggctgcggtgcgggggctgtaggcgccggcgaggagaggcccgcaggcgtcggtgatgagggggaggagaggcccacagccgcagtcgcgaggtcgccgtgcaggaggaggctgcagtcctaa

SEQ ID NO: 93509 - DNA, 1917 bp, Oryza sativa
  unsure (1)..(1917): unsure at all n locations
  Clone ID: PAT_MRT4530_91887C.1
ccggccgggaaaaccggccgagactcccgtccctatcgcgtcggatcgccacccacctcgccgccgctgcttgcttcactcgcctcagatccgcgccgccgccccccgcgaatcccctctcctccccgaaccctagccccgctctcgggggttccccctcctcctccgccgcccgccgcgtccgccacttccatcggaggtgatcgatcgagcgggggtggggggagaggttgggcggcttggattggagagggctcggagtggatgtcgaggaggtcggtgaatccgagccggcgggtggcggatgggggattgccgtctgtcggtggcctgcttcaccccaagtcacgctcgccgcccgtgctcaccatcgccctcgtggtcctgggtgtcattattctgatcgcctacttcaatagcggctcaggtgtaacagttactagcagagaagctgtgagcaggtctgaaggttcttgtacaccagaagtcatgcaagcacttccttatcttaaaaaggcatatggcaatgagttgcataaggttctccatgttggccctgatagttgtacagtagtttctaacttgttgaaggaagggaaggttgaagcatggggagtggagccttatgatttggaggatactgatagtagctgcaaaagccttgtgcgcaagggctttgttcgtatggctgatatcaagttccctcttccataccgccaagattcctttaaccttgttatcgtatcagatgctttggattatttgaccccaagatatctgaacaaaacacttccagatttagcaaggatttctacagatggtcttgttatctttgccggcaatccaggtcaacagaaggctaaggtttctgaactaccaaaattcggaaggcagttgcaccaccaaacagagacagaggtagagagggttcttgctttgcttagctccattgtttttgcttggcaagaagaagaagaagaagaagaagaagaagaagaagaagaagaagaagccatggaggggttgctgccgttcttgtacagggcgatcgtccactacgccaacggcgggcagacgccgatcggcaacccgttcaccaacgagtcgccgtcggcgtcgccgcgggcgccctactacgtccgcctcgccggcggcgcggccgactccggccgcctccgcttcgccgaggtgcccgtcttcccttctccggccagccgcgacgcccagctcctgtgatgtcatgtcatggtcgtctcttctcttggaggattattaattacagtaataattcccgcgtttttaattcttcttctttttctccttcttatcttggaattatcaatcgataataataaaggcaggatgaattgacaggaaaggccttgcaaatgggggcccctgtctctgtctctgtctctgccgtttgtatagtagctcgatcttgttcctgccaaattgcaggctctcaatcagaatcagaaacagtaattaaacatgcataatactatttactactatatgtaatctaagcacttgcttccaatgtgtagcacaacaaagtcttgtaaattaaatgttcttgttaatgccccacctgatcctttaattgtcatccaaaaaaaataaaatgctgagctcgttaaaaaaagggtgggttcggattatgccngntgagccacccttgagcataggtagcttatgtatagagatttgccacatgctgctagaaaattcttcctggaaagttaaattatgtgttaccaagaggtgcaaattgaagccctgaggatatatatgtaagaacttcacactgttgtaccctgttattcttcttggtgttacagttattcctggtgaaccagctgcagttccgtgagcagtttgtaatgtactcagttcccaagagagagacaaaaa

SEQ ID NO: 93510 - DNA, 726 bp, Oryza sativa
  Clone ID: PAT_MRT4530_91888C.1
ccatggctactatggatacatccgttgctcacatcatgcatgaacaacaagatatcaagttcaagtcctccaagtgttggaatccgattcggtcacctgctacactgctgacttcaaacggccgccgaatctgcatacgacctttattttcggcccgtgagtacttgatgaaaagctctcggagtcctctttccaatggatccgaccaaattgccaaattccatctaaatcagcagcaactgaagaaacaatatgctacgacacctctaatgggcctatgggcttgtaacttcgtctgggaccctggcccaagtagggcccatgtggggtgcgccccaatcaggtggaggatgacattgcttttatcttgttcttgcttgtttcttcgatttgcttgcaggaataaggttgatctgcatcggcaagatcaacaacccacgaagaggtgtatcgatcgctaaggcgcaacacaacaacgtctctcaacaactcactgaaagatcgggccaacaacagccttgagtgtcttgagtggagctcagggttcatcagttttgaataatttatatgctcgtgcattgttttacaatgataccatgtgatggttacctactgtttcagctatgctatttgtaccatgctaataattaaacactattaatccaacgctatacaacataccctgctgtataggcccaaccattctgaacaaccatacccggctgt

SEQ ID NO: 93511 - DNA, 969 bp, Oryza sativa
  Clone ID: PAT_MRT4530_91889C.1
cctttgtgatgtgaccatagctactatggatacaaccattgctcacatcatagatgaacaagaagacatcaaggtcaaggcctccaaatgctggaatccgattcggccacctactgcactgctaatttcaaacggccaccaaatctccatacgagctctgtttttggcccgtgagtacttgatagaaagctctcggaatcctctttccaacggatccagcctcattgtgaaattccatcttattgagccgcaattgaagcaacaagcgcgcgtgtcggctagaccgtccgtctgcttgttcggaaccccactttatcatgtatcaattcatatttgtgcgtcttgtctatctagcaattcagttgctttctatcttgttcttgcttgttctcgattgcgtgcaggaatagggttgatctgcatcgacaagatcaacaacccatggagagctgtattgatcgctaaggcgcaacagaacgtcttgtacggttgtagtcggatcgtcaacgtttctcccaaatcgtagttatcacaactcaccgaaagatcgggccaacaacagccttgagtgtcgagaggaactcagggttcatcaggtggtatcagagctttcggtgctcgcgtctagttcgtttagtgtttcgtgttctggtcacgttttataccagagtcattgccgcctccgtgtctctgttatcgtcgggacctacgaaaacggaatcggcttgctgccatggttctatttttgtagttttcaaaagtttttatcggtcggttttggtgttgcatcaagggtttgttgtttacccaggcttagtgcttgtgctgtggttctgttttgcccttgaggaagaagaaggggaaaggaatatagaagatctgtttggattcggttgggtggaaggaaagaaaaaaaaaggaaagaacagaataggaaagaaaaagaagattagatcgggtggaaatccg

SEQ ID NO: 93512 - DNA, 413 bp, Oryza sativa
  Clone ID: PAT_MRT4530_9188C.1
ggatgtaaatttctttgttcattctttgtttgggaaaaggcccaccggttatagttctttgactcgattaaatgtgagaaactgttgccgcattttctatgttcaactaccttgtcagtggaaacataacacccgctttagtacaatacacttatcaacgattatacaaggtaaagaactacacaacgtgtggagatccttagggtactgacagcgaggaatgtcttacagacgattggacgatcgaacgaaatttagctgttaatagatcgtgccattcctttggatttattcacgcgtcaaaaaatctccgttcttgaattccctcttcaggggttttatcatacctgacttgggcacttagtgaaatagaatccagaatactctctatcctttccccagtcttgaagcct

SEQ ID NO: 93513 - DNA, 220 bp, Oryza sativa
  Clone ID: PAT_MRT4530_91890C.1
atggccgaggaaggtgacaagatgggcttttttccccggttgcgtggtcgcggcgcggcgttgccggtggccgcagcgcggctgcgctgggttttgctcccccgcgcactcctcacctcgctgggtcgtggcaacttggcgtcgcgcgtcgcgtggcgttggacgcggggagaagcagcggggattgggtggtcgggcacccgcaggcgcgcgtggcgcg

SEQ ID NO: 93514 - DNA, 135 bp, Oryza sativa
  Clone ID: PAT_MRT4530_91891C.1
ttttaattgcaatagatgcatatgatagacctgtatactaggcaagccagagaacaaacagttcgataccacaaatatgatcacacgtgtccactgagaacaccgctcgaacactcatagatgcacgcataggca

SEQ ID NO: 93515 - DNA, 307 bp, Oryza sativa
  Clone ID: PAT_MRT4530_91892C.1
cggacgcgtgggcggactcgtggccaaatcttaaattctcctgcgtctacaagctctggtactcaatgccagacatgtgaaaccgccgctaatgaggcaaggggctgctcaagggaggcacgaagaggcacaggatggtgctgcgcgacatcatgcagagaatcacgatacccgcgatcctgaagctggcgaggaggggcagcttgatacgcatatccagtctgatctactaggagacccgcggcgtgctcaagatcttcctagagaacgtcatacgagacgccgtcacactacaccgagcacgccc

SEQ ID NO: 93516 - DNA, 665 bp, Oryza sativa
  Clone ID: PAT_MRT4530_91893C.1
cccacgcgtccgtggaatgatcatcaagttaggaagtgctcaagctcgatgcatcccatggccacgtgacaatgtatgatgctattatttcatttgtctagcttatttacatgcaactaattttttaaaattacattgcagctaatgcatccaagtggtcaagctctacactctaaggtgtcgactattgcgagacataactcagctaaccaaggaaattcggtggcactaactgaggtgttcaagcacaatagcattgataatgcactgcaaagtgttgttggacacaagagagaggtgcatgatctaacaccaaagaagaatataggacgtgaagatacacattctagggcaaagaagattgggaaggccagacccgattcttcatatgctaacttcaccaatagccaactgttaacaacttcccggttctagctcaagtccaaatgcatggacaggttttggtgtaatccattctcaggttgtgtttttcctcattgcaaatacatgcgagcctcacaggatgacaggggcaagccactcagtagatcaatgatgtttattgtcttgtaaatcataaatataccattgattgtgatagcatatcttacaaacttaattaccattgaaaaaaaaagaaaaaaaaaaaaaaaaaacccgcggcc

SEQ ID NO: 93517 - DNA, 1926 bp, Oryza sativa
  Clone ID: PAT_MRT4530_91894C.1
gagtcgggagaactagaagtcagcatccgacgatgaccgacctcgtggttccatccactggcgtatccggccggtgccccccagcccgcgcacgcggcccgcgtcgcaggccgctgccgcaacccgtcgcatggactgcattaggaaactctctccagctccggcctagtccgtgccgaagatccaagaaatctggcgggggaggaggaggaactcgaagtacgtgacggcgccgtcaaggactaaatatgaccagctccaaggggagcacccgatgagaacgctcgatgttggccacagcatcgagtcaaacgccgccagcgagatatcgtgtctacaaaagagcaagctcgggtgttcggccaacaagaaggtcgaaaccgaggtcaaatgattgctggctagttccaggggaaggcggagttcggtggacagtcgaagtctcagtgagggggggccttagcttctgatcagtaccaactttgatgagacaagtgtaaagtcctcttacggtgctcaacggttggaacttgaattgtgagggtcttattcgatcaacgagtagttttttttgctatgtcaatcttgttctgtagattctagtaggaatagaagtataaacatggttggctcagtggttaatactgctgtgatctccggatgtttctacctgaaaaaatatgtgaaccttgaatgtaattaatatcatctaaaatcaatctacaaaacagaaagttaaagtttcatacgaccactccatgatgtactgaaagctggattagatacaaaagctatcttgaaaagctcgtgtctcgttctaagagttgtggtatgaaagttggatatctcatctcgtccaaaaagttggaaaaatggttgctctaggtaccattcagaggacagacaaaaacgctatttctgttgatggccaggcactaaatgattgtgttgacatccttgttaacattgtattcaatcagcacaccataatacctcgtgcatatggaatgatcagcaagttaggaagtgctcaagctcgatgcatcccatggccacgtgacaatctaatgcatccaagtggtcaagctctacactctaaggtgtcgactattgcgagacataactcagctaaccaaggaaattcggtggcactaactgaggtgttcaagcacaatagcattgataatgcactgcaaagtgttgttggacacaagagagaggtgcatgatctaacaccaaagaagaatataggacgtgaagatacacattctagggcaaagaagattgggaaggccagacccgattctccatatgctaacttcaccaatagccaactgttaacaacttcccggttctagctcaagtccaaatgcatggacaggttttggtgtaatccattctcaggttgtttttcctcattgcaaatacatgcgagcctcacaggatgacaggagcaagccactcagtagatcaatgatgtttattgtcttgtaaatcataaacataccattgattgtgatagcatatcttacaaacttaattaccattgagatgatttgtgaaccacttaatgtgcgattgaattggaattgggaattattgttctatattgtttctggagctctggttgtgttgtgttatgatatttcatgtttgcgagcctcacaggatgacaggggcaagccactcagtagatcaatgatgtttattgtcttgtaaatcataaatataccattgattgtgatagcatatcttacaacttaattaccattgagatgatttgtgaaccacttaatgtgcgattgaattggaattgggaattattgttctatattgtttttggagataaatgtgatgtgttatgttatttcctgttaaaacattcatatggtgggatgagccaaaaaaaaaaaaaaaaaaaaaaaa

SEQ ID NO: 93518 - DNA, 409 bp, Oryza sativa
  Clone ID: PAT_MRT4530_91895C.1
cttcttcttcttcttctatcttcttcggattgttgtaagttgcaattgttatcccgccaatgttcttgtgcagtttttgaaaattgtttcatcagctgaccaaattgttcattagtaaatttcaaagccaaagaaatcaaacagatagaagagttcgagaaaaaaaaaaaataaaaaaaaaaaaaaaaaaaaaaaaaaaataaaaaaaaaaaaaaaaaaaaaaaaaaaaaaaaaaaaaaaaaaaaacaacaaaaaaaaaaaaaaagaaaaaataaatatattgatggatgttattattcatttgggggggggggtgggaaatctttattatacgtatatattattgttcatgtacaatatttgaaaatttttgggttcgccgggggtttttttcgaaattctctttttt

SEQ ID NO: 93519 - DNA, 1069 bp, Oryza sativa
  Clone ID: PAT_MRT4530_91896C.1
tccatatctatctcttctctcatcttcttctctcctgcggatttgcaaattacacacttctgcaagctaaaaaatccagttttcttgctcaggctagtgcctggttgtatctacagctcagctcagaaagaaaggagtggtttttgaggagtggtttttgtctacacagctgctgcatatcatgcctccacttgccacaatgtcatcgccaggttcgcttcttctgttgacccccgctgtgtaccaggggattgggagaaatcgtggaggacaaagccaggaaggacaatctatctcgtcttcacgatctctcaagactaaactcagcgtttctgccagagcagtttcttcatgcgaagcatccatgagaataacatgttgcgcaaaccagacacagactgcacgacgcaaatctttctctggacctacctcaccgccatcagggtcagttaaagagaaagtgaggagtccaaagcttgacgatggaggcaccggcttcccgccattccggttcggtggaggaggaggaggtggaggtggaggcggcagcaactctgccggtggattcatcctgttcgtgatcgttttgcttcttgattacctgagggagtttgagaggaacctgcagaatggaacaaggaggggcagtgactatgacaatgggctcgctccccaatagttggtttgtttcataggacactttagcgacgatccgaaatgcaagtgggctgacccgtaaacccacttataaatcatttaagcgggtcgatccgtggctggccactggcccatttgcatccttatctgaaactccttttctggaaatgtgtcaagtgagaattgtgcctgagaaatggtaatggagtgtagcagccttctggaaagaaatggtaatggcatgtagaaagctgagactggtgtatcaaaggccaatgacaatagctacatgatatttgaagggccttgatgaggcaaatgagtgacaatggaccaggtgtttaaaaatgtgaattttttgttgagattgttgattggatatgttgcgagaagtgtttggaaatttcaatag

SEQ ID NO: 93520 - DNA, 307 bp, Oryza sativa
  Clone ID: PAT_MRT4530_91897C.1
gtggtgattcatttgccattcattgtaattaatttatgcagtaccaagcatttgtgattacagaagtgtgctctagccaacaaattcgtcagtcatttctcaaaaaaatattcagtgctaaatgaatttaaaagcacccatgcaaatacaactggcatatacaaattaccaagatgactgggttatgagtatggaaaatattcagaacaaaaaatttaatatatttggtggaactccacaatgtccaaaaatattacttgaagctaaaaccaaaaatatttgcatttcaccttccatcatatgggac

SEQ ID NO: 93521 - DNA, 606 bp, Oryza sativa
  Clone ID: PAT_MRT4530_91898C.1
atgtcatcgccaggttcgcttcttctgttgacccccgctgtgtaccaggggattgggagaaatcgtggaggacaaagccaggaaggacaatctatctcgtcttcacgatctctcaagactaaactcagcgtttctgccagagcagtttcttcatgcgaagcatccatgttttacacggtcaaaagcttcatagatcaatttattggttataatatactaattctcagaaatacatttatcagcatgatgcttctaaatttagaagtgcagacacgaagttctaaccagcaaaagagaataacatgttgcgcaaaccagacacagactgcacgacgcaaatctttctctggacctacctcaccgccatcagggtcagttaaagagaaagtgaggagtccaaagcttgacgatggaggcaccggcttcccgccattccggttcggtggaggaggaggaggtggaggtggaggcggcagcaactctgccggtggattcatcctgttcgtgatcgttttgcttcttgattacctgagggagtttgagaggaacctgcagaatggaacaaggaggggcagtgactatgacaatgggctcgctccccaatag

SEQ ID NO: 93522 - DNA, 417 bp, Oryza sativa
  Clone ID: PAT_MRT4530_91899C.1
gccatggcgcgcggcgacggtgcgaggcggcgagcggcggcgacgtgatggcggcgcgactaggtggcggcacagcggcgcggcggctaagcggcgacgctaggtgacgcgggagagagagaaagggaggaggggatgcctcaccgacaaggatcgacgacggcgagcggcgggagacggcggcgacggcgggacgtgctccgggatgaccaaaagaacacaacggggaaggttagagagtgagagagagaccgcagcgagctagggcgccagccgaaggcggcgaccgtggcgatgctcaccggcgcacgagggacggcgggttccagtggcggattcgcccgacggaggggtggacggggtggcgctcaagctcgcgaacccgacgacggcgacggcgggactcggcggcagctc

SEQ ID NO: 93523 - DNA, 210 bp, Oryza sativa
  Clone ID: PAT_MRT4530_9189C.1
cgcgcggcccacgctccgtcctgctagcattcactgtaagctgtaccagaaagactcacttttagcactcttctgtgtctgagtggctcttaacttctacttccagcaagcctggcacttctcttgctgacaatacttcgtagtagctcttgaaggctctgcgaaatgaagatgacacatgctcgcatgttcacctgcaacctacttgca

SEQ ID NO: 93524 - DNA, 132 bp, Oryza sativa
  Clone ID: PAT_MRT4530_918C.1
atgacttggcgagctccgtcacccggttctgaccatggccaagtgaggacagggaaggtggtcgtcggtgatggtgagatgatttaccctagaggtggtagctacccagtgagcgtcggcaccaaggtctag

SEQ ID NO: 93525 - DNA, 719 bp, Oryza sativa
  Clone ID: PAT_MRT4530_91900C.1
agcgtcggctggccaaacgttaagactggatcggaattccgaaaacacagtcgagggcaaacccttggtgaaaatatcagcaaactgcgatgtggtaggtacgtgtcgaacacgaacagccctgtggcgacacgatcacgaatgaagtaaagatcgatctcaacatgcttggtccgttgatgctataccaggttgatagagagatacacaacgctgacattgtcacaatagacaagagtagccttcctttgaggagtgtgaaactcatgaagaagttggcgaagccagcaggtctcggcaacagcattggcaacaaccctgtacttagcctcgcactggagcatgaaactgtgttctaacgctcggaggaccaggagatgaggttatcacctaagaacactgcatagcctgaggtagaccaccgcgggtctggacaaccggcccaattgacatcagattaagacaccaggtcaatagtgggacagcgatgaatatgaagactgtaatccagggttccatgaacataatgaatgatgcgcttgagagtagcaaggtgtggctcctgtgggtcatgcatgtgaagacagacctgctgaacatcatatgaaatgtccggtcgagtgaaggtgagatactagagagcacctgcaagactgtgaaggggatcctctagagtcgacctgcaggcatgcaagcttgagtattctatagtgtcacct

SEQ ID NO: 93526 - DNA, 200 bp, Oryza sativa
  unsure (1)..(200): unsure at all n locations
  Clone ID: PAT_MRT4530_91901C.1
agtcggacgccgtgggcggaccgccgtggggttcgaccttcgaaggggggccccgggtacccaatttcgcccttatagtgaagtcgtanttaacgncgccgcttcaacttggcccgtcgtttttaacaaacggtcgntgnactggggaaaaacccttgggcggttaacccaaactttaaattccgcctttgcaagcaaca

SEQ ID NO: 93527 - DNA, 1482 bp, Oryza sativa
  Clone ID: PAT_MRT4530_91902C.1
atgaggaggctggcggtggctgcggcggcgctgctcctcgtcgcatggcacttctccctgataacaatggcagcggcgcagctgtcaccgccacagccaccggacgaccaatacgacgacccgcccatgcctgggctcccggtgtcaccaccgtcgccggggtattccgattcgccggagccgccgctgccggattccccgccatcacaggagcctgacacgccggagccagcaccaccaacgccgccccagcagcagcagcagccgtggcagtctccattgccaccaaggagggagccggcgccgccgcggacggtggtgccgccgcaggagccgggctggtcttcagtgccgccaccgccggcgagggtgatcaactacaccaccaccgggtgtaccaccatgctggtgttcggtgactcgacggtggatcccggcaacaacaaccggctgcagacggcgatgaaggccaacttcttgccgtacggcgccgacttcctcggcggcaggcccaccggccggttcagcaacggccggctcatcacggacatactcggtacagacacaaatacacccattgccttgcatctccatttacacaagtatttcagagttgagcagatgtgctttgatttagaagtagggatatttgaggataagctttgtggttatgcagcggaaaaactaggtatagcgaggagtattccaggattccgcgacccaaggttgaggtcaggacagctcaggaggggtgtgagttttgcatcagcaggttccgggtatgacgaggccactgccagaagttcgaatgcactgtcatttcccaaccaaatagaggacctttggcgttacaaaaggaacctgcagaggttagttggacgaagaagagcagaagaactagtcaggagggctacattcgtcgtaagtgctggaacaacagatctgctttttcactatcttgcctcaaaccagtcagcagcagagagcggcccacagtacgaaaaccagctgatatcacgcgttgctaactacacccaggtgatggcagcacttggaggaaggagatttgtctttgttggagtgcccccaattgggtgtttacctattgctagaacattgctaggcacaggtacaaccagatgccatgaaaacatgaacttgctggcaacctcatttaatgagaggctagttgaagtggtgcgtcttctaaagaatcaaccaaatatcagggctacatttgttgatacttatacaaccatcggcatggcaacaataagccccaataactatggcctgacagaaacctcaagaggttgttgtggaacaggagttattgaagttgggcaaacatgcagaggccgaagagcatgcacacatcccagcaagtacatatactgggatgctgcccaccacacggagagaatgaaccaaattatcacagaggaagtgataatgaactcaattggagaaatttatgcctag

SEQ ID NO: 93528 - DNA, 139 bp, Oryza sativa
  Clone ID: PAT_MRT4530_91903C.1
aactatgaggggttttatttatatcaagatatactgactcagggagtcattcagaggtgaccttaaggattcaaggttcatgtgctattcataaaaatgatgtgtgtgtattgatgtgaacattttacgttttacctat

SEQ ID NO: 93529 - DNA, 544 bp, Oryza sativa
  Clone ID: PAT_MRT4530_91904C.1
cccggatgtggtttatatatggtgttggacttcgatggaatccattaataccccattcttttggtggggattattctatctccatgttgagatagcttgcctgagcacagatttgctaaatttctggcgccataaaattcccttgattacagtcggtttgcatgtctatgcgctatgccacacaaccgcacaggcctgaggcctcccaactgtgcttccgtgaggttgaagattatttccacacatacatcatgatgagagatgattatatattaattacatatatgccatttcgagacttacatatgtaattttgagacttaccttgtaaatatactaaaattacatatgtatttttgagacttacatatgtaagtttgtgacttactttgtaaatataataaatttacatatgtaatttgtaaacttatgatgtaaatacacccgactattttttagtgaaaaatatggcgccataaatatagctactccattttttttagctaatagaagatggatggtttttttcaaaaaaaaaaaaaaa

SEQ ID NO: 93530 - DNA, 198 bp, Oryza sativa
  Clone ID: PAT_MRT4530_91905C.1
atggtgcaggctagcccgttctgcggcaaacctaatgaggatgcaagtgctcatctgcagcaattcctggaaatgtgtagctcgtatattgtcaaaggagtcagcccagatgcaatcaggctccgactgttcccgttctcactcctcgggagagcaaaacaatggttctacgccaactgtgcaatggtggatacctag

SEQ ID NO: 93531 - DNA, 220 bp, Oryza sativa
  Clone ID: PAT_MRT4530_91906C.1
tttttttttttttttttttttttttttttatgacaaatgggaagcggcttaatcttaagacaacaaaaatggtatcataacatttcccacaaaagagaaattctaacatgcataaacaaattaagggggcgtacatttaaaaaaacaaaaaattggactcataccttccccaaaaaaaggaaaataagagacgctaaatcttcttgtggggggggcctct

SEQ ID NO: 93532 - DNA, 422 bp, Oryza sativa
  Clone ID: PAT_MRT4530_91907C.1
aggtgataaaggtgccggttcttgtggtttgggcgggctgagggggggggggcgtgggcgggaaagacactagaggtagaggtggaggccacgaccgcgggggtcatggtggtggcggtggcagactcgctggccatggtcacggtggtggcggtatccctggtggtggtcaaagtggtggtattggtgcccctggtggtgggtgcggaggggctggccatggtggaggcagtgctgggggcggtcgtggtggtggagcaggaggcagccatcgtggaggtggtggcgcccgtggtggaggcctctctggacgcggccatggcagcggtggtgctgggggtagtagtggaggtggccgtagatctctacctggccatgggcatggtggtcaagggatgaaccaagacggagatgtctcttga

SEQ ID NO: 93533 - DNA, 244 bp, Oryza sativa
  Clone ID: PAT_MRT4530_91908C.1
cggacaaacacgccatagtactggcagctcttcagactatctcaaggtctgaccatctaggcgatcgacgcagatgcagagctacagtataggcgagcgtactccggcgactggatcaggtgatctagcggcgtacgactagaatccacgggtaaaatggggtggatggtgatctcggagaaggagacggtggcgtcttcgtggtcgtatcacgaggtggtgaaactgttgtggaggcaccacg

SEQ ID NO: 93534 - DNA, 171 bp, Oryza sativa
  Clone ID: PAT_MRT4530_91909C.1
atgtcaaacaagcttgacctcctcttccttcttgatgaagagccaacagtagttcaacaaagaggtaaaaccaactcacacaccgagggttacacccactggatcattccagctacggagtacatgacaagctcagccaaaaaacacactggaactgcagggaccagcact

SEQ ID NO: 93535 - DNA, 174 bp, Oryza sativa
  Clone ID: PAT_MRT4530_9190C.1
atgggtcataccaacctccactccgccggaagcaggtgcaacgtgggagcacggttgtttgctgatgacgtgaccggcgtcagaccagtcacaaaccgggacgagtgcctagaggctctcatcattccgacgggacggagcgaggcgtgcgacaggccgcctgttgccacctaa

SEQ ID NO: 93536 - DNA, 339 bp, Oryza sativa
  Clone ID: PAT_MRT4530_91910C.1
atgaggcttacgacaagaaaaagaaaagagtcggctcaatggttcgagttgatgcttcgattcatcaagccgtcctcccgtggagccatcgtgtcgtcctcgccgtcgtggcggtcccgagctcgggggccatcagatctggcccctgccgtcccacacctcgtccgccacctcaaggaagagaagaggagaggagaggagaggaaagacctcgccggatctcctcgcctctgctgtgttgacctcccgccgaccggatccggtggccatgggaaggaagaggcattagtcgccccgcaggggaatagggagaggtgtcagccgccacgcgggtgttga

SEQ ID NO: 93537 - DNA, 680 bp, Oryza sativa
  Clone ID: PAT_MRT4530_91911C.1
accatggctactacggatacaaccattgctcacataatgcgtgaacaagaagacatcaagatcaaggtctccaagtgctggaatccgattcggccacctgctgcactgttgatttcaaacggccgccgaatctgcatacgacctccgtttttggcccgtgagtacttgatggaaagcctacggagtcctctttccaatggatccagcctcatcgccaaattccatcctagtcatccgcggatgaacaaacaaggtgctgcgtcacctgtcatgggcctttgggcttgtaacttcgtttgggaccctggcccaagtggggcccaagtggggtgcgccccaaccaggtggagcacgaccctagagtgcccttggtcgtcctcctatctctttaaatagttaggataagggtgatcttgcaccggcaagatcaacaacccacggagaggtgtatcgatcgctaaggcgcaacgcaacggatttttatcacaactcaccgaaagatcgggccaacaacagccttgagtgtcgagatgaactcagggttcatcaggtatgtttcaaagcatgaataatcatgcatggtaagctgaaacactcgaaacgttgcaacttgcaagctgtgcatatgaacacgcgctaaatggacgcaaatccttgtaggtgacgatggcggggagcgg

SEQ ID NO: 93538 - DNA, 2097 bp, Oryza sativa
  Clone ID: PAT_MRT4530_91912C.1
atgatgtaacacgccaaaactttattcattgtatctaaacaccccctgtgtttctttttatttcgccggtaaggagcgaccccaccggacaggcccaagcttgtgattcaggcgagcgtcagaatcaggcagcgagctgtatggacagtgtgagccccatggctactacggatacaaccgttgctcacattagggatgaacaacaagatatcaagttcaagtcctccaagtgctagaatccgattcggccccctgctacactactgacttcaaacggccgccgaatctgcatacgacctccgttttcggcccgtgaatatttgatggaaagctctcggagtcctcttttcaaaggatctacctcattgccaaattccttctctgtcatgcgcaattgaaggaagaatgtgttacgtctcctgtaatgggcctatgggcttgtaacttcgtctgggaccctggccctagtggggcccatgtggggtgcgccccaagcaggtggaggacgacctaaggtcctcccatatccataaatagcttggaataaggttgatctacactggcaagatctacaacacacggagaggtgtatcgataactaaggcgcaacgcaacgtcttttagcatcaacgcaccgaaagatcgggccaaacaacagccttgagtgtcgagaggaactcagggttcatcaagtggtatcagagctttcattgctcggcgatagtccgtttagagtttcgagttctggtcacgtttagtaccactgtcgtcgcatgcttgtatggatgaaaacggtcgccggcgatggcaactggcgacacaggaggcggcgacggacggcgcggaaggacatgcttgattgtcaaagatatacatctctttcttatttgatacaacttgcttgcaatgctgaaagtcaaatagaggaggacatgaaaaagcaatacgctatgtttctgccttctattactaaccatttgcaggaagtgcataatgatagaaaagaggacaaaggcatggatgaaccgccaatcccattgttcacactcaaagtcgaggcacctccaccatctgaagagggcatcaaaggtaaacttaatggtgctaaaattaatcaaggtgagtgtgttgttaataaattgaatttatccacttttcatgctaaagtggagcaaccattagtggaaccaactgctgagattcctttgtcacaaactgatttgtttgctgttccttgtgataaagaagtgttgtgtgataatgcttcacttatatcaatgccacaactagtgaacgaacatgctatttctcatactagttctttatgtgatgattttaagcatgttattcacattgctaatgaagtagaggaacgtgaattgacatcttctttaaatactttgggctatattcagtgtgatgatttttgtgagctcgatagtttgaaggcgaaattatttgctaaatctgatttgccatgaccaactaatgctatttttcatatctttggtgaatataatgatagagaaatatatttggtgcatagagtttatatatgttcagatttagaaagacatgttatttcttatcatattacttcgagtttgtcttgttttgtttggatgaaacaggttgttttaaatcgaccatgagatgagcaccatatggaaaaatcgaggacggttttctatgaagaaggggaggatgatgtgatcatggctactatggatacaaccattgcttacatcatggatgaacaacaagatatcaagttcaagccctccaagtgctggaatccgatttgaccccctgctgcacaactggcttcaaacggccaccgaatctacatacgacctccgttttcagcccatgagtactcgatggaaagctttcggagtcttctttccaaacgatccacctcatcaccaaattctttgtcagtcatgtgcaattgaaggaacaatgtgttgcgtctcttgtaatacctatgggcttgtaacttcgtctgggaacctggcccaagtggggcccatgtggggtgcgcctcaaccaggtagaggacgacctagggtcctgcttgaagtgcttcctcacgtc

SEQ ID NO: 93539 - DNA, 666 bp, Oryza sativa
  Clone ID: PAT_MRT4530_91913C.1
ctaggctctccatccaagcatgatgtgatcatggctaatatagatataaccattgcacacatcatggatgaacaagaagatatcaagatcaagtcctcaaagtgctggaatccgattcggccacccgctacactgctaacatcaaacggccgccgaatctgcatacgacctccgttttcggcccgtgagtacttgatggaaagctctcgaagccctctttccaatggatccagcctcatcaccaaattccatgtcatttggccgcaaccacataagcaaggtgctgcgtcatttgtcttgagcctctgggcttgtaactttgtttggaaccccggcctacggaaccccaacttatcatttgtattcaattctcatctgcaattcagattgcttttatcttgttcttgcttgtttcttcgatttggttgtaggaataaggttgatctgcaccggcaagatcaacaatctacggagaggtgtatcgatcgctaaggcgcaacacaacaacgtctcgtacggttgtagtcgggtcgtcaacgtttttcccaaatcgtagttatctacaactcaccgaaagatcgggccaacaacaaccttcagtgtctcgagtgaaactcaggcttcatcaaaataatgcaattttatcaacaatccaataaatataga

SEQ ID NO: 93540 - DNA, 531 bp, Oryza sativa
  Clone ID: PAT_MRT4530_91914C.1
atgctggtgtctgctgagggtggatccggcagcggcggctccctctgccgcctctcttctcccttcggcggcggggaagtgaagtttcgtgatgaaaaaatcgcccttcaactctaccatcgctgccagctatcgtcgtcacccctcccggggctagggtggcggatccgctaccttcaagctcagtcgtcattgcccaccattgtggtcgcccctaccgtggtggagagcggtgccgtcggatccctcgttctggtcgctccagccggatcctacagccaagggcactgccaccacttcctgagcccgccactgcctctcccggcggcctctacactagatcccccgtcaccgagcttcccgccaatcctacccaatgctggggagcctgccaccatgcttcgtcgctgccacacgccatcgtcacgaggcaagcgtggcagatccagccgtcaaggatccgtcaagggcccggtggatgcagatccgcctgccatcgagccaccggccaagccctccacctgtcgctaa

SEQ ID NO: 93541 - DNA, 492 bp, Oryza sativa
  Clone ID: PAT_MRT4530_91915C.1
atggctaccacagatgcaaccattgctcacatcatggatgaacaagatgacatcaaggtcaaggcctccaagtgctggaatccgattcggccacctgatgcattgctgatttcaaacggccgccaaatctccatacaagctctgttttcggcccgtgagtacttgatggaaagctctcggaatcctctttccaacggatccagccttattgcgaaattccatcttgggcctttgggcttgaataaggttgatttgcaccggcaaaatcaacaatccacggagagttatcatcaattcaccgaaagatcgggccaaacaactgccttgagtgtcgagtggaactcagggttcatcaggtggtatcagagttttcgttgctcgctgtctatggtgatgtttgaatctcctgaagatgaagatgaagatgaagataaaattaagtgtttcacgcaaaatgaagtgcgtgtcaccgcgcataccgtttatgcatga

SEQ ID NO: 93542 - DNA, 654 bp, Oryza sativa
  Clone ID: PAT_MRT4530_91916C.1
atggatggatacggcaccacggagttcggatttgcaacaagcacggccgaatgcatacggcagaccctagatgcaactcagcaaccccaagaccgaccgacaaaaacttctgaaaactacaaaaatggaaccgtggcagttattttgaatggactatgtgaagaacaccaaatggaaaagccgaggacggttttccgtgaagaaggggaggatgatgtgaccatggttactacggatacatccgttgctcacatcatggatgaacaacaagatatcaagttcgagtcctccaagtgccagaatccaattcggccacctgctacactgctgacttcaaacggccgccgaatctgcatacgacctccgttttcggcccatgagtacttgatggaaagctctcggagtcctctttccaatggatccaacctcattgccaaattccatctcagtcggcagaaactgaagaaacaagttgctgtgacacctgtaatgggcctatgggcttgtaacttcgtctgggaccccggcccaagaatagggttgatctgcaccggcaagatcaacaacccacggagaggtgtatcgatcgctaaggcgcaacacaacgtctcgtacggttgtagtcagatcgtcaatgtttctcccaaatcgtag

SEQ ID NO: 93543 - DNA, 294 bp, Oryza sativa
  Clone ID: PAT_MRT4530_91917C.1
ccggtgagctccaaggcaaagccttgttcccctcgcgccactgcctctctctctcttccccaattctggccaacgccgtccgttgcggcagcgccacctccacgccatcacagagccccgtgccgcgccaccgggttagcctccatctcctcttgctgacgccaacgctcgtcgcggcagccatgcgccgtcaccgacgaacgccgccgcgccgccgccatggcagagcacggccagggagccatggctactctgcctcctcctccttctctcacatctggttgcagccggacc

SEQ ID NO: 93544 - DNA, 1005 bp, Oryza sativa
  Clone ID: PAT_MRT4530_91918C.1
acaaaagttggccgcgccaatcacgaagtgagttttggctattaacgcacccaatatactccaatatcacatctaaaacaaggtgacaaaaccgtgcaggagtactttcataactttaaaatttgtatcacttttagtggtttaaaagaaagcaatgagaacacaatgactagattttttagagggcttaattccgatattcaagctaggcttattaatgtgacatataatcatataggccacttgttcatgcttgcttgcagtgttgagagcaatattttaaagaacccaagggagaaacaagctatgcttgtgcctcctattactgacattttgcagggagctcagaacattcaccatgaggagaagagcaatatgatcgagatgccatctccatcgctcacgaagacagaagagaagactgatgcacctacattatctgaagtggcataaaaggtaaacttaatggtgctgcaattaatcaagaagagcaaccattagtggaaccaattgctgagatgcctttatcacaagttgatttacttgctgttccttgtgataaagaagagttgtgtgataatgcttcacttatatccatgccacaactggtgaaagaagatgctatttctattgtttctttgtgtgttgattttaagcatgttgttcacattgctaatgaaatagaggaatgtgaattgctatcttctttaaatactttgggtatgttcggtttgatgatttttgtgagcttgaaaatttgaaggagaaattatttgctaaatctaatttgccatgtccaactaatgctatttttcatatctttggtgaatataatgatgttggaatatatttggtgcatagagtttacatatgttcggatttagaaacctcttgtacatgtggataaaacatacaagctagagaggaatgttaatgctaaccaaattatctcgagtttgccttgttttgattggaagaaacaggttgttttaaatggactacgtg

SEQ ID NO: 93545 - DNA, 1905 bp, Oryza sativa
  Clone ID: PAT_MRT4530_91919C.1
atggctactacggatacaaccattgctcacatcatggatgaacaaggagatatcaagatcaagtcctccaagtgctggaatctgattcggccacctactacactgctgacttcaaatggccaccgaatctgcatacgacctctgttttcggcccgaataaggttgatctgcaccggcaagatcaacaacccacggagaggtgtatcgatcgctaagggttacacaaagagtttggagctgttcgtgctcaatgtggacattttcaccttcgacaacacatggcaagtgaccaacatgacgcaaataagtggtttacaagaatctaatgagaacacaatgactagattttttagagggcttaattccaatattcaggctgggcttgttaatgtgacatataatcaaataggccaattgttcatgcttgcttgcaatgttgagcgcaaaattttggagaacccaacggagcaacaagctatgcttgtgcctcctatcactgatattttgcaggaagttcagaacagtcctcaaaatgagaagaacgatatgtttgagatgtcacttccatcactcgcgaatgaggagaaggctgatgcacctacattatctgaagagggcataaaaggtaaattaaatggtgtagaaattactcaaggtgagtgtgcttctgatgaattacatttttccacttttcatgccagagaagagcaaccattagtgaaaccaattgctgagatgcctttgtcacaagttgatttacttgctgttccttgtgataaagaagagttgtgtgataatgcttcacttatatccatgccacaactggtgaatggacatgctatttctagtatttctttgtgtgctgattttaagcatgttgttcacattgctaatgaagtagaggaacgtgaattgctatcttctttaaatactttgggctatgttcagcttgatgatttttgtgagcttgataatttggaggagaaattatttgctaagtctgatttgccatgtccaactaatgctatttttcatatatttggcgaatatgatgatagaggaatacgtttggtgcatagagtttatatatgttcggatttagaacctcctgtacatgtggataaaacttgcaagctagagaggcatccgactgtaacgccgctgcccaagtcgccaccgccgccgcagccgaccgtaggatggcgagaagcaaggcgagatgggggggagcaggatgacggggaggaaggggtggggcgatggtggcatggggcggagatgttgacgacagcggggccgacggggccgggcggtgatcgtgctgctgcgctggataaggaggtggcggcggcgacagctcgaggtaaggggatttgcgtcggcgttgctactcgccgcgggtgggaggaggctccggcttgccgtcctcccgtctcgttgtcctacctttgggtcggcgatcaaggtgacgatggggtcatcttcctcgagccgggaaagactgtggcagcgacgaggggagaggcggatgggaggagatggtggcgagctagctgctcggggggcgtcgttgctagccctgctcggtttggggcagtgatgctcgctagtcctaccgccgccaacaggtggttccttctccgacctgctcgccttcctcttcctcttgccttgcctgcagcgcacgctcctcggcgccgtcaacctcgtctatgtcatcgcgtccctcgtcgtcctcgtccgtccccgcggcggcggtggcgacactggggatggtcccaaatgggaggcgctgctgccaaagccttggtcgtcgggaaggcctttcctggtcgtggtcacgctcggggcatcgggatgtttgtgtttggccaaccaaacaggccgactacatttggccagtga

SEQ ID NO: 93546 - DNA, 390 bp, Oryza sativa
  Clone ID: PAT_MRT4530_9191C.1
atgccagatccggcgtccccaggtggggggacgccagatctgatcggccccaacctcgtggggtgccatatccagcctcctcgaggtcaggaggtcggggggacactggatttgaccgcccccaacaccgtagtggctggatccggtattggtcatgtcatctctcccacccacgagcacccccgtccctccgcctctacctcaagctctggctgccacgatcatcgtctcctttgcccccaagagccagtggacgcctctccatcctcgagctctggctaccgcctcttccaccccaagctccacctgccccctccaagcttgttgttcaacttgcaaaagaccacgacggatggtggtagcggtggaggaggaggtcctggcggctag

SEQ ID NO: 93547 - DNA, 291 bp, Oryza sativa
  Clone ID: PAT_MRT4530_91920C.1
atggggctcagtggcaagtggcagaagaacaaaaggccatatgagctagctgatcacaagaggcacctcacaatcttttcacagggtgcatgggggatcctcctccttggatggtgccgcaggggagaggagccggtgtggcccgctgcagcggggcaggacggtggcgtggcccgcggccgcacgctcgccggcctccccatccctctcgtcagcctcccagcctccatctccgcacatgttcgccggcctccctacccaatggctgccaccccccccttatcccgctga

SEQ ID NO: 93548 - DNA, 1039 bp, Oryza sativa
  Clone ID: PAT_MRT4530_91921C.1
gggttccgaccgtaggtgggattgggtcggtactcttgtctatggctaggatgggttggaaactatgtcacgtcttccttccgtataccttacacttggaaagacctgaaacgatattttagagatgtttatgttcccatgtattatgctgatattctgctcaacaaactgcagtgtttaaaacaagataccaaaagtgttacttcatactatcatgatatgcattcttgtttattacgttgtggcttagatgaatgtgaagaagctacataattgaggtttttacgtggacttaacaaaaaaattcaggacatgcttgcttgtgaaaagtatagatctctttctcatttgttacaacttgcttgcaatgctgaaagtaaaatagagtaggatatgaaaaagaaacacgctatgtctttgcctccaatcactaaccatttgcaggaagtgcgtaatcatgaaaaggaggagagagacatgaaagagccaccaattccattgttcacacttaagttcgagacaccaccatcatctgaagaggacatcaaaggtaaagtaaatggtactgaaattaatcaaggtgagcaaccgttagtggaaccaaatgttggaattcctttgtcacaagttgatttactcgctgttccttgtgataaagaagagttgtgtgataatgcttcacttatatccatgccacaactagtgaatgaacatgctattcctagtgtttctttgtgtgctgattttaagcatgctgttcacattcctaatgaagttgaggaacgtaaattgctatcttctttaaatactttgggctatgttcagtttgatgatttttgtgcgctcgataatttgaaggagaaattatttgctaagtctgatttgccatatccaaccaatgttatatttcacatttttggcgaatataatgatcttggaatatattttgtgcatagagtttacatctgctcggatttagaacttactgtacatgtggataaaacatacaagctagagagaaatgttattgctaaccaaa

SEQ ID NO: 93549 - DNA, 1414 bp, Oryza sativa
  Clone ID: PAT_MRT4530_91922C.1
atggctactacggatacatccgttgctcacatcatggatgaacaacaagatatcaagttcgagtcctgcaagtgccggaatcctattcggccacctgctacactgctgacttcaaacggccaccgaatctgcatacgacctccgttttcggcccgaatagggttgatctgcaccggcaagatcaacaacccacggagagggatacgcaacataattggggatagctgtgctcaacatcgacatcttcgtcgagacatgaggagggatcaacatgaccattatgaggtaagtgatgatgttctaggtaagatcaaatctgcactgccttatttcgagggaaactatgatcctcgtgcttacattaattgggagctagcggttgatagtgaatttcaaaagcatgtcttgtctgagaaacaaaaggttatgtgtgcctctagtgttttagttaaacatgcttctaatgattagaaacatctttgtaggcataacaaaataccacaatcttggaaagatctgaaacgatattttagagatgtttatgttcccatgtattatgctgatattctgctcaacaaactgcaatgtttaaaacaagataccataactgttacttcatactatcatgatatgcaagcttgtttattacgttgtggtttagatgaatgcgaagaagctaaagaattgaggtttttacgtgggcttaacaaggaaattcaggacatgcttgattgtcaaagatatacatctctttctcatttgttataacttgcttgcaatgctgaaagtaaaatagagtaggacatgaagaagcaacatgctatgtttttgtcttctattactaatcatttgcaggaagtgcataatcatgaaaaggaggagagagacatgaaagagccgccaatcccattgttcacactcaaagtcgaggcacctccatcatctgaagaggacatcaaaggtaaagtaaatggtactgaaattaatcaaggtgagcaaccgttagtggaaccaaatgctggaatttctttgtcacaagttgatttactcgctgttccttatgataaagaagagttgtgtgataatgcttcacttatatccatgacacaactagtgaatgaacatgctatttctagtatttctttgtgtgctgattttaagcatgctgttcacattgctaatgaagttgaggaacgtaaattgctatcttctttaaatactttgggctatgttcagtttgatgatttttgtgagctcgataatttgaaggagaaattatttgctaagtctgatttgccatgtccaactaatgctatttttcatatctttagcaaatataatgatagaggaatatatttggtgcatagagttttcatttgttcggatttagagaaacatgttattgctaaccggg

SEQ ID NO: 93550 - DNA, 1324 bp, Oryza sativa
  Clone ID: PAT_MRT4530_91923C.1
atgcctacgacggatacaaccattgatcatgtcatatacccacaggcagagatggagttgaagtcccccgcgttctggaatccaattcggccacctaagatagtgctgaattcaaacggtcgccaaatctccatatggcctccgttttgggcccaattgaagaaacaaagggctgcattgtctgtaatgggactatgggccagtaacttcgtctgggaccccagcccaagaataaggttgatttgcacaggcaagatcaacaacccacggagaggtgtatcgatcgctaaggcgcaacacaacaacatctagtacggttgtagtcgggtcgtcaacgtttctatcaaatctcgtcgtcgcctccatgtctttggtgtcgtcgggacctacgaaaatggaatcggcttgctgccacggttctatttttgtagttttcagaagtttctgaggttatacagcaagtgtttgccaaggcatcgatacatccaaactccattggggtgcttggttgagtcggtgtacatcaccattccgcttgctttggaagttcagaacagtccccaaaataagaagaacaatatgttagatatgtcacttccatcactcgcaaatgaggagaaggctgatgcacctacattatcttaagagggcataaaaggtaaattaaatggtgcagaaattactcaaggtgagtaatttccatgctgacctagagcaaactttagtggaacctacttctgaattgcctttgtcacaagttgatttgcattctgttccttgtgataaagaagagttgtgcgatagtacttcacttatataccattccacaactagtgaatgaacatgctacttttaatcttgattctccatgtactgaattaagcatgttattcacacgtccaacgagaatgatgaacttcaattgcaatcttctttaaatacattgggctatattatgtttgatgattcttgtgagctcaattgtttgaaggacaaaatatttgctaattctgatttgccatgtcctcgtaatgttatttttcacatctttggcaaatataatggtagaggaatttatttggtgcacaaagtttacatttgttcagatatgcaaccctctattgttgtggcaagaaaatgcaaactggagactagtgttaggaccactgatgttacttcaagtttgttttgctttttttccaaagacgcagcgctgtgtgaggatatgctacgtgaattaccaaagttaaaaccgaggatggttttccgtgaagaaggggaggaggatgtgaccatgcctacgatggatacaaccattgatcat

SEQ ID NO: 93551 - DNA, 438 bp, Oryza sativa
  Clone ID: PAT_MRT4530_91924C.1
gcatcaaagataagaggattaattaatttgcatgctcagatgtgttcacttggatagagacatgcgtgcatgggtgcatgctatagcttgagatcgaccaaacttcttcttcttcttcttcttaatttagctactctcttcttatttcttgatctgtttcttcaacactaccattattgtattggtccagtagtgctgagttaagcctcctcatgatctcatccactgtggaattgaatccctcttccaccttagcggtgatggtgatgatgacggtggaggccgggaatggcatgacgctggtgtgggtgatgcccagccggagctcctccacctccgacagcaacctcaccagcaaaccccgcgagttcccgcactgcacccgcaccagcacgctcctctcccacacccgcacctcgatctccggcacccgccctt

SEQ ID NO: 93552 - DNA, 643 bp, Oryza sativa
  Clone ID: PAT_MRT4530_91925C.1
cacgttttaaggctattccaagtcactcgaggagacggtctacatttgagcagtatgttcggacacgtgctgacgaggagcggaaagagaaaagagctgctcagagagctgcagtggaggcgtataaacagttactagaagaagcatccgaggacatcaactccaataaggattacaaggaattcaaaagaaaatggggcactgatccaaggtttgaagccttggaccgaaaagaaagggatgctcttttcaacgagaaggtgaaatcgattgaagagaaagttcaatcagtgcgcaatgctgtgatagctgagttcaaatcaatgcttcgagaaagtaaagacataacctctactagccgttggaccaaagtgaaagaaaatttccggagcgatgcaaggtacaaagccatgaagcacgaagaaagagaggttgcttttaatgagtacatagcagaactaaaatccgctgaaaaggaagcagagcaagctgccaaggccaaactggatgaacaagccaagttaaaggagagggagcgcgagatgcggaaaaggaaagaaagggaagaacaggaaatggagagagtaaaattgaagatccgaagaaaagagccgtgtcttcatatcaagctttacttgttgaa

SEQ ID NO: 93553 - DNA, 3542 bp, Oryza sativa
  Clone ID: PAT_MRT4530_91926C.1
atggcgacgccggcgacggccgcctccgacgcgaccaacccggaggcggcggaagtgccgtccgctgccccggcgtcggaatcggaaggaccgttcgattccggcgtcgtcgcggcggcaacgacaccggcggtggtggatagtgcggtggagggagacgccccggccgctcccgctcctacctccggctccggtcctgcggcgccgtctatgccggcgaatccggcgtctcctgcaactccagggcccccgcggccgcagttcgccgggtcgcccgcttacgcgagccccccggcgccggcgttctcgtacaacgttcttccgaggccgtcaccccggccgcaggtgggcagtggtgcggcccagcagcagctagcttcccctccgcagaagttacatggctctttaatgtctcagcataatctggtacttcctccatttcataatgccatgatggctccttcagtggctgctgcagctcttcagcctcctgtcccagggcaatattttgggaacaggccgtctttttcatataatgtagtctcgcatgctaatgctggcttgcctactggtcagcagtttcaacttgacaccggcacaaaccatgctgtccaagtttcacggtttgttccaccatcatccttgcaacctccagctcctatgaatttagctcgcccaagttcagcatttccaggagcaggagctatgccaccaaatcctcctggatctattcgcttgccatttccaggtccacccagaccatccatcaatacttttgttgcaagcccacaacaggcacagccccaggcatctcagttaccttcaaacagtgtatatgcttcgaccaactttcttttatatgcgtgggggagctcagatgttagcacttccaggtctgatactcgaagtgtcccagaggctagtccccagaccatgcagttgtcgacaggcccaccatcaacaagtactgctggaagtccttcaatcactgttcagatgccaacaaatccatcacttccaactcgcccggaggtttttggggccattggtgcttctgtacctggacaaccttccacaatcttgtctgctccaccaagcctccttgggagacctatgactccatctgcttctccttttccccaaacatcgcagtctccaactgcttttcaacagcctggtcagcaacagttgtacccctcctatccttcagcacatggggttcaacctcagcctctatggggatatcccccacagcctactggttttcagcaaccccccttccaatcatacccatctggtcttctagggcctcttggtaggccgatggttgggagttcttctgtgactgcatacttgccaagcatacaaccacccggtgtctcaacaactgacagggattccaaggagctatcatcagcaaatcctggatctgagcagcccactcaacagggaagccaaaacagcgatcagctcgaggacaaaagaactactgccattcaggattcagattcatggtctgcacacaagacagaggctggtgttgtatattattacaatgccttgactggagaatcaacttatcaaaaaccacctggttataaaggggagcctgagaaggtcgcagcccagccagttccagtttcttgggacaaactggctggcactgactggagcatagtaacgacaagtgatggaaagaaatattactatgataataagctaaaggttagcagctggcagcttccaccagaggtggctgagctcatcaagaatgccgagtctggtccattgaaaggaagttcaacttcgctgcaagatgctggcacgatagggaataaagaggaaataagtattgatattgatactcctgctgtacagacaggtggccgtgattcgttgccacttcgacaaacagttgcccctgcatcgtcttctgctttggatttaataaagaagaaattgcaggatgctggcgcttccagtgtgccttcacctcttgctactccatctagtgcatccgagctgaatgggtctaaaacaactgatgctgcacctatgggacatcaagtctcaattagcggcgagaaatcaaaagataacagtggtgatggtaatatgtcagattcctcttcaaattcagatgatgaggaacatggcccaagtgaagaggagtgtactcgtcagtttaaggtggagatgttaaaggaaagaggtgtattgccattttcaaagtgggaaaaggaactcccaaaaatagtgtttgatccacgttttaaggctattccaagtcactcgaggagacggtctacatttgagcagtatgttcggacacgtgctgacgaggagcggaaagagaaaagagctgctcagagagctgcagtggaggcgtataaacagttactagaagaagcatccgagggtcataccatcttaatacataaaatgcaggacatcaactccaataaggattacaaggaattcaaaagaaaatggggcactgatccaaggtttgaagccttggaccgaaaagaaagggatgctcttttcaacgagcaggtgaaatcgattgaagagaaagttcaatcagtgcgcaatgctgtgatagctgagttcaaatcaatgcttcgagaaagtaaagacataacctctactagccgttggaccaaagtgaaagaaaatttccggagcgatgcaaggtacaaagccatgaagcacgaagaaagagaggttgcttttaatgagtacatagcagaactaaaatccgctgaaaaggaagcagagcaagctgccaaggccaaactggatgaacaagccaagttaaaggagagggagcgcgagatgcggaaaaggaaagaaagggaagaacaggaaatggagagagtaaaattgaagatccgaagaaaagaggccgtgtcttcatatcaagctttacttgttgaaatcataaaagatcccaaggcatcatggacagaatccaaaccaagacttgaaaaggatccacaaggccgtgcagtaaatcctgatttaggtaaaggtgatgcagaaaagttatttcgtgaccatgtcaaggacctgtatgagcgatgtgttcgggatttccgtgcgctcctatctgaggtgataactccagagatagctgctcgaacaacagatgaaggaaagactgcaattaactcctggaccgaagcaaaaggtcttctaagatctgatcctaggtacaacaaactggcaagtaaagaccgggagtctatttggcggcgctatgcggacgacatgaagacaaaacttaaacagtcagatatgaaggagagatcagatacagatggaaagcagcgtaggtcctctgatccgccaaggcggagatagcttttagaaatgcccacctgtaattcgctactcaacattattgttaacagtagttcagattctgtttacacttgtaacaatgagggcgtcaaattaactggaaattttgaagcatccatgttctgtgagttttttggccattcaattctatgagccgtgcatccagattgcagtac

SEQ ID NO: 93554 - DNA, 429 bp, Oryza sativa
  Clone ID: PAT_MRT4530_91927C.1
atggagacacagtcatcctggttgagcatttgtgcaatctacaacgaatgtctctggatatttggccctgtggcccgcgatgaattttcccggtcgtcggcgacagcgacggcgagcgaccaccatgcatgcgcccgctcgaggaaacaggacacgggggcacgtgagcccgggtcaatttccggccactggcgacgccctgtcggcgagggccttgtgttgacggattccggcggcgtgttcgcccgtgtgtggtggctcgatcgtacgccgctctcgacttggccggccactggtctcccgggctttctcgcgctttttcttgcagaggagcaagggttgcaatccgacgtgatggagattggagagttgccggaagcccaatatgatggaatgggtagaaagctattatgtgatcttgggctgtga

SEQ ID NO: 93555 - DNA, 238 bp, Oryza sativa
  Clone ID: PAT_MRT4530_91928C.1
gaaggcaataaagtaagcacaactagttaacatattaagaaacaaaggcttccaacctggaacaatcttaaaggccaacgggttcaggtttaccaccgaaagggtaactgtaaacacaggccaagattacctgctcatggaaccccaaatatggatattcaggatccagcctaatgataaaaggaaccgtgtcgcatacctagataaggggacattctccccaaggacagaagaaaag

SEQ ID NO: 93556 - DNA, 161 bp, Oryza sativa
  Clone ID: PAT_MRT4530_91929C.1
tatatgccggatcctccttaatgcatcagataaagaataactaaataaataaattaaaataaattccaacctatttgcgttctgctatgtactgtaaaagtttttcttataatatcagttctgaatcctaagcacatcctcagatgtcttctaaaaaaaaa

SEQ ID NO: 93557 - DNA, 1115 bp, Oryza sativa
  Clone ID: PAT_MRT4530_9192C.1
gtttgtgctctctcctctcctcactccgccttatccccaaaaccctatcgatcccatcccctttcctcctcacccatggcggccacgctcttctccaccgccctctccccgcacctcctccccctcccctccacctcctccaaccccgcctcatcctccctctccttcctctccaagccgctgctccccgccctcgccgtcgcgggatggccgcggaggaggaccagccccttcgtgccggtggccgtggccgtgtcggaggaggtcgagacggaggaggacgaggaggaggaggaggagggctccgggggcgaggagttctccgacgacctgagggtcttcgtcggcaacctgcccttcagcgtcgacagcgcccagctcgccggcctcttcgagcaggccggctccgtcgagatggtcgaggtcatctatgataagctgactggaaggagtcgtgggtttgggtttgtgacaatgtctagtgttgaagaagttgaggcagctgtcgagcaattcaatggctatatacttgatgggagatctttgagggttaactcagggccaccaccaccaagggagcaatcatcgcagagagcacccaggggtgaggccaacagggtctatgtaggtaacctttcttggggtgttgacaatgcagctctcgcaaacctattcagtggggaaggggaggtcttggaagccaaggtcatctatgacagggagagtggcaggtcaaggggatttggttttgtcacgtatggttccgctgaagaggttgagaatgcagtttcaaatcttgatggcgctgacatggatggcagacagatccgagttacagtagcagaatcgaaaccacctaggagacaatattgaaattcgtttagatgccctgaagcctatggttagtccagatatgaatcatactatcgtcatgattgttctatagcatcgatggaattctagtcgtaacttccaccatatggttcaaaagattggtttggtgatgagatatatatcattttgttttaactttttgaacccacttttttttgttatgtatggcttgttccttgaattatagagtaaagtgcacggccggtctctaaacttgtgct

SEQ ID NO: 93558 - DNA, 661 bp, Oryza sativa
  Clone ID: PAT_MRT4530_91930C.1
ggatcccccgggctgcaggtacaagctgacaggctctatctagcgaataatgcattcgacggtattgtaacacccaacttgggaaggcttcaaccactgttggagttggatcttagcaacaataatctccagggtagcatacctccagagttaggtaacctcaaacaattgtacatactagatctttcatcaaataaattcagtggtgcaattcctgaaactttaggccaatgtcaaaatttagttatccttcaaatggaacaaaatgttcttacaggaaatatcccaaccactttcacaaatctaaatagcttgagccttctcaatctttcccacaatgctttgtcgggccccttgccagctgttctaaatgatctaaagcttctcactaagctagacctatcttacaacaacttcgaaggagagataccacgaaatggtatattcgacaattcgacggtggtttcactggatggcaatgcaggactatgtggaggagccatgactttgcgaatgcgtccatgtcctgtttctcatagagcaataagcgtaaacagattaatcaaaatattgatcccaatatttggcttcatgtctctcatattattgatctactttttactccttgggaagaagaggtcagaagaacatcatatcagag

SEQ ID NO: 93559 - DNA, 323 bp, Oryza sativa
  Clone ID: PAT_MRT4530_91931C.1
tcgcacggagaagctggagtcacgacatatgacctggcgcgcgaaatctgtggagacgatgaagctactggagcacacatacggtgcataagatctggagacgtgcacagacacaagcttgacgccttgtgcgacgtattatctgaccagggtggactccatgtacataatattctatgagaggaaggccgacaaggacatcgctgcaatcgatgtcaagatcagcaatggacatgcccatgatgtctatgctgatggccactagtggcacgcatgggatgatggcaggagctgatattgatagccgggtggataagttcatg

SEQ ID NO: 93560 - DNA, 274 bp, Oryza sativa
  unsure (1)..(274): unsure at all n locations
  Clone ID: PAT_MRT4530_91932C.1
catcaaaaaaaatacctagaatacaaatggggaggcctctcaaaagtggagtatattccntaaattcacacattcattcacttagcttactaccatcatactaccaacaatagctttctctatctgtttcattcctatactccattacactccacaatctatatatcatttacttaccattaacaatttcatacacattacataccacactaatagtttgcattgctatgccatcacttttctttttcattttttatgttgttctcttcttcta

SEQ ID NO: 93561 - DNA, 373 bp, Oryza sativa
  unsure (1)..(373): unsure at all n locations
  Clone ID: PAT_MRT4530_91933C.1
aagccncccnccccccncaccaccngaancnncgacnggncgcgntcaccacataccgatatcctccngcatactcgcnccgacgggggnggcctcctcgtcgtcgtccgcngnagggaggaagctcctcctcctcggggctcgtcatnctncctcgtccgtagcggtagcnggtcgtggcntctngcgaagngggcttnccggggtcggggtagcggcngcngcggcgtcntcgtcttcncccgacgagcttcacgcgcgcnggaggcccctccgcggcggcgcttacnaggagagatcttccctttngaacttgataaaagacatagaacctttngatcttaggcattaattccaaaaagatgttccttct

SEQ ID NO: 93562 - DNA, 234 bp, Oryza sativa
  Clone ID: PAT_MRT4530_91934C.1
tttagtggagataggctatgttaagtttctcagttgatattaggaataacccaagatgtctgcttatgtattattttagctcctttggcaattcactagttgataatttgctgtaacatgaccaataagcagactaattgtcaacatatattgtattcctgctattggttagaagttttcaggttccacgctattctctcctctctttcttttttatgtacctttttcttttca

SEQ ID NO: 93563 - DNA, 185 bp, Oryza sativa
  Clone ID: PAT_MRT4530_91935C.1
atgagcaagaattccattcatcagtaaggagtctgtatatcaatcactatacattggttaaaatatataacaaaaaaaaaactgttcaaatatatctgctctactttactatacacttgtataatggtctatcttgagactctttcattctaaaaaggactaattcaaattttcatttttccttt

SEQ ID NO: 93564 - DNA, 105 bp, Oryza sativa
  Clone ID: PAT_MRT4530_91936C.1
atggatagcgtcggcttcacggcgacggccttctcctggaaccttggcgacgatcatggcgcagcggctcagtcggagatgcactggatcatcgggaacggctaa

SEQ ID NO: 93565 - DNA, 339 bp, Oryza sativa
  Clone ID: PAT_MRT4530_91937C.1
atgtacgccgcgacgaccgcgtcgagcgcggcggccgcgggcggcgcctccccgcgcgcgccgagccggcacagcgcgcccgacagctcggccggcgtgatcacgccgtcgccgtcgcggtcgaacatctcgaacacgcgccgcagccgcagcgtctccgccctccgccggtgggccgcctgccgctgtggctgcactaccgacgccggcgcccgagatgctgcggcgctggccgtgagaacggacgagggcggcggaggacgcagcatgttaatggagcgctacttggttttcaccaatggcaacgacgacgacacgtcgagggtactactggagtag

SEQ ID NO: 93566 - DNA, 608 bp, Oryza sativa
  Clone ID: PAT_MRT4530_91938C.1
atgagatccatcgacgcgacgccgccgcctccttcctcctcctctcgtcggagccaccgccgggagggattcatcgcgagcggcggctgaattggaacaggtgaaaccaatgcagccgcacccgcagccagtgaggagatcgtcgtctccggcctccgggaatagcggtttttgatcgaagacgcttatgaagtattttcagaatgcggagatgaaaggttcgaagcagcctagaagatccatggacgaaaatactaatatgataagtagttttcatcgtacatatggagtgtatgttaaactaaagaaaaactcctacatggttcgtgggacaaaaatgatgattctagtgaattacaacttaaatatgtggccaatatcatgatcatctcagaaagtgagatcagtgtgcccacaaagaaataattcatcttcatatacacacacacactgtagtctgaagttgatcctacaattgcagctggctggtcatcacagcgagaactggaatcaaataattgaaatgccgacacatcacagaaaaagatatgccattctctctcgtcctatcagataaaagctggaacgtaacagtgtgatatttttct

SEQ ID NO: 93567 - DNA, 507 bp, Oryza sativa
  Clone ID: PAT_MRT4530_91939C.1
atggtccctcatcatccagaattgctggaggtcaatctacgccgccttagctctagaggaggaggggtagagcggccagtggagtgggataggggagctcgaggagtcgtcggccaccgtcggtggagctcgtggccctctgccaagaactgcgccaccaccgctgctccaagccccgcgcctagatctttgtcacccttcttccaccaccgcttcgccccactagcaactgccgccagcaaaggttgcgacaagcgaaggacaggaggagggggagggaacgacattggcttgaaaccagctgatgagctgctccccgttgggcttgttgctgccgttgacctggtagggggagcttgttgctggtgtcattgccgagcttgctggaccgagccgtctcctccgaactctgcttggtctaaatccggcaagcccacggaagcgggaggggcatcggctaggaaaggaggcgtgctagtcaggaaggaggagaggggcgccggctga

SEQ ID NO: 93568 - DNA, 492 bp, Oryza sativa
  Clone ID: PAT_MRT4530_9193C.1
atggcgagcgatggcgcaagcgtgatgaccggcagtggcggccggcggcacacgctcgggagcggcgacacacgagggagtggtagggtgcacgggagtgatcggcgaaagatggaaaaagacgaaggaggtgagggcgtggtttatataggtgcggcgaggctggacgtggccgagagggggctcaaaaccgccggtgacgtggggggagattggcgatggctcagcgccgttttttgcggggatagtgggggtagtgggcacgagggtgggtggaggccggtccacgcgcacgcggggcggggtggagcatgggagaagcggcgacgtggggcgagactggcggccatggcggcggttggaggcgggctggaggtgggaggaagagctgacgggtggggcccacaggtccacctgtcggccggagggagagagaggaggccagaggggaggcggaatagactttcgcgaggggtaaggaaaaagggctga

SEQ ID NO: 93569 - DNA, 1349 bp, Oryza sativa
  Clone ID: PAT_MRT4530_91940C.1
tgcaggaattcggcacgaggattttcgccatctcctccgcctcgtggtcggcgctccacactctaccctcgccgaagccttctagaagatccgccgccatggacgaccccggtgcggccgatccgggggcgcgcccccaccacgtgtcgccggggcagccgccggtggtgccgcgctccccgaccccgctcgacctgtcgagcgccgcggcggcggcggccgcggcgtcgtacaggaggctctcgccgtcgctccgaccgcccgcgcacccgcaggcgcgtctcccttcgccgtacccccagatcccctcctcgtcgtcgtcggcggcggcgggctcgtcggggcaccacgcgcggtcgctctcgcagccgctcttcttctcgctcgactcgctcccgccgctgccgtacgccgatctggccgcgccgcccgccatcccgccctccccgccttcctcgagctccgacccgccgccgccagggctgccgccgcggaagggcgggcaccggcggtcgcagagcgatatccccttcgggttctcgcacctgagcccgcccctgccgcctcccgcgcccgtgaagcgggaggccgccacggcggcggaggggtgcagatcggacggcgatgacttcgccttgtacgacctcgtcaactcctacatggacctcgacgggatggaggctctcaactcctccgaggagcggcacgaggaccgcgacagccgcgccagcggcacgcgcaccgggagcgtggccgacagcagcgagaacgaggccgagagccactcgactccagtggagaggaaggacggaggaggcaaatcccggcattgccgcagcttatcggtggacagcttcatcgagaagctcaacttcgacgagtcaccgaagctgccactgccgtctcccagcggtggcctatccagaagcgggagcgggtccttggatggcggcgctgcatctctgtttggtgctgagtttgccaatggggagttcactgaagctgagaagaagaagatcatggcaaatgagcgccttgccgagatcgctttgactgatcctaagagggttaaaagaattttggcaaatcggcagtctgcggcaaggtcaaaggagcgtaagatgaggtacattcaaaagcttgagcacaaggttcaggtgttgcaaacagaggcttccacactctcacacagtttgaaatgctgcagaaggactccctggactagccctcaaaacaatgagttaaaattaggttgcagcatggaccacagcccagtttaaaaatgccctgatgaagcattactgccgaggtccagcgtctgatactcgccgctggcgagataactgacg

SEQ ID NO: 93570 - DNA, 2500 bp, Oryza sativa
  Clone ID: PAT_MRT4530_91941C.1
cgccgccccgggccgcgccccgccgccggggcaccccgccagggacactttccgtggtagagtgtgtgaatgcctacatgcgggggccggcggggctgccgctgccgctggtggtggcggtggcgctcgccgcggcggcggtgatggtggtggaggcgcggttcgtggtggagaagaacagcctgatggtgacgtcgccgacgtcgctgcgggggaggcacgacagcgccatcggcaacttcggcgtcccgcagtacggcgggagcatggccggcaccgtcgtgtaccccaaggacaacgccgacgcctgcgaagcctacgacggggaccgccacttccgcgccaagcccggcgcgctccccaacttcctcctcatcgaccgcggaaattgcctatttgctaagaaggtttggaatgcgcaaaatgctggtgcctcagcggtccttgtggttgatgacaaggatgagccactgattactatggacttgccacgggaagatgatgaggctgcaaagtatatacagaatataaccattccttctgctctgattgataaaaaattcggggaacagttgaaaaaagctattaaagatggtgaaatggtaaatgtgaatctggactggagggaggctgttccacatccagatgatcgggtggagtatgagttgtggacaaacagcaatgacgaatgtgggcctaaatgtgatatgctgatgaatttccttaaggaatttaaaggagctgctcaactactcgagaaaggtggttatagtcagttcacgccccattatatcacctggtactgtcctcaagcatttgttgttagcaagcaatgcaagtctcagtgtataaaccatggaaggtactgtgcgcctgatccagagcaggatttcagcactggttatgaaggaaaagatgttgttgttgagaacctgagacagctttgtgtatttcaagttgcaaaagagagcaaaaaaccatggatctggtgggattatgtaactgattttcacataaggtgcccaatgaaggacaaaaagtataacaagaaatgtgcagaaactgtcatcaaatcactaggtttagatgtaaagaaggttgacaagtgcatgggagatccaaatgctgattcggaccaccccttgcttaaaatggagcaggatgcacagattgggaaaggatcaagaggagatgttactatattgcctactcttgttgtgaacaatcggcaataccgaggaaagcttgaaaggaaagctgtcctcaaagctatatgtgctggctttgaagaaactaccgagccaaatgtttgtcttagtgatgaaatggaaactaatgagtgcctgaatgacaacgggggttgctggcaagacaaagctgctaatgtaacagcttgcagggacactttccgtggtagagtgtgtgaatgccctacattcaatggtgtgcagtttaaaggcgatggctacagcaattgtgaacctgctggaccaggaaagtgcttgataaatcatggcggctgttggcatgagactcgcaatggcaaaacattttctgcttgtcaggaatcaggaaatggaaaatgccagtgtccagctggtttccgaggggatggtgttaaaaaatgtgaagacatcaatgagtgcaaagagaaaaaagcttgtcaatgtccagaatgcagttgcagagatacatggggtgactatgaatgtacttgcagtggggacctactgtacatcaaagagcatgatacttgcataagtaagacagctgttcagggtaaagcagcttgggctgcagtttggggaatcttgatagtcttggtagttgtggcagcaggaagttatgttgtctacaaatacagactaaggtcatacatggactctgagatcagagcaatcatggcacagtacatgccactggacagtcaaggggaggtgccaaatcatacaaatgatgaagaacaccattagcaagagtttagtttacctttgcaaaccaaggaacagcaggcccccttggcgtcacggacagactgacacatgcagaaatgtgatgttttgagatgcttatcaggtatacgggagtgatgtggaggtgaatgtggcttgatatttgaagtccgttaaatctgttgttcacctgctaatttatgtggagcagtttcaccatacgtgccacactgccactgttagctccatttgtggaagtgtacatttgtaggcttttggttgagaaagtatccatagagtttttagcttatgaatggggaccatgtaatagtaacctatctccgatatgcatctggtgccacacgaaagactgttcaaacgatgtgaattgcaacatttgtgacattgcaaagttccattggaataaataatgaccggcaatgtattatgatctaaataaaggaacaacaaccccgccaactcctgcagcccaaaaaaaaaaaaaaaaaaaaaaaaaaaaactgcagcccgggggatccactagttta

SEQ ID NO: 93571 - DNA, 181 bp, Oryza sativa
  Clone ID: PAT_MRT4530_91942C.1
gatctggggtctgctgagaacgtggctaggaactcctttccccctgcctggcgatgacgactgggagttcgcggactggatctttgaacaaaaggcgagaacggcagcggagctcttcagtgatattaagaatgaagttgcagtgtggagggagaccaacattttgagagaagtcggctaa

SEQ ID NO: 93572 - DNA, 652 bp, Oryza sativa
  Clone ID: PAT_MRT4530_91943C.1
aggaattcggcacgagggagagagagaactagttctctctctctccccatctcgcgcggccacggccatgtgggggctcaacctgaaggcgggcggcgtgggtggccctgcctcacgccgaggcggcgccccctcgccgccggcgatgccgcctggtgccaagtgggaagcgtattgatggggagaaggcacaggggtcaatcttctttgccgcgggtgcggtccttgatattgggtggtagatgaagattttcaccacataggttcctattttacaattttttacatgtttcttttcatattggtacaaaataatttcaaattgcgcctacctgaggacagaaattcctgaaatgaaagcaaaaggaaactgccttgtaaccaacccactcatatcttcaattgattctctgtgcttttcttaaaaaccagcgccgggagcaggagctcttggtagatccaagtgcacccgcagagcagaaaacatcatcaggagaaccagcacaccagcttcctcaaaagtgggctcaccctattacaatgccagaagcagggtgtgtcttggttgctaccgaagtgcttgacgatgatagcatcttcgaaagaactgtcattctcctccttagactaggttccagaggcacatttgatg

SEQ ID NO: 93573 - DNA, 452 bp, Oryza sativa
  Clone ID: PAT_MRT4530_91944C.1
atgaatgcgaagaagctacagaattgaggtttttacgtgggcataacaaagaaattcaggacatgcttgcttgtgaaaaatatagatctctttctcatttgttacaacttgcttgcaatgctgaaagtaaaatagaggaggatatgaaaaagaagcacgctatgtctttgcctcctattactaaccatttgcaggaagtgcataatcatgaaaatgaggaaagagacatgaaagagccgctaatcccattgttcacactcgaattcgatgcaccttcatcatctaaagagatcatcgaaggtaaactaaatggtgctgaaattaatcaagaagtagggtttatctacaccggcaagatcaataacccatggagaggtgtatcgatcgctaaggcgcaacacaacgtctcgtacggttgcagtcggatcgtcaacgtttctcccaaatcatag

SEQ ID NO: 93574 - DNA, 1485 bp, Oryza sativa
  Clone ID: PAT_MRT4530_91945C.1
atggcaggattgagcaagcgaatacgagaacatcggcttcttcaccgtctacaagatatgacaacatctccacgtgatgcatacgaggtacatcactataattttgcgcgagttgaatctaagttaccattttatgatgcagtagacaatgaatttgacaaatatgatttttctgatgctcaaatgattaaggctgctagtaataagtttacctcttctacattattttggtggagttatgttagtaataaacctgaaacttgggatgaattcaaaaccatgatgagaaaacgctttgtgacatcttattacaaatgtactcttcgggagaaattagaacatctgaaacaaggtgatagaactgttgtaaagtacattcatgaatttaaggttttgcttgataatgtgacatataatcatattgggcacctattcatgtttgctcgtagcattgagagtcagatcatatcaaatgcgaggaagcatgaacaatgtgatttatctcccgtttctaaatctcctatatccttgtgcaatgatgatgtgcaaacattggaggagcaatcttttgtctctcctgttactaacgttttgcagggagttcagaacattcaacaaaaggaggagaatggtgtacttgagaagaaagaggatgaagcacctgcgctttcagaagaaattttgcaaggtaaattaaatggtgctgagataaatgaattgaatgaacattctatttctagtgtttctttgtgtgctgattttaagcatattgttcacattgtaaatgaagtagaggaacatgaattgctatcttctttaaatacctatgtttggtttgatgatttttgtgagctcgaaaatttgaaggagaaattatttgctaaatctgatttgccatgtccaactaatgctatttcttatatctttggcgaatataatgatagaggaatatatttggtgcatagagtttacatatgttcggatttagaaccttctgtacatgtgcataaaacaagaaaactagagagaaatgttactgctaacaaaattatctcgagtttggcttgttttgattggaagaaacagattgttttaaatggactacgtgaagagcaccatatggaaaaaccgaggacggttttccgtgaagaaggagaggatgatgtgaccatggctactacagatacaaccattactcacatcatggatgaacaagaagatatgaagatcaagtcctccaagtgctggaatccgattcggccacctactacattgctgacttcaaacggccggcgaatcagcatacgacctccgtttttggcccgtgagtacttgatggaaagctctcaaagttctctttccaatggatccagcctcattgccaaattccatctcagtcggcaacaactgaagaaacaaggtgttgcaacacctgtaatgggtctatgggcttgtaacttcgtctgggacgcactatctctataa

SEQ ID NO: 93575 - DNA, 2030 bp, Oryza sativa
  Clone ID: PAT_MRT4530_91946C.1
aatacaatccgactccagaatacatggtttatgaatccattccgcgctttagtgccagcccctctcggcgctctagctagtaactctacctcctctgcagcgaccatggatataaccgttgctcacatcattaatcaagaagaacacttcaagatcaggccgtccaaattctgaaatccaattcgggcacctgctactgtgctgaattcaaatggccgccaaatgtgcatacgagctctgttttgggtctgtgagtacttgatggaaagctctcgaagtcgtcattccaacggatccaacctcattgccagattccttctcagtcatgcgcaattgatggagcaaggtgctacatcacctgtaatgggcctatgggcttgtaacttcgtctgggacaccggcccaagtggggcccatgtggggtgcaccccaaaccaggtggaggatgacctaggatcctcccatctccataaatagcttggaataaggttgatctacaccggcaagatcaacaaccaacggagaggtgtatcgatcgctaaggcgcaacacaacaacgtctatcttcaactcaccgaaagatcgggccaacaacagccttgagtgtcgagtggaattcagggttcatcaggtggtatcagagctttcgttgctcgtgtgtagtacggttagagtttcgagttcttgtcacgtctagtaccactgttatcgccgccgtcgtgttcttgttgtctttgggacctacggaaatggaattggctcgctgccacggttctatttttctagttttcagaagtttctgtcggtcagtgatttatctcatgtttttgaatctcctatatccttgtacaatgatgatgcgcaaacaaacgaggagcaatcttttgtgtctcctgttgctaacgttttgcagggagttcagaacattcaacaaacggagtataatgatgtcattgagaagaaaagggagaagcatgaagcacccgcgatatctgaaaatagtttgcaaggtaaattaaatggtgctgagacaaatgaaggtgagtatactcaaggtgagctacacatttccacttttcatgctatactagagcaaccattagtggaaccaattgctgagatgcctttgtcacaagttgatttaattattgttccttgtgataaagaagagttgtgtaataatacttcacttatatccatgccacaactagtgaatgagaatgctatttctagtgtttcattgtgtgctgattttaagcatgttgttcacattgctaatgatgttgaggaatgcaaattgataacttctttaaatactttgggctatgttcagtttgatgatttttgtgagctcgataatttggaggagaaattatttgctaaatctgatttgccatgtccagctaatgctatttttcatatctttggcgaatataatgatagaggaatatatttggtgcatagagttttcatttgttcgtatttagagaaacatgttgttgctaatcacactatttcgagtttctctagttttgattggatgaaacaggttattttgaatggactatgtgaagagcaccatatagaaaaaccgaggacggttttccgtgaagaatgggaggatgatgtgaccatggctaccatggatacaacagttgctcacatcatggatcaagaagaacacttcaagatcaggccgtccaaattctggaatccaattcggccacctgctactgtgatgaattcaaatggccgccaaatgtgcatacgagctccgttttgggtccgtgagtacttgatggaaagcattcggagtcgtcattccaacagatccaacctcactgccaaattccttctcagtcatgcgcaattgatggaacaaggtgctacgtcacctgtaatgggcctatgggcttgtaacttcgtctgggaccccagcccaagtggggcccatgtggggtgcgccccaaaccaggtggaggatgacttaggatcctcccatctccataaatagcttggtaccccttcag

SEQ ID NO: 93576 - DNA, 1409 bp, Oryza sativa
  Clone ID: PAT_MRT4530_91947C.1
atgaggaaaagttttgtgtttttatattataaacgtactctccttgagaaattacaacatttaaaacaaggtgacaaaaccgtgcgggagtactttcacaactttaaaattagtatcacttatagtggtttaaaagaaagcaatgagaacacaatgactagattttttagagggcttaattccgatgttcaggctgggcttattaatgtgacatataatcatataggccacttgttcatgcttgcttgcagtgttgagagcaatattttaaagaacccaagggagaaacaagctatgcttgtgcctcctattactgacattttgcagggagctcagaacattcacgaggagaagagcaataggatcgaggtgccatctccatcactcacgaaggaagaagagaagactgatgcagctacatcatccgaacagagaaccacaggtaatcttaatggtgctgcaattaatcaagaagagcaaccattagtggaaccaattgctgagatgcctttgtcacaagttgatttacttgctgttccttgtgataaagaagagttgtgtgataatgcttcatttatatctatgccacaactggtgaatgaacatgctatttctagtgtttctttgtgtgccaattttaagcatgttgttcacattgctaatgaagtacaggaacgtgaattgctatcttctttaaatactttgggctatgttcagtttgatgatttttgtgagctcgataatttgaagaagaaattatttgctaagtctgatttgccttgtccaactagtgctatttttcatatatttggcgaatctgatgatagaggaatatatttggtgcatagagtttacatatgttcagatttagaacctcctatacatgtggataaaacatgcaagctagagtgaaatgttattgctaaccaaattgtctcgagtttgccttgttttgactagaagaaacaggttattgtaaatggactacgcaaagagcaccatatggaaaaaccgaggacggttttccgtgaagaaggggaggatgatgtgaccatggctaccacggatgcaaccattgctcacatcatggatgaacaagaagatatcaagatcaagtcctccaagtgctggaatccgattcggccacctactacactgctgacttcaaacggccgccgaatctgcatacgacctccgttttcggaccgtgagtacttgatgaaaagctcttggagtcctctttccaatggatccagcctcattgcgaaattccatcttattgagccgcaattgaagcaacaaggaatagggttgatctgcaccggcaagatcaacaactcacggagagctgtatcgatcgctaaggcgcaatacaacgtctcgtacggtcggcttgagagagtttgtag

SEQ ID NO: 93577 - DNA, 224 bp, Oryza sativa
  Clone ID: PAT_MRT4530_91948C.1
acatcattttagatatcggtagcccagaagaaatggacgaaaaacctttagttttagcacaggctcaagtgattgaattgcctttctataagttatccacgcaatttgcgcatttagatcaaagcaaaaattaccttttatattgtgagcggggcgtaatgagtaaattacaagcactttatttaaaagaaaagggctatcagaatgtgaaggtgtttaactta

SEQ ID NO: 93578 - DNA, 524 bp, Oryza sativa
  Clone ID: PAT_MRT4530_91949C.1
ctttgttttttttttttttttttttttttttcaaaaaaaaaaaaagaaattcattgcaaatttgcagcttggaatatagataaaaaaaaattacaccccaatagtgtagtaagttcaattagcacttgcctcctactaagtctaaaccctgaagattccatcatcaaaatggaccagattaactgtgtaacaagagaaaaataacacatgtgcaaatcacagattcagacagcctgtgcttgggtcctctcttgctgtcatcaatcagaaaattcaaagggaacaattacatctgaagaattctctggtaataatgcaaaaatatataccactggtactcaaactcaccaccaaaacaactcccctcctgtcacatcccacttcatctggatgctgggcttggcattgccggtggcgtcgctgctctcctctccaccctccgggctcctttccggcggcggcgtcttccgcagcgaagacctgcatccccggtgcgatccaagcggacgcggggtcgacccgga

SEQ ID NO: 93579 - DNA, 3360 bp, Oryza sativa
  Clone ID: PAT_MRT4530_9194C.1
cccgggctgcaggaatcgcacgaggccccccctcctttttttttttttttttttttttttttttttttttttttttttgggagtttttttttttttttttttttacaagattgcagacaaggacaatatactttttaaggtagcgatacaaagtccagatcacaaggttccctgcccagtggacattggaggtaataaaggcataaacataaggcaggtttaacaactatacacgatacaccgatgccatccaagatgaacaaaatcaagatgctgctgctgctgctgcttcttcccttgcaaaatacttcagtagccaccaacaaaggattgcctattgtaaccccttgatgctgcaacattattcccatatgtctggtgctgggcgccagtagactgccctggacaatctctagcgaagtgcccaggctgtttacatttgaaacactccgagccaccagtagactgcactggacagtctctagaaaagtgcccaggctgtttacatttgaaacactccaagccaccagtggactgccctggacagtctctagcatagtgcccgggctgtttacatttgtaacactccgagctgccgttgccagcgatggagttgtagttacccatggagcttccaccggctgatgtttcctgcatatccatatctgcacccacatggcagatctgggcgctgtgcccatttgctccacaaatgctgcatgtctgcaagtttcgtgttgctgctagtggagtagacatcccggcgcttatactcgcttgctgcccaaactgattcacgccaccagtattcatggcataggcattgctagatgtaggcgcaccgtgaccgcctaccggatcggtgaaaccagcattaggggcaagatcactttgcccctttgggtccagtaaaaggttgtcaatcgctccaagtaggacgttgctctcttttgatgggtccagtttttcaaccttgacagcggtgcatttcaagctttgctcatcattgtaggtttcttccttgaccttcagtttgaatagatatagatgccaccggaccccttctatgatctctgcaaattgtgcatcatcttggtcgacatttcttatcgagaaaagttctcctgccttgcgaccaaaaatctgctcacctgcctcatcgaacgcactagcataggtactaccagtgtggtcttggatctggaacctaagcatgtacctatattcaggattttgaaaactctcatcacatcggtcacaatgccacatcccatcaccattatttattgcctttttattacactgcctcccgacgggcaagagctttgggcaagctggataacaaaaactctcagtagtcacatgggagattgcagccttaacagtgatccagtctggcttctctaatcgtcccaaattttcatccttgatctgtgcaattgttttgcgggcatcagtccggcccatattaagcatttctcgagataaagaaatgcaaggagcagtttttccttctgtcatgtaccactgcctcagcctttccacctcaggaaagtctggatttataattaactgggttgaaccaattgtgctcactgatttgccattaaaatcacccacacgggcacctttaaaagcaattatagggttcgaaccagaatcacactgcaactgcaactgctgaccctcagcatcacagaagtttccccataatgttacttcaatgctccggccagacaagtccttcagttgaatagaccttttccgggtttcagtgccgatcttcctcattattgttgcagaagggctaactgatgtaacaacaccaagtaaatcaacaatggtctcgttagccatattctctagttcgctgatctgccggaaattgtactgcagcctggggatgctgttatcatcatcagagcaaacctcgacagttgataacccgatatccagagttatttcataatcatggttcaaagtgttatacttcttctgggcgggcttcagtgatcctctagatatcaaatacaccctaccaacctcaatttggccaaaaaacttatcagccgattctttccagcattgtgcacgaatttctccaccttgtgcatcaagaagatcaaacgagaaaactgttcctgaactcctggcattgctccaatgcctgatatcagactttgctgtcacccttgccttgattgtccacttaggctggtatggattcaacgcggtaattgggatgatacgagttgcagagtcattcctagaggcaggccctctattcatatacactggaggtggctgctgatatgaaggacgtgaaggctgcccataagcattgccaggagggccaaagactccacccgaagcaggagctgcaaacctttggttttgattagggttcaacgaggacagctgagatgtaggctgcatcgtgttggcattcattgtgttcagctgagatgtaggctgcatcgtgttggcattcattatgttcagctgagatgtaggctgcatcatgttggcattcgttgtgttctgtgctgatattgcaccgtaagagccaacagcagaaacatttgcaggaccaggttcaactgtcctgccaatagaagaacccaacattccttgagcactattataaggtccaccatatgaactgttgctagcagcctgctctgcccttggcgcaacggaggggcccagcatgcttgcgccaccagaataggttccattattggtttgagccacactggcctgtaagttagggtcttgctccttagttagactctttggttcatagtgtttagggttcccaattacaatgcagtcattttgcagaacatcaagtttcacaacaataataatcctagccagcaaattagttgcaagttgaaacatatttgcaggttgaatatttgtcgacattggacaactgctaacaatagaaccccaaagtgataaaatctcgttggatgaaacatgacaaagataaaagcgcatcttccttagaaccttctcactgtcccccatgttgacataaagactactgtgcgaattagatcttttaccctggatggtgttgcacatgaagtcggtgagctggacgacggtgccggggcggagcgtggcgtccttgacgagggggttgagggcggtggcgagcatggactgctgcgtgttgacgccgtcggagagcatcatccggaagcgctcggcgggcttgggcgtgggcggcgcgttcttggtggtgacgggccgcacgtccaccacctgcagcaccggctggatcgtccccgtcccgtccgggtgctccgctatcgcctgcaccgcccccggcgtcagctgcggctccat

SEQ ID NO: 93580 - DNA, 641 bp, Oryza sativa
  Clone ID: PAT_MRT4530_91950C.1
cccggagacgcgtgcactcgtgttttactaggaacgatggagaggacccaaagggaagaggattcgcgcggggtggattcggactgtagggcagcgccaacttctgatggccgccacgacttcatgcgaactccgatttgggtgtgcaagtacttcatggaaagcttatcaagtctactttcaaatggatccagccacatgtccatatatgttctgaagcggccgcaattcttccttgcagcgcgcgtgtcggctagaccgtccgtctgcttgtattcgaaaccccaacttatcgtgtgtactcaattcctatttgcaattcagattgattttattttgtttttgcttgtttctttgatttgcttgcaggaataaggttgatctgcaccggcaagatcaacaaccctcggagaggtgtatcgatcgctaaggcgcaacacaacatctcgtacgattgtagtcgggtcgtcaacgtttctctcaaatcatagttatctacaactcaccgaaagatcgggcaaacaacagccttgagtgtcgagtggaactcagggttcatcatttataaacatgcatattaaaaatatttaatagtaagaaatataatttttaaactaactatatattgctatctttgtgtg

SEQ ID NO: 93581 - DNA, 167 bp, Oryza sativa
  Clone ID: PAT_MRT4530_91951C.1
gtagagctcctgcccttgttttgagcaagcgatcaaaaggtaaagatgggcgagttatggcaacagatcaggaagaagatggggcaacagaggaagaagatgcaaggaaaggcatcccgtttctgctttcgtcccaagaagagaacatcgcctcagacatcctgcag

SEQ ID NO: 93582 - DNA, 1934 bp, Oryza sativa
  Clone ID: PAT_MRT4530_91952C.1
cggtcgacccaacgcgtccgcaaagagacacttgaagtacttcttgacatgcttattgaagaaacacctcatagcttgcctcgcaccgaaggcatcgtatgcattgtctgatttgagcggtaggtatagctgtgctacatatgtaagcctacccagagctccacagatctgattgcagccgtacagcaagtgtgtgccaacggatggggacatccaacctccattggggtgcttggttaagtcggtgtacatcaccatgtcccgttgctttggtaagaacttgcaggagcgtggctaaaagcttgagtgtgtgtgatattggagctgccactacctagtagttgataggagcgtgcatatttttgtgtgtttcttgtttgcgactaaccatggcaggattgcgtaagggaatacgagaacatcgacttctacaccttcgacgagatatgacgacttctccacgtgatgcatatgaggtacatgactataattttgaacaagttgcatctaagttaccattctatgatgggaagtatgattctgttgcatacattgattgggagctagcagtagacaatgaatttgatatatatgatttttctgatgctcaaatgattaaggctgctagtaataagtttacctcttctgcattattttggtggacttatgttagtaataaacctgaaacttgggatgaattgaaaacgatgatgagaaaacactttgtgacatcttattacaaatgtactcttcgggaaaaattagaacatctgaaacaaggtgatagaactgttagggagtacattcatgaatttaaggaagatcagcacatccaagaaaaggagaatggtatacttgagaagaaagaggatgaagcacctgtgatgtctgaagaaagttcgcaaggtaaattaaatggtgctaagagaaatgaaggtgagtattctcaaggtgagctacacttgtccacttttcatgctatagtagagcaactattagtggaatcaattgctaagttgcctttgtcacaagttgatttacttgctgttccttgtgataaagaagagttgtgcgataatgcttcacttatatccatgccacaactagtgaatgaacatgctattcctgttgttaatactaactgcgctgattttaagcatgttgttcacattgctaatagagtagaggaacgtgaattgacatcttctttaaatactttgggctatgttcagttcgctgattttcatgagctcgataatttgaaggagaaattatttgctaagtctgatttgccaggtccaagtaacgctaattttcatctctttggtgaatataatgatagaggaatatatttggtgcatagagtttacatctgttcagatttagaacctcctgtacatgtggataaaacatgcaagctagagagaaatgttattgctaacaaaattatctcgagtttgttttgttgtgattggaagaaacaggtagttttaaatggactacacgaagagcaccatatggaaaaactgaggatggttttccgtgaagaaggggaggatgatgtgaccatggctactatagatacaaccgttgttcacatcaagatcaagccgtccaagttctgcaatccagttcagccacctactacagtatcgacttcaaacggccgccaaatatgcatgcgagctccattttgggtccatgagtacttgatggaaagctctcggagtcatctttccaatggatccaatttcatcgccaaattccatcccagtcggccgaaatcacaaaaagaaagtgctgcatcacctataatgggcctatgggcttgtaacttcgtctgggaccccggcccaagtagggcccatgtggggaataaggttgatttgcaccggcaagatcaacaacccacggagaggtgtatcgatcgctaa

SEQ ID NO: 93583 - DNA, 531 bp, Oryza sativa
  Clone ID: PAT_MRT4530_91953C.1
tttattacaataattcattaaatcaagcgaaagaacaacattaaagctatattaagtaaaaataaaattttgtacctcgtgtataatggtttttctactaagaagaaaacttcttttacccgaaattaactaagctatgagcagtttgtttagaacttactaacatttgtttcattaaatgttttaaaactgttcataaaagctacatacttttgcagttaattgtacctggctcttacaaaaaaatttatagaagtaaagttaactacctagttaataaaattttcgtggataagcatgaaaattctctctaaaactcttataaacttattctttttctatgctttaaagcagctatgcgttttagcacattttaggagtattattcgtagttttgaaattatttggagcatattaaaaaacaaacttaataaagattatgaaaaaataagtttttttatctatataaagaaaaataactcggcaaacttttcctcgactgtttaacaaaaacattgctttatgaatttt

SEQ ID NO: 93584 - DNA, 2455 bp, Oryza sativa
  Clone ID: PAT_MRT4530_91954C.1
atggcaggattgcgcaaggggaaacaagatggtcatgctcaacgtcaacatctacaccttcgacgagatatgacgacttcttcacgtgatgcatatgaggtacatgactataattttgcacaagttgcatgtaagttaccagtctatgatggaaagtatgattccgctgcatacattaattgggagctagcagtagaaaaacaatttgatgagtatgatttttctaatgctcaaatgattaaggctgctagtaataagtgtaccggttctgcatctttttggtggcatactgtggggaataagcttgaaacttgggatgaatgcaaaatactgatgagaaaaagatttgtgttttcatactatagacgtgctctccttgagaaatgggaacatctaaaacaaggtgacaaaactgttagggagtacttttatgattttaaaatttgtatcacttatagtggtttacaagaatctaatgagaacacaatgactagatttttcagagggcttaatttcaatattcaggctgggcttgttaatgtgacatataatcatataggccaattgttcatgcttgcttgcattgttgagcgcaaaattttggagaatccaatggagcaacaagatatgcttgtgcctcctatcactgatgttttgcaggaagttcagaaaagtctccaaaatgagaagaacgatatgtttgagatgtcacttccatcactcgcgaatgaggagaaggctgatgcagctacattatctgaagaaagttcgcaaggtaaattaaatggtgctgagagaaatgaaggtgagtattctcaaggtgagctacacttgtccacttttcatgctatagtagagcaaccattagtggaatcaattactgagttgcctttgtcacaagttgatttacttgctgttccttgtgataaagaagagttgtgtgataatgtttcacttatatccatgccacaactagtgaatgaacatgttagttctactatttctttgtgtgctgattctaagcatgttgttcacattgctaatgaagtagaggaacgcgaattgctatcttctttaaatactttgggctatgttcagtttgatgatttttgtgagctcgataatttgaaggagaaattatttgctaaatctgatttgccatgtccaactaatgctatttttcatatctttggcgaatataatgatagaggaatatttttggtgtatagagtttacatttgttcagatttagaacatcttgtagttccggataaaatatgcaagctagagagacatgttactgctaatcatattgtctcgagtttgtcttgttttgattgcaagaaacaggttgttttcagtggactgcgcgaagagcaccatatggaaaaaccgaggacggttttctgtgaagaaggggaggatgatgtgaccatggctactatggatacgaccattgctcacatcatgaatcaacaagaagatatcaagatcaagtcctccaagtgctggaatccgattcggccacctattacactgctgacttcaaacggctgccgaatctgcatacgacctccgttttcggcccgtgagtacttgatggaaagctcttggagtcctctttccaatggatccagcctcattgcaaaattccatcttattgagccgcaattgaagcaacaaggtgctgcgtcacctataatgggcctatgggcttgtaacttcgtctgggaccccggcccaggtggggcccatgtggggtgcgccccagccaggtggagcacgatcaagtcctccatgtgctgcaatctgattcggccacgtgttacattgctgacttcaaacggcccgcaaatctacatacgtgctccgttttgggcccgaatagggtttatctgcaccggcaagatcagcaacccacggagaggtgtatcgatcgctaaggcgcaacacaacgtctcgtacggttgtagtcggatcgtcaacgtttctcccaaatcgtagttatcacaactcaccgaaagatcgggccaacaatagccttgagtgttgagaggaactcagggttcatcaggtggtatcagagctttcgttgctcgcgtctagttcgtttagagtctcgagttctggtcacgttttgtaccacagtcgtcgctgccaccgtgtctctgttgttgtcgggacctacgaaaacggaatcggctcgctgccacggttctatttttgtagttttcagaagtttctatcggttagttttggagttcttgagttgcatctagagtttgccgatccttgtgtgtgtttgttttggccgtgcctgtgtcgtgcacgagaggaggaagaaagtgagaaaaaaaaggcagaaaggtgaaaaaaaaaagaaaaaaaaagccgcaccaaaaaaaatcagaaaagaaaaggaaaaaaaaagaaaagaagaaagaagaaagaaaga

SEQ ID NO: 93585 - DNA, 177 bp, Oryza sativa
  Clone ID: PAT_MRT4530_91955C.1
gtcctccgcgctagcgccggggacaggacccgtcgacgaccctccgcgcggactgaagcgagaattttggccgcctggtgagaccgggctacattgcttcaccaacggcttcctcgacctgacgaccggcgtggcatgcccaccgggcatgatgaggacgagctccttcaccgacag

SEQ ID NO: 93586 - DNA, 3383 bp, Oryza sativa
  Clone ID: PAT_MRT4530_91956C.1
atggctaccacggatgcaaccattgctcacatcatggatgaacaagaagatatcaagatcaagaataaggttgatttgcaccggcaagatcaacaacccatggagagagtttacatctactcagatttagaacttcctgtacatgtggataaaacatgcaagctagagaaaaatgttattgctaaccaaattgtctcgagtttgccttgttttggttggaagaaacaggttgttgtaaatggactacgcaaagagcaccatatggaaaaaccgaggacggttttccgtgaagaaggggaggatgatgtgaccatggctaccacggatgcaactattgctcacatcatggatgaacaagaagatatcgagatcaagtactccaagtgctggaatccgattcggccacctactacactgctgacttcaaacggccaccgaatctgcatacgacctccgttttcagcccgaataaggttgatttgcaccggcaagatcaacaacccatggagagtggacttcccaccaccaccgccgctgcctcctatggacgcaacagtgattgcgccaccaaccacctactccagatcgcatgagcgccgctgccgaggagctccaggcggcagcggtaacctgctgacgatggagcttgaggagggaggatggattgctgagaaggaaaggaaagaaggaggcgccgctaccattcagggggatgccgagtcgagggtcacctcgctggtgtgggcgcggagcggtgcgaatgggcggctgctctcttccagcgtcgacgggtccgtggccgagtgggatctcttccacctacggcagaagaccgtcctagattctgtcggggtaccagtatggcaaatggccattgaaccttcagttgatcttatggattctgaaaataaaggctcaaaagtaactgctaatggccatgcaaatggccgcactgactctgactcaagttctgtcgatgatggtgaaaacactgacgatgaagatgattctgccaatactagtttgccatatcgtgcaaatgaacttcagcgtctggccctggcatgtgatgatggctctgtgcgcttctataatgtgcccgaatctggcgcgttgacttactatagatctctcccgagagtaagcgggcggatgttgagtgtggcatggagtaatgatgccaaattcatattctctggaagcagcgatggtttaattagatgctgggattccacttctttctatgaaaaataccgtattactgctggattaggaggtgctggtagtggaaatgagctttgcatatggtcgttattgtttcttaggtgtggaacacttgttagtggtgatagctccgggagcgtccagttttgggatagccgccatggaactcttttgcaagcccatacttaccacaaaggcgatgtgaatgcactagcaactgtgcctggtcagaacagggtattttctgctgggtctgatgggcaggtaattttgtacaaaatatcaaaagatgagctcgttgctgataaagaggtggccaaagagcaagtgcgcaagtgggtctatgtgggatacgtaagatctcacactcatgatgtaagggcattgactatggcagtaccaatttgtagagaagatgcgttgccagaggaaaagacaaagaagattcgccggcgtgaaaagccacttgagttcagttaccacaaatgggcacatctgggtgttccgatgcttatttctggtggggatgacactaagctatttgcttattctgcaagggagtttactcagtttgcacctcataatttttgccctgcacctcaacgtcctttgattaatctggcaagagagagtatagttaatggagattctgttatgcttgttcagtctgctaactggctggatgtattacttgtggtagttcagaacaagttgactccaagcacctcttccagaggagatgcgacagtacgacaccttgctcgtctgaaaagcaagggttcccggaaaatcatttccagtgctacctcaactaatggaactatgttggcctattcagattgtgtgaaaccctgcctttttgcactaagacataagggtggaaaaaagtttactctagacaaactagagctgccaaagggattgctgaattctcagtgtatgctgttttctattgactcatccagtttgattctagctggccgtgatggaaagatttatgcttttgtgtattctctgctctttttgaaggctaatgttcttcatttcgccaagcaggttgtagacattgccacacgggaaatttcaaatgtctttcaacctatgagaaaaatggatggagcttccaaagaaccacctgttacaaaaatgttcctcagtgcggatggacagtggttggctgcagttaactgttctggggatatttacatatttaacctcgaggtgcaaaggcaacactggttcatacctagaatgaatgatgggtctgttacatctggtggcttttgtcccaagaacaatgccctcgtcattacaacatccaagaatgaggtgtatgtatttgatgtagaagcaaaacagttgggtgactggtccaaacgcaacacacatcacttgcccagaagattccaggaatttcctggagaggtcattggcctgtcatttcctcccctaagttcatcttcagttgtggtttacagtgcaagggcgatgtgcttcattgattttggactacctgttgttcaggatggtcaattgccaaatggtgtggttgcagaaaagatagactctcaaaagggttcaaacaaaaagcttaagaggaaggctcgagaagaagagttgaggcaagagataaggaataactttgatttctttgcttttaaagatccagtgctatttgttggccacctatcagacaactctgttctaatggtagagaagagatggatggatgtagttgaaggttttggcgcaccagttcatagacatatatacggtacatgatccatgccgtcctggcacatctcaacttttggcacttgcgacaggcatcccattcttttgtcttcacccaagatgtgaaatgccatacatcgaagtttgttaagagatccaaacagctagcagcataaaaatgtctgctgatatggagttatagcaactaatatgggttaatgctgtcaaatggctattgttccttgggtagccttgctgtattcttttttcttttagcgtacgaaatttagtggactaatcgctgcgcgagttttgtcatacttgttgctgcgcaaattttggcatctgtaaactatgtatcagttatgttatgtgttatttgttgtttgcattgtgccaaaaaaaaaaaaaaaaaaaaaaaaaaa

SEQ ID NO: 93587 - DNA, 493 bp, Oryza sativa
  Clone ID: PAT_MRT4530_91957C.1
ttttcggccgcaagaggggcaagcccgacggtgcgaacggcgccggcgggaagcgcgcgcgagaatcggagtcatttcaaaccggtgtaggaagcaaatcgaagccatgcaccaaatttttcaggttataatccaacttaaaatgaactccacctggtaacatttattatgcatggttatttcattaaaattttgcttctgttttttttcctaaaagaattgtattgttgctaacacatgaatcaagtaaagattgtgatacaggttgtacctaatccaagcttaagaaacactcactggagtaaaattggaatgcgcacagttgcgcgaaatcactttgaacctgtgaaagatgcaacagtataaggaattaaggatatgtaactccttgtcagatgaacaacctgtcagtaatatcatgatgcagcttcatctgctcaaattgagaaaagaagattgaatacatgacttgggaactgcaactgaactcaca

SEQ ID NO: 93588 - DNA, 310 bp, Oryza sativa
  Clone ID: PAT_MRT4530_91958C.1
cggattgggggaaaagaaaaattcttcacttccatttaattccaacaccatgggatcccataagagtaagacagataaattacatacccaacaccccaactaggccatgacagatctgggatcaaaccccaaccaaggaaccccatcaaatttttacatgggcagactagacacaggaaccccccctagaactcccagggtttcacagccttttgagcaaaacacgcctaggcccttttgccacggatgcggggggcaagctggatgtccttgggcatgatggggacccccttggcggggatggcccaaa

SEQ ID NO: 93589 - DNA, 2851 bp, Oryza sativa
  Clone ID: PAT_MRT4530_91959C.1
atgccgcgtcccagaggcaggaagcgtgcggcggcggcggcggaggaggaggatgcggccacgcgggggagggggaagcgtgtcaaggcgtcgcccaagccggagacggaggcggagtacttccccgataagcggaatctggaagatctttggttgtcagcctttcctgttgggactgagtgggaaaatattgataagataaaggagttcaactggaactttgaaaatttggagaaagccctagaagaagggggagagctttatgagaaaacagtttacttgtttggaagcactgaacctcaactattgggtgtgaatggcgaatcgaagatagtacttattcctattgtagttgctgttgactgtccttttcctccttcagataaaattggtataaattctgtccaaagggaaaatgaagagatattgccaatgaaagcaatgaagatggcctgggtgccttattttccgctagaggaccggctcagtaggattgacagtttgaaaacaaaaatatttactcttggctgcactcagcggaggtctgcactgaggcatctcaaaaccgaacgagtcaagctgtttgactactgcatgccatattatatgccactaaatcctcctgaaaatgaagatgatacagttatcaatatcctatatccttttgaaccaccgatattttgtgagtttaactgggagatggatgattatgaggactttgctgatgagaaagttaaagaggaggggctaccggaggatgagagagaaaaaatgaaggaattcctaaaggagaaggttagagagagaaaaagagagctgaaacaggctaaggaagctagaaagaaagctattgatgatatggatcctaagatcaaagaggcatttgaaaatatccaattttacaaattttatcctgtaaaaactctagatactcctgatgtaagcaacgtaaaggcaaggaaggttgatttgcaccggcaagatcaacaacccacggagagttatcacaactcaccgaaagatcgggccaacaacagccttgagtgtcgagaggaactcagggtccatcaggtggtatcagagctttcgttgctcggattgcgcacggggaaacgagatggtcatgctcaacgtcaacatcttcaccatcaacgagatatagcgacttcttcacgcatcacatatgaggtacatgataatgatcttgcaagggtaaaatctaaattgcctggttttgatggtaagtatgattccgccgcttatgttaattggaagctaccagtagaaaaacaatttgatgagtatgatttttgtaatgctcaaatgattaaggctgctagtaataagtgtaccggttctgcatctttttggtggcatactgtgggaaataagcttgaaacttgggatgaatgcaaaatactgatgagaaaaagatttgtgttttcatactatagacatgctctccttgagaaatttgaacatctaaaacaaggtgacaaaactgttagggagtactttcatgattttaaaatttgtatcacttatagtgatttacaagaatctaatgagaacacaataactagatttttcagagggcttaattccaatattcaagttgggcttgttaatgtgacatataatcatataggccaattgttcatgcttgcttgcaatgttgagcgcaaaattttggagaacccaacggagcaacaagctatgcttgtgcctcctatcactgatgttttgcaggaagttcagaacagtccccaaaatgagaagaacgatatgtttgagatgtcacttccttcactcgcgaatgaggagaaggctaatgcacctacattatctgaagagggcataaaaggtaaattaaatggtgcagaaattactcaagtagagcaaactttagtggaacctacttctgaattgcctttgtcacaagttgatttgcattctgttccttgtgataaagaagagttgtgcgatagtacttcacttatatccattccacaactagtgaatgaacatgctacttttaatcttgattctccatgtactgaatttaagtatgttattcacacgtccagcgagaatgatgaacttcaattgcaatcttctttaaatacattgggctatgttatgtttgatgattcttgtgagctcaattgtttgaaggacaaaatatttgctcattctgattagccaagtcctcgtaatgttatatttcacatctttggcgattataatgatcttggaatatattctgtgcatagagtttacatctgctcagatttagaacatcctgtacatgtggataaaacatgcaagctagagaaaatgttattgctaaccaaattgtctcgagtttgccttgttttgattggaagaaacaggttgttgtaaatggactacgcaaagagcactatatggaaaaaccgaggacggttttccgtaaagaaggggaggatgatgtgaccatggctaccacgtatgcaaccattgctcacatcatggatgaacaagaagatatcgagatcaagtactccaagtgctggaatctgattcggccacctactacactgctgacttcaaacggccaccgaatctgcatacgacctccgttttcggcccgtgagtacttgatggaaagctctcagagccctctttccaacggatccagcctcatccccgaattccatctcgtgtggccggaatcacaggcacaaggaataaggttgatctgcaccggcaagatcaacaacccacggagaggtgtatcgatcgcaaaggcgcaacacaacgtcttgtacggttgtagtcggatcgtcaacaggggtactattgatcgata

SEQ ID NO: 93590 - DNA, 369 bp, Oryza sativa
  Clone ID: PAT_MRT4530_9195C.1
atggggctagatgagaatcggattcctcctccaccgccatggattcgccgtcgccggctcgccgccgcagccaacggcgagcgcttcgagcttcgccgcaacgggggcgaccccagggagtccctcctcgagttcctccgctcccgcacccggtggttgcgggcgtgcgtggtggtggtctcagcgtacgacgcggaggtcgacgaggtgacgcacgcggcggtcaactcgtgcctcacgctggtgcacggcctccaccactgcgcggtgacaaccaccgaggggctcgggagcagccggcgtgggaaacaaattgcttcgattagtacttcatcacgcatgaaatcgacaggaaactggatggattaa

SEQ ID NO: 93591 - DNA, 198 bp, Oryza sativa
  Clone ID: PAT_MRT4530_91960C.1
atggcgcagcattcacgtcgcacaccgtgcatgaggtgggagggaggcagtgaggggcggagaggaggcggagaagggaaaggggaagcagatgctacagttggtgggggtgctgctgcatggtccgtcaacaagatcaggatcaaactgactggcacgctcgcatctaatcaagatttggatctgcacaggagctaa

SEQ ID NO: 93592 - DNA, 1698 bp, Oryza sativa
  Clone ID: PAT_MRT4530_91962C.1
actaggcggtcgccgggctataacaaacttagaattatcgggacccccacgtcgctctcgcgcgggcggctcgggggcgaaaccctagccgcccacgccgccacaccctcatccccctcctccaccttgccgccgccggagctcgccggcggcaaagccggcggcgtgctgggaaggcggcggcgaggcccaaacggctcggcggaaccggcccctgcgcgaggaggacggagaacgccgatgatggcgcggccggaggtggagacgggggttcggcttggggcggcggatccggcgcccctgtggccggatctggcctccccacccacggatccggtcggcacggtgagaggcgcgacggaggcggagcgggcggcgagcggcgcgggcgtgccctgccggcgcagcgggcggcaagacgggcggcaagacggacgcgatgtgggcggcgggcggcgcgacgcgggccccggccggcacggcggcggcgtgggttggggttgctgcggcgacggcgcctgctcctactctgcctcgtgccccgatggcgcgtaggaggaaggcgaggccggcagccagggcgaggcggcggcccggtggtgtgcgaggtggtgctggccggacacgcggccttggcccgatgtccggcggcgtgaggctgtggaggtgctgcgcaaggagcaagccggtggtggtgaccgggtcatcaggtggctggctgccattggtgacctcagtggctttcggcaacacgcaggaagcggtttggcagtgaagagttcatcctctgtattgccagcttgacctgcggggtggtagactgagcttgggtgttgaagggatggcgtggtggtccggcgatggtcgttgtgcaggatggttgtgtggggttttgatgggaaaccgctggcgaaagccttgccaggccatgggctggcatgacgacggcgacgccatttggcgccgttcccctccttggaggcgtcgtcctggcattgacccctcgtaacaccaagaaccctctgcgcgcaatggtagccttggtggactcctgcaatgtccccaaagctcttcaggtctagggtgtttgacgaggcctcacttccttggcttcgttccttgctacagcgggtgttcatcactcttatctggttactgtggggtagagtcggaactgctttgctgggggcgacgaagcttagcaacaatgacacactgcaatctctttataggattgttgatgctagctgtgtgtaggagtggttccttggtagcttgggctgatgtccttcgtgggtgtcgttcttgtttgtttattttggcgttgggatagcatcgcattgaagtcgaagctgctgtgtcacttgggtggcaagcttggcaacgataacatgtgtaagctgccgtgttgtctcaaatggcaagattggccgatgccttgtgtcgggctctgtcgtggtagcttaggataggttagctgttggtgtggtgttgtagttgtggttttcgctcagttttctctaattaactgagcactgtaaagtttgatcccgttttctcctcaaaatgggatatcttcttcttaatataaaatgtcggcaacggcctgaccgtaggtttcaaaaaaaaaaaaaaaaaactcgaggcggggccccgctccctctcccccccgtgccgagtcctgctgcccgggcatcc

SEQ ID NO: 93593 - DNA, 380 bp, Oryza sativa
  Clone ID: PAT_MRT4530_91963C.1
acatgtaagacgatgaagaatgaagctagcaaatacaggcatgcatagcgcactggttaacacactctgcatgggttgatagctctctaggttcatctacattcctttattttgatcatgaacgacactggattaatacaagcaagacttagctcggcttgctgaactgatctgatcaccatgcatgcatgcaaccaggggcatttaaatttcaagcttgcccgtcattcacgactcagcacatttgcagtgcgtaaaaccaaagcttaaaggtgataatacacaacattgattcattcatacattactctaaatgaattgactggaggacgaggaacttatatttacttgcgaggggtgcatgcatatatatggtaccg

SEQ ID NO: 93594 - DNA, 1664 bp, Oryza sativa
  Clone ID: PAT_MRT4530_91964C.1
tgtagctggctatagatctgtagcctgttgctcttctctctcttactttatctttttaaaatatgtttatagctggcttatagtctgctgttgaaatgaaacgcccccgccgccctgctcccttgcgggttcacctggtcccaaagagccgtcgccgccggcgttgccggtcatcggcaacctccaccagctcggccgcgggcggcaccaccgggcgctgcgcgagctcgcgcggcggcacggcccgctgttccagctccggctcggctccgtgcgcgcgctcgtcgtctcctcggcgcccatggcggaggccgtgctcaggcaccaggaccacgtgttctgcggccggccgcagcagcgcacggcgcggggcacgctgtacggctgccgggacgtcgcgttcagcccctacggcgagcggtggcgccgcctccgccgcgtcgccgtcgtgcgcctcctcagcgcgaggcgggtcgactcgttccgcgccctccgggaggaggaggtcgcgtcgttcgtgaaccggatccgcgcggcgagcggcggaggcgtcgtcaacttgaccgagctcatcgtcggcctcacccacgccgtcgtgtcgagggctgcgttcgggaagaagctcggcggcgtcgatccggcgaaggtccgcgagacgataggcgagctcgccgacctgctcgagacgatcgcggtgagcgacatgttcccgcggctccggtgggtggactgggcgacggggctcgacgcgaggacgaagaggacggcggccaagctcgacgaggttctcgagatggcgctccgtgaccacgagcagagccgcggggacgacgacgacggcggcggcggcgacggcgagccccgtgacctgatggacgacctgctctccatggccaacgacggcggcggcgaccatggccacaagctcgacaggatcgatgtcaagggactcatcttggtaaatcaaataattcgtctcaatttctttcatgtcgcattgccaggacatgttcatagcaggcacggacacaatatacaaatcgatagaatggacgatggccgagctcatcaagaacccagcagaaatggcgaaggtccaagccgaggtgagacatgtcgccgcagctgcacacggagacgaagacgaagacaccgtcgccgtcgtcagggaggagcagctggggaagatgaccctcctccgggcggcgatgaaggaggcgatgcgcctccacccgccggtgccgctgctcatcccgcgcgaggcgatcgaggacacggtgctccacggccaccgcgtcgcggcggggacgcgcgtgatgatcaacgcgtgggcgatcgggagggacgaggcggcgtgggagggcgcggcggagttcaggccggggaggttcgccggcggcggggacgccgccggcgtcgagtactacggcggcggcgacttccggttcgtgccgttcggcgccggcaggaggggttgccccggcgtggcgttcgggacgcggctcgcggagctcgcggtggcgaacatggcgtgctggtttgagtgggagctccccgatgggcaggacgtggagtcgttcgaggtcgtcgagtcgagcggtttgtcgcctgggctcatcaacccgttggtcctcgccgcgaaacctctcaaataagtaatccct

SEQ ID NO: 93595 - DNA, 1635 bp, Oryza sativa
  Clone ID: PAT_MRT4530_91965C.1
atggcggccgtgcagctcgactccggcctgctcatcggctttctcttcttggcgacgtgcttggtcgtcgcggttaggagctacctgagatcgggcggcgcggacggtggccgtggtggcgcggcgatcacgtcgccgccggcgttgccggtcatcggcaacctccaccagctcggccgcgggcggcaccaccgggcgctgcgcgagctcgcgcggcggcacggcccgctgttccagctccggctcggctccgtgcgcgcgctcgtcgtctcctcggcgtccatggcggaggccgtgctcaggcaccaggaccacgtgttctgcggccggccgcagcagcacacggcgcggggcacgctgtacggctgccgggacgtcgcgttcagcccctacggcgagcggtggcgccgcctccgccgcgtcgccgtcgtgcacctcctcagcgcgaggcgggtcgactcgttccgcgccctccgggaggaggaggtcgcgtcgttcgtgaaccggatccgcgcggcgagcggcggaggcggaggcgtcgtcaacttgaccgagctcatcgtcggcctgacccacgccgtcgtgtcgagggcggcgttcgggaagaagctcggcggcgtcgagccggcgaaggtccgcgagacggtgggggagctcgccgacctgctggggacgatcgcagtgagcgacatgttcccgcggctccggtgggtggactgggcgacggggctcgacgcgaggacgaagaggacggcggccaagctcgacgaggttctcgagatggtgctccgtgaccacgagccgagccgcggggacgacgacgacgacgacggcgacggcgaggcccgtgacctcatggacgaccttctctccatggccaacggcggcgacgaccatggctacaagctcgacaggatcgatgtcaagggactcctcatcttggtaagacatgttcgcggcaggcacggacacagtctacaagtcgatagaatgaacaatggccgagctcatcaagaacccagcagaaatggcgaaagtgcaagcagaggtgagacatgtcgtagcagctgcacacggaggagaaggagacgaagacgccgtcgtcatcgtcaaggaggagcaggcgagcagctggggaagatgacgctcctccgggcggcgatgaaggaggcgatgcgcctccacccaccgctgccgctgctcatcccgcgcgaggcgatccaggacacggtgctccacggccaccgcgtcgcggcggggacgcgcgtgatgatcaacgcgtgggcgatcgggagggacgaggcggcgtgggaggacgcgggggagttcaggccggggaggttcgccgacggcggggacaacgccggcgtcgagtactacggcggcggcggcgacttccggttcatgccgttcggcgccggcaggagggggtgccccggcatggcgttcgcgacgcggctcgcggagctcgtggtggcgaacatggcgtgctggtttgagtgggagctccccgatgggcaggacgtccagtcgttcgagccttcgaggtcgtcgagtcgagaggtttgtcgcctgggctcatcatccgggaaaattggaaaccacgtatatgtagtgcaaaccactcgtatgtag

SEQ ID NO: 93596 - DNA, 360 bp, Oryza sativa
  Clone ID: PAT_MRT4530_91966C.1
acgaaatggaacggtttggaagcatggtgggcaatgaattctatccccctgtaaatctcatgtacagtagagattaactctgtttgttcattacagtaaacagaaccagcacctgcgcattgtcatttacccgaaaccaaagagattttttccacgtgtttctctgcaaaacaaagccataaacctgtagatattatttgcttgcaatttttgtcagctcctaaacatagtttatggattatgatatgtaaggattaggctgagtacgctttgccgcgtaaatattttacgcactaattatgtgcccgatcaaatgagtataatcattatccgaaacataagaaaaaaaaaaataataat

SEQ ID NO: 93597 - DNA, 370 bp, Oryza sativa
  Clone ID: PAT_MRT4530_91967C.1
gctaccaagggcatgagtgcctcacgtgccacctgtggcacccacgttgcccacgattgattgtcacgatgcacatgcacaacacagttagtttgtgctgtgaactcgggcagcactgccacgattgattgaagatgcgcgatgcacgatgccactaacactgtggcaaccactgggcccctgtcaaattccaacttctccttccctcgtgggcttgttgttgatcacaaccgttgggtgtacactggtaccttctacgtaataaaggtgtctgcatacctattcgtggtgccaaccaactaggaaattaagaaccctttgaataaatatccatcattttcagacttgccaaaaaaaaaaaaaaaaaaaa

SEQ ID NO: 93598 - DNA, 323 bp, Oryza sativa
  Clone ID: PAT_MRT4530_91968C.1
ctatattatgtctgagctgtactttgctacctggctctgacgaagcatatacctccttttcatttgccatgatacttgataaatactcccgactggtgtgcgtgcccgactgcccgcatgcctatccttctttttggtctgccttaactgcttgcaagttcgtgttgtccgctcgcgcacccctactactacgatttccgcggaaacacgccacgcgacagccggcgcgtgtctggtactctggtttggcccatacaactgtaccgtcctccccttgcgcatgcagagcgccatggccgctcgcgctgccgcgtcaccggccg

SEQ ID NO: 93599 - DNA, 1427 bp, Oryza sativa
  Clone ID: PAT_MRT4530_91969C.1
agctgcagcttgcagggcgcccagctcacagcatcagagagattcagagtagctcagagtgagcttttgctcgttggtccctcgaattctggagctagttcgcccgggtcctcggtttcgatcgatccccttcagacgaagcggaggcggatttcgcatgaggtagcgcaagcgtcagccatggaggaggtcgtcgtcggcggcaaggagcgcaagcgcccgcgcggcgcgctcgtcggcgtcggcggcgggggcgcgtcggcggcgacggcggcggcctggcggacgagccgggtggcgcgggcggcggcgggggggaaggacaggcacagcaaggtggtgacgtcgcgggggctccgcgaccgccgggtgaggctgtcggtgccgacggccatcgcgttctacgacatccaggaccgcctcggcgtcgaccagccgagcaaggccatcgagtggctcatccgcgccgccgcggccgccatcgacgcgctcccgtcgctcgactgctccttagccctccccgccgccgcctcctcgccgccgccgccggccgccgacgacgccgaggtcagcacatccgagaccagcaagagctccgtgctctccctcgccaacgccccctgcgacaacggcggcggcgcgttcgccgagctcctccactgctcgaacaccaacggcagcaagccattgcagcaacagcagcaggcgacgcttgcgtactacgcggcggcgcagagcgcgcacatggcggcgcccatgtcgttcgaggtgatggcgatgccgccccacctcgcgttctcgcaggagcagcagcagcacgccacggtggccgccttcgatcggggcacacttcagtccaatgcgtcgctgtggccgccgccgccgcagccgccgccgtcgcagcacccgttcctgctgcagaggttcgccgccgctccggctgaggtcgccggcctcccgttcttccttgcaggcggcgtcggcggcgctgctgctgctgctccggcggcgacgaccaatggtggggagcggaggctgcagctctgggacttcaaggaggagaggaagacatgactaaaattgcctggtgttatgtctggtgttgtgccacaagtcaaagccgatcagcatgaagaaaaattcagaacaagaaaaagtattcaggaactgaagatgatgtcagcgccaggaaaaaaacttaaacaccagaaaaatggatgtaattccagatctatgattcttccggctcatgatttccatttctctattctctaacaatgtacgatttaattgtaaccttgactgtgttgtgattcagaaaccatgtcattctgttgcctgtacttcgataattttgtcacatactgcttaatcagagatgcctgacattttcctaaaaaaaaaaaaaaaaaaaaaaaaaaaaaaaa

SEQ ID NO: 93600 - DNA, 358 bp, Oryza sativa
  Clone ID: PAT_MRT4530_9196C.1
gaaaaaataaaaaataaaaaaaaaaaaaaaagggtttctaatataaaaaaaaaaaaaataataaaaaaataaataaaagggaaagagtattatatagaggactgtaaattaaattaaataattcgcggttttattaaaaaaatgggtggggcatttctggtggtttcaacatttttaatcctttttattgaaattcttatttttttatttgttgccataaatttaaaaaaagggcgcgtgtttaaaaacctggagttacggaaaaaactttggttaaaaaaaattaatcttttttgaattaattaattttttaaaagtgtggtttatattcaaaatgacccactaatgttcccctttt

SEQ ID NO: 93601 - DNA, 203 bp, Oryza sativa
  Clone ID: PAT_MRT4530_91970C.1
ggagggaggacgcagggaggccggcgatggccgagcgccgtgggcgggtgcttgatgacgatggacggagggagagatgtgcagccgacggcggccagcgggagagggagcggcgatcgccctccgccacaacccgcctccaccaccgagctcgtcagcgaccgcccaccggagcaaggaggatgacagccggcgacgggtga

SEQ ID NO: 93602 - DNA, 240 bp, Oryza sativa
  Clone ID: PAT_MRT4530_91971C.1
atggagagagcagcgacggagcccgggcggctgcccgacctgcctaggaggtggatcgagccgttcatgcgggtcatggctatgtcatatcgttactacctatcatactgctggatgaatgacaatacgaccagagatgctcttaagatcaagaagggtggttcccatgttgttacaacaaacaagcctaaagaatcttttgccatggggaaacggcggctagccaataagcctctgtga

SEQ ID NO: 93603 - DNA, 513 bp, Oryza sativa
  Clone ID: PAT_MRT4530_91972C.1
gtggatccccgggctgcaggttgacgcagagcattttaacacaagcatgtagtttctaagggtgctctagagaaaaaaaatacattgctcttgtttcaaggagcatgtaaaaatcttttaatcatggtgagaggctgatggatagtcatgcacaaatatttcttagttggaattgtgtgatatcagacttttcatattcatgcatggctttcaggggtttgtagctctttgcatagatatatgggattcttcaagatagattttacaattggtccttatctgaaaaaaggattttacaatagttgaagcagtaaaccagaacaaactgactaggggatatttttgcaagctatttaagaaggaatatgtggaaatataatgttttgctgatcgatagccattttacttatgttttgtcagtgacatggctggccctgcatgcacgcacccctaaaggacatcactacaaattggttgaaaatggacggttcaaacaaacgccatctactttac

SEQ ID NO: 93604 - DNA, 1991 bp, Oryza sativa
  Clone ID: PAT_MRT4530_91973C.1
atggaggacgacatcgaggagggcgtggccgagagctcgggaccctctccccgtgccgccgccgccgccgcgggactcggttccggcggcggcggcggcggcggtagcgtgcacgggtcccctgacattaggaacgtcatctacgagcgcctggtggcgattcgcaacgaggaggccatctccaacccttcctccttccgcgttgagctcgaccgccacttccttcgcttgcccgaaagctatttgatcgatctggatgtcagcaaggcagagcaagtgctgctgcaccggaggattctcgccgactgcgccgaccctgaaaagcgcccaatcttccatgcccgctacataggggtagactctggatcaactccaactgaaaacggtaatggtgggggctttctccctatcaatttgagagatgatgaattcacagaatccgagccatatgaaaggatgatggaagacctgagtctagagagaggaaaaggtgtggatgacttcgaagccagttctgcaagaagggactcgaaattcgtccgtgttcatgaaattattttttcttccatagacaaggccaaagctcctcaatggcttttgcctcgatgtgtttgttgttgatggctgggatacagaggaaacggatggtttgcttcagaagcttatagaggccgaggcaagcagccatggctcattgtctaatccgacaaatttgtcacaatcagagaaagttctagagctgcaggaaaagataggagattctgaattcgacaggagtttgctgcaaattggggagaaaattgcatccggatcttctggggatctatatcgaggaacttatctcggtgtggatgttgcagtaaaatttcttagatctgaacatgttaacgattcttcgaaagtggagttcttgcaagaaataatgattttaaatgaagtcatgtccaggagtgttgatcatgaaaatgttgtccaattttatggagcttgcacaaagcatcgaaagtatctcattgtaacagagtacatgcccggaggtaatttgtatgacttccttcataagcaaaacaatactttggagcttcctgttgttcttaggattgctattggtatctcaaaaggaatggattatttgcaccagaataatatcatccatagggacttgaagactgccaatttgctaattggctctggtcaagtcgtgaagatcgcagactttggtgtctctcggctccgatctcaagggggagaaatgactgctgaaactggcacgtatagatggatggcacctgaggtaataaaccataagccttatgaccataaggcagatgtcttcagctttgctattgttctatgggagttggtcactacaaagataccatacgaaaatctgacacccttgcaagctgcactgggagtaaggcagggaatgcgcatggagatcccaccgaaggtgcatccgaggttgtccaaactgattgaacgatgttgggatgaaaatcctcatgtgcggccccttttctcagagattactgtagaattggaagatatcttacggcatgtcctggtttccaagacaggaagtcgacatcccaaagcaaagatacaaaagaaatcggcgcgatagagaatacatgggctccttgtgacctttgtgaaaacagcttagaggttttcttcaaaactaccaggctactgtttgttgctagcacggcagcatagaaatgattttgtatatatgtcggatgcttgcatgtataatatttttttactcacacctgattggtatgagttttctgttttgtcatataatatgtgtactaaatttagaagaacgctgaacaaggcggcagccactgggatattttaatacagctctagtttttgtgtttccagcctgaaaaaaaaaaacatgtacatccgcataacttagtgagacttcgactcagatgaagacctatctctttgctgaaaaaacaaaaaaaaaaaaa

SEQ ID NO: 93605 - DNA, 528 bp, Oryza sativa
  Clone ID: PAT_MRT4530_91974C.1
gtgctctcatgcatatgtatggtcttctcctgctaccagcgaaaccaagccaccaccaccacgtctccttactgcgaaaaccgccatggaaggaagttctgcaagccaggccaaggccttgttcaaagccactcttattggcctggccatcctatccatggtcacttgggtgccacacatgtattcctgcattaagatgttcttggtttcggtcccttccgcggcttccaccctcgcgacaccgaggtgtttgttcatcttctccaacatcatcgtcatcttcctcgccagcgagttaaaactctccgagggggagagcttcggcgagtctccgatccggaccaatcatggctccgatgctttcatcagatatagggttgaagctttcactccagctaccaagtcaaacgatgtgattgttcaccatgttgttgaagagcaagttagcacggtaattgtacatgatgacagccctgcacagctagatcaatgtgaacaagtggttgctttatcaaccatgttcatgga

SEQ ID NO: 93606 - DNA, 867 bp, Oryza sativa
  Clone ID: PAT_MRT4530_91975C.1
atgaccctagcggccgcggcggaggcgccggcgccgacccatgcgttcgcgatcgcggcagaggaggtggcaatggagccgctgtcgacggcgacggctccggcggccatggaggaggagtccagtagtagtggcggcggcggcggggtaggggagcgacggtcgcggttccgccggatctgcgtctactgcggcagcgccaaggggaagaagcccagctaccaggacgccgccgtcgacctcggcaaggagctggtggagaggggcatagacctggtctacgggggtggatccatcggactcatgggcctggtctcgcatgcagttcatgctggaggtcgccatgtcattgggatcattccaaaatctctgatgcccagagaggtaactggagaacctgtaggggaagttagagccgtttctggtatgcacgagaggaaggccgagatggctcggtttgctgatgcttttattgctctaccaggtggctatggaaccttggaggagttgcttgaggtcattacttgggcacaacttggaatccataagaagccgatatggttcacactttttgaatattctcaaacagctaatggaatggcgattggaggatcttatactgttggtcttttgaatgttgacggattctacaaccctcttctatcgtttatcgacttggctgttaatgaaggcttcatcaccgaggaggctaggcgcatcatcatctccgctccaacagccaaggagctagttatgaaattggaggactatgtccccgagtatagcattggcttggtttgggaggaccagaaccagaagcaaaataacttggtccctgagctggactccgggatcacatcatcctga

SEQ ID NO: 93607 - DNA, 300 bp, Oryza sativa
  Clone ID: PAT_MRT4530_91976C.1
gccagccccccgttatccttgcttccacggcccaagacagctggtgaacccgtctggtgctttaaagggcggaagaatcgaacgagtagcgtctgcagatcgactggtgcgtcggtatcggctcgttcgtgctcttccacttattgtaatcttgtatacgtactgttcgtgaattgttagcatatttgtactggcaattggctattgtcttgcgtagtgctaatgaaggatgcatggattgtcttagaacttggtggactagccaggccaatatataacaccccaatgtacattgtattt

SEQ ID NO: 93608 - DNA, 2070 bp, Oryza sativa
  Clone ID: PAT_MRT4530_91977C.1
cccccacgcgtccgcccacggctgatcaatcgccgccgccgtctcctcgtgtaaccctagcttagtggattagtttaagtgtttgccggagattatggggtcggtggcggcggaggaggtggtggtgttccggtcgaagctgccggacatcgagatcgacaacagcatgacgctgcaggagtactgcttcgcgaggatggcggaggtcggggcgcggccgtgcctgatcgacgggcagaccggggagtcgtacacgtacgcggaggtggagtccgcgtcgcggcgcgccgcggcggggctccggcggatgggggtgggcaagggcgacgtggtgatgagcctcctccgcaactgccccgagttcgccttctccttcctcggcgcggccaggctgggcgccgccaccacgacggcgaacccgttctacacgccgcacgaggtccaccgccaggcggaggccgcgggcgccagggtgatcgtcaccgaggcgtgcgccgtcgagaaggtgcgggagttcgccgcggagaggggcgtccccgtggtcaccgtggacggcgcgttcgacggctgcgtggagttccgcgaggtgctcgccgcggaggagctcgacgccgacgccgacgtccaccccgacgacgtcgtcgccctcccctactcctccggcaccaccggcctccccaagggcgtcatgctcacccaccgcagcctcatcaccagcgtcgcccagcaggtggatggagagaaccctaacctgtacttcagcaaggatgatgttatactatgcctgctgccactgttccacatctactcgctcaactccgtgctgctggctggcctgcgtgccgggtcgaccatcgtgatcatgcggaagtttgatcttggcgcgctcgtcgaccttgtgcgcaagcacaacatcaccatcgcccccttcgtgccccccatcgtggtggagatcgccaagagcccccgcgtcaccgcggaggacctcgcctccatccgcatggtcatgtccggtgccgcgcccatggggaaggaccttcaggacgccttcatggccaagatccccaatgccgtcctgggacaggggtatgggatgactgaggctggacctgtgctggccatgtgtctggccttcgcaaaggagccattcgaggtcaagtccggctcgtgcgggacagtggtgcgcaacgcggagctgaagatcgtcgaccccgacaccggcacctccctcggccggaaccagtccggcgagatctgcatccgcggagaacagatcatgaaaggctatctgaatgatcctgaggcgaccaagaacaccatcgacgaggacgggtggctgcacaccggagacatcggcttcgtcgacgacgacgacgagatcttcatcgtggacaggctcaaggagatcatcaagtacaaggggttccaggtgccaccggcacgagctggaggcgctgctcatcactcacccggagatcaaggacgccgccgtcgtctcgatgaaggatgatcttgccggtgaagtgccagtcgccttcattgtccggacagaaggctcagaaatcaccgaggatgagatcaagaaattcgttgcaaaagaggtggtgttctacaagaggatcaacaaggtgttcttcaccgattccatccccaagaacccttccggcaagatcctcaggaaggacttgagagccaggctcgccgccggcatccccgacgccgtcgccgccgccgccgccgatgcgcccaaaagcagctaaggccaacgccgacgttttctctattttcagtcacacaaccggtgaaaaaaaaatgcagagatatgatgttgctgtccatgaaaatggaggcagaaatggagcagaggaagtttatagtttggtttgttggttggttgatgctgctgcagcagcttgtgcaatgttcataaaatggcattaataatattattattattattatacatagatgatgtattgtttttgaccataagaacaaggctgattacaaaataatacagtgtattaattaaaaaaaaaaaaaaaaaaaaaaaaaaaaaaaaaaaaaaaa

SEQ ID NO: 93609 - DNA, 1773 bp, Oryza sativa
  Clone ID: PAT_MRT4530_91978C.1
atggcaggattgcacaaggggaaacaagatggtcatgctcaacgtcaacatctacaccttcgacgagatatgacgacttcttcacgtgatgcatatgaggtacatgactataattttgcacaagttgcatgtaagttaccagtctatgatggaaagtatgattccgctgcatacattaattgggagctagcagtagaaaaacaatttgatgagtatgatttttctaatgctcaaatgattaaggctgctagtaataagtgtaccggttctgcatctttttggtggcatactgtggggaataagcttgaaacttgggatgaatgcaaaatactgatgagaaaaagatttgtgttttcatactatagacgtgctctccttgagaaatgggaacatctaaaacaaggtgacaaaactgttagggagtactttcatgattttaaaatttgtatcacttatagtggtttacaagaatctaatgagaacacaatgactagatttttcagagggcttaatttcaatattcaggctgggcttgttaatgtgacatataatcatataggccaattgttcatgcttgcttgcattgttgagcgcaaaattttggagaatccaacggagcaacaagatatgcttgtgcctcctatcactgatgttttgcaggaagttcagaaaagtctccaaaatgagaagaacgatatgtttgagatgtcacttccatcactcgcgaatgaggagaaggctgatgcagctacattgtctgaaggaaagttcgcaaggtaaattaaatggtgctgagagaaatgaagtagagcaaccattagtggaatcaattgctgagttgcctttgtcacaagttgatttacttgctgttccttgtgataaagaagagttgtgtgataatgtttcacttatatccatgccacaactagtgaatgaacatgttagttctactatttctttgtgtgctgattctaagcatgttgttcacattactaatgaagtagaggaacgcgaattgctatcttctttaaatactttgggctatgttcagtttgatgatttttgtgagctcgataatttgaaggagaaattatttgataaatctgttttgccatgtccaactaatgctatttttcatatctttggcgaatataatgatagaggaatatttttggtgcatagagtttacatttgttcagatttagaacatcttgtagttcccgataaaatatgcaagctagagagacatgttactgctaatcacattgtctcgagtttgtcttgttttaattgcaagaaacaggttgttttcagcggactgcgcgaagagcaccatatggaaaaaccgaggacagttttctgtgaagaaggggaggatgatgtgaccatggctactatggatacgaccattgctcacatcatgaatcaacaagaagacatcaagatcaagtcttccatgtgctgcaatctgattcggccacgtgttacattgctgacttcaaacggccgccaaatctacatacgtgctccgttttgggcccgtgagtacttgatggaaagctctcgaagtcctccttccaacggatccagccccatctcggaattctatcttgtttggccgcaatcacagaagcaaggaacagggttgatctgcaccggcaagatcaacaacccacggagaggtgtatcgatcgctaaggcgcaacacaacgtctccgcttcctcctcggcgcgtgtgagggaggagaagcagagcgtgggacagagagggag

SEQ ID NO: 93610 - DNA, 129 bp, Oryza sativa
  Clone ID: PAT_MRT4530_91979C.1
atgtcaggtataaccgtcccagaaattgtcataactgtcacaaccatcatagggatccacctgatagtgacccaggagaatttggaggcctgctgggccggcccaggggttcggccgaatgctggcaac

SEQ ID NO: 93611 - DNA, 2316 bp, Oryza sativa
  Clone ID: PAT_MRT4530_9197C.1
atggcggaggaggtgtatgtcgcgtcgatcgaccagggcacgacgagcacgcggttcatcgtctacgaccgccaacgccaagcccgtcgcgtcgcatcagctcgagttcaagcagcactacccggagcctgggtgttatggttgatcgaaaatgtggatgccgtcaagaatgcagtccgagctggtgatgccttatttggcacaattgacacctggttaatctggaacctcacaggaggcattggcgggacagatcgtgatggaaataaagtatttgggcaccatgtcacagactgctccaatgcatctcgcacaatgcttatgaacctgaaggcacttgactgggacaaaccaacacttgagacgttaggaattcctgctgagatattgcccaaaattatcagtaactcggagagaattggtgtggttgccaatgggtttcccttggcgggcgtccctattgctgggtgcctaggagaccagcatgctgcaatgcttgggcagctgtgccagaaaggtgaagccaaaagcacctatggaactggtgccttcattcttctcaacacaggggaggagcctacccaatcctcccatggtcttcttagcacgattgcttataagcttggcccaagcgcacccactaattatgctctagaaggctccatcgcaattgctggtgccgcagttcagtggttgagagacagccttggaatcattagcacagcagctgatattgaaaagttggctgatactgtgcaggattcaggtggaatatactttgttccagcattcaatgggttgtttgcaccatggtggagggatgatgcaagaggcatatgtataggaatcacacggttcactaacaaggggcacattgctcgagcagtgctcgagagtatgtgctttcaggtgaatgatgtcctcagctccatgcacaaggatgctggggaggcaggagaagtgaagagtgcagaaggggagttcctgctgcgcgttgatggtggtgctactgtcaacaatcttctcatgcagatccaggctgatttattgggtagccctgttgtcagacctgctgacatcgagacaactgcccttggagctgcgtatgcagctggattagctgttggagtctggtcgaaggaacaaattttcgctggtttgcacaaggagaacaccacagtcttccgcccgaaattggatgaggccacaggaggaagagagcagactcctgccggtcagcccggttctgtgcagcaggcagcagcgagcaagagagttggaggcgccgccgcggagaggagggcaaccgtggccatccatcacggtggagacggatctacacgcactcccaccgtcccatggattgaatctaccgatgcgggtggcggtcgaggagggaggagtgatttgccaccgtcctcccctactgagaaattggacattctgccactaccaatatttctttcacctcctcctccggcgaacatgtgggaagaggcaaggctgtgcgaggagaaggggaagaggcggcgctatgcgaggagatgttctggacaccgtcgccggcaagagaaggatgaggcggccgtcctcgtgaagcgcgagcacccgggccgcgctgtagcggccaacgcggcgaggcgcgagcgcttcgaccgcatgacggcgtctgactcagcggccgcagcctgccatttgtggtcggcgtttgactcgatgacgcggcggaaggatcctcttgatggactgaagctatactccggcgacgagcactactggtcccatgcgtggtgtagtcggtcggattcacggcggtgccggtgtttgccgcggccgggatctggttcgtcgtgttcagcgtcgctcaccgctgcgtacgtaatttctccggtcacctcgccgtcggggcggttcgacgggagcacaacggtgacggtggagtacatgacgggcaggggcggcgagcgagccaacgttggtcatagcggtggcgacggcgtcgtcgaggctaagcggtggtcctcgcttgtgacggtgacgaggtcgctcccttgtaaccactctctccgcatactttatcttctaatgcccgctcgttctgattctggagatacgacgactacttccctccgaggcaattcactgggtaaagagaaccgcaataatcctgaattacacagtacaacgcagacactcacaacgcacgcacacaaaccctacccctatgagcatcttgagcatcttcgaagattgggccggcaaattctggagagattgacgaagtcaccacaggcgcctcgctgtccacaacgccgt

SEQ ID NO: 93612 - DNA, 4161 bp, Oryza sativa
  Clone ID: PAT_MRT4530_91980C.1
atgacaaagccgccatccaagacggaggtggagccatctaacgtgatgccggtcacattggatgacttcgaaggagaagatcgtaaagctatggaggagtacatcaacgagctcacaaaggaggcattgatgagagcaactactaggactcgtcaaggcgtgatcatcaagcccgagccacgtcccaaactcgctcccgacgtggtaagtaatgacgaggtatcacaatctatccaacaacaaattgcatctacaatagattcatctatggctaattttaaagatcgattagatgtaatgtttaaggataaagttgatgggtttttaaggagtaggctcggttctcttatgaataattacacattaaaggataaagcctataccactgctaatcaacctcctatagatcaaacgggtagtaaaaccgacggaacggcgctcacggccggtccgaccgggcctgacggccggtcagactgcgacacagccgtcggtccgatcggccagacggccggtcagaccgggtattaccccggcggtcagaccggctctcaggccggtccgaccgcacatcatgacgctggtcagaccgggccctgggccggtcagaccggcgcaattgtcccaatacaggctatagatccaatgactaatgctagttatttgtatcactttaaaacatttgatcctcctatttctactgctaccagtagtcctcaagttcccccacatattcctaatgcttataatgatgtttctaggggatatcctcccgatactagacaaggccaatataatcatattgtgccacaaacacaacctattaggccaccaaacccaccgccaaatcaacaagggcctaataacatggaggatatgattagtgatattatgaggaatagattcgggattgaaactaggaatcgtgctagaacttacaaaaagccatatcctgattattatgatgatgtgtcgtttcctcgaaattatagagttcccgaatttgccaagtttagtggtgaggatgtttctcctcttagagaaagactagatggccaacaatttcttgatgttagtcaactcatgcaaagggctctggctcaagaaagccgggttaaggataatagaaaacttgctagaccatttgataaaaaacctaatgttaatgtggttgattaccctgaggctattgatagtgaggaagagggtgataatgatatttatgttgccgaatggtcatggactaataagaataagccttttgtttgctctaatctaatgccgactcctcgcaaagatcggcaaagtgagagaaatgatgtgaccatggctaccacagatgcaaccattgctcacatcatggatgaacaagaagatatcaagatcaagtcctccaagtgctggaatccgattcggccacctactacactgctgacttcaaacggctgccaaatctgcatacgacctccgtttttggcccgtgagtacttgatggaaagctcttggagtcctctttccaatggatctagcctcattgcgaaattccatcttattgagccgcaattgaagcaacaaggtgctgcgtcacctataatgggcctatgggcttgtaacttcgtctgggaccccggcccaggaatagggttgatctgcaccggcaagatcagcaacccacggagagcctacccagagctccacatatttgattacagccgtaccgcaagtgtttgccaaggcattgatacatccaaccttcattggggtgcttggttgagtcggtggatacgcaagataattggggatagctgtgctcaacatcgacatcttcgtcgagacatgaggagggatcaacatgaccattatgaggaagtgagtaatcatgaaaaggaggagagagacatgaaagagccgccagtcccattgatcacactcaaagccgaggcacctccattatctgaagagggcatcaaaggtaaacttaatggagcagagcaaccattagtggaaccaactgctggaattcctttgtcacaagttgatttactcgctgttctttgtgataaagaagagttgtgtgataatgcttcacttatatccatgccacaactagtgaatgaacatgctatttctagtgtttctttatgtgctgattttaagcatgttgttcatattgctaatgaagtacaggaacgtgaattgctatcttctttaaatactttgggctatgttcagtttgatgatttttgtgagctcgataatttgaagaagaaattatttgctaagtctgatttgccttgtccaactactgctatttttcatatatttggcgaatctgatgatagaggaatatatttggtgcatagagtttacatatgttcagatttagaacctcctatacatgtggataaaacatgcaagctagagcgaaatgttattgctaaccaaattgtctcgagtttgccttgttttgactggaagaaacaggttgttgtaaatggactacgcaaagagcaccatatggaaaaaccgaggacggttttccgtgaagaaggggaggatgatgtgaccatggctatcacagatgcaaccattgctcacatcatggatgaacaagaagatatcaagatcaagtcctccaagtgctggaatccgattcggccacctactacactgctgacttcaaacggctgccgaatctgcatacgacctccgttttcggcctgtgagtacttgatggaaagctcttggagccctctttccaatggatccagcctcattgcgaaattccatcttattgagccgcaattgaagcaacaaggtgctgcgtcacctataatgggcctatgggcttgtaacttcgtctgggaccccggcccaggaatagggttgatctgcaccggcaagatcagcaacccacggagagggatatgcaagataattggggatagctgtgctcaacatcgacatcttcgtcgagacatgaggagggatcaacatgaccattatgaggaagtgcataatcatgaaaaggaggagagagacatgaaagagccgccagtcccattgatcacactcaaagtcgaggcacctccattatctgaagagggcatcaaaggtaaacttaatggtgctgaaattaataaagcagagcaaccattagtggaaccaactgctggaattcctttgtcacaagttgatttactcgctgttctttgtgataaagaagagttgtgtgataatgcttcacttattatatccattccacaactagtgaatgaacatgctatttctagtgtttctttatgtgctgattttaagcatgttgttcatattgctaatgaagtacaggaacgtgaattgctatcttctttaaatactttgggctatgttcagtttgatgatttttgtgagctcgataatttgaagaagaaattatttgctaagtctgatttgccttgtccaactactgctatttttcatatatttggcgaatctgatgatagaggaatatatttggtgcatagagtttacatatgttcagatttagaacctcctatacatgtggataaaacatgcaagctagagcgaaatgttattgctaaccaaattgtctcgagtttgccttgttttgactggaagaaacaggttgttgtaaatggactacgcaaagagcaccatatggaaaaaccgaggacggttttccgtgaagaaggggaggatgatgtgaccatggctaccacagatgcaaccattgctcacatcatggatgaacaagaagatatcaagatcaagtcctccaagtgctggaatccgattcggccacctactacactgctgacttcaaacggctgccgaatctgcatacgacctccgttttcggcccgtgagtacttgatggaaagctcttggagtcctctttccaatggatccagcctcattgcgaaattccatcttattgagccgcaattgaagcaacaaggtgctgcgtcacctataatgggcctatgggcttgtaacttcgtctgggaccccggcccaggaatagggttgatctgcaccggcaagatcagcaacccgcggagaggtgtatcgatcgctaaggcgcaacacaacgtctcgtacggttgtagtcggatcgtcaacgtttctcccaaatcgtag

SEQ ID NO: 93613 - DNA, 2604 bp, Oryza sativa
  Clone ID: PAT_MRT4530_91981C.1
aaaattactcaagtgagtatgcttctgatgaattacatttttccactttccatgctgacctagagcaaactttagtggaacctacttctgaattgcctttgtcacaagttgatttgcattctattccttgtgataaagaagagttgtatgatagtatttcacttatatccattccacaactagtgaatgaacatgctacgtttaatcttgattctccatgtactgaatttaatttaagcatgttattcacacgtccagcgagaatgatgaacttcaattgcaatcttctttaaatacattgggctatattctgtttgatgattcttgtgagctcaattgtttgaaggacaaaatatttgctcattttgatttgccatgtccaaccaatgttatatttcacatctttggcgaatataatgatcttggaatatattttgtgcatagactttacatctgctcggatttagaacttcctgtacatgtggataaaacatacaagctagagagaaatgttattgctaaccaaattgtctcgagtttgccttgttttaattggaagaaacaggttgctgtaaatggactacgcaaagagcaccatatggaaaaaccgaggacggttttctgtgaagaaggggaggatgatgtgaccatggctactacggatacatccgttgctcacatcatggatgaacaacaagatatcaagttcgagtactccaagtgccaaaatccaattcggccacctgctacactgctgacttcaaacggccaccgaatctgcatacgacctccgttttcggccaatgagtacttgatggaaagctttcggagccctctttccaacggatccagcctcatctccgaattccatctcgtgtggccagaatcacacgcacaaggtgctgcgtcacctataatgggcctatgggcttgtaacttcatttgggatcccggcccaggtggggcccatgtggggtgcgccccagccaggtggagcacgaccctaggcacccctaggtcgtcctcccacccctatttatatgcaggaatagggttgatctgcaccggcaagatcaacaacccacggagaggtgtatcgatcgctaaggcgcaacacaacgtctcgtatgcacaactcaccgaaagatcgggccaacaacagccttgagtgtcgagaggaactcagggttcatcaggtggtatcagagctttcgttgctcgcggctagttcgtttagagtttcgagttctggtcacgttttgtaccacagtcgtcgctgccaccgtgtggatacgcaagataattggggatagctgtgctcaacatcgacatcttcgtcgagacatgaggagggatcaacatgaccattatgagatatacatctctttctcatttgttacaacttgcttgcaatgctgaaagtaaaatagaggaggatatgaaaaagaaacacgctatgtctttgcctccaattactaactatttgcaggaagtgcgtaatcacgaaaaggaggagagagacatgaaagagccaccaattccattgttcacactcaagttcgagacacctccatcatctaaagaggacatccaaggtaaagtaaatggtactgaaattaatcaaggtgagtgcattgttaacgaagtaaatttgtccacttttcatgcaaaagtagagcaaccgttagtggaaccaaatgctggaattcctttgtcacaagttgatttactcgctgttccttgtgataaagaagagttgtgtgataatgcttcacttatatccatgccacaactagtgaatgaacatgctattcctagtgtttctttgtgtgctgattttaagcatgctgttcacattgctaatgaagttgaggaacgtaaattgctatcttctttaaatactttgggctatgttcagtttgatgatttttgtgagcttgataatttgaaggagaaattatttgctaagtctgatttgccatgtccaactaatgctatttctcatatctttggcaaatataatgatagaggaatatatttggtgcatagagttttcatttgttcggatttagagaaacatgttattgctaatcacactacttcgagtttctctagttttgattggatgaaacaggttattttgaatggactatatgaagaacaccatatggaaaaaccgaggacggttttctgtgaagaaggggaggatgatgtgaccatggctactacggatacatccgttgctcacatcatggatgaacaacaagatatcaagttcgagtactccaagtgccaaaatccaattcggccacctgctatactgctgacttcaaacggccgccgaatctgcatacgacctccgttttcggcccgtgagtacttgatggaaagctttcggagccctctttccaacggatctagcctcatctccgaattccatctcgtgtggccggaatcacacgcacaaggtgctgcgtcacctataatgggcctatgggcttgtaacttcatttgggatcccggcccaggtggggcccatgtggggtgcgccccagccaggtggagcacgaccctaggcacccctaggtcgtcctcccaccccta

SEQ ID NO: 93614 - DNA, 1632 bp, Oryza sativa
  Clone ID: PAT_MRT4530_91982C.1
atggcggacccgcgactactggaaccaacgacggtggacctgggacgagcagatccaacaatgggctccaacgacggtggtggtgggggcgtaggttccgctgccatcggtgaaggggtggcaaggagtggcggcggtggcttctggtgcggcgagtcgccggaggagttggagaagaagaagaagaagaagaagaagaagaagaagaagaagaagaagaagaggagatcgacgacgacgacgacgacgacgacggcgaggcaggaggacacggtgcgcgtgaacatcgagacgatgctggagcatctgaccacgccggcggcgaggctgggcgacggctactccatctaccgtgtcccggcgaacgtcgacaggaagcactacgagccgaggctggtctccgtcggcccgtaccaccggagcaagcaccacctcagcgccatggaggaccggaagcgcctctacctcctccggttcctcgacgacggtggcgagagcggccaccgccgcggacttctgctccaggactgcatcgacagggtgcgcgagctcgagccgcgggcgcgcgcgtgctacttcgagagcccggccaccggtgacgacggggaagacgacgacggcgacatgttcgtcgaaatgctcctcctcgacggctgcttcgtggtccagttcttcatccagtggttctccggcgtcgccgaccccatcttcaacgtcggctggaacctcccgctgctgcacaccgacctgctcatgctcgagaaccagatcccctacttcatcctcctcgcgctctacgacgcctacacgcatgacggcgacggcgacctcgaccggccggcgcggcggcccaagccgtcgctgacgagcatcatcaccgcctacttcagccagaaggaaggtcggcagccggcggcgacggagacggcgcagctgcaggaggaggacgacatcgaccacctcctccacctctaccactccaccttcgtcaagccacccgatcacctgccggcgcggcggcaccgccacggcggcggcggcagcagaccgccgaggacgatccgctgcgccaaggagctggccatgcacggggtgaggttcgtgcccaaggtcgggacgagcaacatcctcgacgtcgcgttccacgacggcgtgttcgagatcccgcgcgtcgccgtcgacgactccacctgcacccgcttcatgaacctcgccgcctttgagcagtgccgcggcggcgacgccgagacaccggcggcggggaagcacctgaccagctacgtggtgctgatggactacctgatcaacacggcggaggacgtggtgatcctggagcgcgccgacgtgatggagaacaatctggcgaacgaggaggcggcggcggcgttcttcaaccagctccgcgtctgctcctacatcgactacgacgaccactacctggcgccggtgtaccgcgacgtcgacgccttctgccgccgcaagtggcccaagtacaaggccaaattccgccgggactacctcaacagcccgtgggcgatcgtcggcttctgcttcgccaccaccttcgccgtcgtcaccttcttcaacaccatcgtcaacatactcaagacgttcttccatgtcttgcattga

SEQ ID NO: 93615 - DNA, 2102 bp, Oryza sativa
  Clone ID: PAT_MRT4530_91983C.1
atgatgagaaaacgctttgtgacatcttattacaaatgtactcttcgggagaaattagaacatctgaaacaagctgacagaactgttagggattacattcatgaatttaaggtctgtatcatctacagtggtctcaaagagtgcaatgaaaatacaacgcgtagatttttcaatgggcttaattctgaaattcaggttttgcttgataatgtgacatataatcatattgggcacctattcatgcttgctcgtagcattgagagtcagatcatatcaaaggcgaggatgcatgaccaatgtgatttatctcctctttctgaatccccaatatacttatgtaatgatgatgtgcaaacattggaggagcaatcttttgtctcccctgttactaacgttttgcaggtagatcagcacatcaaagaaaaggagaatggtatacttgagaagaaagaggatgaagcacctgcgatgtctgaagaaagttcgcaaggtaaattaaatggtgctgagagaaatgaaggtgagtattctcaaggtgagctacacttgtctacttttcatgctatagtagagcaaccattagtggaatcaattgctgagttgcctttgtcacaagttgatttacttgctgttccttgtgataaagaagagttgtgtgataatgtttcacttatatccatgccacaactagtgaatgaacatgttagttctactatttctttgtgtgctgattctaagcatgttgttcacattgctaatgaagtagaggaacgcgaattgctatcttctttaaataccttgggctatgttcagtttgatgatttttgtgagctcgataatttgaaggagaaattatttgctaaatctgatttgccatgtccaactaatgctatttttcatatctttggcgaatataatgatagaggaatatttttggtgcatagagtttacatttgttcggatttagaacatcttgtagttccggataaaatatgcaagctagagagacatgttactgccaatcatattgtctcgagtttgtcttgttttgattgcaagaaacatgttgttttcaatggactgcgcgaagagcacaatatggaaaaactgaggacggttttccgtgaagaaggggaggatgatgtgaccatggctactatggatacgaccattgctcacatcatgaatcaacaagaagacatcaagatcaagtcctccatgtgctgcaatctgattcggccacgtgttacattgctgacttcaaacggccgccaaatctacatacgtgctccgttttgggcccgtgagtacttgatggaaagctctcgaagtcctccttccaacggatccagcctcatctcggaaatctatctcgtttggccgcaatcacaaaaccaagcgcgcgtgtcggctagaccgtccgtctgcttgttcttcggaaccccaacttatcattcgtatttaactcctatttgcaattcagattgcttttatcttgttcttgcttgtttcttcgatttgcttgcaggaataaggttgatttgcaccggcaagatcaacaacccacggagaggtgtatcgatcgctaaggcgcaacgcaacgtcttgtacggttgtagtcgggtcgtcaacgtttcttccaaatcgtagttttcatcaactcaccgaaagatcgggccaacaacaaccttgagtgtcgagaggaactcagggttcatcaggtggtatcagagctttcgttgctcgcgtctagttcgtttagagtttcgagttctggtcacgttttgtaccacagtcgtcgctgccaccgtgtctctgttgttgtcgggacctacgaaaacggaatcggctcgctgccacggttctatttttgtagttttcagacgtttctatcggttagttttggagttcttgagttgcatctagagtttgccgatccttgtgtgtgtttgttttggccgtgcctgtgtcgtgcacgagaggaggaagaaggtgcaaaaaaaaagaaaaaaaaagccgcaccaaaaaaaaaacagaaaagaaaaggaaagaaaaaaaaaaagaaaagaagaaagaagaaagaaagaaaagagaaaatactg

SEQ ID NO: 93616 - DNA, 2785 bp, Oryza sativa
  Clone ID: PAT_MRT4530_91984C.1
atggctactacggatacaaccattgctcacatcatgcatgaacaagaagacattaagatcaaggcctccaagtgctggaatccgattcggccacctgctatactgctgatttcaaatggccgccaaatctccattcgagctccgttttcggcccgaataaagttgatttgcaccggcaagatcaacaaccaacagagagggttacacaaagagtttggagttgttcgtgctcaatgtggacattttcaccttcgacaacacatggcaagtgaccaacatgaagcagataaggtacatgatcataatattgcaagagtagagtctgttttgccatcttttgatggaaagtatgattccgctgcatacgttaattgggagctagcagtagaaaaacaatttgatgagtttgatttttctaatgctcaaatgattaaggctgctagtaataagtgtaccggttctgcatctttttggtggcatactgtgggaaataagcttgaaacttgggatgaatgcaaaatactgatgagaaaaagatttgtgttttcatactatagacgtgctctcctcgagaaatttgaacatctaaaacaaggtggcaaaactgttagggagtactttcatgattttacaatttgtatcacttatagtggtttacaagaatctaatgagagcacaatgactagatttttcagagggcttaatttcaatattcaggctgggcttgttaatgtgacatataatcatataggccaattgttcatgcttgcttgcattgttgagcgcaaaattttggagaatccaatggagcaacaagatatgcttgtgcctcctatcactgatgttttgcaggaagttcagaaaagtctccaaaatgagaagaacgatatgtttgagatgtcacttccatcactcgcgaatgaggagaaggctgatgcagctacattatctgaagaaagttcgcaaggtaaattaaatggtgctgagagaaatgaaggtgagtattctcaaggtgagctacacttgtccacttttcatgctatagtagagcaaccattagtggaatcaattactgagttgcctttgtcacaagttgatttacttgctgttccttgtgataaagaagagttgtgtgataatgtttcacttatatccatgccacaactagtgaatgaacatgttagttctactatttctttgtgtgctgattctaagcaccttgtttgttcatccacggatgacttggatagaatttggtgatgaggttggatccattggaaagaggactccgtgggctttccatcaagtactcacaggccgaaaacggagatcgtatgcagattcggtggccgtttgaagtcagttgtgtagcaagtggccgaatcggattctagcacgtggagcacttgatcttgttatcatcttattcatccatgatgtgagcaatggtcgtatctgtagtagccgtggtcacatcatcctccccttcttcacagaaaactgtcctcggtttttccatatggtgctcttcgcgtagtccatttaaaacaacctgttttttccaatcaaaacaagacaaactcgagataattttgttaggaataacatttctctctagcttgcatgttttatccacatgtataggaggttctaaatctgaacatatgtaatccctatgcaccaaatatattcctctatcatcagattcgccaaatatatgaaaaatagcagtagttggacaaggcaaatcagacttagtaaataatttcttcttcaaattatcaagctcacaaaaatcatcaaactgaacatagcccaaagtatttaaagaagatagcaattcacgttcctctacttcattagcaatgtgaacaacatgcttaaaatcagcacacaaagaaacagtaggaatagcatgttcattcactagttgtggcatggatataagtgaagcattatcacacaactcttctttatcacaaggaacagcgagtaaatcaacttgtgacaaaggaattccagcatttggttccactaacggttgctctacttttgcatgaaaagtggacaaatttacttcgttaacaatgcactcaccttgattaatttcagtaccatttactttaccttggatgtcctctttagatgatggaggtgtctcgaacttgagtgtgaacaatggaattggtggctctttcatgtctctctcctccttttcgtgattacgcacttcctcataatggtcatgttgatccctcctcatgtctcgacgaagatgtcgatgttgagcacagctatccccaattatcttgcatatcccgagcaacgaaagctctgataccacctgatgaaccctgagttcctctcgacactcaaggctgttattggcccgatctttcggtgagttgcgataactctccgtgggttgctgatcttgccaatgcagatcaaccctattccccacatgggccccacctgggccggggtcccaaatgaggttacaagcccataggcccattacaggtgtcacagcacattgtttcttcagttgctgccgactgagatggaatttggcaatgaggcttgatgcattggaaagaggactccgagagctttccatcaaatactcacgggctgaaaacggaggtcgtatggagcttcggcggccgtttgaagtcagcagtgtagcaggtggccgaattggattttggcacttggaggactcgaacttgatatcttgttgttcatccatgatgtgagcaacggatgtatccgtagtagccat

SEQ ID NO: 93617 - DNA, 369 bp, Oryza sativa
  Clone ID: PAT_MRT4530_91985C.1
atggacggagatttgtatggttgccgtcccaatgatcttctgatgggacggcacatacctacctccacttccgccggaggcaggcgcgacatgggaacgtggctgtctgctgacgacatgattagtgtcagacgggtcacaaatcagtcattcttgtccaccatgcgtcagcttaacaacatgcatatttgcccttcttcacacaacatcttgcctgtaatggttaggatgaagcctggcatatatctacccaggactaacttgccatctctgggaggtaacacgctagctccgtttgggaacgagcgcctagaatccctcgtcctgacgggatggggcgtggtgtgcgtcagaccgcctgtcgccacc

SEQ ID NO: 93618 - DNA, 4461 bp, Oryza sativa
  Clone ID: PAT_MRT4530_91986C.1
catgctaccatggatgcaaccattccttacatcatgtatgaacaagaagatatcgagatcaagtcctccaagtgctggaatctgattcggccacatgctacactgttgtattcaaacggtcgccgaatctgtatacgacctccgttttcggcccgaataaggttgatttgcatcggcaagatcaacaacccacgaagaggattaagcaagggaatacgcgaccatcatgctcaacatcgacatcttcgtcgagtcatgaggaatgatcaacatgaccaagatgaggtaagtgacattgttcttggaaagatcaaatatggactaccttatttcgaaggaaattataatcctcatgtttacattaattgggagctagcagttgatagcaaatttaaaaagcatggcttgtctgagaaacaaaaggttatgtgtgcctctagtgttttaattaatcaagcttctaatgattggaaacatctttgtaaccataataaaatacctcaatattggaaagacctaaaacgatatttgagagatatttatgttcctatgtattatgctgatattttgttcaacaaactgcaatgtttaaaacaagaagttacagaagctacagaatacatctctttattacgttcttgtttattacgttgtggtttagatgaatgcaaagaaactacagaattgaggtttttacgtgggcttaacaaagaaatttaggacatgcttgattgtcaaagatatacatctctttctcatttgttacaacttgcttgcaatgctgaaagtaaaatagaggaggtcatgaagaagcaacatgctatgtttttgtcttctattactaaccatttgcaggaagtgcataatcatgaaatggaggagagagacatgaaagagccgatagtcccattgttcacactcaaagtcgaggcacctccatcatctgaagagggcatcaaaggtaaacttaatggtgctgaaattaattaaggtgagcaaccattagtggaaccaactactgagattcctttgtcacaagttgatttgtttgttgttccttgtgataaagcagagttgtgtgataatgcttcacttatatcaatgtctcaactagtgaatgaacatgctattttctaatgttagttctttatgtgatgattttaagcgtgttattcacattgctaatgaagtagaggaacgtgaattaacatcttctttaaatactttgggctatgttcagtgtgatgatttttgtgagctcaataatttgaagaagaaattatttgctaagtctgatttgccatgtccaaccaatgttatattttacatctttggtaaatataatgatcttggaatatatttcgtgcatagagtttacatttgctcggatttagagcttcctgtacatgtgtataaaacatgcaagctagagagaaatgttattgctaaccaaattgtctcgaatttgccttgttttgattagtagaaataggttgttgtaaatggactatgcaaacagcatcatatggaaaaatcgaggatggttttccgtgaagaaggggaggatgatgtgaccaaggctaccatggatgcaaccattgctcacatcatggatgaacaagaagatatagagatcaagtcctccaagtgctggaatctgattcggccacctactacactgctgacttcaaacggccaccgaatctgcatacgacctccgttttcagcccaatcacaggcacaaggtgctgcatcacctataatgggcctatgggcttgtaacttcatttgggaccccagctcaggaataaggttgatctgcaccggcaagatcaacaacccacggagaggtgtatcgatcgcaaaggcgcaacacaacgtcttgtacggttgtagtcggatcgtcaatgtttctcccaaatctcgtcgctgccaccgtgtctctgttgttgtcgggacctacgaaaatggaatcggctcgctgccacggttctatttttgtagtttctagaagtttctgtcgccgtacagcaagtgtttgccaaggcatcgatacatccaacctctattggggtgcttgattgagtcggtgtatgtcaccattccgcttgccttggaagttcagaacagtccccaaaatgagaagaacgatatgtttgagatgtcacttccttcactcgcgaatgaggagaaggctaatgcacctacattatctgaagagggcataaaaggtaaattaaatggtgcagaaattactcaagatgagcaaactttagtggaacctacttctgaattgcctttgtcacaagttgatttgcattctgttccttgtgataaagaagagttgtgcgatagtacttcacttatatccattccacaactagtgaatgaacatgctacttttaatcttgattctccatgtactgaatttaagtatgttattcacacgtccagcgagaatgatgaacttcaattgcaatcttctttaaatacattgggctatgttatgtttgatgattcttgtgagctcaattgtttgaaggacaaaatatttgctcattctgattagccaagtcctcgtaatgttatatttcacatctttggcgattataatgatcttggaatatattctgtgcatagagtttacatctgctcagatttagaacatcctgtacatgtggataaaacatgcaagctagagaaaatgttattgctaaccaaattgtctcgagtttgccttgttttgattggaagaaacaggttgttgtaaatggactacgcaaagagcactatatggaaaaaccgaggacggttttccgtaaagaaggggaggatgatgtgaccatggctaccacgtatgcaaccattgctcacatcatggatgaacaagaagatatcgagatcaagtactccaagtgctggaatctgattcggccacctactacactgctgacttcaaacggccaccgaatctgcatacgacctccgttttcggcccaatcacaggcacaaggtgctgcgtcacctataatgggcctatgggcttgtaacttcatttgggaccccggcccaggaataaggttgatctgcaccggcaagatcaacaacccacggagaggtgtatcgatcgcaaaggcgcaacacaacgtcttgtacggttgtagtcggatcgtcaacgtttctcccaaatcataccactgtcatcgtcgtcgtcgtgtgctttgttgtcgtcgggacctacgaaaacggaatcgtctttccgccaaggtttcatttttctagttttcagaagtttctatcgccgtacaacaagtgtttgccgaggcatcgatacatccaacctctattggggtgcttggttgagtcaccattccacctgcattggaagttcagaacagtccccaaaatgagaagaacgatatgtttgagatgtcacttccttcactcgcgaatgaggagaaggctgatgcacctacattatctgaagaaggcataaaaggtaaattaaatggtgcagaaattactcaaggtgagcaaactttagtggaacctacttctgaattgcctttgtcacaagttgatttgcattctgttccttgtgataaagaagagttgtgcaatagtacttcacttatatccattctacaactagtgaatgaacatgcttcttttaatcttgattctccatgtactgaatttaagtatgttattcacacgtccggcgagaatgatgaacttcaattgcaatcttctttaaatacattggggtattttatgtttgatggttcttgtgagctcaattgtttgaaggacaaaatatttgctcattctgatttgccatgtcctcgtaatgttatatttcacatctttggcgattataatgatcttggaatatattttgtgcatagagtttacatctgctcagatttagaacttcctgtacatgtggataaaacatgcaagctagagaaaaatgttcttgctaaccaaattgtctcgagtttgccttgttttgattggaagaaacaggttgttgtaaatggactacgcaaagagcaccatatggaaaaaccgaggacggttttccatgatgaaggggaggatgatgtgaccatggctaccacggatgcaaccattgctcacatcatggatgaacaagaagatatcgagatcaagtactccaagtgctggaatccgattcggccacctattacactgctgacttcaaacggccaccgaatctacatacgacctccgttttcggcccaatcacaagaacaaggtgctgcgtcacctataatgggcctatgggcttgtaacttcatttgggaccccggctcaggaatagggttgatctgcaccggtaagatcaacaacccacggagaggtgtatcgatcgctaaggcgcaacacaacgtctcgtacggttgtagtcggatcgtcaacgtttctcccaaatcg

SEQ ID NO: 93619 - DNA, 1332 bp, Oryza sativa
  Clone ID: PAT_MRT4530_91987C.1
atggcagggatacgcaagataattggggatagctgtgctcaacatcgacatcttcgtcgagacatgaggagggatcaacatgaccattatgaggtaagtgatgatgttctaggtaagatcaaatctgcactgccttatttcgagggaaactatgatcctcgtgcttacattaattgggagctagcggttgatagtgaatttcaaaagcatgtcttgtcggagaaacaaaaggaagtgcgtaatcacgaaaaggaggagagagacatgaaagagccaccaattccattgttcacacccaagttcgagacacctccatcatctaaagaggacatccaaggtaaagtaaatgatactgaaattaatcaaggtgagtgcattgttaacgaagtaaatttgtccacttttcatgcaaaagtagagcaaccgttagtggaaccaaatgctggaattcctttgtcacaagttgatttactcgctgttccttgtgataaagaagagttgtgtgataatgcttcacttatatccatgccacaactagtgaatgaacatgctattcctagtgtttctttgtgtgctgattttaagcatgctgttcacattgctaatgaagttgaggaacgtaaattgctatcttctttaaatactttgggctatgttcagtttaatgatttttgtgagctcgataatttgaaggagaaattattttctaagtctgatttgccaagtccaactaatgctatttttcatatctttggcaaatataatgatagaggaatatatttggtgcatagagttttcatttgttcggatttagagaaacatgttattgctaatcacactacttcgagtttctctagttttgattggatgaaacaggttattttgaatggactatataaagaacaccatatggaaaaaccgaggacggttttccgtgaagaaggggaggatgatgtgaccatggctactacggatacatccgttgctcacatcatggatgaacaacaagatatcaagttcgagtcctccaagtgccaaaatccaattcggccacctgctacactgctgacttcaaacggccgccgaagctccatacgacctccgttttcagcccgtgagtacttgatggaaagctctcggagtcctctttccaatgcatcaagcctcattgccaaattccatctcagtcggcagcaactgaagaaacaaggaatagggttgatctgcaccggcaagatcagcaacccacggagaggtgtatcgatcgctaaggcgcaacacaacgtctcgtacggttgtagtcggatcgtcaacgtttctcccaaatcgtag

SEQ ID NO: 93620 - DNA, 438 bp, Oryza sativa
  unsure (1)..(438): unsure at all n locations
  Clone ID: PAT_MRT4530_91988C.1
tgtggtggccttgtggcacccctgatgttctntgtgaccccaccatacccacanggggttttggggttttcctnagtntcccaacgggggnccaatgagtgtgtcccagagttttccctaaaggtaccctagggttcccggttanaccctggccanattcctaagccttaattaattccaaccgggttccaagaatgccctaatccagagccaactgtttcttgaggggcccgcctgtttcccgctgccctgccttggttagtaattatgggggagtccgacgttcctcttccaagttggtggtactacggttttaatcggaaccccagactggtaaatttcccagtatctcagtggtgtacccctcttttactnagggcccaaatttanagcttacccnccctcctatgggagttcggttcaaaaaaaaaaaaaaaa

SEQ ID NO: 93621 - DNA, 2605 bp, Oryza sativa
  Clone ID: PAT_MRT4530_91989C.1
atggcaggattgcgtaagggaatacgagaacatcgacttctacaccttcgacgagatatgacgacttctccaaatgatgcatatgaggtacatgactataattttgaacaagttgcatctaagttactcttctatgatgggaagtatgattctgttgcatacattgattgggagctagcagtagacaatgaatttgatatatatgatttttctgatgctcaaatgattaaggctgctagtaataagtttacctcttctgcattattttggtggacttatgttagtaataaacctgaaacttgggatgaattgaaaaccatgatgagaaaacgctttgtgacatcttattacaaatgtactcttcgggagaaattagaacatctgaaacaaggtgacagaactgttagggagtacattcatgaatttaaggtctgtatcatctacagtggtctcaaagagtgcaatgaaaatacaacgcgtagatttttcaatgggcttaattctgaaattcaggttttgcttgataatgtgacatataatcatattgggcacctattcatgcttgctcgtagcattgagagtcagatcatatcaaaggcgaggatgcatgaccaatgtgatttatctcctatttctgaatccccaatatacttatgtaatggtgatgtgcaaacattggaggagcaatcttttgtctcccctgttactaacgttttgcaggaagatcagcacatccaagaaaaggagaatggtatacttgagaagaaagaggatgaagcacctgcgatgtctgaagaaagttcgcaaggtaaattaaatggtgctgagagaaatgaaggtgagtattctcaaggtgagctacacttgtccacttttcatgctatagtagagcaaccattagtggaatcaattgctgagttgcctttgtcacaagttgatttacttgctattccttgtgataaagaagagttgtgtgataatgtttcacttatatccatgccacaactagtgaatgaacatgttagttctactatttctttgtgtgctgattctaagcatgttgttcacattgctaatgaagtagaagaacgcgaattgctatcttctttaaatactttgggctatgttcagtttgatgatttttgtaagctcgataatttgaaggagaaattatttgctaaatctgatttgccatgtccaactaatgctatttttcatatctttggcgaatataatgatagaggaatatttttggtgcatagagtttacatttgttcggatttagaacatcttgtagttctggataaaatatgcaagctagagagacatgttactgctaatcatattgtctcgagtttgtcttgttttgattgcaagaaacaggttgttttcaggggactgcgcgaagagcaccatatggaaaaaccgaggacggttttccgtgaagaaggggaggatgatgtgaccatggctaccatggatacgaccattgctcacatcatgaatcaacaagaagacatcaagatcaagtcctccatgtgctgcaatctgattcggccacgtgttacattgctgatttcaaacggccgccaaatctacatacgtgctccgttttgggcccgtgagtacttgatggaaagctctcgaagtcctccttccaacggatccagcctcatctcggaattctatctcgtttggctgcaatcacagaagcaaggtgctgcgtcacctgtattgggccaatgggcttgtaactttgtttgggaccctggcccatgtggggcccatgtggggaatagggttgatctgcaccggcaagatcaacaacccacggagagaatggggaggaggagcagaggagggggtgtacctcggcttctcggcacggctcaccgtggagtcccagcgcggcggcgacggcggtggcgcggaggaggaagaggcggcggagctggtcccggcatcgacgacgagtcccggtggcggcggcgtcgacaacgaggacccggcggcggcgatgactcccgaggtggaggcggcgtcgacgacaaggaaccggcggaggaagaggaggtcccggcagcggtcttggcggcggcggcggtgggaggaggaggcggcggagctggtcccggcgtcgacgacgagtcccggtggcggcggcgtcgacgacgaggacccggtggcggcgatgactcccgaggtggaggcggcgtcgatgatgaggaaccggcggaggaagaggaggtctcggcggcggtcttggtggcggcggtgggaggaggaggcggcggctgcggcggaaaaaaggagccggcagacaagtcccggtggtggcgacaactcccgacgtggaggaaggaggagccggggagaggtggagctcgatctgccaccggtggtggtgaagacgccggcccgatcgaggaggagaatgcggcgcccgtcggtcgaagaggagttggatctagcggtggcggtgaagagaaggcgcgaatggatctaacgccggcggtgaaggtgcgattttcgctggcggaggattccgtgggccgctagcgaaaagggttttcgctggcggcaagcttatgtgggcaaagccggc

SEQ ID NO: 93622 - DNA, 1131 bp, Oryza sativa
  Clone ID: PAT_MRT4530_9198C.1
atggccggcggcgagcccatgcggcagcagcctctcgccggcgatggattcttctggttcctccccgcaccgaagccaaccacctcttcccctttcatcgccttcctcctcctgcctcatcgctccacccatgccactcccccagttatggaggctgagaagtggtggagagggatggaaaaaaggagagaagaggtgaggatagaggaagaagatgaatctagcgggtgggtcccacgtgcagatagggaatatgatggaaaacatgacggcgatggcatgatagacacatttgcaatggcatggatcaaattaaccccttttgaaaagggagaaagagtgaaaaaggtgttttcaaattcagaaaattataggttaaatggaaattgctatgtgcattttgtgatgttctcaacgttgggtggttgcttcaacaatggcgacagtgggtatgactgcgctatcatgtggtgcggtgatgggggtgtcgaggaagcgggagagggagatagtggagcaatatgtggcgatggcggcattcacgacgctactgctggttggtggtggtcagtggcctcggctgcagtgatgggagatgcgctggtgtctgagatgtgcctacatagagcgaagatcgacgcggtagtgcggatggagtgtgagcggatgcacgacgggctggagcaggcgcggagaggcagtgctaggtgctggtgcgcatggcgttggcgttggctgcagtggctacgggagaaggaggccgagctcgacgctgctcaccgccacgtggtcgagctagaggagctgctccgtcacgctgccaccgagagccaggcgtgtgcgggctcgcctgcagcaacgaggccgttgcggctggcatccgcctcaccttcgaccacctcctcctccgcaacgcccccgcccaatgcttcggcgactccgacgccctcgctgtcgtggcggacaacgcctccaccttgccaacggcatccaagtagtcgtgcaagtcgtgcggtgaggacgacgccaccatgctgctcctctcttgccgagaacatcgctcaagggaagaagacaggagaaagaaggaagaaaatgggggaaaaaaagagatatggatggaaaacgtga

SEQ ID NO: 93623 - DNA, 2299 bp, Oryza sativa
  Clone ID: PAT_MRT4530_91990C.1
atggctactatggatacatccgttgctcacatcatggatgaacaacaagatatcaagttcgagtcctccaagtgccaaaatccaattcggccacctgctacactgctaacttcaaacggccgccgaagctccatacgacctccgttttcagcccgtgagtacttgatggaaagctctcggagtcctctttccaatgcatcaagcctcattgccaaattccatctcagtcggcagcaactgaagaaacaaggtgctgtgacacctgtaatgggcctatgggcttgtaacctcatttgggaccccggcccaggtggggcccatgtggggaatagggttgatctgcaccggcaagatcagcaacccacggagagttatcacaactcaccgaaagatcgggccaacaacagccttgagtgtcgagaggaactcagggttcatcaggtggtatcagagctttcgttgctcgggatatgcaagataattggggatagctgtgctcaacatcgacatcttcgtcgagacatgaggagggatcaacatgaccattatgaggtaagtgatgatgttctaggtaagatcaaatctgcactgccttatttcgagggaaactatgatcctcgtgcttacattaattgggagctagcggttgatagtgaatttcaaaagcatgtcttgtcggagaaacaaaaggttatgtgtgcctctagtgttttaattaaacatgcttctaatgattggaaacatctttgtaggcataacaaaataccacaatcttggaaagacctgaaacgatatttcagagatgtttatgttcccatgtattatgctgacattttgttcaacaaactacaatgtttaaaacaagataccagaactgttacttcatactatcatgatatgcaagcttgtttattacgttgtggtttagatgaatgcgaagaagctaaagaattgaggtttttatgtgggcttaacaaagaaattcaggacatgcttgattgtcaaagatatacatctctttctcatttgttacaacttgcttgcaatgctgaaagtaaaatagaggaggatatgaaaaagaaacacgctatgtctttgcctccaattactaactatttgcaggaagtgcgtaatcacgaaaaggaggagagagacatgaaagagccaccaattccattgttcacactcaagttcgagacacctccatcatctaaagaggacatccaaggtaaagtaaatggtactgaaattaatcaaggtgagtgcattgttaacgaagtaaatttgtccacttttcatgcaaaagtagagcaaccgttagtggaaccaaatgctggaattcctttgtcacaagttgatttactcgctgttccttgtgataaagaagagttgtgtgataatgcttcacttatatccatgccacaactagtgaatgaacatgctattcctagtgtttctttgtgtgctgattttaagcatgctgttcatattgttaatgaagttgaggaacgtaaattgctatcttctttaaatactttgggctatgttcagtttgatgattttggtgagctcgataatttgaaggagaaattatttgctaagtctgatttgccatgtctaactaatgctatttttcatatctttggcaaatataatgatagaggaatatatttggtgcatagagttttcatttgtttggatttagagaaacatgttattgctaatcacactatttcgagtttctctagttttgattggatgaaacaggttattttgaatggactatatgaagaacaccatatggaaaaaccgaggacggttttccgtgaagaaggggaggatgatgtgaccatggctactacggatacatccgttgctcacatcatggatgaacaacaagatatcaagttcgagtcctccaagtgccaaaatccaattcggccacctgctacactgctgacttcaaacggccgccgaagctccatacgacctccgttttcagcccgtgagtacttgatggaaagctctcggagtcctctttccaatgcatcaagcctcattgccaaattccatctcagtcggcagcaactgaagaaacaaggtgctgtgacacctgtaatgggcctatgggcttgtaacctcatttgggaccccggcccaggtggggcccatgtggggaatagggttgatctgcaccggcaagatcaacaacccacggagaggtgtatcgatcgctaaggcgcaacacaacgtctcgtacggttgtagtcggatcgtcaacgtttctcccaaatcgtag

SEQ ID NO: 93624 - DNA, 1462 bp, Oryza sativa
  Clone ID: PAT_MRT4530_91991C.1
gaagtgcataatcatgaaaaggaggagagagacatgaaagagccgccagtcccattgatcacactcaaagtcgaggcacctccattatctaaagagggcatcaaaggtaaacttaatggtgctgaaattaataaagcagagcaaccattagtggaaccaactgctgagattcctttgtcacaaattgatttgtttgctgttccttgtgataaagaagagttatgcgataatgcttcacttatatccatgccacaacttgtgaatgaacatgctattcctactgttaattcatactgcactgattttaagcatgttgttcacattgctaatgaagtagaggagcgtgaattgagatcttctttaaatactttgggctatgttcagtttgatgatttttgtgagctcgataatttcaaggagaaattatttgctaagtctgatttgccatgtccaactaatgctatttttcatatctttggcgaatataatgatagaggaatatttttggtgcatagagtttacatttgttcagatttagaacatcttgtagttccggataaaatatgcaagctagagagacatgttactgctaatcatattgtctcgagtttgtcttgttttgattgcaagaaacaggttgttttcagtggactgcgcgaagagcaccatatggaaaaaccgaggacgtttttctgtgaagaaggggaggatgatgtgaccatggctactatggatacgaccattgctcacatcatgaatcaacaagaagacatcaagatcaagtcctccatgtgctgcaatctgattcggccacgtgttacattgctgacttcaaacggccgccaaatctacatacgtgctccgttttgggcccgtgagtacttgatggaaagctctcgaagtcctccttccaacggatccagcctcatctcggaaatctatctcgtttggccgcaatcacaaaaccaaggtgctgcgtctcctgtattgggccaatgggcttgtaactttgtttgggaccctggcccatgtgaggcccatgtggggtgcgccccaatctggtggagcacgacccttggaccctcttggtcgtcctcccacctcgtccgtctgcttgttcttcggaaccccaacttatcatttgtattaagttcctatttgcaatatcagattgcttttatcttgttcttgcttgtttcttcgatttgcttgcaggaatagggttgatctgcaccggccagatcaacaacccacgcagaggtgtattgatcgctaaggcgcaacacaacgtctcgtacggttgtagtcggatcgtcaacgtttttcccaaatcgtagttatcacaactcaccgaaagatcgggccaacaacagccttgagtgctgagaggaacttagggttcatcatactactaccattttatctctgttcccaacacatctctctcgcattccatacgcac

SEQ ID NO: 93625 - DNA, 2268 bp, Oryza sativa
  Clone ID: PAT_MRT4530_91992C.1
atggatggagatcggagtaggaggagtgccgccgcgatcacgcggccgccgtcgcacggcggcccggcgtggcggcggatgatcgcctggattcaactactcaaggtgttcgtccagaggtacggggaggtggcgaggtggcgcacggcgttcctcctcttcctggcgctcctggcggagcggggcctgcgccgcgcctacctgtcgtggaaggagtcgcggctgcggccgcgcgccgccgccgccgtcaccctgcaggccgcgttccgggggatggccgcccgccgcgagctctccctccggcgcagggccgcacgagccgcagccgccgcgctcatccaggcgcggtggcgcgcgcgcgcggcggcgcgggagcacgcggcggccgtgatctgccagtgcgcctggaggcgccgcgccgcgcggcggcggctcgcgaggctccggatcgagcaggagagggcggcggaggcgtgcaggctcagggagatggtggacgtgctccagcaggcggtggaggacgcggaggtgcgggtgatcgccgagcgggaggcggccaagaaggccatcgccgaggcgccgccggtgatcaaggagatcgtcgtgcaggtcgtggacaccgacaaggtggactcgctcgccgccgaagtcgcccgcctcaaggatttgctgggagcagagatgaaggcgacgtttgacgcgaagaaggcggtcgccgaagccgagctgaggaacgagaagctgggctaggttgctcggtgtcgggaggtgaagaacaggcagctgcaagaatccctgaaaaggatggagatgaaggcatctgatcttgaggaagaaaaccagaagcttcgaggagctgtcgcgtcagtcccttatgtcaggttgccgtcaaacgtaaaccgtgatgatcctgatcttgagccaactccagagaatgaggatgagaatgagaatgagaaagcagtttattgtgaggtgaagccaatgatagtggatagaggggttgacatccatgagaacaattctcaactgcctggcctgaatgatcctgaagctgagaagcagcagcaggagctgttgatcaagtgcatatctgaagatcttgggttctctattggaaggcctattgccgcatacctcatctaccgatgcctgatccactggaaatcatttgaagaggacaggacaacagtttttgatcgcattattcagaagataagtgctgcaattgaggctcgagacaacaatgagacattagcatattggctatccaattcatgcacactgctgctgcttctccaaaaaacactgaaaatcaacggggcagctgctttggctcgtcagaggcgaagagcatcacccctgaagacgccacaggaaaatcaagcacctaatcatcctgaccgtagtccagttcctgatggacggttagtcggtggactaggtgaagtttgccaggttgaagccaagtatccagctcttgctttcaagcagcagctcactgcattgctggagaaggtctatggaattatcaggcacaatttgaagaaggaactgtccccactgcttggtctctgtattcaggcaccaagaacatttgttgtaagccccagagggtcaggcgctcaaggaacagacttggcacagcaagcttctatggcacattggcagagcatcatcaaaattcttacaaattcgctgaatgtcctaaaatccaattatgtgcctcccttcctaatctgcaagctgttcacccaactattttcattcatcaatgttcaactcttcaacagtaatggagagtatgttaaagctgggttggatgagctagagcactggtgcttttggctgactgaagagtatgcaggttcttcctgggacgaactgaagcatattaggcaggccgtagcacttctgatacttgaagagaagcacagcaagtctctcaaagaaatcactgatgagtactgcccagcacttagcatgcagcagctatacagaatcagcacaatgtattgcgacgacaagtatggaactctgggtattcctccagaagtggtttcgagcatgagaaccaagatggtccagcagggatcgaacagtccatcgacacaagatgacatcaattccttcctgttagatgacgatttcagtataccgttctccatcgatgacattgcaaagctgatggttcacatcgacatagcagatatggatctgccacccctgattcaggagaacaagggctctccacatctgatgccctaa

SEQ ID NO: 93626 - DNA, 691 bp, Oryza sativa
  Clone ID: PAT_MRT4530_91993C.1
cccgggctgcaggaatcggcaccacggggagagagagagcactagtctcgagttttttttttttctttttggttatgaatcatgaaatgtgaacaaatgaaacgaatccagtagtatgtgcacccccaccactctgaatttttcccccctatccaacagtgatttctagctctccacttgcccattgtccatcgactatccggttcgggcgagggaagtttcaactcggcaaaaatatgtatgtctcctatatatatttacggatggccctaacaggagccaaaacaaagaagagaaagaaagaaagaacaccaacgtgttgccgcctaaatccccacatgcctttgcataattctgcgaggcgattcatcttccgcgggcctgctacgatgtgttgacgctgtcaagatcttgaaggaccactcagactacatacaacttctggtccacaagcaattcagctcacgcaccagccatgtgacgctttgtgctgaaataatgaatcaggacgggcgtcagggccagccagacttctcaaggcatacccaagcttttgccatggactatcaatggtaaatgatgcatgtctagtaccatgtcacacttgcacaggtaagccatagttctggaaggatctgatgtagccatcccagcctgcagccactatgacctggccccaggcgtgcgtagc

SEQ ID NO: 93627 - DNA, 2367 bp, Oryza sativa
  Clone ID: PAT_MRT4530_91994C.1
atggtggagccacagccacctccagtagcagctactgtacctgtacggggcctcaaatgccgcggtggcgacgctgccgcggagccggctatggcggggaccccgaatcggggccaagaacggggtggggaggagggggaggaggaggagaaggcggtgctgcggcgagggctcgcggcggcacgggcgaggaggaaggcagggccgatcacgccgtccccgtcgtggaagctggaggcctcgccgccgcggccggaggagccggtggcggattcctccgcggccgccgcggcggcgggggcgatggggaggaggagctcggccgtcgcggcctccgcgcggcagctgggcgccacgctgtgggagatccgggacgtcatcaaggtcgccggcgccgggcgacggatccggcggcgcgggcggaggggtggcgtcgccggcgacgacgacgaggcggatcggggattgaaatcagaattgcaacatgctcatgcacgagttcaagagcttttgcaagagaggcggaggtatcactatgaaatcgattcgctggtaagacaagtatctgaagataaaatgacccagaaaagcaaggatcaagagaaggtcaaagcagcccttagatcactgcaagaggaaattgaagacgagagacatctgagaaaacattctgagagtctccacaggaagctaaaaaaggaactgtctgagatgaaatcagcatttgttaaggctgtaaaggatctggagaaagagaagaaagcaactcacctattagaaaatctctgtgatgaatttgcatttggaataagaaactatgaagaagaagtaaggttgttaaagcaaaagcatataaagcagtatgaacacaagtttgataagtcagtagtccatatttcagaagcatggcttgatgagcgtatgcagatgcaaaatgctgatcccaaggcaactttggcagaaagaatctcaatcaccgagaggcttagcagtgaaatccatagttttcttaataccaggaggtcaagtaaacccaaggatgataaattatacatcagcaatgaaaagcaagatgcaagcttgtgccggcaatcccttgagtccgttcatttgcatggagccactagtgctcctcggttagctgaagatgacaatgacaattctgttgcaagcgacttgcattgctttgaactgagcatgcatggtcacaccattcagaataatgaccttataggaactcggcagagggtcacaagctgcatgtactcaccaatgagaaggcttgaattttccaatggcatacccgttgaaggttcaagaatctcaaccatgtcaccttgttcaatgaaagacaaggcaaggcctaatggcatcagagaacaacttaatgcttcaacaccagaaattagcccatgcaacgatgccaaaaatgctccaagatgtgcgcaggatgaaactgtcatgactcaagtctctcaaagattgcatgatgacctgttgaagatcaaatcagaggctcctcagcatgcgtatctcgggcaaaaatccaatgatcatcactccagggcaggcaaggctggaggggcagcacgcccggatgagagcatcagggtattccctaaccagcacaagaaggaaatgagaatggctgggtgcggcgggggcggcttggccgcctcgggcagcgccgccctgcgcggttacggcatcgagggccctgcctcgcgcggatccggccccgacaacgacggtggacggtcagggcagcgtcagcgacgatgtcgggaggtggggcggccgattcgacatcggcgaggactgagggcaatggggccggtggaagcggcgcctacgacaacggtgggcagtggggtggctgatccggcgccggtgaggatggcgggcggcagggatacgcggcggctaggcacggctcggctcggcacaaagccggccggccggccatggcgagcggcggcggcgcgctaccgccagcgacggcaagcggcggcgtgggaggctgcggcgagcgacacaaacgcggcggcgcacggccgaagcggcggcggcgcagcggcggtgggagagagaagtgggaggaagagagggggttcctcaccggcgagcacggcggccggtgcgaaggatgaaggtggcggcaacgaccgccggagatggaggggagagaaaatctcaccggcgcgcgaggagaagagggctccggcgttgttcggcggcaaccaagcggcggccgaggtgcggacgggctcggtgagcgcgacggcggcgatggcgcggcgcggcggcggctctagcggcggcggcggcaagcggcggcgctggcggcgagcggcgcgagctcggtag

SEQ ID NO: 93628 - DNA, 552 bp, Oryza sativa
  Clone ID: PAT_MRT4530_91995C.1
caacaaccagttcttccaagctaaaaggggatccatctttctttcaaaaaatgggggtccagaagggccgggaggccccacataaccccaaccatgactaacaaaacccacggaaaaaaataggcggcccttccagcgaaaaaccccctcaaaaaaaccctttaagctgcagcacccttgccctttttcctggggagctttttaatgaaaaacccaagctctttgccctccaggaggtccccatcagctctgccacattgcccagcccgggaggaaatgcaggccaaaacccttccgctgccaaattgctcttcaaggggcgagcccaaagggcgagtttgctgacccttttaaagcttcctcacaacaggggggctcttttttgctccccccggggaagccccaccctttggcccctaaaaagcatcctttttagaaaaaggagctttcttcttcctaccgatttcgaccccatagggagggagaccccactgctggaagggggcagcatcaacttgcacaagggccctcttcacaagggtcggggccccc

SEQ ID NO: 93629 - DNA, 1339 bp, Oryza sativa
  Clone ID: PAT_MRT4530_91996C.1
atggcgctgctgggcgacgcgctgcggcaggcgttcatgccgcggcgggcgtacgcggcgctgcgggacgaggagcgcgcgctgccgcggctccgccgcccgctggcggcggccgcgggggcgtgcgtggcggccgcggtggccgccgcggccggggtcagcctcgggatcgtgttccccgccgagcccgccgagcggcccttctgccgcgagcgccgcatgctggaggccctccccgccgcggccagcagcagggaggaggagcccgaggcgtaccggtaccgcggcggggccttctacatgaccaccgccgaggccgccgacttctactggatggtcgtcttcgtcccgtccgccctcctcttcgccgtctcgtctgcctaccttgtatctggcatatctgttgcatatgctgctccaagaagacatccattgatttgtgtcgtcgagaataacttctgtgcttctaaaagagtttttgctgtcatatttggtctcatggcaattattcttggatcaacgcttctggctcttggaagtagttgttctgttcctctcttctggtgctatgaaattacagcatggggtttggtaatcctatatgctggcactgccttcttcttgagaaggaaagctgcggtgatccttgatgagggtgattacactccccacaatgtgggtctagaaatgctggagacaacaatagaagtaaccccagagatgcagaggcgaattaatgatggtttcaagtcatggatggggccgtctactctatcttctgatgatgaggaggaagcttcggatgactatatagagcacaatgtgcctatcccaactgcgtcagttcaagtcaggcaagagaatgatctagagagttgactaatgtataaacagatgtacatagtgctccacttattccttgatgtttggtaatgtttgtaaatgcttggcgtgggttttgactgctaacaagtgattttgtttgttcttttcccctagaggaaacaaatgttgagggttagttagccactgaagttcatacaagaggttacctttttttccctgtaccctttcctgtcaatcctttgcctttccattgctgggtcatacgtgttggtggaaggagtaaatagcaagcagttggcaaaatgttgttgggcttggttggtctttactcttgaggcaattgcttccttgtgacctgagatctctgaagtgccaaatgagtcgagcaagagttgcttaggctgacttgtatattatgtcataagcatgagacagttggaagttataaaattccatcttttcattttccaaaaaaaaaaaaaaaaactcgagg

SEQ ID NO: 93630 - DNA, 552 bp, Oryza sativa
  unsure (1)..(552): unsure at all n locations
  Clone ID: PAT_MRT4530_91997C.1
gacttaggtcacactattaagagctatgacgtcgatgcncgcgtncgtagcttggatctctaaagcggcgcggggatctctcccggcggcggggagctcacgttcttcgcggcgaactggctccaggcagcgggaccagaggggatgggggaccggccgcggggagcggggcgggggagggggagganacgcggcgtgcggacgggtacggggacctaccgtgctggtgcggcacgactcgggtcgggggcgtaccgcgcgggtctggctcgggacacgcacccgcacgcggggcaccggacggtggccttgacacggacgactcgccgtggacgcggcttacgcacgcaacgctccgccagagacgcctcctctccgacggatcgaccatcctccgtgcgacatccgtcatcccaaacgtcatcgancctccaacgagatccatcagggatggtgggaaacactantactcttgatattacgagtacttgtacggaggtggtgacttcacaactccataaccttcagccagcgattacaacagggttatct

SEQ ID NO: 93631 - DNA, 464 bp, Oryza sativa
  Clone ID: PAT_MRT4530_91998C.1
cacacaacttttcacttcatgttgaaacaagattttgacaatactaaaaggagtagcatacaagctcgaaaagtggatgggttaggagaaactgagctaagcaacaccagctttatcaaagcacataaactgcttaccacctccctaacataggatggtgagtgctgctgataaacgctccagtcagtaaatctttatcacccggagtagatggacgccaagatgatcttatttgcgagctgtatagctttctggaacatagatctcccctccagcttcaccgtgttgctccccactgatcgttttccttgcagccaaaaactcagcactcatagcattcattcctggtattaccgcttcctccactatcctgtaaccatgttcatcagcatattttctaatatcctctgtgattttcatcgaacaagactttgggccacacattgagcagaaatgtgctactt

SEQ ID NO: 93632 - DNA, 1059 bp, Oryza sativa
  Clone ID: PAT_MRT4530_91999C.1
atgggcgggagccgggaggcgatgcctagcggccccgtcagcgatcccgctgggggtcgtagtctgccagaggccgtcctcacctgggaggagctccaagtcgagatggggcgccttctcgaagctggtgctcgtggcatcggccgcgagatctcggaggcgaggtcggaaacggcggcggcgaacgcgcgtgccgagagattggttcgcgaactggctgaggcccgcgaggacctcacgaagatgagggagctggtggccggcaacgagcgtcaacgcaaggggctcgaggaccgaatgtcggaactcgggaacaatctcttcgagatccgtggctcgctgcgcgtcacctatactggcctccaccagctcgctgaggagtgcggcatcaaagatgctaatgacgaggatgtccagcagcgggggcagcctaagtcactggcgataattccagtactcgagtttgaaccacatgtctcacctgatgtcgaggatcaaactcttgatgcggagctcgagatggcaacgactacctcaatagatctcgaggatgcccttgcaacccaagatcgtcgtatccaatactggaagacgaaatttgaagtggcggaactcgagagaaccatgctagtcgtgaagaaggagcaggccgtggaaacgctccgaggccgcgaggtgtggtttgcgtcgtacttaaaaagttgctgcacctcaatggccagagtatgcagggaacttcgagtagtccgcgccgatcctggggaatcggcggccgggtatatctggtggctcaacggggcttgtgcccaactcgatggcatcggcaagtgtatcgacgaggccttgaagcaagagtgtcatcgagtgagccgatacaccggaggacatgtgctggcttgcctacgagatcaccgcccgcgcctggacctcgaattcctccacgaaggttttgctcgttcccggaggactccggcggagatagaccatcttgcgaggtcgatgtcgccgttggctgagaaggtcttccagtctatggactggcattggccctcttggtag

SEQ ID NO: 93633 - DNA, 429 bp, Oryza sativa
  unsure (1)..(429): unsure at all n locations
  Clone ID: PAT_MRT4530_9199C.1
gantcggcacgananaaaaaggncatgcttatgctcccatggcgaaccanctgangaanaacanttggtgttctccaaaccnaaggggntgtctggtncttcnctnanaaagaagncccgcttcncantcnanggcatccaatctnaaaaaccaaccttccaagtngtgcaacccatcaatggggaacccttcatcngcaacctggaaancccggtnanctccaacccnctggtccctggttactctcaaactcccggcgtacgcacgccgtcagccgctctcgcgcatcagtcgctcccacgtactctcgtcggccttcgcgctcacggccgctcgcaacagccgtncacgcagcggcctcgccaggctcgtccatcctcacntctgcctcacatgtacggtcctccttcgcgaggcgactcacggca

SEQ ID NO: 93634 - DNA, 268 bp, Oryza sativa
  Clone ID: PAT_MRT4530_919C.1
ggaccaacatccctctttgggccacatttgggcctaagcagcgcaaaaaccgcggcccaccagagggaagcggggccctctcctctactctcccgcggccaccttctccgagaaatccgcttcggcgcttctccccggctgcttttttgctccgcctcggcgcctcccatccaccaccgccaccgccatcgcctccgcctccgcctccgccgccgccaccgcctccgcaactcggcgctcgccccgctcaaccggcaggaggaccaag

SEQ ID NO: 93635 - DNA, 591 bp, Oryza sativa
  Clone ID: PAT_MRT4530_91C.1
ccagattccaagactgaagaaaaaactttcaagaacatctgaaacatggcactgcccatcaagcttctgctggtctctgcatttctctccctcctcctgatccaaggcgcggcggcgaggtcgtcgccggcggcggggaagtgcgcggcggcgagcgtggaggtggagcaggcgaacaccggcgagaaggcggggtacgacccggtgttcgaggtggcggtgcgcaaccggtgcgcgtgcgcggtgcgcggcgtgcgcctccgctccgaggggttcgcgagctccgtcgccgtcgacccgcggctgttccgcctcgaccgcgacgccggcgactaccaggtcggcgacggccgccgcatcgagccctccgccgccgtcacgttccgctacgcctgggaccgcgccttccgcatggcgccggccgccctgctcgacgactgctcctgaaaaaccaaccatcatcgatcgtccactgattgattctctgatcgagattcaagaacaaccggtgataaatgtgtttattagcagcgtgtagtgacagtgaattaaggagtaattagtagtagtatttacttagttgagagtgtc

SEQ ID NO: 93636 - DNA, 229 bp, Oryza sativa
  unsure (1)..(229): unsure at all n locations
  Clone ID: PAT_MRT4530_92000C.1
cgctcgcnatcacaccgtccgccaccggaagagagagccccnctacgacgacgacgaccatggcgctcgnctccacctncgacaccncgtccncggccgttctcaagacgaccttcntcngggcgaaggngtgctcnacaatnacgtcggcgtngngggcgnaaagccgctctgaatgcctgcagtcagtggtntcgggcaagaagtngtggatcccngacttnangag

SEQ ID NO: 93637 - DNA, 1218 bp, Oryza sativa
  Clone ID: PAT_MRT4530_92001C.1
atggcaggcaattcatgcgcggaaacattccctgctctctctgacgaccacctcatctccgccctcacctactccaccgccgaccaccacgacctcgtcgacgctgctcctgcggttgcctcccaacccaacgaggacgtctgggatggcccctgcaccgccaccggcgccgcctgcgagccctgctccctcacgctccacttcctccgcaacacctgcggcctctcggaggatgaggcggccgcggccgccgcgcgcgtccgcctgcgctccaccaagaaggcgcacgccatcgtcgccctcttccgcggcatcggcttctcggccgccgacatcgcccgcctcgtcacctcgaacccgtccttgctctcttaccgggccgacgccaccctcatgcccaagatcgagttcttccgccgcgagctcggcctcaccgacgccgagatccgccgcctcgtcctcgccaacccctaccgcgtcctccgttacagcctcaagcgctgcatccgccccaactacctcatcctcagagacctcctcggcagcgacaagaacgtgaccgctgccgtcttgcagtccacggatctcatccacggggacgttcgtggcatcctcctccccaagatcaagatcctccaggactacggcgccacgaacgatgtcatcgtcaagctggtcaccacgcaccccagggcactcatgcatagggcctcccgcttcgaggagagcttggctgccatgaaggagctcggggtcagaccttcctctggaatgttcccctattccttcgggctctttgccagattgcatccaaggaaatggaagggcaggatggacaatttcttgagcttgggatggacaaaggagcaagtgattgaggcgtttgtgaggcacccgtactgcatgtccgtgtcgaatgacaaggtgaagctcatctggcagtttctcgcgaagaagctcaggtggaccaccgattatgtcgcaaggagcccgatggttctctccttcagctacgataagcgaatcttgccaaggtgcacggtgctgaacttgttggcatcgaggggcatattcaacagggacatcaagacatcccatctggtactgggggagaagaagtttaaggagaagtatgtcaccccttaccaggatgaaattcctgaggtactggaagcttattcttctgtggcagaaagtcgagtccccgtgtataagtag

SEQ ID NO: 93638 - DNA, 1056 bp, Oryza sativa
  Clone ID: PAT_MRT4530_92002C.1
gctccggtgcagagccgtcgccgccgtgggatgtcgccgtcgtcgtcgtcgtcgagcacggggccgatgggggtggcggtgtcgccggaggtggaagcggcgctggcgcgcggcggcgcggtcgtcgccctcgagtccaccatcatctgccacggtatgccctacccgaagaatctccagaccgccatggaggtggaggccgtcgtgagggagaacggggcggttcctgccaccatagccattctgaacggcgtgccacatgttggccttagcggcgagcaattgaagagcttggctgtaagtggaagacagtttcagaagacggctagaagggatattgcacatgttgtggcctctggtggtaatggtgcaacaacagtttctgccactatgtttttcgctcataaggttggcataccaattttcgtaactggagggattggaggtgttcatagaaatggtgaacagaccatggacatctcctcagacttaactgaacttggaaagactcctgtcactgttatttcagctggtgtgaaatctattttggacataccacggacacttgagtacttggaaactcaaggagtaacggttgctgcttacaaaaccaatgaatttcctgctttctttacagaagtcagcggatgtaaggtgccatgtcgcgttgattctcccgaagagtgtgccaagataatatatgcaaacaagaatttacatctaggatctgggattttgattgctgtgccgattcccaaggaacatgcagcttcaggaaatgctatagagtctgcaatacagaaagccctcaaggaagcagaaaacttctccttagcatattcagatattgcgcttgtaaagaacaatgctcttgttggtgctaaaattgctgtggccctttctgatcttcaccagagagtaacaaacagtaaggatttcggaggtctgccttatagagtgcatgtacaaaggcaagcgaggtctgaaacatggggcatcctattcatcctcacaatggccagtgtttgctctattgcgttgatcataaatgaataa

SEQ ID NO: 93639 - DNA, 501 bp, Oryza sativa
  Clone ID: PAT_MRT4530_92003C.1
gctatacgtacatgcacgcgccgtacgcttgatcgctatgagcgggcggcctgtcctttttttttctttttttgttctcaaacatcacatgcagtatatattagtattatcagtaaattgttataggccctcgtgtgcccttttttttttctatagtcaattcgtacaaaacaagtgtaagcactcgtgtatgtgtagaatttaagcgtgcctatagcttatccacagatttgtgtgtgtacttttaaaaaaaaacccttcaattttaaaaagaatagatcgacagaaaaacaagcccacgcgtgcacatacaactttccagacgaaacaggaactatcggatccagctataaaactcacaagacgtaaccttttgatttttagaccagcggggacttgtccacttaaaaatgagatcctctgtctgcatccatggagcctgccacattgtgtaggcacaactctcccaaagcatgttgctgctgggttccatcaaatgta

SEQ ID NO: 93640 - DNA, 1537 bp, Oryza sativa
  Clone ID: PAT_MRT4530_92004C.1
atggccgtcgtcttccttcagatcgtctcattaggcagccagatgcagaggcagccctgccgtcaggctccacccgtcctctcgttaccgctgccggcgtgccgcctcgcctcacatccttcgggaactctgcggccatggcgacgacggcgcaaccgctgtcaatcgccggagctccggctcctcgctaggggtaacacaagtcttttctgcacatgtgcacccgggaagaatttcccggtcggtcacccatcccaaattgctccagtgcacactttgtcctcatgtgcacccgggaagaatttcccgcggagcagcagcggggcggcctcctccgccctagccctcgccctggtccgtccggcgtggcgcgcgctctcgccacctggtgttttcttgggggcgggggatttccctgagacgattgaggagttcttgcagtatgggagtatgaaatgcatagcattcaaccgcagaggaactctccttgctgttctcccagcttttctgtctgataatggtaacctccctgctcctaatactcgcaataaattttctgatggttctccaccttttacaccaactgctgcaacatttgacaagtatggggatctgatatatgtgggcaattccaagggagagatattaattatagattcaaaaagcatcaaggtacatgctgtgattcccatcccaggtggaacagtagttaaggatattgttttcagcagggatggccgatatctactcacaaactctaatgatcgggtgattagagtctatgataatcttctgcctgttaaaggttctggagaggagatagaaaaaataagcagtaacaacattagctatgagagtcactacgagaagctaaaagcaaatggtgcaagctgcctagctatttcttgtgaacttttggatgctatcgcaaagataccgtggaaggcaccatgctttagtggtgatagtgagtggattgttggtgcttcagcaagcaaaggagagcacagattgtgcatatggaaccgatcaggacgtcttgtaaaaatccttgaaggtccaaaggaagctcttattgatattgcctggcatccagtagatcctacaattgtttcagtgtctgtagcaggcttagcatacatttgggccaaggaacatgtagagaattggagtgcatttgctcctgattttgtagaattagaagaaaacgaagagtatgttgaacgagaggatgagtttgacttaaatgcatatgtagaaaaggctgaagaacaactggtaaacgaggatgagtatgtcgatattgagacatatgataaaaactcaacgttcagtgatttggatgatagcagtagcacaacgatggagctcatctacttggcagctattcctatcccagacactcccgatgagcagcccgacaaatgccttggaagttcatcgaagttggaggacagcaatcattctgattccccatcctcattggatgctgtacagaatggacaagcgattcctccagcatctagtccaatggaag

SEQ ID NO: 93641 - DNA, 314 bp, Oryza sativa
  Clone ID: PAT_MRT4530_92005C.1
tgaagatggccgtcgtctgcctgctcctcctgtccgccggtcatctgatggcctacgccgccgccgagcgcccggacaccggggactactcagcagaggtgatgatccttaaggaccttatcaagatgtattacgatgaagcaaatagtatatgaaatatccattttatgacaaaaaaggggccaagttctgaggctaacttgctgaacttagggagttggaaaaaatatagttagcaaaggcattttttaagcaatgcatggatattttcaaaaactacatatatgccactgttttagatgcggagatgaatt

SEQ ID NO: 93642 - DNA, 2301 bp, Oryza sativa
  Clone ID: PAT_MRT4530_92006C.1
gacagcaacaggcataggaaaaaataaaatatctgtaaagtcatgtacataaccacaagacgcatgtgcgcagtgatcttgaaacttcactgtaacaacgatctactgttatctgaaaccttatcgatcagaacaatctaaaggatgaaaggaaagtgaagaaataaacaggcctaaatattaaatgcaacacagatgattaatctcaacatagatccacccacttccatttaacgatttcattttgcctcagcgcaccacatagttcctcaatcgtttctaatgcatactacacagagatattccctctgttctcaacaggggctccacgaactaaagtagttaaagttatcaatgatggacaggtcagatctcatcgtcttcggtggcttcatcatcaacagcagagctgttcccgttagcaggctccaattgcttgccattggaccctggggacttgccgttggacttattctttgttgttggttttttgcccttctcggcttgctgcagctcgaggcccttagccgacagcctccgcctcctctttgagttcacggcttcagctggttcttcagcagtagaattatccacttccattggactagatgctggaggaatcgcttgtccattctgtacagcatccaatgaggatggggaatcagaatgattgctgtcctccaacttcgatgaacttccaaggcatttgtcgggctgctcatcgggagtgtctgggataggaatagctgccaagtagatgagctccatcgttgtgctactgctatcatccaaatcactgaacgttgagtttttatcatatgtctcaatatcgacatactcatcctcgtttaccagttgttcttcagccttttctacatatgcatttaagtcaaactcatcctctcgttcaacatactcttcgttttcttctaattctacaaaatcaggagcaaatgcactccaattctctacatgttccttggcccaaatgtatgctaagcctgctacagacactgaaacaattgtaggatctactggatgccaggcaatatcaataagagcttcctttggaccttcaaggatttttacaagacgtcctgatcggttccatatgcacaatctgtgctctcctttgcttgctgaagcaccaacaatccactcactatcaccactaaagcatggtgccttccacggtatctttgcgatagcatccaaaagttcacaagaaatagctaggcagcttgcaccatttgcttttagcttctcgtagtgactctcatagctaatgttgttactgcttattttttctatctcctctccagaacctttaacaggcagaagattatcatagactctaatcacccgatcattagagtttgtgagtagatatcggccatccctgctgaaaacaatatccttaactactgttccacctgggatgggaatcacagcatgtaccttgatgctttttgaatctataattaatatctctcccttggaattgcccacatatatcagatccccatacttgtcaaatgttgcagcagttggtgtaaaaggtggagaaccatcagaaaatttattgcgagtattaggagcagggaggttaccattatcagacagaaaagctgggagaactgtagtacttccagtgtttaaatcaacaagaataggtgcagacgagagagggcatgccaaacaaatagatggggtagatggaccaccaggatgaagacggacacttaacggagtctgctgaagagtaatgcgggcaatttttttctcatttaccacatgccaaagtgtcaatgacttgtcagtagcagaggcgagcaaatggtgaccatatttagaccaggccacacttgttataggtgcagtacaatctttatcatgcagttctcttgcaatcccccttgtttcaaagtcccagataacacaggtaccatttgcacatccagcagcaaggagagttcctctgcggttgaatgctatgcatttcatactcccatactgcaagaactcctcaatcgtctcagggaaatccccctgcaaaggatcgactatagggacgttcatcgcggcggcgccaccccctcagcctcgcctcgccgcgccgctgtccccaggcggaggcaaccggcgaaccgcccccaagaaaacaccaggtggcgagagcgcgcgccacgccggacggaccagggcgagggctagggcggaggaggccgccccgctgctgctccgctacacaaagccctaggaagggaaaaacctctctctctctctctctctctctctctc

SEQ ID NO: 93643 - DNA, 735 bp, Oryza sativa
  Clone ID: PAT_MRT4530_92007C.1
atggcggcggaaatggagaagagaagaacaggatggacgaggcgagcaccaggagcaacaacggcgcagcagatggtgtttcgggtggaggcggctagggttttgagtcggggaggggaggaagaggaggaaggtgccgactcagagttgcttgcgaaagccgattggggtttttgggcaccaaaccaccgtgtgcatgggagcaagacgaggaccaaccagctttgccagaacctcgccgcaccgcgctcgaccaaagccaagctgcaaggctgcaaccatgccggcaccgttgtgtgctgcccgaagccccgacccgcgcgcatcgtgcgtttgacgcgccggcggcattggctgcaccatgcgctggacgctcgcactgtgatgaacaggatgctgtgggtgcgaacagcaatgaacaccatgcttgtgctagcgccatccatgtcctccgcgctcatcccgggacgccggtcgtgcagcgccgtgctgagttggctgcacgtcgccctggccgggagtcacgaattcacaataaggactgcgcgcctgctccgcaccctggcgccgtgccaggacaactatgcggagccatcgagcacacaccaggccgcgtccgtgccgagctgccgagccaaggccaccgcgccagcaccctcgcgacggacggaacagctagccactcatgcaccttctgctgcgccgaactccccgccgaccattcgccattcatga

SEQ ID NO: 93644 - DNA, 261 bp, Oryza sativa
  unsure (1)..(261): unsure at all n locations
  Clone ID: PAT_MRT4530_92008C.1
tntttttttatagttttttttttattttcttagcttccatatattgcattcatataaacctgacccaactacatataatgcgtaacttataccactcccacattaaatcagatagttaacaagttatacatatacaaatgcttagcacctacgttcaaaattttaattttacaaaattataactgtgcctttgccatcacttttaccattttttcccttactttaacattttatcctttctttttccgattatttcccctt

SEQ ID NO: 93645 - DNA, 330 bp, Oryza sativa
  Clone ID: PAT_MRT4530_92009C.1
atggccgcagagttcccgaaggatgtgaggcgaggcggcacgccggcagcggtaacgagaggacgggtggagcctgacggcagggctgcctctgcatctggctgcctaatgagacgatctgaaggaagacgacggccatggcgacatctcctgaagataacctcggaagaaattcagcaagtgcaacaaggattcctgactgttcagaagttccaagtgtcaacagcaattctgcagatcatcatcatccaaaaaatgagaaagaaactaacagttctgaaggccgataagggaattgtcctgccctttttttgttcaaaaaacttctga

SEQ ID NO: 93646 - DNA, 2653 bp, Oryza sativa
  Clone ID: PAT_MRT4530_9200C.1
acgtacccgtcgacagcgaagcgcctgtggtgacttcgtcattctctccagaatttgccggcccagtcttcgaagatgctgaagatgctcataggggtagggtttgcgtgcgtgtgtttataggggtgagtgcgcgtgcgttatgagtgtctgcgttgtactgtgtaattcaggattattgcggttctctttacccagtgaattgcctcggagggaagtagtcgtcgtatctccagaatcagaacgagcgggcattagaagatatagtatgcggagagagtggttacaagggagcgacctcgtcaccgtcacaagcgaggaccaccgctcagcctcgacgacgccatcgccaccgctatgaccaacgttggctcgctcgccgcccctgcccgtcatgtactccaccgtcgctgttgtgctcccgtcgaaccgccccggcggcgaggtgaccggagaaattacgtacgcagcggtgagcgacgccgaacacgacgaaccaaatcccggccgcggcgaacaccggcgccgccgtgaacccgaccgactacaccacgcatgggaccagtagtgctcgtcgccggagtatagcttcagtccatcaagaggatccttccgccacgtcatcgagtcaaacgccgaccacaaatggcaggctgcggccgctgagtcagacgccgccatgcggtcgaagcgctcgcgcctcgccgcgtcggccgctacagcgcggcccgggtgctcgcacttcacgaggatggccgcctcatccttctcttgccggcgacggtgtccagaacatctcctcgcacagcgccgtctcttccccttctcctcgcacagccttgcctcttcccacatgttcgccggaggaggaggtgaaagaaatattggtagtggcagaatgtccaatttctcagaaggggaggaggacggtggcaaatcactcctccctcctcgaccgccacccgcatcggtagattcaatccgtgggacggtgggagtgcgtgtagatccgtctccaccgtgatggatggccacagttgccctcctctccacggcggcgcctccaactctcttgctcgctgctgcctgctggacagaaccgggctgactggcaggagtctgctctcttcctcctgtgggcctcatccaatttcgggcggaagactctggtgttctccttgtgcaaaccagcgaaaatttgttccttcgaccagactccaacagctaatccagctgcatacgcagctccaagggcagttgtctcgatgtcagcaggtctgacaacagggctacccaataaatcagcctggatctgcatgagaagattgttgacagtagcaccaccatcaacgcgcagcaggaactccccttctgcactcttcacttctcctgcctccccagcatccttgtgcatggagctgaggacatcattcacctgaaagcacatactctcgagcactgctcgagcaatgtgccccttgttagtgaaccgtgtgattcctatacatatgcctcttgcatcatccctccaccatggtgcaaacaacccattgaatgctggaacaaagtatattccacctgaatcctgcacagtatcagccaacttttcaatatcagctgctgtgctaatgattccaaggctgtctctcaaccactgaactgcggcaccagcaattgcgatggagccttctagagcataattagtgggtgcgcttgggccaagcttataagcaatcgtgctaagaagaccatgggaggattgggtaggctcctcccctgtgttgagaagaatgaaggcaccagttccgtaggtgcttttggcttcacctttctggcacagctgcccaagcattgcagcatgctggtctcctaggcacccagcaatagggacgcccgccaagggaaacccattggcaaccacaccaattctctccgagttactgataattttgggcaatatctcagcaggaattcctaacgtctcaagtgttggtttgtcccagtcaagtgccttcaggttcataagcattgtgcgagatgcattggagcagtctgtgacatggtgcccaaatactttatttccatcacgatctgtcccgccaatgcctcctgtgaggttccagattaaccaggtgtcaattgtgccaaataaggcatcaccagctcggactgcattcttgacggcatccacattttcgatcaaccataacaccttcaaagcactgaaataggtactgattggcaatccacatgtctcgacaaagtgggttctaccaccagaaagatcactttccaatctcctgcaaatggggcttgtgcgagcatccatccatacaatggcattgtatagaggaaggcctgtggatttgctccacataacagtggtttccctctgatttgtaataccaatggccttcagtccaacatccatattatgaccatcagctgcagctttgtcaagtgccttcgccatgcatatcttcacactctccataatctccataggatcatgctcaacccatccagcctccgggtagtgctgcttgaactcgagctgatgcgacgcgacgggcttggcgtggcggtcgtagacgatgaaccgcgtgctcgtcgtgccctggtcgatcgacgcgacatacacctcctccgccat

SEQ ID NO: 93647 - DNA, 335 bp, Oryza sativa
  Clone ID: PAT_MRT4530_92010C.1
gtcaccacgcccaacgccacaaccatcgacgcctccgcgccggtgtcgccgttggacggcggaggcagcagcgggtcgacgtcgacggcgaagtcgggcgcggtggtgcgacaggtggggtgggtgagttgcttccgtttcgcttaatattcttgcggacattctgcatcactcaaagttggaagagtcccgcattgaacgtgagcgcgatgttattctgttagagatggtagaggtttagggacaatatgttgatgttatattcgatcatcttcatgcaacttgattccatttcacttttcttggctgaccaatcttgggttcttcagttaatg

SEQ ID NO: 93648 - DNA, 935 bp, Oryza sativa
  Clone ID: PAT_MRT4530_92011C.1
ggcacctgtcgatctccatcatctcttcgtctactaacaaagttataatatcaaattaaggtatatatatatatatatagtagctagcttcaattaatggcgagttcgtcgagcaggttatcctgctgcttgctggtgctcgcggcggcggccatggcggcgacggcgcagaactcggcgcaggacttcgtggacccgcacaacgcggcgagggccgacgtcggggtggggccggtgagctgggacgacacggtggcggcgtacgcggagagctacgcggcgcagcggcagggcgactgcaagctggagcactcggactccggcgggaagtacggcgagaacatcttctggggctcccccggcggcgactggacggcggcgagcgccgtgtcggcgtgggtgtcggagaagcagtggtacgaccacggcagcaacagctgctcggcgccggaggggagctcgtgcgggcactacacgcaggtggtgtggcgcgactcgacggcgatcggctgcgcccgcgtcgtctgcgacggcgacctcggcgtcttcatcacctgcaactactcgccgccgggcaacttcgtcggccaatctccctactgattaattaattaattatattatcacactcactaattaatcatatcgtatgctatgctacgtgtttatgcatgtatggacatgtagtgtcatatggtatatcgtatatgtgtacgtataatatacgtacgtatgctggtgagaataaatccgatgaataaataaataaagctgtactgtcagccgtatttgcttagtgtaaaaaaaaaaaaaaaaaaaaaccgtgtatgcatttacactttagctgtccttcgtggttacatgcatggtctgatggtcatgtacatatatagctggtttttgctggttaattaatttgtccttaattttgagtt

SEQ ID NO: 93649 - DNA, 1053 bp, Oryza sativa
  Clone ID: PAT_MRT4530_92012C.1
atgaggtcaaagcccatcctccatggtcaggtcacgcaaagcctgctactgctatcgctgggctccagtcaacgccacgacattcgcacggctcgcccaactccaaacgccacgcggagtcgacgcgaccagggcaacgcccagccttatcccccgccaccgccacgtgggcccggtaccacgtgggtcccgcaggtcagcggcacgaagtaccaggcggctcggggtgtcgaggaagccacagcgaagcagctgcgcccgagacccgacagaactccttctatagccattcctgtggattcagatgcctctcctaggaaaaatacgccagagactgtaacaagtcctcttgtgaatggtgaaaagagtattttccgggatcaggttagaggatacagtgcacttgggagtcctttgaggagagaagttgggaacaggcataacattgtatctgtgactatagtgtccactctatcgctctctggtgttatcccaactgaaccactaacttggaagctaatcaaagtttggttgcctgtgaatatcatatttgtcggaatgctaattacaagcatgtttagtttgaagtacatcaatgttgcaatgctgactatattgaagaatgttgccaatgtattgactgcttctggggagacatacttctttaaaaagcagcatgacagacaagtttggatttctctcacgttgatgcttacattacggcatgtaatggacagtgccaagcaagccaccaaatctgggaatttgaatgagttatcaatggttttactgaataatattctttcagtaccacttgggattatcctcgtgcttggtttcaatgaagtggagtacctttttgaaactcttgtgggctcccttaataagatccctctctctattgctggaatccttctcttcaaagtgcggacgagcatggagaattctttcagcattttgtttggtaggcttttttttaataacaagggaaaaggtttattggcaggagtattcttcgccagagccaaattgcttaataactctcagtcctag

SEQ ID NO: 93650 - DNA, 1568 bp, Oryza sativa
  Clone ID: PAT_MRT4530_92013C.1
gataagaccaaaatattattacctccgatttgcctgatcaggcataaattatgaaaaataaaaaaagaagagggtacttttagatgtcacagatacaaagaaccctcaggtaaccacagcatgaaactaaatatatcctctctcatcagcacacgacatattgttcgtgcagaacgggcattgcataaaaaaaattttaccctcattgagtgatatgcaagcctaagagcaatagtaatagtaagttagtaacagtactaaatgcaatgcagaaatggagagctagctcaaccaggaagatatgatgcacgctaacaacgctaatcaccagcttataccaccccccacgaacaatatactgcttattattcctcgacaagaaaagtcccaaacaaatcaatcctcaccactgaattcagaaaaaaaagaaagaaagaaaaaggagaaataacattattatccccaccaatactgcgtgatctgcacagccacacaccacataacaaacctagaggaggcataacagcagtaacggccatggtcgagcacctcaaagctaaatcatctctgactggactccactgtgcgcacgttcgcgcccgtcatcccttccagcctgtccttcattatatctacaaagtggccaaccatttcatggaattgcttcaacccggagagtggcaagattatcgacgaacgatcagctccagcaacctcagaaatcctcaggtaatgacccctgttgttgcttccaaggtcaaagaagaacctcttttgatctgcccttatgaccttagacatgcccatgccactaatttctacctctggtccagaagcagattgacttccatgtccagctataaatccagcaccaacatcatcagaaagtccaggaaggcgctctggaggttccaagtgttgctgattaggatggtttggtagaacataaagtcgggaagcctcattgtttatttccaacaatacattcctgaatgcttcccaaccttcttcaccagaactaccagccggaacaatgattgtactacggtttctgttgacagatgcctctgataccttgaggaagcggcctctcttgttctccccaatatcgaagtagaacaccttggtgtcgaggcggagctccttgctgaaggcgtcgcgctcgtcggtgcggatgtagtagtcgaagaggtcgaggaaccaggcgacgccggcgacggggacgatgatggtggagcgcgtggaggacgtcttctcggagatcttcaggtacctccccctcgggttctccttcagatcgaagtagaacagcttgtgctcgaactgcagcgtcttgctgacgagctccacgtcgcccccaacgccgcctccccctcctcctcctccccctcccgcgacaccgggccccgccatgacgcccccgcctcctcctcctcccccgccgccgtccatcgccgccgccgccgccgcgaactagggttttgagctagggtttgggtttaaactcgctctcaaactcgagtcgtcgagtcgaggagaggtggggatgtgaggttgggaattgggat

SEQ ID NO: 93651 - DNA, 369 bp, Oryza sativa
  Clone ID: PAT_MRT4530_92014C.1
cgccacgcgttccaacctttaccttatatcctctttatctctaataagcttaatttgacacggtcctaccggatgcatactccattaatggatcaacccgcggcgttgaatggggatgaagccccttgcatggaaatgggccccgccctttattgcgcctcaccgaaccggccaaccgaagaaggcattggcgttctttttgaacaaccggcccggcaatgggccacaacacaatggcaaagtggttgccttaatcaacacaaaccaggccaccgtcttcaagggaccggcgaaaaggaccaccttctttaatgtcgcagcggaaaaagggcatggcaagctgatccaggagctttaccataggttcat

SEQ ID NO: 93652 - DNA, 1585 bp, Oryza sativa
  Clone ID: PAT_MRT4530_92015C.1
atggcaggattgtgtaagggaatacgagaacatcgacttctacaccttcgacgagatatgacgacttctccacgtgatgcatatgaggtacatgactataattttgaacaagttgcatctaagttacccttctatgatgggaagtatgattctgttgcatacattgattgggagctagcagtagacaatgaatttgatatatatgatttttctgatgctcaaatgattaaggctgctagtaataagtttacctcttctgcattattttggtggacttatgttagtaataaacctgaaacttgggatgaattgaaaaccatgatgagaaaacgctttgtgacatcttattacaaatgtactcttcgggagaaattagaacatctgaaacaaggtgacagaactgttagggagtacattcatgaatttaaggcctgtatcatctacagtggtctcaaagagtgcaatgaaaatacaacgcgtagatttttcaatgggcttaattctgaaattcaggaagatcagcacatccaagaaaaggagaatggtatacttgagaagaaagaggatgaagcacctgcgatgtctgaagaaagtttgcaaggtaaattaaatggtgctgagagaaatgaaggtgagtattctcaaggtgagctacacttgtccacttttcatgctatagtagagcaaccattagtggaatcaattgctgagttgcctttgtcacaagttgatttacttgctcttccttgtgataaagaagagttgtgtgataatgtttcacttatatccatgccacaactagtgaatgaacatgttagttctactatttctttgtgtgctgattctaagcatgttgttcacattgctaatgaagtagaggaacgcgaattgctatcttctttaaatactttgggctatgttcagtttgatgatttttgtgagctcgataatttgaaggagaaattatttgctaaatctgatttgccatgtccaactaatgctatttttcatatctttggcgaatataatgatagaggaatatttttggtgcatagagtttacatttgcttggatttagaacatcttgtagttccggataaaatatgcaagctagaaagacatgttactgctaatcatattgtcttgagtttgtcttgttttgattgcaagaaacatgttgttttcagtggactgcgcgaagagcaccatatggaaaaaccgaggacagttttctgtgaagaaggggaggatgatgtgaccatgtctactatggatatgaccattgctcacatcatgaatcaacaaaaagacatcaagatcaagtcctccatgtgctgcaatctgattcggccacgtgttacattgctgacttcaaacggccgccaaatctacatacgtgctccgttttgggcccgaataaggttgatctgcaccggcaagatcaacaacccacggagaggtgtatcgatcgctaaggcgcaacacaacgtcttgttatctcaactcactgaaagatcggaccaataacagtcttgagtgcctcgagtggaactccaggctcttcattaatatcaaagattaaaat

SEQ ID NO: 93653 - DNA, 183 bp, Oryza sativa
  Clone ID: PAT_MRT4530_92016C.1
atgaggacatcactccttcagatatacacaacaatccttcgccggaacaatggagaggacaaggagacacttaaagagggacttagaggcgtggaggaccagcaaaggcgtccaagtcaagatggaggcccaaaccaagtcgacttcgagtacgtttcggagtccaggactagtttgctctaa

SEQ ID NO: 93654 - DNA, 4623 bp, Oryza sativa
  Clone ID: PAT_MRT4530_92017C.1
atggctaccacggatgcaaccattgctcacatcatggatgaacaagaagatatcgagatcaagtactccaagtgctggaatccgattcggccacctactacactgctgacttcaaacggccaccgaatctgcatacgacctccgttttcggcccgaatagggttgatctgcaccggcaagatcagcaacccacggagagggatacgcaagataattggggatagctgcgctcaacatcgacatcttcgtcgagacatgaggagggatcaacatgaccattatgaggtaagtgatgatgttctaggtaagatcaaatctgcactgccttatttcgagggagactatgatcctcgtgcttacattaattgggagctagcggttgatagtgaatttcaaaagcatgtcttgtcggagaaacaaaaggttatgtgtgcctctagtgttttaattaaacatgcttctaatgattggaaacatctttgtaggcataacaaaataccacaatcttggaaagacctgaaacgatatttcagagatgtttatgttcccatgtattatgctgacattttgttcaacaaactgcaatgtttaaaacaagataccagaactgttacttcatactatcatgatatgcaagcttgtttattacgttgtggtttagatgaatgcgaagaagctaaagaattgaggtttttatgtgggcttaacaaagaaattcaggacatgcttgattgtcaaagatatacatctctttctcatttgttacaacttgcttgcaatgctgaaagtaaaatagaggaggacatgaagaagcaacatgctatgtttttgtcttctattactaaccatttgcaggaagtgcataatcatgaaaaggaggagagagacatgaaagagccgccagtcccattgatcacactcaaagtcgaggcacctccattatctgaagagggcatcaaaggtaaacttaatggtgctgaaattaataaagcagagcaaccattagtggaaccaactgctgagattcctttgtcacaaattgatttgtttgctgttccttgtgataaagaagagttatgcgataatgcttcacttatatccatgccacaacttgtgaatgaacatgctattcctactgttaattcatactgcactgattttaagcatgttgttcacattgctaatgaagtagaggagcgtgaattgagatcttctttaaatactttgggctatgttcagtttgatgatttttgtgagctcgataatttcaaggagaaattatttgctaagtctgatttgccatatccaaccaatgttatatttcacatctttggtgaatataatgatcttggaatatattttgtgcatagagtttacatctgctcggatttagaacctcctgtacatgtggataaaatatgcaagctagagaaaaatgttattgctaaccaaattgtctcgagtttgccttgttttgattggaagaaacaggttgttgtaaatggactacgcaaagagcaccatatggaaaaaccgaggacggttttccgtgaagaaggggaggatgatgtgaccatggctaccacggatgcaaccattgctcacatcatggatgaacaagaagatatcgagatcaagtactccaagtgctggaatccgattcggccacctactacactgctgacttcaaacggccaccgaatctgcatacgacctccgttttcggcccgaatagggttgatctgcaccggcaagatcagcaacccacggagagggatacgcaagataattggggatagctgtgctcaacatcgacatcttcgtcgagacatgaggagggatcaacatgaccattatgaggtaagtgatgaggttctaggtaagatcaaatctgcactgccttatttcgagggagactatgatcctcgtgcttacattaattgggagctagcggttgatagtgaatttcaaaagcatgtcttgtcggagaaacaaaaggttatgtgtgcctctagtgttttaattaaacatgcttctaatgattggaaacatctttgtaggcataacaaaataccacaatcttggaaagacctgaaacgatatttcagagatgtttatgttcccatgtattatgctgacattttgttcaacaaactgcaatgtttaaaacaagataccagaactgttacttcatactatcatgatatgcaagcttgtttattacgttgtggtttagatgaatgcgaagaagctaaagaaatgaggtttttatgtgggcttaacaaagaaattcaggacatgcttgattgtcaaagatatacatctctttctcatttgttacaacttgcttgcaatgctgaaagtaaaatagaggaggacatgaagaagcaacatactatgtttttgtcttctattactaaccatttgcaggaagtgcataatcatgaaaaggaggagagagacatgaaagagccaccagtcccattgatcacactcaaagtcgaggcacctccattatctgaagagggcatcaaaggtaaacttaatggtgctgaaattagtaaagcagagcaaccattagtggaaccaactgctgagattcctttgtcacaaattgatttgtttgctgttccttgtgataaagaagagttatgcgataatgcttcacttgtatacatgccacaacttgtgaatgaacatgctattcttactgttaattcatactgcactgattttaagcatgttgttcacattgctaatgaagtagaggagcgtgaattgagatcttctttaaatactttgggctatgttcagtttgatgatttttgtgagctcgataatttgaaggagaaattatttgctaagtctgatttgccatatccaaccaatgttatatttcacatctttggcgaatataatgatcttggaatatattttgtgcatagaatttacatctgctcggatttagaacctcctgtacatgtggataaaacatgcaagctagagaaaaatgttattgctaaccaaattgtctcgagtttgccttgttttgattggaagaaacaggttgttgtaaatggactacgcaaagagcaccatatggaaaaaccgaggatggttttccatgaagaaggggaggatgatgtgaccatggctaccacggatgcaaccattgctcacatcatggatgaacaagaagatatcgagatcaagtactccaagtgctggaatccgattcggccacctactacactgctgatttcaaacggccaccgaatctgcatacgacctccgttttcggcccgggagtacttgatggaaagctctcggagccctctttctaacggatccagcctcttctctgaattctatctcgtgtggccagaatcacaggaacaaggaatagggttgatctgcaccggcaagatcagcaacccacggagagggatatgcaagataattggggatagctgtgctcaacatcgacatcttcgtcgagacacgaggagggatcaacatgaccattataaggaagtgcataatcatgaaaaggaggagagagacatgaaagagccgccagtcccattgatcacactcaaagtcgaggcacctccattatctgaagagggcatcaaaggtaaacttaatggtgctgaaattaataaagcagagcaaccattagtggaaccaactgctgagattcctttgtcacaaattgatttgtttgctgttccttgtgataaagaagagttatgcgataatgcttcacttatatccatgccacaacttgtgaatgaacatgctattcctactgttaattcatactgcactgattttaagcatgttgttcacattgctaataaaatagaggagcgtgaattgagatcttctttaaatactttgggttatgttcagtttgatgatttttgtgagctcgataatttcaaggagaaattatttgctaagtctgatttgccatatccaaccaatgttatatttcacatctttggtgaatataatgatcttggaatatattttgtgcatagagtttacatctgctcggatttagaacctcctgtacatgtggataaaatatgcaagctagagaaaaatgttattgctaaccaaattgtctcgagtttgcctagttttgattggaagaaacaggttgttgtaaatggactacgcaaagagcaccatatggaaaaaccgaggacggttttccgtgaagaaggggaggatgatgtgaccatggctaccacggatgcaaccattgctcacatcatggatgaacaagaagatatcgagatcaagtactccaagtgctggaatccgattcggccacctactacactgctgatttcaaacggccaccgaatctgcatacgacctccgttttcggcccgggagtacttgatggaaagctctcggagccctctttctaacggatccagcctcttctctgaattctatctcgtgtggccagaatcacaggaacaaggaatatggttgatctgcaccggcaagatcagcaacccacggagaggtgtatcgatcgctaaggcgcaacacaacgtctcgtacggttgtagtcggatcgtcaacgtttctcccaaatcgtag

SEQ ID NO: 93655 - DNA, 5917 bp, Oryza sativa
  Clone ID: PAT_MRT4530_92018C.1
atggcagggatacgcaagataattggggatagctgtgctcaacatcgacatcttcgtcgagacatgaggagggatcaacatgaccattatgaggtaagtgatgatgttctaggtaagatcaaatctgcactgccttatttcgagggaaactatgatcctcgtgcttacattaattgggagctagcggttgatagtgaatttcaaaagcatgtcttgtcggagaaacaaaaggaagtgcgtaatcacgaaaaggaggagagagacatgaaagagccaccaattccattgttcacacccaagttcgagacacctccatcatctaaagaggacatccaaggtaaagtaaatgatactgaaattaatcaaggtgagtgcattgttaacgaagtaaatttgtccacttttcatgcaaaagtagagcaaccgttagtggaaccaaatgctggaattcctttgtcacaagttgatttactcgctgttccttgtgataaagaagagttgtgtgataatgcttcacttatatccatgccacaactagtgaatgaacatgctattcctagtgtttctttgtgtgctgattttaagcatgctgttcacattgctaatgaagttgaggaacgtaaattgctatcttctttaaatactttgggctatgttcagtttaatgatttttgtgagctcgataatttgaaggagaaattattttctaagtctgatttgccaagtccaactaatgctatttttcatatctttggcaaatataatgatagaggaatatatttggtgcatagagttttcatttgttcggatttagagaaacatgttattgctaatcacactacttcgagtttctctagttttgattggatgaaacaggttattttgaatggactatataaagaacaccatatggaaaaaccgaggacggttttccgtgaagaaggggaggatgatatgaccatggctactacggatacatccgttgctcacatcatggatgaacaacaagatatcaagttcgagtcctccaagtgccaaaatccaattcggccacctgctacactgctgacttcaaacggccgccgaagctccatacgacctccgtttttggcccgtgagtacttgatggaaagctctcggagtcctctttccaatgcatcaagcctcgttgccaaattccatctcagtcggcagcaactgaagaaacaaggaatagggttgatctgcaccggcaagatcaacaacccacggagaggattgcgcaaggggaaacaagatggtcatgctcaacgtcaacatctacaccttcgacgagatatgacgacttcttcacgtgatgcatatgaggtacatgactataattttgcacaagttgcatgtaagttaccagtctatgatggaaagtatgattccgctgcatacattaattgggagctagcagtagaaaaacaatttgatgagtatgatttttctaatgctcaaatgattaaggctgctagtaataagtgtaccggttctgcatctttttggtggcatactgtggggaataagcttgaaacttgggatgaatgcaaaatactgatgagaaaaagatttgtgttttcatactatagatgtgctctccttgagaaatgggaacatctaaaacaaggtgacaaaactgttagggagtactttcatgattttaaaatttgtatcacttatagtggtttacaagaatctaatgagaacacaatgactagatttttcagagggcttaatttcaatattcaggctgggcttgttaatgtgacatataatcatataggccaattgttcatgcttgcttgcattgttgagcgcaaaattttggagaatccaacggagcaacaagatatgcttgtgcctcctatcactgatgttttgcaggaagttcagaaaagtctccaaaatgagaagaacgatatgtttgagatgtcacttccatcactcgcgaatgaggagaaggctgatgcagctacattatctgaagaaagttcgcaaggtaaattaaatggtgctgagagaaatgaaggtgagtattctcaaggtgagctacacttgtccacttttcatgctatagtagagcaaccattagtggaatcaattactgagttgcctttgtcacaagttgatttacttgctgtttcttgtgataaagaagagttgtgtgataatgtttcacttatatccatgccacaactagtgaatgaacatgttagttctactatttctttgtgtgctgattctaagcatgttgttcacattgctaatgaagtagaggaacgcgaattgctatcttctttaaatactttgggctatgttcagtttgatgatttttgtgagctcgataatttgaaggagaaattatttgctaaatctgatttgccatgtccaactaatgctatttttcatatctttggcgaatataatgatagaggaatatttttggtgcatagagtttacatttgttcagatttagaacatcttgtagttctggataaaatatgcaagctagagagacatgttactgctaatcatattgtctcgagtttgtcttgttttgattgcaagaaacaggttgtgttcagtggactgcgcgaagagcaccatatggaaaaaccgaggacggttttctgtgaagaaggggaggatgatgtgaccatggctactatggatacgaccattgctcacatcatgaatcaacaagaagacatcaagatcaagtcctccatgtgctgcaatctgattcggccacgtgttacattgctgacttcaaacggccgccaaatctacatacgtgctccgttttgggcccgtgagtacttgatgaaaagctctcgaagtcctccttacaacggatccagcctcatctcggaattctatctcgtttggccgcaatcacagaagcaaggaataaggttgatttgcaccggcaagatcaacaacccacagagagttatcatcaactcaccgaaagatcgggccaagaatagccttgagtgtcgagaggaactcagggttcatcaggtggtatcagagctttcgttgctcgggatacgcaagataattggggatagctgtgctcaacatcgacatcttcgtcgagacatgaggagggatcaacatgaccattatgaggtaagtgatgatgttctaggtaagatcaaatctgcactgccttatttcgagggaaactatgatcctcgtgcttacattaattgggagctagcggttgatagtgaatttcaaaagcatgtcttgtcggagaaacaaaaggttatgtgtgcctctagtgttttaattaaacatgcttctaatgattggaaacatctttgtaggcataacaaaataccacaatcttggaaagacctgaaacgatatttcagagatgtttatgttcccatgtattatgctgatattgtgttcaacaaactgcaatgtttaaaacaagatacaagaactgttacttcatactatcatgatatgcaagcttgtttattacgttgtggtttagatgaatgtgaagaagctaaagaattgaggtttttacgtgggctaaacaaagaaattcaggacatgcttgattgtcaaagatatacatctctttctcatttgttacaacttgcttgcaatgctgaaagtaaaatagaggagagagacataaaagagccgccaatcccattgttcacactcaaagtcgaggcacctccatcatctgaagaggacatcaaaggtaaagtaaatggtactaaaattaatcatggtgagtgcattgttaacgaagtaaatttgtccacttttcatactaaagtagagcaaccgttagtggaatcaaatgctggaattcctttgtcacaagttgatttactcgctgttccttgtgataaagaagagttgtgtgataatgcttcacttatatccatgccacaactaatgaatgaacatgctatttctagtgtttctttgtgcgctgattttaagcatgttgttcacattgctaatgaagtagaggaacgcgaattgctatcttctttaaatactttgggctatgttcagtttgatgatttttgtgagctcgataatttgaaggagaaattatttgctaaatctgatttgtcatgtccaactaatgctatttttcatatctttggcgaatataatgatagaggaatatttttggtgcatagagtttacatttgttcggatttagaacatcttgtagttccggataaaatatgcaagctagagagacatgttactgctaatcatattgtctcgagtttgtcttgttttgcttgcaagaaacaggttgttttcagtggactgcgcgaagagcaccatatggaaaaaccgaggacggttttccgtgaagaaggggaggatgatgtgaccatggctactatggatacgaccattgctcacatcatgaatcaacaagaagacatcaagatcaagtcctccatgtggtgcaatctgattcggccacgtgttacattgctgacttcaaacggccgccgaatctgcatacgacttccatttttggcccgtgagtacttgatggaaagctcttggagtcctctttccaatggatccagcctcattgcaaaattccatcttattgagccgcaattgaagcaacaaggtgctacatcacctataatgggcctatgggcttgtaacttcgtctgggaccccggcccaagtggggcccatgtggggaataaggttgatctgcaccggcaagatcaacaacccacggagaggtgtattgatcgctaaggcgcaacacaacgtctcggtttctgccgtgtggttgtctcggtcccgaggttgtgccgtgcatgctgttctgttgtgcgcaaggaagaagatctgttgcgcgaggaaggagaaagaaaggataacggatcaggtccttgagtcgtttttgctggaaaagaaattaaaaaaaaggatacgcaagataattggggatagctgtgctcaacatcgacatcttcgtcgagacatgaggagtgatcaacatgacgattacgaggaagtgaacaactgcaacaaggaggagagagacatgaaagagccatcagtcccattgttcacactcaaagtcgaggcacctccatcatctgaagagggcatcaaaggtaaacttattggtgctgaaattaatcaagtagagcaaccattagtggaaccaactgttgagattcctttgtcacaagttgatttgtttgatgttccttgtgataaaaaagagttgtgtgataatgcttcacttatatcaatgccacaactagtgaatgaacatgctatttctaatgtcagttctttatgcgatgattttaagcatgttattcacattgctaatgaagtagaggaatgtgaattgacttcttctttaaatactttgggctatgttcagtgtgatgatttttgtgagcttgatagtttgaaggagaagttatttgctaaatattatttgctatgtccaactaatgctatttttcatatctttggcgaatataatgatagagaaatatatttggtgcatagagtttatctatgttcggatttagaacctcctgtacatgtggataaaacttgcaagctagagagacatgttatttctaatcatattacttcgagtttgtcttgttttgattggatgaaacatgttgttttaaatcgaccacgtgatgagcaccatatggaaaaatcgaggacggttttctgtgaagaaggggaggatgatgtgaccatggctactacggatacaaccgtttctgacatcatggatgaacagcacgatatcaagttcaagtcctccaagtgctggaatccgattcggccacctgctacactgctgatttcaaatggccacagaatctgcatatga

SEQ ID NO: 93656 - DNA, 1627 bp, Oryza sativa
  Clone ID: PAT_MRT4530_92019C.1
ttgaaaatttccccaatccgacgccctcctcctcctcccccctcccccctgctggatctcctccactccccatggtagcctcccccgccccgcgctgctgacccctgggccccaccgccgcttccgccgccgctcccgtttcccccggctctcgctctcgcgcgagccgtagccgttgctggggaggaggaggaggggaaagctcgaggtatttggatgcgcgcgagccgatggcgacgccggccgccgagaagcccgacggggtggagatccgcgaggtgtgggaggacaacctcgaggccgagttcgcggtgattcgggagatcgttgacgacttcccgtacgtcgcgatggacacggagttcccgggcgtcgtctgcaggccgctcgggacgttcaagtccaacgccgatttcaactacgcaacgctcaaagccaacgtcgacatgctgaagcttatccagcttggtttaaccttctcgaatgagcatggtgggctcccgtcgcttggccccgagggtcgaccttgtgtttggcagttcaactttcgtggcttcgatccccggaccgacgtcgctgctgcagattccattgacttgctccggcgcagcggtattgacttcacccgtcactcggctgacggcgctgatgctcgccgcttcgctgagcttctcatgtcgtcgggcgttgtgatgaactctgaggttcgctgggttacgttccatagcggatacgactttggctacttgctcaagttgctcaccggcacatacctgccagacacgataaccggattcttcgacctcatcaggatatatttccccgtcgtgtatgacatcaagcacttgatgcggttctgcaacagcctccatggtgggctgaacaagcttgccgagctgcttgatgttgagcgcgttggaatttgtcatcaggctggttccgactcgctgttgaccgcgctgtcattcaaaaagctcaaggaagcatacttcaatgggttaaccgagaagtatgccggtgtgttgtatggtcttggcacagaaggtggggagacctcctctgctgctcactaagtaatggatagttaaataaaggatgaactatgtttggaaaaaaaaggagagagaaatgggtgcgtgaatgtgtgatgcttgattacttccttttgcttgacactagattgccagaaaggtaccacttttaccctcaatcgtggtttactctgggcccacgcgtccgaggtgaaaaagtattttgatgtctgacttagcagttgaagcaaattggacaccattgtagctcctacttagcggttgaagcttgcaattctacgctaatcattcacaccaactgtagaattaaacactgaatagcaaaaggaacacttccttttgtcgtatcatatgccaatctcatcaaatctagtgataaatattttagagagtgactctttaagtaatgagtataggtgctgttcccttgcgtacactttcctggaagcaaggacaattatagattccatgggttggttattcctttcttaaatgatggatttcttttttgtctatttggtcatacagatgtaactaacgagcttatatgtgcatgcaatttttttagtttgaac

SEQ ID NO: 93657 - DNA, 252 bp, Oryza sativa
  Clone ID: PAT_MRT4530_9201C.1
atggagacgttggcatctcaccggagaggcccctgcgtactctcctcccccgacgccgacttcctcaccggcggctccgtcaccgatgtgtcgacacgggagcgggggtgtgcaaggtttcaccgtgatgaggctctcccggtaagctgcattccacggattgcttctgctacgatgagagcagctgagcatcctcttctccttggtgtcgtacaccaagccccatctgcaggacaaggtgacaagcagtag

SEQ ID NO: 93658 - DNA, 492 bp, Oryza sativa
  Clone ID: PAT_MRT4530_92020C.1
atgagcacggcgatcagcgcttctcggggcgtcctcctcgacctcgacggcgatgacaacatcaactgtgccacttgtgctgaagaagaagaggtcaccggagccggagaaaaagagcttaaagcacaaatcatgaagtatatccgggacaacatcacaagtgtttgcgtggcggcggtgatagaggaagcggcggcatcaagtagcgagcggggaaggaggtgggcggcgcggctcaccgcgagtagcagggtgggtgacatcagggtggtgccggcagagcgatgtggctgcgacggggggatctcggcgaaccatcacaaccttgcacgcgctgcggggatccgaccgataaagaaggggcaagcagcatctgcacaaactctgctggaggcatcgtctatgattgctgattcctcatcctcttctcagccaaaggcagtagcggtagctcaggataccattgagttctccgaaccatcagggcgttga

SEQ ID NO: 93659 - DNA, 5197 bp, Oryza sativa
  Clone ID: PAT_MRT4530_92021C.1
atggcatgattgcgtaatggaatacgagaacatcaacttctacaccttccacgagatatgacgacttctccaaatgatgcatatgaggtacatgactataattgtgaacaagttgcatctaagttacccttctatgatgggaagtatgattctgttgcatacattgattgagagctagcagtacaaaatgaatttgatatatatgatttttctgatgctcaaatgattaaggctgctagtaataagtttacctcttctgcattattttggtggacttatgttagtaataaacctgaaacttgggatgaattgaaaaccatgatgagaaaacgctttgtgacatcttattacaaatgtactcttcgggagaaattagaacatctgaaacaaggtgacagaactgttagggagtacattcatgaatttaaggtctgtatcatctacagtggtctcaaagagtgcaatgaaaatacaatgactagatttttcagagggcttaattccaatattcaagctgggcttgttaatgtgacatataatcatataggccaattgttcatgcttgctcgtagcattgagagtcagatcatatcaaaggcgaggatgcatgaccaatgtgatttatctcctatttctgaatccccaatatacttatgtaatgatgatgtgcaaacattggaggagcaatcttttatctcccctattactaacgttttgcaggaagatcagcacatccaagaaaaggagaatggtatacttgagaagaaagaggatgaagcacctgcgatgtctgaagaaagttcgcaaggtaaattaaatggtgctgagagaaatgaaggtgagtattctcaaggtgagctacacttgtccacttttcatgctatagtagagcaaccattagtggaatcaattgctgagttgcctttgtcacaagttgatttacttgttgttccttgtgataaagaagagttgtgcgataatgcttcacttatatccatgccacaactagtgaatgaacatgctattcctgttgttaatactaactgcgctgattttaagcatgttgttcacattgctaatagagtagaggaacgtgaattgacatcttctttaaatactttgagctatattcagtttgctgattttcatgagctcgataatttgaaggagaaattatttgctaagtctgatttgccatgtccaagtaacgctatttttcatctctttggtgaatataatgatagaggaatatatttggtgcatagagtttacatctgctcggatttagaacttcctgtacatgtggataaaacatacaagctagagagaaatgttattgctaaccaaattgtctcgagtttgccttgttttgattggaagaaacaggttgttgtaaatggactacgcaaagagcaccatatggaaaaaccgaggacggttttccgtgaagaaggggaggatgatgtgaccatagctaccacggatgcaaccattgctcacatcatggatgaacaagaagatatcgagatcacatcgtccaagagctggaatccgattcggccacctactacactgctgacttcaaacggccgccgaatctgcatacgacctccgttttcggcccgtgagtacttgatggaaagctctcggagccctctttccaacggatccagcctcatctccgaattccatctcgtgtggccggaatcacacgcacaaggtgctgcgtcatctataatgggcctatgggcttgtaacttcatttgggatcccggcctaggtggggcccatgtggggtgcgccccaaccaggtggagcacgaccctagtcacccctaggtcgtcctcccacccctatatatagctagttaccccttcagggtttcttgggtttttgttagattaaagtttagccattgctacttgcttgcagcgcgcgtgtcggctagaccgtccgtctgcttgttcttcggaaccccaacttatcatttgtattaaattcctatttgcaatatcagattgcttttatcttgttcttgcttgtttcttcgatttgcttgcaggaatagggttgatctgcaccggcaagatcagcaacccacggagaggtgtatcgatcgctaaggcgcaacacaacgtctcgtacggttgtagtcggatcatcaacgtttctcccaaatcgtagttatcacaactcaccgaaagatcgggccaacaacagccttgagtgtcgagaggaactcagggttcatcaggtggtatcagagctttcgttgctcgcgtctagttcgtttagagtttcgagttctggtcacgttttgtaccacagtcgttgctgccaccgtgtctctgttgttgtcgggacctacgaaaacggaatcggctcgctgccacggttctatttttgtagttttcagaagtttctgtcggttagttttggagttcttgagttgcatctagagtttgccgatccttgtgtgtgtttgttttggccgtgcctgtgtcgtgcacgagaggaggaaggtgaattaccatatctgattttggaagtagtcaagattgttttggaaagatatagtagattggattggttaaaaatcagtttcctttttatcccatacaccaaattcggctgccatccactccacctcctggccgagtcccactcgcccctttggccgagtccgactcccctcctttttttcccacggttccgagttgtgtcaaacaccttggcgaatttttgtttgggtgtcggttcgagatctgtttggaaaaacggaaccgggcataaattcagcattccattttttgtataattttaattttgggtttagacttttacatttgagtccctgtaaattttatatttatgtttgagtccctgtaatcttacattaaagtccttgagtcagtttttgttaaaaaaatcaagaaaaaagtgaaaaaaaggcagaaaggtgcaaaaaaaagaaaaaaaaaagccgcacaaaaaaaaacagaaaagaaaaggaaagaaaaaaaagaaaagaagaaagaagaaagaaagaaaagagaaaatactgttatgtttgagctgaacttcatatatcagagttgtgctcgcgtctctagtacgttctagcctaggaccagcacggtacttgactttgaacaattattcaactttgcattatctgatttgagcaggccacctactacactgctgacttcaaacggccaccgaatctgcatacgacctccgttttcgccccaatcacaggaacaaggtgttgcatcacctataatgggcctatgggcttgtaacttcatttgggaccccggcccaggaatagggttgatctgcaccggcaagatcagcaacccacggagaggtgtatcgatcgctaaggcgcaacacaacgtctcgtacggttgtagtcggatcgtcaacgtttctcccaaatcgtagttatcacaactcaccgaaagatcgggccaacaacagccttgagtgtcgagaggaactcagggttcatcaggtggtatcagagctttcgttgctcgggatacgcaagataattggggatagctgcgctcaacatcgacatcttcgtcgagacatgaggagggatcaacatgaccattatgaggtaagtgatgatgttctaggtaagatcaaatctgcactgccttatttcgagggagactatgatcctcgtgcttacattaattgggagctagcggttgatagtgaatttcaaaagcatgtcttgtcggagaaacaaaaggttatgtgtgcctctagtgttttaattaaacatgcttctaatgattggaaacatctttgtaggcataacaaaataccacaatcttggaaagacctgaaacgatatttcagagatgtttatgtttccatgtattatgctgacattttgttcaacaaactgcaatgtttaaaacaagataccagaactgttacttcatactatcatgatatgcaagcttgtttattacgttgtggtttagatgaatgcgaagaagctaaagaattgaggtttttatgtgggcttaacaaagaaattcaggacatgcttgattgtcaaagatatacatctctttctcatttgttacaacttgcttgcaatgctgaaagtaaaatagaggaggacatgaagaagcaacatgctatgtttttgtcttctattactaaccatttgcaggaagtgcataatcatgaaaaggaggagagagacatgaaagagccaccagtcccattgatcacactcaaagtcgaggcacctccattatctgaagagggcatcaaaggtaaacttaatggtgctgaaattaataaagcagagcaaccattagtggaaccaactgctgagattcctttgtcacaaattgatttgtttgctgttccttgtgataaagaagagttatgcgataatgcttcacttatatccatgccacaacttgtgaatgaacatgctattcctactgttaattcatactgcactgattttaagcatgttgttcacattgctaatgaagtagaggagcgtgaattgagatcttctttaaatactatgggctatgttcagtttgatgatttttgtgagctcgataatttcaaggagaaattatttgctaagtctgatttgccatatccaaccaatgttctatttcacatctttggtgaatataatgatcttggaatatattttgtgcatagagtttacatctgctcggatttagaacctcctgtacatgtggataaaatatgcaagctagagaaaaatgttattgctaaccaaattgtctcgagtttgccttgttttgattggaagaaacaggttgttgtaaatggactacgcaaagagcaccatatggaaaaaccgaggacggttttccgtgaagaaggggaggatgatgtgaccatggctaccacggatgcaaccattgctcacatcatggatgaacaagaagatatcgagatcaagtactccaagtgctggaatccgattcggccacctactacactgctgacttcaaacggccaccgaatctgcatacgacctccgttttcggcccgaatagggttgatctgcaccggcaagatcagcaacccacggagaggtgtatcgatcgctaaggcgcaacacaacgtctcgtacggttgtagtcggatcgtcaacgtttctcccaaatcgtag

SEQ ID NO: 93660 - DNA, 242 bp, Oryza sativa
  Clone ID: PAT_MRT4530_92022C.1
gcacgagggcacccgagcctccctcaaaagcaagcactgcatgctttcaacataagcctagcctctagcgatccatctagctcgatcaccacagttcttagccgaagagaaagaaagttaattagagagttcatatatagctgaagtaatcaagaaccaagaagaggagaggaaggtgatcgaggaggaaggaaaggatggtagcggaggaggaggtgggggtggtgtgggagggggagaag

SEQ ID NO: 93661 - DNA, 439 bp, Oryza sativa
  Clone ID: PAT_MRT4530_92023C.1
gaacaaaacaggtgagcggtcgtattagtgcttcataaacttagaacagaaccgccacagagttacacatacgttgtggcattatttttttgatacacctatactatgacattagaacattactctaaggcctggttattcgactcatatgagaagcctgggtaggcctggtgttgatatctaggagtgaaggcaccgagctcttatcccatattatacttaagggtgcgtgcttgctccattgatttgcggtaagcattatcgatcgcgtacactgtcgtggcacggaatactaagtgattccctgtatgggagttcaacagggaggaagcataggggaagagagaaaggtgttagggtaacttcacgctgtgctgttattaaaacgaggatttgattcaggaaagccatgattatgagctactctttgatagatata

SEQ ID NO: 93662 - DNA, 343 bp, Oryza sativa
  Clone ID: PAT_MRT4530_92024C.1
actaaaacagaaagcaaatactcatctccctctcaaatcctcctcttcctcttggagacctccacttcgcctttaatggcggccacgcacaacctcccgtctcagtgacgtcgcgcccgtagtcccgtacgctacctcgctgctgccaggaagcgaggcgcgctgggtggaggagcagatcgagatggcggtggtggtggcggcggcggcggcgaagcggctggcggggcgggtcacgaagaggccggtgctggagaaggccaggatggcggggctcgccgtggcggtggccgccgccgccgcgctggtgctgctcctctgcgccgcctcgctccgctgctcg

SEQ ID NO: 93663 - DNA, 1553 bp, Oryza sativa
  unsure (1)..(1553): unsure at all n locations
  Clone ID: PAT_MRT4530_92025C.1
atggcgggcaagggcgagggtccggccatcggcatcgaccttggcacgacctactcgtgcgtgggcgtttggcagcacgaccgcgtggagatcatcgccaacgaccagggcaaccgcaccaccccctcctacgtcggcttcaccgactccgagaggctcatcggagatgctgccaagaaccaggtcgccatgaaccccatcaacaccgtctttgatgccaagcgtctcattggcaggaggtttagcgatgcttctgttcagagtgacattaagctctggcccttcaaggtgattgctggacctggtgacnagcctatgattgttgtccagtacaagggtgaggagaagcagtttgctgcagaagagatctcctccatggtcctcatcaagatgcgtgagattgctgaggcctaccttggcaccaccatcaagaatgccgttgtcactgttcctgcctacttcaatgactcccagaggcaggccaccaaggatgctggagtgattgctggtctcaatgtcatgcgtatcatcaacgagccgactgctgcagctattgcctatggtcttgataagaaggccaccagcgttggtgagaagaatgtcctcatctttgaccttggaggtggtacctttgatgtcttccctcctaccattgagaagggtttttttagggtcaagcccccagttgttgccacccattttgttgtgaaatttttgccattgaggaagaccaagaaggatatcnctggcaaccccaggctttcaggaagtttaggacagcttgtaaaaggcaaaaaggaccctgtcctccactgcccagccaccattgagatcgattccctgtatgagggcatcgacttctactcaaccatcacccgtgccaggtttgaggagctcaacatggatctcttcagaaagtgtatggagcctgtggagaagtgcctcagggatgctaagatggacaagagctctgttcatgatgttgtccttgttggtggctccactaggatcccgagggtgcagcagctcctgcaggatttcttcaacggcaaggagctttgcaagaacatcaacccagatgaggctgttgcttatggtgctgctgtccaggctgccatcttgagtggtgagggcaacgagaaggtccaggacctcctcctgttggatgttacccctctctctctcggtttggagactgctggtggtgtcatgaccgttttgatcccaaggaacaccaccattcccaccaagaaggagcaggtcttctccacctactccgacaaccagcctggtgtgctcatccaggtttatgagggtgagaggaccaggacacgtgacaacaacctgctggggaagtttgagctctctggaatccctcctgctcccaggggtgttccacagatcactgtttgcttcgacattgatgccaatggtatcctgaacgtgtctgctgaggacaagaccaccgggcagaagaacaagatcaccattaccaacgacaagggcaggcttagcaaggaggagattgagaagatggtccaggaggccgagaa

SEQ ID NO: 93664 - DNA, 279 bp, Oryza sativa
  Clone ID: PAT_MRT4530_92026C.1
aagccatccagaaacaaaattattttttggaaagattatgcccatgtgcatgtggccggacaatttgggtacataatttttcaaaaaattcccccgcgaaaagaaatttttaaaaaaaagttttaaaacagcattatgcactgacgggtcccaaacagttaagctggtcgtcatttccacgggtggaaagccatttttacctcattggagttgggcatttgggcaagcggggcatgttttggggcccgcaaatttttttctgacatcaaccaatggggg

SEQ ID NO: 93665 - DNA, 3372 bp, Oryza sativa
  Clone ID: PAT_MRT4530_92027C.1
tggtaaggaaagctggcggcctctgcatcgccgacgaagttcaggcgggagtcgcacgaactggaagccacttctggggatttgaatcgcacggcgtcatcccagacatagttacaatggcaaagggtataggcaatggcataccgatcggagcagtcgtcacaacccctgagatcgctcaggtgttaacccgcaggagctacttcaacaccttcagatggcaaccctgtcagcacagccggtggccatgctgttctcaaggttctggagaaggagaagctccaagagaacgcatttgtggttggctcctacctgaaggaacggctcaacaagctgaaagagaagcatgacatcattggtgatgttagagggaaaggcttccttcttggggttgagctggtgaccgatcgccagaagaagacaccggccaaagttgagatcggtcatgtcatgaaccacatgaaagacatgggtgtgctggttgggaaaggtggtttctacgggaacgtgttcagagtaacacctccactatgcttcaccaaagaggactccgatttcttcattgaggcgatggacatttcactatcgaagctgtgagtcggagagggactggcaggatcaacctgtccgcatgtgatccgtatccataaataatgttggggattggtgagatagcacctcgttgtctcgtaatatgtcctgcaaacccaccatgcgctgctcaacacatggtccaataggcgctcctccggtctctaatcagatgtgttgtgactcgtgaccaataagcgcatgtcaatgtcagatgtattgttatagttattgtttacatgctgaacgacaaaacgaaccaatcacaatgcccaggcgatgtaaatgttgaaacaattatattggcaaatgtcagtgatttcgccgagagaaacatcagcatccatggcgggcaagggcgagggtccggccatcggcatcgaccttggcacgacctactcgtgcgtgggcgtttggcagcacgaccgcgtggagatcatcgccaacgaccagggcaaccgcaccaccccctcctacgtcggcttcaccgactccgagaggctcatcggagatgctgccaagaaccaggtcgccatgaaccccatcaacaccgtctttgatgccaagcgtctcattggcaggaggtttagcgatgcttctgttcagagtgacattaagctctggcccttcaaggtgattgctggacctggtgacaagcctatgattgttgtccagtacaagggtgaggagaagcagtttgctgcagaagagatctcctccatggtcctcatcaagatgcgtgagattgctgaggcctaccttggcaccaccatcaagaatgccgttgtcactgttcctgcctacttcaatgactcccagaggcaggccaccaaggatgctggagtgattgctggtctcaatgtcatgcgtatcatcaacgagccgactgctgcagctattgcctatggtcttgataagaaggccaccagcgttggtgagaagaatgtcctcatctttgaccttggaggtggtacctttgatgtctccctccttaccattgaggagggtatctttgaggtcaaggccacagctggtgacacccatcttggtggtgaagattttgacaatcgtatggtcaaccactttgtgcaagaattcaagaggaagaacaagaaggatatcactggcaaccccagggctctcaggaggttgaggacagcttgtgagagggcaaagaggaccctgtcctccactgcccagaccaccattgagatcgattccctgtatgagggcatcgacttctactcaaccatcacccgtgccaggtttgaggagctcaacatggatctcttcaggaagtgtatggagcctgtggagaagtgcctcagggatgctaagatggacaagagctctgttcatgatgttgtccttgttggtggctccactaggatcccgagggtgcagcagctcctgcaggatttcttcaacggcaaggagctttgcaagaacatcaacccagatgaggctgttgcttatggtgctgctgtccaggctgccatcttgagtggtgagggcaacgagaaggtccaggacctcctcctgttggatgttacccctctctctctcggtttggagactgctggtggtgtcatgaccgttttgatcccaaggaacaccaccattcccaccaagaaggagcaggtcttctccacctactccgacaaccagcctggtgtgctcatccaggtttatgagggtgagaggaccaggacacgtgacaacaacctgctggggaagtttgagctctctggaatccctcctgctcccaggggtgttccacagatcactgtttgcttcgacattgatgccaatggtatcctgaacgtgtctgctgaggacaagaccaccgggcagaagaacaagatcaccattaccaacgacaagggcaggcttagcaaggaggagattgagaagatggtccaggaggccgagaagtacaagtcagaggatgaggagcacaagaagaaggtggagtccaagaacgcgctggagaactacgcctacaacatgcgcaacaccatcaaggatgagaagatcgcctcgaagctcccggcagcggacaagaagaagatcgaggatgccatcgaccaggccatccagtggctggacggcaaccagctcgctgaggctgatgagttcgatgacaagatgaaggagctggagggcatctgcaaccccatcatcgccaagatgtaccagggcgctggcgcggacatggccggcggcatggacgaggacgatgctcccccggctggcggcagcggtgctggccccaagatcgaggaggtcgactaagcgcgaaatttgctagtgatccgcgcttcaagttatcttattgcattattagtgtctctttgatgttgcgtgttaaaaaactttgctgctatgacttatgatgatacccttggtctgtttgggcagtccttttgaattgaagaactgcgttgggagctctatgagaactatgaattgcgtgagaaatttaattattgtggtgcttgcagcgcctattaaaaaggactgcccaaacagaccaagggtatcatcataagtcatagcagcaaagttttttaacacaacataaaagagacactaataatgcaataagataacttgaagcgcggatcactagcaaatttcgcgcttagtcgacctcctcgatcttggggccagcaccgctgccgccagccgggggagcatcgtcctcgtccatgccgccggccatgtccgcgccagcgccctggtacatcttggcgatgatggggttgcagatgccctcca

SEQ ID NO: 93666 - DNA, 588 bp, Oryza sativa
  Clone ID: PAT_MRT4530_92028C.1
ggcagtcttcttctactgacagaggcatgaaaatggtactttctggtggatgcaactttatctgttcaaaatgctaatgtgtcaatggtagacgtaatttttggaccacaggttgtaaaatcagttctgaatctcctaggaccttgatgtcttggttgcagcctctgcaagctacaaatctcttcccttgtgctatcctcaatgacttgctcttcattttgttcatccatttatgcagtgaaccaaagcgccttagattagactgtttgcactctattactgggaattgttgcagcgaacttccaaacaggttgtcacttatgaggaattagtagtgtttggctagtcatggcataacaactgtggaaaacaatgagtgttcagtgttttgctacttggattaagaacactcacaagaatagccattacatcatattagttcattgtggagtcccttcagatctcaggttaatattatatggaacgcgttaatatgagaggtaaatcttctattgacaccaactacatgaaatcggtactgtccaagggatgcagcttaatctgttcaaggcgctaatgtgccaatgc

SEQ ID NO: 93667 - DNA, 1677 bp, Oryza sativa
  Clone ID: PAT_MRT4530_92029C.1
atggcgtcctcttcctccaacgccgcaaccagcaaccttttccaaggacacccggtctctgagaagctcgggaaaaccaatcacgcactctggaaggcccaagtcaccgcaggagtgcgtggggcgcgcctctacggtcatctgaccggcgtgactccaaaaccagatgaggagatcaccgtcaccgaaggtggaaaagaggtgaagaagccgaactcggcttatgcagattgggaggctcaagaccagcaagttcttgggtacctcctctcctccgtcacaagagatgtactcgtgcaagttgcaacctacgaaacagcagcagaggtgtggggaatcatcgaacagatgtacacctccgactctagagcgcgctccatcaacactaggatagcgctcgcaacaaccaagagaggaaacatgaccatcacggagtacttcacgaagatgaagaccctaaaggatgagatgcaggccggtggtaaaccactggatgacgaagattttctgcagtacatcatcaccggcgtcggccctgagtttagcgaggtcgtgtcggtggtgtgtgcacgagtggaatcaatctcaattggagagttgtactcacaactcctcaattttgagactcgcaaggtgctgtacaatggagcacaagacactggagggtttgccaatgtcgctaatcgtggcggctttggtggacatggcggatctaacgtttgtcgtggcggcggcgctcaacgtgggcgcgggcgtggcggcaaccaaggaggtcgcggcggcggtccaggaggtcgtggccgtgggcgaggatatgccggccctgatctccgtccgacttgccaagtgtgcttcatgaaaggacacacggctccagagtgctggcacaggttcgatgacaattatgttaatgatcaaaaacatgttgcagcagccacttatgcagggtatggtgtcgacacaaactggtacatcgataccggcgccattgaccatatcaatggcgagcttgataagctcacaatgaaggagaaatatgaagggagcgatcagatccacactgcaagtggagcaagtatggatataaggcacattggttctactattgttcatgcccctaataatcaaaaaatacatcttaaaaatgtcctatatgtaccacaagcaaagaaaaatctagtttctgttcatcgtcttgttgatgataactctgctttccttgaactccatcgtgattatttttctcttaaggatcgggtcaccaggaaaacactccttaaaggaagatcatggcgcaggctctatccccttccaaaatcatccttgaagcaagcctgcagtgttgaaaagctctccttggcccggtggcacagtcattttgctcatccctcatcttccatcgtcaagcaagtagacaataaatttcatcttccttgttcgagtttagcaatgtttgaaaaatttcaagagttccaagttatggtggaaagaatgtttgatagaaaaattctagctatgcaaaccgactggggagatggtgcaccagaattttcagccgcagaagatcccgtcagcgatcccggtgatgattctctggagcagtcagccgagcggtatggggacgaggcgttcgagttcagccagcatgtcgagaaggtctacagaaaagggatctag

SEQ ID NO: 93668 - DNA, 324 bp, Oryza sativa
  Clone ID: PAT_MRT4530_9202C.1
atgcaagcgtctccctattgttcgactgtgacaatctttgcgttagactacaacaaatatacgcgtcgtcgattagttggagaggtatatgcgtcgttgacactgtccctgtcttccaattcctggctccaaccttggcaacggcagcacaaggcccctgcagtgacaatgttacattcatcaaatggtaacatgatggttctttgtgcgttgccctgctttgttctcagtttcacagatagcttcagggataaggaagggaatgcgcgctataggtttgtcgcattcaagggattgtggggtcatcgacaatcaagcacctct

SEQ ID NO: 93669 - DNA, 438 bp, Oryza sativa
  unsure (1)..(438): unsure at all n locations
  Clone ID: PAT_MRT4530_92030C.1
ctagcctttatccattgttgccgcgtccggaagagataggaggatggtgttcaccgccgggacacggccttgatgcttctcctcgccggcgacgagctcgcctccagggccagcgccggcgagcacgcatggcagaaacggcggcggcagcaagagggacatcactaggattgcaggaggatcgtgcccacctccagggttcgcaggaactccaccagacagaaaccgaggagaccttattgccggtggcttcctacgagtctcccggccgccggccactagctcgccggagttgccgcctgagctgccggcggcgaacaccctgggcagaaacggcaacggaagcaagaggaacatcactaggattgcttgcaactcgacgcgaatccgagaagctcctcccatatattctttgagatgttttggctcccaatnctg

SEQ ID NO: 93670 - DNA, 204 bp, Oryza sativa
  Clone ID: PAT_MRT4530_92031C.1
atggcggcgagcgacgacggggagagcagcgcgaccgtgccgtcgagggacgccgtcgcgaggaggcgcccgcatggggagaacctcacgcacgagacggcgcggctgtgcggggtcgccgccctcacctgccggatttacttttttaaacacagtaaaaacagtgcatccaaaactactcccactgtcaataaaataaaataa

SEQ ID NO: 93671 - DNA, 399 bp, Oryza sativa
  Clone ID: PAT_MRT4530_92032C.1
atgtcacatgggctacacactgacgtgggctatgattgtggcgctgggctgcaaaaatccccttcctcttcagcagccgacgcacgcagagatcgatctcgtgagcagcgccagcgcatgaagagcaagaagacatctcccaaagaaaagatcatcgaacgaagaggaactcaagcaggcagaggcaggcgcagagaatcgaagcagcggcagcagcaggccggctcgtcggccagtcgggcggcagcgtcagcagcagcagcatgcatgcgccacgagttaaaaggggaatctcccacacccactactcctcactccctgcctgcctgcagcgtgctgcgctgcatatatggcgagaacgaaaagcgcgtgtactggtccaggctccccaagagctag

SEQ ID NO: 93672 - DNA, 645 bp, Oryza sativa
  Clone ID: PAT_MRT4530_92033C.1
atggctaagcaatccctaagccaacatctagtcatgttacatccccaagctaacaaaggaacaagccctggtgacgtcatcagagagggaaagggtggcgccgacaggcggtccccacaagacataggctcaagggcgctggcccatggtggaccaagtccacgggaccggggaggggaggttcaccacgtggcgcacacgtggcgaccacgcgggcggccggatggacggtggagggggagggggcggcacgcggccggcgcgcacgggcggctcaagccggcccagcggccatggcgcggcggcggcacggcaccggcggcgaccggcggacggcggtggcgtggtggcggttatgcagcggcgctaccaggagaaaagagagggaaaaaaggagggggcggcctcaccgaaggggtccgaccggcgtggagggagacgacggcgaacggcgacgaggaacgatggagggaggtcgacgagcggcggacagggcggcggccatggccgaactcaccggcggacggggcggatggggttccggcgacggacagcgtcgatcgagcggtggctagggtgctccacacgatggcgaatgtagtggcgtcggcggcgaggctcgacgcggcggctagcgacagctag

SEQ ID NO: 93673 - DNA, 192 bp, Oryza sativa
  Clone ID: PAT_MRT4530_92034C.1
atgagaatgaaggaacccaaatccagccactcaaaggaagttaaaagttcaaccaatggcgaaagaactgttgtcttcttgggtcaacgggcaaggttggggaagaggaaacctgcaaaagagggcttgaggaatctggcttgggagggctatcaaccaccgaatcgtgaggagatgggtggtggaggttga

SEQ ID NO: 93674 - DNA, 261 bp, Oryza sativa
  Clone ID: PAT_MRT4530_92035C.1
atgacgaacagcaggaaagcttctcccctcgtccgcgtagatctcgccgacgtcaacagcggcggcgcgaccgtcttcctcgtcgacgtggctcttgtagcggccgaacttgaccgtcgtaacgcaaacacccgtggcggagctcctgcacggccaccgatgcactgcgcgaacccgtccgtcctggatggtcacctcgttctcgatggaggagaacgtgacgccggtggcctcggcgatgatttaatgattaaggattga

SEQ ID NO: 93675 - DNA, 467 bp, Oryza sativa
  Clone ID: PAT_MRT4530_92036C.1
gcaactccatctccaaggttctctggatggccaccctccaccccacctcgctgcccaactggaacaggatgcggatctcggtgaacattatcacgcagaaccgcgccaagtcgctgcggcggctgcttgcgtcgctgcggaacgcatgctacgtcggcgatgaggtgccgatcagctttagcatggacagctacatcgacgcggcgacgctgaacgccgtcaactccttcgactggccgcacggcggcaagacgctgcaacggaggatcatccagggcgggctgatccgcgtgcagagggcagcatggtggcccgcgcagattgcgcggctagcatcattatattattctcatatatatatatatatatatatatatatatatatatatatatatatatatatatatatataccagccagtcactagatcagcaaatctttcaacactgtgaagaaacacttgtatt

SEQ ID NO: 93676 - DNA, 2199 bp, Oryza sativa
  Clone ID: PAT_MRT4530_92037C.1
atgtcatcttccgccagcccgtctgtcacgccatcggccgaatacgctgaggtaagttctcattggctagatcccttttcctcgcatgaaatcgatttccccttttctcatcgtgttttcttcttcccgatccctttggatttgctgcacctttccaacctagtcgcgattcccagtctgtcgcatgaaaaccactactttcttggcccaatcggcaatcttgaccccactgatttcatcatcggtgaaaccaacagaattccctttagattagccaaccctaatctgggtcactggaagaatactttcaagtcttggccatctcttgagaaacccacccctgagaagagttggaccacctggtaccagggcgtatcggctagtaagaaagttcactgggatgagattgggatcggccaagcgcttgctctcaccatagccaattctgctaagggcgaacctctgatgactgctgccacctatttctggtccaataccatcaatgcatttatgttcaatcaagggccgatgactccgactttgatcgacatcaccatgatcactggattagatgtaacttcatcggctaaccctatgagtatgaacaccaagaaccaatttgacttcaggaccaaaagcataggagggtggtctggctatgtagcggcatacatgggcaaagggcctgtcactcctcgggagcatgtagctttcttgctaatgtggctagaaaagtttctcttctgtggatccagctgtggtcctacaaccaattggcaatttgtagccgaagccctagaatcaaagagacaatttcctttgggcaaaatccttctcggctatctataccaaatgttgaatagtgcatcagccaagatagctgtcgactctatagttggagcaggtggaccatggtggctactgcaggcttggctaaatctaatggtcatgaaagttgtcaatcggccagctgtaacagaagccgaattcccaaggttggagccaattgtagaagatgatggagaagagcgcacccatcgcagatgcatgtcatatgaagaatatgcatccacaccagccgatgcaggggcaaaactatcggctgagctgctcaaagattggttctgcagcttttatgaaggcttccaaaaagatgcccggatccaatgccgaggagaaatttcttcaactctaatgatggatcgactgcttaatctccaaggacctcctctaggcagtattgaaaatattgagttagcaggattcaagagcaaaaactttgacagatggtggggtgaatggaaactgcatctatttcatcaatcggcatcaatgtacatgacatatctattccctgatgtcgtacccaagacaatcgactcttctcctccacatcagagcaacaacggcagagatattgaatatgctccaggtctgattcccaatggaggcagactgtctctctctgtcatcggctatcatgcccccaaggtctcaaccctcgtccaaggcataatcagggaaccaaccgatgcagccaagaaaagaaaaaccagatcatcggctgtaggcactttgactctagctccaaagaaaaaggccaagtctaagaaatccaagccaaccgatgacatgcctgccttggatccatccattgaacaagctctggatgaaggagatattgaggatgatgttgatcaggctacagccgaaattttagccgatctcttctcttttgacataagagattatcttgatgaggcagaagaagatacttcaagcaaagctttagctcccttatccgatgatgtgaagaaaacacttgaagatatctctcgtcggctggaagcatcatcattagatagtctggtggtaaactgtgggtcaattaggactcggctatatgaaatccaagctctaatcccagacaagctagccgatatccttactccagcagtataccttgagcaacatcagttcaagttagagaaggccaagctaagactagccgaacgtcgggagcacaaggacattgaatccacaatccaagccaatcgacaactttttcatgaagagaaaaccaaacttgatcagttgtctaagggcctgatcaagtccaatattgatcggctcgaagctcgcaagattgagctcttggcacaacttgaagaatgcaacgccgagctagatatggaatag

SEQ ID NO: 93677 - DNA, 1896 bp, Oryza sativa
  Clone ID: PAT_MRT4530_92038C.1
atgtcgtcctccgccagcccgtctgctgcgccatcggctgagtatgccgagcacctttccaacctaattgcgattcccaacctatcgcatgaaaaccactattttctaggtccaaacggcaatcttgaccccactgattttatcatcggtgaaactaacaggatcccctttaggctagccaaccctaacctgggtcactggaaaaataccttcaagtcttggccatctctcgagaaacctacctctgagaaaagctggaccacctggtaccaatgcgtatcggctagtaagaaagttcactgggatgagattgggatcggccaagcgcttgctctcaccataaccaattctgctaaggatgaacctccaatggccgccgccacctatttctggtctaacaccatcaatgccttcttattcaaccaagggccgatgaccccaactttgatcgacatcatcatgatcactggattagacgtaacttcatcggctaactatcactgtggtcccacaaccaattggcaatttgtagccgaagccttagaatcaaagaaacaattccccttgggcaaaatccttctcggctatctataccaaatgttgaacaatgcatcagctaagatagccgtcggctcaatagttggagcaggcggaccatggtggctactacagacttggctaaacctgatagtcatgaaagttgtcaatcggccatctataacagaaaccgaattcccaaggttggagccaattgtagaagatgacggggaagagcgcacccattgcagatgcatgtcatatggagaatatgcatccacaccagccgatgctggggcaaaactatcagctgagctgctcaaagattggttctgcagcttttatgaaggcttccagaaagatgctcaagtttggtttccttatgaagactcagcagaccttgagctcccatcagactttagatttgaagatatcaaccatgaaagatatcaaacgtccagggaagtctttacagctgcaatcagcccatgcatcttacatgtcggcatccatcaaggaagaaatatccaagtctcttacgaattctatcaccctgtgagttcagctcgacaacttggattaggccaacttccaatcggcttattctttgctgacaagattcaatgccgaggagaaatttcttcaactctaatgatggatcgactgcttaatctccaaggacctcctctaggcagtattgacaatattgagttggccggatttaagagcagaaactttgacagatggtggtgcgaatggaagttgcacttgtttcatcaatcggcctcaatgtacatgacagatctattccctgatgttgtacccaagacaatcgactcttctcctccacatcagagcaacagcagcagagatattgaatatgctccagccgatctcttctcttttgacatcagagattatcttgatgaagcagaggaagatacttcaagcaaagctttagctcccttatctgatgatgtgaagaaaacacttgaagatatctctcatcggctggaagcatcatcattagatagtctggtggtaaactgtgggccaattaggactcggctacatgaaatccaagctctaatcccagatgagctagccgatatccttactccaacagtataccttgagcaacatcagttcaagctggagaaggccaagctgagactagccgaacgtcgggagcgcaaggatatcgaagccacaatccaagccaaccggcagcttgtgcatgaagagaagaccaaacttttgatcagctatctaagggttcgatcaagtccaatattgatcggcttgaagctcgcaagattgagctcatggcacaacttgaagaatgcaatgccgagctag

SEQ ID NO: 93678 - DNA, 441 bp, Oryza sativa
  Clone ID: PAT_MRT4530_92039C.1
tctcacttaccttattcacagcggcacatggcggggtgcgcgacagacgacattcttccgtgagcggagcagcacgccgttgtcggtgaattgtcatcacatgcgtaataacatgtttttccatcgattctgccgaggttagcttagatgtatcatagactatatacataattctcttttacaagggataatgcaaaccatatttgaatgaaataaggcttcctcatatctgaattgtaaattgaatggtttggttattagatatcggtgtacagatatttatagcttaggagcttataattcctttttgtaagtaagccaggacgtaaaatttttcttttttaggtaacactcaacaattctataatgtttttatgatgttaagtattttttttcttaatttaaaatgatattttttttaaaataataatataaattttg

SEQ ID NO: 93679 - DNA, 2414 bp, Oryza sativa
  unsure (1)..(2414): unsure at all n locations
  Clone ID: PAT_MRT4530_9203C.1
actcgtccgccccccggggcctgactctctctcccccctccctcaccggcgctcttcccccgcggcagcatcccggccggccgccggcgagcccttctctcgcgagccgcgctcccctggacgaggatgcgttgacagcgcctccccctccgttcttccccacggaagcgtcctcctcctcctactcctactactgggctcgtggactggtggtccccccccctccgaccaccgcctccctccccggcgacgaccatccatggagctccaccgctcttcctcctcctgccgcagtggtaaagttactcaacagtgaggatttctaaagctcaacagaactagatgatacttgcataatgatgccctcagatatttggaaggagcattctgggtcatcaccgtcagaaggaatagcatcggagttggaggcacatgggtacacagctatgtgtagctcatcttctctcaaacatctactctaagtgcacgggtcttctgaaggcagcgctaattactttttggaacctacagaagggctgtgatacatgggcatcttgagccgcttgccaacagggcaaagggccaccaccttgcttgatttgatgattataagagcattccacagcaagatcctacgtcgctttagtcttggtacagcaataggctttcgaatcaagaagggtacattgactgatactcctgccatccttgtttttgttgctcggaaggtgcacaggaagtggctcagccctacacagtgccttccggctcaccttgagggaccggggggagtgtggtgtgatgtcgatgttgttgaattctcttactatggggcaccagcaccaactccaaaggaacaattgtatgacgagcttgttgatggtctgcgtggtagtgatccatctatcggctctggttcacaggtagctagccttgaaacatatggtacattgggtgccattgtgaagagtcgaactggtaataagcaagtaggcttcctgacaaacaggcatgttgcggttgacctggattaccctaaccagaagatgttccatcccttgcccccgaatcttgggcctggtgtatacctaggtgctgttgagcgagcaacatcatttatcacagatgatgtttggtatggtatctatgcgggaacaaatccagagacatttgtcagagctgatggtgcatttataccgtttgctgatgattatgacataactagtgttaatacctcagtcaaaggagttggagtcataggtgatgtaaaggcaatcgatctacaatccccaattagcagtctcatcggaagacaggttgtcaaagttggaagaagctctggtttgacgacagggaccgttgtggcatacgctcttgaatacaatgatgagaagggcatatgcttcttcacagactttcttgttgttggggagaaccaacaaacatttgatcttgaaggggatagtggaagccttataatcttaacaggaaaagatggcgaaaagccacagcccatagggattatatggggtggcacagccaatcgggggaggttgaagctcaaaagtggtcagggtcctgagaactggacaagtggggttgatctcggacggcttctggatctattggagcttgatctaatcactacaagtgaaggactacaagaggccctagaggaacaacgaattattctagctgctgctgcagcagcagctaattcaactgctggggaatcgtcacctgttgctggtcctcaagaaaatgagaaagttgacaagatttacgagcctcttggaatcaacatccaacagcttccaagagacaattcagccacctccacaggacccgatgagttccatgtcgacacggtggaaggcgtcaccaacgtcgaggagcgccaattcctcattggcatgtctccagcacgcgaaggccaagaagccaatggcgacctgaacaaccttgcggagctagagaattcacctgaagacatttgcttctccctgcatctgggcgagagggagcccaagcgactccgctccgattcgtcgctggacatagacttgcagaaatgaaatgaagctgtgtgctgctgttccatcaccacccagctctgtataacctagtgaaggcagttccattctatgaacccaatagaaataaatatgggctaggtatttgtttccggaaactatctagataggtatccggataatttctatcgttttcacaggatacaagccttactgtatttgtttctgtttttaaaaaattttctgaattcgtttctgttttaggtaccatccaaaattatctttccgacactggccgttttgaaaaggtgactggatggttataaactatcgaaaccgatttcatcacgcccaaaaaaanaaaaaaaaaaaaaaaaaaaa

SEQ ID NO: 93680 - DNA, 1431 bp, Oryza sativa
  Clone ID: PAT_MRT4530_92040C.1
atggcgatggaaggagaagagagggagggtgcctgggctttaagggcggcaatgtcggtttggaaccgacttgggcggtcaaggcgcgagctggcgctcggcgctcgcgtccaatcggcgacagggcggagggaggatgacgccggcgggaggaaaaggggaaaaggagggatgggaaggggggctcgcccctttcttctttgggaaaaggaggaggggagtgggggtgtcacggcagagggaggagggctctgcctccgtcccttggcggcttgcacgcggggtggcggggccgaggcgatgacgacggcgatgacggcagggcggcgactcccaggcgatttcattctcgatcaaatctccgcccgcagcaatgtcatcttccgccagctcatctgtcgcgccatcggccgagtatgccgagatctattccctgatgtcgtacccaagacaatcgactcttctcctccacatcagagcaacagcggcagagatattgaatatgctccaggtctgattcctaatggaggcggactgtctcccactgtcattggctatcatgcccccaaggtctcaaccctccttcaaggcgcaatcagggaaccaactgatgcaaccaagaaaagaaaaactagatcatcggctgtgagcactttgattctagctccaaagaaaaaggccaagtctaggaaaatcaagccaaccgacgacctgcctgccttggatccatccattgaacaagctctggatgaagaagatattgaggatgatgttgatcaggctgcagccgaagttttagccgatctcttttcttttgacatcagagattatcttaatgaggcagaggaagatacttcaagcaaagctttagctcccttatccgatgatgtgaagaaaacacttgaagatatctctcatcggctggaagcatcatcattagatagtctggtggtaaactgtgggccaattaggactcgactacatgaaatccaagctctaatcccagatgagctagccgatatccttactccagtagtataccttgagcaacatcagttcaagctggagaaggccaagctaagactagccgaacgtcgggagcgcaaggatatcgaggccacaatccaagccaatcggcagcttgtgcatgaagagaagaccaaacttgatcaactatctaagggtccgatcaaatccaatattgatcggctcgaagctcgcaagattgagctcttggcacaacttgaagaatgcaacaccgagctagatatggaacagaaaaagttagccgatttcccaatgtctatcgaagaacaaaaagccaaactcaaattggctatcaagaatgttacagatttgaccaaatgtttgaaagtcatccctggaaccgatgctcaagatgcccaagctattgaagtagaacaaatataa

SEQ ID NO: 93681 - DNA, 807 bp, Oryza sativa
  Clone ID: PAT_MRT4530_92041C.1
atgggggcggcagcgggctcagatgagcgccagatgcggccggtggtgtatgtcccctccctctttcttgtccgcgcaaggcagtcgttgtggtcagcagtggctgctaccggcgaccggcaaagagggggctccaacgtcgacgaccgccgcttaggggaagaggcgcgaggagtggaggggaaggagatggggaggccggcaagcagggcgaggaggccggcaagcagggcggggatgccggcgaggaggttggcaagcagcgctgctggggaggaggccgccggggcaaggcgctgccacgccgacgctgggtggaggaacaccgagatacagccggcaagcatggagtcgaacgtcgacttgcggtgtcaacagaccggtgcaccggccggcgagtgtacaagtacgagctctctccgcggttggtaccggctgtactcgaggtcgatggacgtgtgcaagctcgtcgtgaacgacgggtttggcccggcgctccccagcggcggcgctctgccggagcgggacgtgtacgacaccgaccagtacatgctggcgctgatctaccacacgcggatgcggcggtatgagtgcctcaccggcgagagaatggcgaggaagaagatccgcgacgcttggagcaagctctctccgccgccgccggacttgtcggacacgcacgacactcgccgccatcggagcagacgtgcgccctcgccttctcccgcgtcgaagctgccgccgccgcctcctctcccgcctcgccccggcggcctcgtccccagcagcgccgcccggcttgcctga

SEQ ID NO: 93682 - DNA, 3825 bp, Oryza sativa
  Clone ID: PAT_MRT4530_92042C.1
atggctgaatatttggttgggccactgctctccaaggtgctggagaaggcttccagctttcttgtagacatgtacaaggtgatggatggcatggaggaccagcgtgagactctggagcgcttgcttccagccatcctcgatgtcatccaagatgcggaggagaagaaaaatcatcgatccggtctagtttgcgcttggctcaaatcactcaagaaggtgtcctacgaggcaattgacgtcttcgacgagttcaagtacgagtcgctctggcgtgaggccaagaagaaagggcaccgcaaccacactatgcttggcatggactctgtaagcctcttcccttctcgtaatcctattgtcttccgatataggatgggcaagaaactgcgaaagatcgtggagaaaatcaaggaacttgtctcggagatgaactccttcggactcgtacaccagcaggaaacacccaagcagtggaggaaaactgattccatcatggttgattttgacaaggatattgttatcagatctagagatgaggagaagaagaagattatcaggatattgcttgataaagctaataacacggacctcactgtccttcctattgttggaatgggtgggctgggcaagactacctttgcgcaactcatttacaatgaccctgaaattgagaagcatttcccgctccgcaggtggtgttgtgtgtcggatgtgtttgatgttgtcactattgcaaacaacatatgtatgagcacagagagagatcgtgaaaaggctttgcaggacctgcagaaagaagtaggtggaaagaagtatctcattgtgttggatgacgtatgggaacgggattatgataagtggggaaagctaaagacctgccttaagaagggtggtatgggtagtgcagtactaacaacaactcgagatgcagaagttgctagaattatggtcacgggtgaagttgaagtgcataatcttgaaaatctaggagaaatttacatgaaggaaataatcctgaggagagcattaactctgccaaacaatgatgaacattttggaattctttgtaagattgtgcacagatgtcatggctcgcctttaggtgcaaaagcctttggttctatgttaagtaccaggactactatgcaagaatggaatgatgtattaactaaaagcaacatttgcaatgaaggggaggataaaatttttcctatacttcggctgagctatgatgatctgccatcacacatgaagcagtgctttgctttctgtgctatattcccaaaagattatgagattgatgtggagacattgatccaattatggttggcacatgacttcataccactgcaggaggaagaccatctggaaacagtagcccagaatattttcaaggaactagtttggaggtcattttttcaagatgtgaataaaatttctcagcgggaggagaatgtgtataggagtcagctccgtgacagaacaacgtgcaagatacatgatcttatgcatgacatttctcaatctgttatggggaaagaatgtctcagtataattggttcgtctaatttgaaaaatctgatgcgagaacatcctttatatcacgttctcataccatacaccagcattgctcttccagatgactttatgggaaatgaagctccagctctccgaactttattgtttcgagggtattatggtaatgtctcaacatcacatttatttaagtacaattctctacagctaagagcattagagctcccaagaagggaagaattaccaatcaggccaagacacctacaacatctaagatatctaaatctctcagacaacagtaatatccatgaacttcctgcagacataagcacaatgtacaatctacagacattaaacctttctgattgctataatcttgttagactcccaaaagatatgaagtatatgacaagcctacgacacctttatacaaatggatgctcaaaattgaagtgcatgcctccagaccttggacagttaacttccttacagacattaacatattttattgtgggtgctagcgctagttgcagtacccttagggaagtgcatagcttaaacctttctggcgaactagagttacgtggcctagaaaatgtatctcaagaacaagcaaaagcagccaatcttggaaggaaagagaaacttacacacttatctcttgaatggagtggcgaataccatgctgaagaaccagattaccctgagaaggttcttgatgctcttaaacctcatcatggtctccatatgcttaaggtagtttcctataaaggcactaattttccaacatggatgacagatcttagtgttcttgagaacttgacggagctccatctagagggctgtacaatgtgtgaagaatttcctcaattcatacatttcaagtttcttcaagttctctatttgataaaactagataaattgcaaagcttatgctgcgaggaagcaagagatggaaaagtacaaatatttccagcattaaaggaagtcaagttaattgatttggaaaggtttgagagttgggtggaaactgaaggaaaacaagaaaacaaaccaacatttcctctgcttgaggaggttgaaatcagtaactgtccaaagttgtctagtctacccgaagcaccaaagctgaaggttttaaagctaaatgaaaacaaggcagagctgtcattgccattgcttaaatccagatacatgtcccaattgtccaagttaaaattggacgtgcttgacaaagaagctatattgcagcttgatcaaattcacgaatcatctctctcaaatatggagttaaggcactgcaactttttcttctccacaatcccatcagaaccaataattgggatttggaaatggtttcgacaacttgtgtatttggaaatcaagtccagtgatgtgctcatctactggccggaggaagagttcctatgcttggtgtccttgaagatgttggccatttttggttgtgttaatctaataggccgtaccacgctggtgaaaggtgagccaactcgttgtgcaacagatcagttcctgccatgtctaacgtcattatcaatttgctgttgtgataacttgagagagctattcgttctacccccatctgtcacccacattcatgtttctggatgtcgcaattttgagttcatatggggtaagggggatatagagtcggagaatgtacatgtagaacaccatgacacatttacatcatcggagcactgcaatgaccttgagtacagaagtgtaccagagcaatcatcatcagcagtgaatcatcctctgccatgcctagaaatgatacatatctctttcaatgataaaatggtagaacttcagaacctaccaccgtccctcacgtcactagaatttcattcttgtccgaagcttcagtctctatcagggcagctgcatgccctgaagtttttggatattaggtgctgcaataaactggagtcactgaattgtttgggagacctgccatcattagaaagactttgtcttgtgagctgcaaacgtctagcatccttagcatgtggtccagagagctactcatctctttcaactattgctattcgatattgcccagccatgaatatgaagccgctatatgaacgccttaggccacggttggatattcttaaggaaagagatttgtcacatgcccatgcaaaatgtccttatggaggtgttattcatttttccttgggtacagagcataaacgcccgacattatgggatccaaaatcttggaaatatgctattcctggctgtcggtggctccaagtataa

SEQ ID NO: 93683 - DNA, 977 bp, Oryza sativa
  Clone ID: PAT_MRT4530_92043C.1
cgtggctgctgagtcagcgtgggacccacgtggaccccacatgtcagcttgggccacgtcagcctcctctatctttcccctattctctcccttccgcatctgtctcactcttcccttctcttcttaggtaagcagcgttgctggcactgccggggaggagaccgccggggcgaggttggtgtacgccgacgctgggtggaggaacaccgggatgtagccggcgagcatggagtcgaacgtcgacttgcgggtataggagtcgccacgcggctggatgcagaacacgcggaattgaggagctccatgatccgccccggcgagtttccgaagtgggtgcaggacggcgacgcgtgcactgctcgatgatctgggcgcgcacggtcttggtgctcccggggcgcggcgcgccggcgaacgcccagagccaccggcggtcgcgccgccgcatgcggtccccagccggcgggtgtacatgtacgagctccctccgcggttcaacgccgagatcgtccgcgactgccggctgtactcgaggtcgatggacgtgtgcaagctcgtcatgaacgacgggttcggccccgcggcgctccccagcggtggcgcgctgccggagcgggacgtgtacgacaccgaccagtacatgctggcgctgatcggcgagagcatggcgaggaagaagacccgcgacgcccggagcaagctcgctccaccgccgccggacttgtcggacacgacgctcgccgccatcggagcggacgtgcgccctcgccttctcccgcatcgcagccgccgctgccgcttcctcccccacctcgccccgggggcctcctccccagcagcgccgcccggcttgcctgagaagagaagggaagagtgagagagaaatgagaaagggagagaatacgggagaaagagaggagggattttgtatctcgatgacaagttgagggaccttgggtgtacttttccccgcgcaa

SEQ ID NO: 93684 - DNA, 975 bp, Oryza sativa
  Clone ID: PAT_MRT4530_92044C.1
atgcgcgtcgaacgagtcgcggatttgccagttgccatgcaccaaccaaccctgctgcctgttggctcgtcgtcgatcgctacggctgatacatacgagatgaacatgcaggtggggtacagggcaagccgggcggcgctgctggggacgaggccgccggggcgaggcgggagaggaggcggcggcggcagcttcgacgcgggagaaggcgagggcgcacgtctgctccgatggcggcgagtgtcgtgcgtgtccgacaagtccggcggcggcggagagagcttgctccaagcgtcgcggatcttcttcctcgccattctctcgccgatcagcgccagcatgtactggtcggtgtcgtacacgtcccgctccggcagagcgccgccgctggggagcgccgggccaaacccgtcgttcacgacgagcttgcacacgtccatcgacctcgagtacagccggtaccaaccgcggagagagctcgtacttgtacactcgccggccggaccgcacatgcggcggcgcgaccgccggtggctctgggcgttcgccggcgcgccgcgcaccgggagcaccaagaccgtgcgcgcccagatcatcgagcagtgcaccgcgtcgccgtcctgcacccttcggaagctcgccctcggggcactacaactcgccgaggcggatcatggagctcctcgagtccgcgtgttctgcatccagccacgcggcgagcgactcctacacccgcaagtcgacgttcgactccatgcttgccggctgtatctcggtgttcctccacccagcgtcggcgtggcagcgccttgccccggcggcctcctccccagcagcgctgcttgcctgagaagagaagggaagggtgagagagagatgaggaagggagagaataggggaaagagagaggaggctgatgtgggccaagctgacatatgcaactcatgtgggtcccacgctgactcagcagccacg

SEQ ID NO: 93685 - DNA, 786 bp, Oryza sativa
  Clone ID: PAT_MRT4530_92045C.1
atgtacgagctccctccgcggttcaacgccgagatcgtccgcgactgccggctgtactcgaggtcgatggacgtgtgcaagctcgtcatgaacgacgggttcggccccgcggcgctccccagcggtggcgcgctgccggagcgggacgtgtacgacaccgaccagtacatgctggcgctgatctaccacgcgcggatgcggcggtatgagtgcctcaccggcgagagcatggcgaggaagaagacccgcgacgcccggagcaagctcgctccaccgccgccggacttgtcggacacgacgctcgccgccatcggagcggacgtgcgccctcgccttctcccgcatcgcagccgccgctgccgcttcctcccccacctcgccccgggggcctcctccccagcagcgccgcccggcttgcctgagaagagaagggaagaaaggaaggaatgcaaatgtgccttgcttggtgaggaaggtatagaaatcaatgttggggtagaggtagtcatcgatggagtactcaacgagggtgtggacgtccttgccatacctgaagagggcagggagaaagaaggcgacaacgagggtggtgactggggaagtggggagcgacatgctacggcaaggaaggagcagctagaggaggaagggagtgttggtcgtggattggctgggagggaggccctaaatgataacatgaggaggagtatcatttatcacctattgactgcaaacctcatgttagttaacttaataatttcatcaatatggctggtaggtagctaa

SEQ ID NO: 93686 - DNA, 424 bp, Oryza sativa
  Clone ID: PAT_MRT4530_92046C.1
tttactcgtgggcttctctgaaactttcaatcttgtggctagacagcaactactctatcatgcgcctctcaatcacaagcctcgtcgccgtcctcccggcagttattcttgctgtccccgctccaggggtttccaaccagcacgccgcacctctcattcgagcacgctcgccggggaaagccattcccggaaagtacattgccaaattcaaggaaagcgccacggatgctgctctcaacaaagctctaggtagccacaaagcaggtcatgtctaccgagcgaaggggctcaagggattttcgggtgctttggatgccgactctctcgaagcgatacgccaactcccagaggttgaatttgtagaagaagacgccctattcacagcctacccgatcgttacccagactggcgccccgtggcacct

SEQ ID NO: 93687 - DNA, 1029 bp, Oryza sativa
  Clone ID: PAT_MRT4530_92047C.1
atggccgcgccggcgccgccggcgccgccacctcggccgccgttcaaggtgcgcatccgcatcaaacccgcccgcgccgcgagggcggaggaggacgccggcaaacaggaggagcggcttccgatggatcacccgctctccaccaccaccaccaccaagcgccgccccgagggcgaggagagctccggcgcggcgagccagccggcgccggagcgcgtgaatcccaccgggacaaccacgccggcggcgcgggcggcggcgtcgtgctgcgtgaatgaagaggccctggccagcagctcccacgccggcggccgcgacgacggcgcgagcgcgatcaagaaatgcaaggacggcgaggggaggcaagaggacgccaagaacgcgcaagaaagctcggggatgacaagcccggccgtgcattccgccagggccacctcaccggcgccgccgccgtcgcgcacgaagaaagagaccccggtccgcgcccatgccgccgtccgcgacgacgacgcgacgccgccacgcgcgatcaagagctgcaagaacggcgagcgggggcaagagaaggacgccgagagcgcgcaaggatgcgcgaggacgagaagcccgccggtgcgttccgccagggccaccacaccggcggcttcgccgtcgcgctcgaagaaagagaccccggtccgcgcccacgccgccgtccgcggcgacgacgcgacgccgccacgcgcgatcaagaagtgcaagagcgacgagcggaggcaagagaaggacggcgagagcgcgggacaatgcgcgacgacgagcagcccgcgcgtacagccctcaccgacgccgtcgccggcgccggcggcgcggccggatcccagtgcggcggagaactcgctgcgcgaggccattgagagggcccgcccacacatgcggagggacatcgcgcggcagagggaggcggcgcgacgggagatcgccagcatggtcaggaccgtcgagttcaacgacccgttcatctcaccggaggacgtgaacaagccatga

SEQ ID NO: 93688 - DNA, 1050 bp, Oryza sativa
  Clone ID: PAT_MRT4530_92048C.1
atggagtctgatgagacagaagtcgattctatggacgttgaggaattccggaagcaaatgtcgcagcaatcgatggcgaaagccttcaccagtggaacaacactgcatgaccccatcgtcgctaccaaacccttcagcacctatgagccgccggtttctgcatctgctggtgaagaaacccacaccgtgggcagcgaggagttcgggctccgccgcatcgacatgtcgcgcttcttcccccgagaaagccaaccggcgggggcgacggatcagccgccgcagatcgccgcgcctggcgccggtggcggcagcgatggtggacgcgcagctacctcgcccggcgaggccatctatagaccccagggccacggctggggcagtgcggcgcccacgccgtcgcctcctcccccacatgcgcgcgaccaagcggtgccccatcgccttcacgtcggcgacggcgtctacgtcatggaggcggcggcgccggagccggcgcgatgcgcggggcggagcactgcttcgaggcgctcgtccacggcctcccgcggcgccgccgcggggtggcgccaccatcatcgaggactggcactggcgtccctcacggcgccgccctacgttctcgaccccgacggcgacgacgggccgcccgcgtcgccgcccacgcggtggtccgcgactcccaaatctgggtgccacggagcggcacgggacgttcaccttcgacacggcgagcggcgcgtgtccaaggccggcgactgggcgctcccgttccgcggccgcgccgagcacgcccggagcacagcctctggttcggcttctcccctcaccacgacggccactctgcgcctccgacctcaccgccacgcccccgtcgctgcgccacacatgagttttctaaaattgcatgttgataacggaattgattattgctcactccagtttaaagatgtcataactgttcatggcttccttgagtttggtttgaaaaatgccaattttgttataccttatgatcttcagtcatctacatgcatgctcatgccatgctaa

SEQ ID NO: 93689 - DNA, 513 bp, Oryza sativa
  Clone ID: PAT_MRT4530_92049C.1
atgtggctgctgcccaaggaggaggtggactggatcctcgctcagtgcaacgagcccatctgcgccaggttccgggagctgaagcgcgccaacccgtcgctggtgccgtcgccggaggagaaggacgagtacaccatgcttctctacgagtgcacccgcgaatcctacgaggacgaggctaagtacgccaagttccaggactgggttcggggcgagtacgctcgcaaaggatttgtggaggtggactatgactatttcgccaagagggaggaggccatttggctgaacgaggaagcacgggaggaggttttggggcactggtcagatcgtcatcatccttcccacaccgaccttgacgatgaagattggaagcttaagatgtggcgtctgcccaaggaggaggtggactggatcctctctcagttcaacgagcctgtctgcgcctggttccgggagctgaagcgcgccaacccgtccactagtacagatccttccatctgtgacggcccctaa

SEQ ID NO: 93690 - DNA, 1167 bp, Oryza sativa
  Clone ID: PAT_MRT4530_9204C.1
atgctggcggtggtcggggcggcgctgctggtggtgctgtacgcgaggctggtgagccgggtgttcagggcggcgaggcggcggtggcggaggaggaggaggcggcggctgctcatgatcccgggctcccccgccgacgactcgttcgcgacgttcaccacctacgacaactactaccacaccttctcgccgtacggcctcgacgacgccgccatcaagtcgctgccgtcggcgcagtacctcaagtcgtcggcgatggcggcgcgcggcgggggcgggggaggcggagccgacaccgccgcgcgcgactgcgccgtgtgcctgctcgagttcgccgacggcgacgagctccgcgcgctgccgctctgcgcgcacgcgttccacgcggactgcatcgacgtctggctccgcgcgcacgcctcgtgcccgctctgccgcgccgccgtcgcgctcccgcccccggtcgcctccccgctccgcgccgcccgccgcgtgcgccccagcctcgacgacctcctcttcttccaccccgtcccgcaaccaccccacgccgccgccgaccccctccgccgcgccggcggagatcaccccggcaagcccggaccacagccaccctccatcctcgccgcggcgaggcgcgccagcgccgccgctgccgcgtccagccggctccggtgcggcgaccccgaggccctcctctcgccggaccggctcagccgcgccaccctacaagtcaccgccccaccgcgagaggagggcgggcatggccttgccctgctcctatggctcccactgcgccgccctgcccttccccgccgtggtctccagggcggcctcctcgccgccaccgcgctcccgggggagaaggcccagcctaccacccgccggatgcttccacgccgcgccaagggacgccgctctggtgtccggctccgctgctggtggcgtgagcaggaggagtccattgtgacaaggaggaaagggttggtaggcacggatgaagatcactccgacaccttaatcgcgctgcagcatccaccagtttatacgctaggcactgacagcaccgaggactacctccatttcgatgttaaagatgctccttttgaggttcaccgtattgaccgtggtggggaggtgacatatcatggtcctggacaggcctag

SEQ ID NO: 93691 - DNA, 179 bp, Oryza sativa
  Clone ID: PAT_MRT4530_92050C.1
cgtctctcgcgctgtgatattttctgtgttaattgtaattgtaccacgtatagtagtaccacgcgagagaaaaataaagtcactgcatcactcgtgtgtgacccagttgaaacatcggggtgatacccaatctgaataaaaatgtcaatgccaatttataaaaaaaaaaaaaaaaaaaa

SEQ ID NO: 93692 - DNA, 600 bp, Oryza sativa
  Clone ID: PAT_MRT4530_92051C.1
gcgacgagccggcgatcggcatcccgtaccatccggcggcggcgggggcccagggcggttactactacgcgccggacccctacgcggcggggatgcccccgccgaacgcgatctacgccggcgcgcccaagggggtgcccctgcagcagaccatgttccgcgacacccccgcgccattccactgccaggcctgcggcgccgcggccgtctcctccctccggtcgaagccaagtctagcatcagttgtggcttgcatgatgcccttcatgatgggcgtctgcttcctttgtccttccatggactgcctctggcacaaataccactactgccccagctgtggggaaaaggtggctgagttcaagaagtcggatccgtgcctcgttgtggatccaactcgctggtctgaaccgagcttcgctgtgcctgcgtaagaacataccctcttgatatccaaaccgtttccatggatgagaactatgcattgttcttgagtgatctgctctgtacatagagaaggcaactaccttgttgtataccatatatatgtatctaaaccgctgtattttcgctaaagtaatgaactgtttattcatgtttgtc

SEQ ID NO: 93693 - DNA, 294 bp, Oryza sativa
  Clone ID: PAT_MRT4530_92052C.1
atggtggaggaggtagaggggaggggggagggggctcgtgagcttgcgggagatatggcgacgtgggggaagtggtcggcggtgtcggcccgagcggctagagctagatcggggcaagtggaccagatcagggcaatgaggagcagtagtagcagcaaccccagtggcagcggtggctcctcgtctcgtcatcccaacgagccccaacgccgaccctttaccactgccaccgccgacgacccctccaccactgctgtagatgtcgccctaccaccgccggccttgctaagctag

SEQ ID NO: 93694 - DNA, 600 bp, Oryza sativa
  Clone ID: PAT_MRT4530_92053C.1
atggcggccaaggcggcgttccccgcgccggccggcgacgagccggcgatcggcatcccgtaccatccggcggcggcgggggcccagggcggttactactacgcgccggacccctacgcggcggggatgcccccgccgaacgcgatctacgccggcgcgcccaagggggtgcccctgcagcagaccatgttccgcgacacccccgcgccattccactgccaggcctgcggcgccgcggccgtctcctccctccggtccgaagatacaatttttttcccagtccatgggaggtcgaagccaagtctagcatcagttgtggcttgcatgatgcccttcatgatgggcgtctgcttcctttgtccttccatggactgcctctggcacaaataccactactgccccagctgtggggaaaaggtggctgagttcaagaagtcggatccgtgcctcgttgtggatccaactcgctggtctgaaccgagcttcgctgtgcctgctttgtacttccgaaggaaaagagtcaagttctttggggggaggtctaacgcgcgagttgctaaacgcgataagagcgagtcaacgtgcgcccacacagcctag

SEQ ID NO: 93695 - DNA, 354 bp, Oryza sativa
  Clone ID: PAT_MRT4530_92054C.1
atgcaggtgcaggcatcacgcgcggtgcggcgcgacgcggccgacgtccgccagccgctcacggcccacaagttttttcacagccgcagcgcagcgggatccatccaccgagggctagtggcgcacgagacgcgcacatcgctgtaccgcctgggcggtgtcacgctcacgcgcgcccacgcccacgccggcttcacgatgtgtgggggcgcaaccggcgcttgctcaaaatgccctcgtgttgaaatgcgttatgctttatctggagcttttgtctctggaccgtacagatcttaccgacgatttgcaacactggaatcccgccttaatctccacacaatccacgcgcgatag

SEQ ID NO: 93696 - DNA, 718 bp, Oryza sativa
  unsure (1)..(718): unsure at all n locations
  Clone ID: PAT_MRT4530_92055C.1
ccggccgggacggctttccccatagcgtctgcttcctctttcttcatctcgttctttcttgttttaaactactatattatatacagtgcctatattatatatatatactgcttaccccttctctccattctgtaacttctgcaggcgctatgtttactgtgaacacgtcgcacatcctgcttttgaatgtagccacggaacgctgcatgcttccaccgccctattatctatgggagtttgactccggcgataggttgttggctggaattgagcttgtcttcccagcatatgcagccccagcttagttagacaccgtttttttctggtctgtagcctgtgaccctctccagagcgtgcacgagcctgcagccatggaggctgtcaggtacctacagcggtgatatggttttcttgtgcgcgactataatttccaatctatgttagcatatagaacgatagcaaagtgtgctgttgagactgcgttgttggcttgtgggtgtatcacgcgatatagatcgtgctgctcacacacgcctccacgttgtgatgatatcattcagtcgtgtgcttcgctgtggtttaatctttatattgaggatggtgatcactctgctcatgtgtagagcacccctgatgtatgcnacnntcggagatgttgtgttttctggatgctactctttgntttatatgctgtnatttaattgaggtggttgtacct

SEQ ID NO: 93697 - DNA, 2293 bp, Oryza sativa
  Clone ID: PAT_MRT4530_92056C.1
ctttactctttcacctctgcgtttcctctttattttatttgtttcttttttataaaatatttttagttgttttgtatttttttggattttaataagaagcttgccgactgtaaagtaattccaatgggggtatatgttaattctttacaagaagatctagatgtgtggccgcatcgctgctatttattgttcagtctcgctcagggaaagccttctccaagaaacttgcaatatctatttactgttcaatcttgctcggggaaaaccttctccaagaaacttataaatcgtctcgaatacaaatttggatcaacagctgatatcgaaagagggtcgaattttagtgatttgacagcatgctcaactcttttggacacattatactcttgtagtatgtcgatgataccaaggtataggacaacatcatactcttcaatggtgtccctgttttctacttctacgttcacgtcctcttgcactttccgagctcgagctggcatattcacccctagctgaacacggaaccttccagtgcctggcaaaacaagatcaacttcttcataaccaccttctgctgccctaaccatgcttcctcttatgtgcgaaccacgtactgctggacctggctcatcagcagcaactagtagaaatccctttgaagaaattgtctcctcatgatgcagtgcaacactacgatgaattcgcagttcagtacaaaacatatttcccatgacaacaaaacggacctttcttccaggtttcagagtaatcctgtgcacgccaaagaattttgtaatgagcgtattatcataagctttgacatgattgtaatactttggaagcatcttcaatagtatcttcagctcagttttcctcaatgtttttataacaaaacgttcatcttgagaaagatagaaaatgctgccacttttcccaggtgaagaaagctcctttagactatcaccaccacatatagacatcatgtaatctgcagcatcgatatgaaacatttctcgaagattcctgatgccaagttgcaagttaagcattagataatagctcctatggcccttgtaaatagtctccattggtcctttagcttgtttctcccagttattttcttgtgctataccgctctccgacattcttgaatcttcgttttttggttgttccatgataagcactccttgtacgtattcccgttcataaaccgaatctttatcaacttcactgtcttgtagacactgatcatcagctgaaaatgatttacttgatacatcttggcatagatggcttccagaattatcatcgaaaactggtgtggtaccatttgaaatacgtctgggccgatgaagaaacctacgcaacctccaattcttgcacagtttttgcaatagaaataacagtccaatagtgatcttttcattactagaacttgaagcacttgtaccatcatgacttgttagacagtcagaaacttcaaggttacaaggaattttgcttccaggttgataaaatgtaccatggccatcctttagtcctctatcccatgtaccaatgtagcaagccccagatgcatatttgcagtaacctttgccatgagccaggccattgagccaattacagtcaagagtatcaccatttatccactgcattaccccgctgccattcattttgcctgatttccatcttccaatgtatacgttgccatcagcccatgtgtatttaccaaattcatcaggtaaaccttcattccagaaaccttcataagtgtcggagttagagtaaaccattgtccccataccatgcttcttgttcatcctccaagaacctttgtaaactgagccatcaactcccttgaaagtgcctgctccatcaatgaaacctccacggaagtcaccttcataggatgcaccagaaggccactgaattagtcctctcccggtcattttactcttgtcccactcaccatcataaagagctccatctgtccacatatactttcccggtccatgagggactaacccatcgaagctccccacgtagatgtccccatttggaagggtattaccccagaatagctcagaagccacaagatgcattccagaagatctcagctgcagcagtagcacaacgaggaaggagaccacgtggagccccggcatcagctgcagcagtagcacaacgaggaaggagaccacgtggagccccggcatccgatccgcctccgccgcccccgagccgagctgagctaagctaagctagcaaatgggatcacggctcaagcagcagc

SEQ ID NO: 93698 - DNA, 347 bp, Oryza sativa
  Clone ID: PAT_MRT4530_92057C.1
gggggatacccgtagaccggatatagagtgtataggggtgcgctgataccgacgagatcgtagtcgagttgattcgactagatcacccagcgacttggctcctgtagacttcggcttcgtaggttgtggtagatgtgttggcggtaagattcgatgcctagatcctcccgggggtccctttaatatcacaggtcaattggtttccaagtaggactcggagacatcggactcggtacgatacaatgacgaccgagttctatccgagtaggactctttctatctgtggactccataatggacttccttaacttatgccgaaaacgtccgtatacgcgcaagcataccat

SEQ ID NO: 93699 - DNA, 263 bp, Oryza sativa
  Clone ID: PAT_MRT4530_92058C.1
gccgggtcgtcgtcgtcgccacgaacgccggccatgctcgatcccggtggcaacacaacattcatcaatcatcatacgatcgaccatccgggccggcggcccaccgaaaggatccagtcgcgtcgccggggtccaaagaaatccggccatttggcaaacacaaatcaaagtctaaattaagggaacttgaccagcaggtcatcctgtggatggcaattcaacatgtcacactaaccctggacgagacccacgatatctcttga

SEQ ID NO: 93700 - DNA, 2603 bp, Oryza sativa
  Clone ID: PAT_MRT4530_92059C.1
atgctcagaaatgcaggagatggtgtgggcattacaacctttggaaagagggaacaggatcccagtgatatcatggatgaggcaaatgttgcatcttcattccatttgatgtcaaagactgtacaaggttttgctgatgacaagtatcccgcttacaaagataggcataaacttgccacagaacgggagaaggtaataaaagagaaagccgagaaagctagggtacaaagatatggcggtgtcaacagttcaggtattgtgccatctccaagatctgcactccctccaaaacttgctcaaataaaggaaaaggctcctacagctaatgctgaatccagtgaccaacctagtgataaccagaacaaccctctagttgtgacacaactgaaacttgcaaatattgagaagagagctccaagagttcctaggccacctcctgcaccatcagccactgccaacactgcaagtgcgttgtctccaccgccgccacgcccgccaggtgcacctcctccaccaccgcctcctggcaaacctggtggcccgccaccgccgccaccaccccctggttccctacctaggaatcttgctggtggtgacaaggtacaccgtgctccagaggttcggtagaggtttattctgatgaagccggtgaagccagggtacaaagagaaggagggatcaacaatcaaggtattgtgccttctccaagatctgcactccctccaaaacttgctcaaataaaggattgatgtgagaagcaacatgatggagagattgaccaagaataggaatctcttagcaaccctctagttgtgacacaactgaaacttgcgaatattgagaagagagctccaagagttcctaggccacctccttgtcaaagcggatgtggagacacaaggagactttgtcgagtctctagcaaatgaggtccgagcagcaagttttgtaaatatcgacgatgttgttgcatttgtaaattggcttgatgaggaactatccttcttggtcgatgagcgggcagtactaaacactttgattggccagagagcaaaactgatgcactaagagaggcagcctttgagtatcaagacctgctaaaattagaacataaggtttcgtcgtttaactgatgatccaaaagcttgcatgtgaagaagctctcaagaagatgtattccttgcttgaaaaagtggagcagagtgtttatgcgctacttcgtactagagacatggccatatcacgctacagggagtacggactaccggtggattggctgtctgattccggggtagttggcaagatcaaattggcatctgttcagctggcgaagaagtatatgaagagggttgccacagagcttgataccttgcaaggcaccgagaaagagcccaacagagagttcttgcttcttcagggtgtgagatttgctttccgagttcatcagtttgccggagggttcgatgaggaaagcatgaaggcatttgaagagctaagaagcaagatgtctacacagacatctgctccacaaaattccgatgtatagctctaaccatgatgcatttcacacttcttcactggtttctttgttgaaaggcaagattaattgagtagctaaaagtagtagaaaaagagaagtataaatcccaatataatattgctgtctccatcaagatgtatatggcaggaaagaatgataagtgtacagatgataaatacatgtattactagattagtgtgtgtatttatttgtatttaaaggcagcaagcgcattttaaaagcaaaaaaaaaaaaaaaaaaacggcgacgcgtcgggcttgtcgacttcgcgtgcctgaagccgctgcgcattccggtggccgggctgctcgagcacatcaagctcatcggctgcttcgacgacggcagcgtggagttcatgaccgtcgctacacgtggcatgggtaatgatgttctatcagctgggctgacgaagtatgaaccctgggaggaacatatggccacaagaagttcagcagagaaaacaatagcaagcaatgcccacagggacttccatgctgaaggagattctagtcctcttttgatgcctgggcggcaaggaccagagcaaagctcctcctcaactgctacttccgcgccggctgctccgccgcgttcgtcaccaacaaatgcgacggcggcacgctgctcttctcccctgccggttgccggtcgttggccgccggacctcctcctctctcgtctctcccagccggcctttgtcggggagctcgacgccgtgacgctcggttggagctctctttccctctctcggcgccgtcgcgcgcggggtggatctcgacgccgtggcgctcggtccttcccggtcagggccaaccgcatggccgtcgcctcgccctggtctgcccccgggctcgacgccgaccccatcctcgtctgcgccgcaccaagtcgccgccgcatcacccatcatcggccaccagacgaggagcaaagtgagggagagagagaggggaagggagagatgacgtggcatcctaatatatggatcaatgtgggttccacgctgactcagccgtcacgttggacaaatctggcgtga

SEQ ID NO: 93701 - DNA, 1825 bp, Oryza sativa
  Clone ID: PAT_MRT4530_9205C.1
ttttttttttttttttttctgttttttttgatgatggtgtcatgtttgatcgtgtcttattacgtggaacggagggagtacatatagccctctagtaaaaagtttttaagagtataatccacacgttatttttcttacatacctacaccttaggagcactgttgtcttcgacaaccatatctaaccgtcattatccccgccaaaatggatgaaatagaccagcgccgcccttgagttttgaacttttgatatggtgtgaagcttcaccgggccaatgcgcggagatagaacgggccatccattttcagagtcagcatcggcctataacccacggtggcgtcgtcatcccacatctcgaatctgaagaagtagagaaggacagccgaaacgatcttcatctgcctgtacgcgaactccttccccaagcagattcgtggccccgcctggaacgccgtgaacttgaaggggctctcggcgacgaacataccactgtcatcgagccaccgctccggcttgaactcctcggcgtcgtcgccccacaggaacttcatcctgcccatggggtacggttggtagttcaccatgtctcctttcttcaccgcgtgcccgtccggcaacgtgtcatccgagaagcagtatttgacatcgaggggaacgccagggtacaaccggagcgtctccgtcaacgctgcgtgtaggtactgcatcttgttgatggcgtcttctgtcagaaatgaagagaaatcctggacgccgacgtcgcggtcgccggtggtggcgtcgcgcacttccctcgcgatcttgtcctgtacgcgctggttcttgcagacggcgtagaggaaccacgacagcgtccccgccgtcgtgtcgcggccggcgatgacgaagttgagtatgatgtccctgatgtacttgttgtcgaagcagccgggatccttctccctctcgagcagaaacctcgacagtatgtcctctttcttggcgaattcgtgttgctctctgctcatctgttcgatcttcctgtcgatgatggagtacacgaagtcgttgatggtgcggatcgactgcttcatggttgcctccgacgagatgttgagaaacctcttgaccttccagagcaggtcgaagaatcggaacagcacctgctcgctcgcgtcgtcgaacgccctggcaaacaccaagccctccttgctggatccggagagcacgccaaggttgaccccgaaaccaaccctgaagaaagagtccagcgtcgcccgcatcagcagatcctgcatgtccaccctctcccgccccttcgccgccggaccacgctccaggatgccggcgagctccgcggcggtgtcgcggaacacggcgctgctgtagtcccgcagcacacgggtggagaactcgaggctggcgaccttgcgctgctgccgccacatgccgccgtccacgttgaagatcccgtcgccgaggaggtcctccagcacgtcgtgggtcatcgggcccttgccgtagttggcgaagttggtcttgaggatgtgctcgacgttggccggctcgacggtgtagacgtagttgcaggtcggggtgagcatgcggaaggtgcggtacttgcgggagagctccgtgtggtactccagcaagcggccgaagttgagcagctggtggaacatggtgccggccacgggcggatacctgcgtttcttccccagcacggcgcggcgcgcgaggtagagcgccacgagtagcagcagcgacaaggcgaccatcgccggatggctcagcggcgactccatggccgtgggcagcttagcagaataggtgtctccccggccgg

SEQ ID NO: 93702 - DNA, 2643 bp, Oryza sativa
  Clone ID: PAT_MRT4530_92060C.1
atgcttgtcaggttaggcgtcgttgttgtaggctccgtcgcagctttagctctaaagggagccagtacttggaacactctccgccaagcaaggaaagtaaaggaaaaaagccgctattctcaacatggggagagagaagaaaacaacgaaggcggcaatacatccaacggcagcatcaattcggcactttcagatcatgacgagatgctctacgagctcgacagcctactatcagcggcgtgagaaatctttctaccaagagtcagtttagacgataaagggcattctccatacagcactgtcagatgcaaacgacagaggctccgagaacgggtgcgtacgatgaaggcaggttaacttcaccgtaacagatcgccgctagagaatcatggaatcacgctagacgaaaaggatgaggtccagctaggacgaccacgctggataatgatggtgaaggtgtggacgctgaaaatgagcatcagcgagcggcaagaggagaggaagaagctgcaggatgacgtcgcccgtgtcaaaggagccaagagggagctagaggctgcgaggaagaagatgaaggagctgcagcgacagatacagatggaggcgaaccagacaaaagggcagctgttgcttctaaagaaccaggtgattgcgctgaagtccaaggaggaggaggcagccatcaaggacgcagaggtgcagaggaagctgaagaagctcaaggagctggaagtggaggtagttgagctgaggaggaagaacaaggagcttttgtatgagaaaagggatctcatcgtaaagctggatgcagcacaaggaaaaataacagagaggatcgccctgacgaagacccctcgcatgaggaattggttgtcccggtgcaccattgagaaggacctgggacgaagaggtggcaaaaaggttgcagatccaattgagccaacggttgccaaagccgaactgtcgaagaacatcaaggagagtgatgtagtttcccatgcaagagaggagatcaacaagctgaggcatgcaaatgaagaccttaccaagcaagtagaaggcctacaaatgaacagattcagtgaagtagaagagttggtttacctgcgttgggttaatgcttgtctgagatatgagctccgcaactaccaggcaccgtctgagaaaatttctgctcgtgaccttaacaagaccctgagcccaaaatcgcgtgagagggccaaacttctaatgctggaatatgcaggatcagaacgaggacagggcgacactgaccttgaaactgcttcttctgcaccttcttcacccagaagcgaagacttcgacaacgtttcagttgacagttcttctagcagatacagcttctttggcaaaaggcccaatctgatgcaaaagctcaagaagtggggaaggggcaaggatgacggaagcagcttagcttcaccgacacagtccttcactagtgactccccaaagagcgccagccagaaaccaaaggggcccctagaggctctcatgctcagaaacgcaggagatggtatgggcattacaacctttggaaagagggaacaagatcccagtgatatcatggatgaggcaaatgttgcatcttcatttcatttgatgtcaaagactgtacaaggttttgctgatgacaagtatcccgcttacaaagataggcataaactcgccacagaacgggagaaggcaataaaagagaaggccgagaaagctagggtacaaagatatggcggtgtcaacagttcaggtattgtgccatctccaagatctgcactccctccaaaacttgctcaaataaaggaaaaggctcctacagctaatgctgaatccagtgaccaacctagtgataaccagaacaaccctctagttgtgacacaactgaaacttgcaaatattgagaagagagctccaagagttcctaggccacctcctgcaccatcagccactgccaacactgcaagtgcgttacctccaccaccgccacgcccgccaggtgcacctcctccaccaccgcctcctggcaaacctggtggcccgccaccgccgccaccacgccctggttccctacctaggaatcttgctggtggtgacaaggtacaccgtgctccagaggttgtagagttctatcaaagtctcatgaagcgtgaagccaagaaggacacaacttctctgggatcaacaacatcaagtgtctctgatgtgagaagcaacatgattggagagattgagaatagatcaacattcctcttagctgtcaaagtggatgtggagacacaaggagactttgttgagtctctagcaaatgaggtccgagcagctagttttgtaaatatcgacgacgttgttgcatttgtaaactggcttgatgaggaactatccttcttggtcgatgagcgggcagtactaaagcactttgattggccagagagcaaaactgatgcactaagagaggcagcctttgagtatcaagacctgctaaaattagaacacaaggtttcgtcgtttactgatgatccaaagcttgcatgtgaagaagctctcaagaagatgtattccttgcttgaaacagacatggccatatcacgctacagggagtatgaataccggtggattgctgtctga

SEQ ID NO: 93703 - DNA, 1274 bp, Oryza sativa
  Clone ID: PAT_MRT4530_92061C.1
ctaacgcgcgacgccgacgaaggggttgacaaggagaagagtgaaggtccgtcgccgccgaatcgctgatcgatccgcgaaggacacgaggttcgtggcgtagagggcggtggtggtggtgacgacgacagcatagtgggtggcgttcgccaaggacaaatccgcgccgggaggattggaggtgtggctttggagccagtggaacccgttagttgcggcggcgtagcagtaatagtataaaaactcagacccgccaccgaaccggcgaagctttttggaccttctgtttggtctatattgtcgaaaggccatatgacgtgtcctctcgtcagtaaaccggagaggctgcaggtcctgattttttccattcgcccggtggtctggtcggtttttacagtcgtgggcgtagattggtcggacctccgcacgtgggcaatagtacccaaagatgtgtgccgcatctgctgtgggggtagggtcgactggtgtcaccaacgtcgggcacccccccgcagcgccggccggaaacgcgggcttggctcgccgtcggggcggtcggcggcgagaggcgagagccagggcggtttgccgattcccgcgccgcagtttctcgaatcccgaattatcccttctcggcttctcccagctccaccaccggatccctctactctccacgggcggagagcgcgccgcgggagagtcccggagacgggatggccggtccggcccgagcgcgctcccgctccccgcaggcccgactccgcttccgagccgcccagccgctgcagcccccggcccgagacgcgccccgctttcgccgccggccgcggcccgccgctgcgtgctggagcggggtcggctggccggcccccgcaaaggcgtcgctccaacagccaattgccccctctagctctccgccggccaggtcatttactatggtggcaacgacaactcgggttgcgagtgtgaggacgttagcatagaagacaatgcctgggccgggcctccttcccaaggcccttgtagaggttagaccctggagcggacgcgcagccccgctgcgctgcggacactaatgcgtcctcttcttctcgtattgaaggtgaggtcttgtagcgactagttcgcaccgcgtccttctcgacctcaatgtgcatgtccaccgtcgccgcccgccgagctcgagcgtgagcgcggagattcacctttatgagcaccatgagctcgacatccaccaccattgcttcatcaagctcgaggtccatagttgccat

SEQ ID NO: 93704 - DNA, 2694 bp, Oryza sativa
  Clone ID: PAT_MRT4530_92062C.1
ccggccggaaaaaaaaatttgtatgatcagcatccactgccgtccaatatcagaaaacaaccagaataacagagagaggggtcgctgtacccgtaggtgttcatgttccacacaatggtcaagcagcacaatttgcagtcctaaaaggacaagcatgaaatatttgcagcaacatttgaaaaaccagttcatcctgcagccatcaacgccccctccctctccatccccatacctgcagcaggcagcagcatatccattttattctcctctcacctgagctgtacttatatgctctgtagtctgtacacattggtgccagcacaacagtaagcactaagccactaacgagccaatcttcagattaaggctaagctagctagctagcctgcaacctctctccaacaacccaatagtgacgagaggtatatattcctgcagagaagcagtgcaaaatttcccaaggctttctctcatcagagaactggttttgatgaagagccggggagaagaaggcgaggctggatcgtcgttgtaccgttttcgacatcgccggctgatggatacaacacccgcgactgattcaggagggcgcgtcccgcccgcggcgtcgcctcgccgcccgccgcgccgcgtcgcccccctcgccccccccgccccctccccccctccccgccccgctcgcccctccgatcgatctgttccctagccaagaagcatcgatcagctgagtgagctggcaagcgagagatactagctaggatgtacgacgtggccggggagcggtggagcggcggctgcggcgggcaccaccgccggctgatgggcgcgtcgtcgtcgtcggctccggcgccggcgggggaggacgacgcagggaaaagcgggtcgagcaaggacgcgatgaagatcatggtgtccgtgctggtggtcgtcatcttctgcacgctgctctactgcgtctactgctggcgatggcgcaagcgcaacgctgtgaggagggcgcagatggagaggcttcggccgatgtcgagctccgacctgccgctcatggacctcgcctccatccacgccgccaccgacagcttctccaaggccaacaagctcggcgagggcggcttcggccccgtctacaggggcgttctccccggcggcggcgcggagatcgcggtgaagcggctgtcggcgaggtcgaggcagggcgcggcggagttcaggaacgaggtggagctcatcgccaagctgcagcaccgcaacctggtccgcctcctcggctggtgcgccgagcgcgacgagaagctcctcgtctacgagttcctccccaacggcagcctcgacgccttcctcttcaacgaggggaagagcgcgcagctggggtgggcgacgaggcacaacatcatcgtggggatcgcgaggggattgttgtacctgcacgaggactcgttgctgaaggtggtgcaccgagacctcaaggccagcaatgtcctcctcgacgacaagatgagccccaagatctccgacttcggcatggccaagatcttcgaggacgagtgtaacgaggtcaacaccggccgcgtggtcggcacctatgggtacatggcgccggagttcgcgctggagggcgtctactcggtgaagtctgacgtgttcagcttcggcgtgctgctgctagagatcctcagcggccagcgcaacggcgcgctctacctcgaggagcaccagcaatccctcatccaagacgcgtggaagctgtggacggaggggttggcggcggagttcatggacccggcgctggggcgggggtacgcggcggaggaggcgtggcggtgctaccacgtggggctcctgtgcgtgcaggaggacgcggacgcgcggcccaccatgtccaacgtcctcctcgccctcatcagcgaccacatgaacctccccgagccctccaggccgcccatgttcaccaggctccggagggcgctcctcctcgccccgccgctcatgaccaccaagaccgactccaccgcctcgccggtgtccgtcaacgacgtctccatcaccgtcatcgagccacgatgaggtcgtcgtcctcctcgtcgccgccgccgattaattgtctggggctagcttctttttttgtacatatagtggtagtagctaagtgtttagcagttaggtaagtcttttccttttactcctctgaatgttgtcgatggcttttctgaagctctcaagtctcaaccatcactgcaggcatttatctggtagtaggaggagagttagtgaagagatccacgaggaaaatgtaattaagtattatccttccacaagagggttaattaattaataaatcaaaagggtttgggtttgaaaaaaaaaaaaaaaaaaatttacatctttttttagggctctctctctctctctctctctctctctctctctctctcaaactgtgtttattacgagagttttgataagctagtggtgatggagattgagaaaaataagaaacaaataacagcgtggagataaaaaatcgacagggagcttgacagattgtttcattctttggtcgtcatacccacaagtactggtaaatatcatctgttcactgaaagaaaaagtactcgtgaacactaaaaaataaaaaaaaaaaaaaaaactcgagactagttctccctcgtgccgattcctgcagcccggggatcc

SEQ ID NO: 93705 - DNA, 415 bp, Oryza sativa
  Clone ID: PAT_MRT4530_92063C.1
tttttgtgttttttttttttttgggtttttttttttttttttttttttttttttttttttttttttggggacccacgggggaatttcccgccgctttgtttttggggcctctaaaactcccaaccagtggcccaataaattggggctagtaaactggaagccccccttttggtttcccatcccgcccttttttggggacataaatttttggcccctggttggcaaaaataatgggtgggggggaggacaaaaccccaaatgtttttttttcaaagcccctaaggtactgggggaaaaaataaggggaccgcccgcccaccgaaaagaaaaaacgtcagggtggtgtttttttttggccaagctattgggggggggcactggaggaccccgccttttgaagcttcaaactgggggt

SEQ ID NO: 93706 - DNA, 301 bp, Oryza sativa
  Clone ID: PAT_MRT4530_92064C.1
attcttaggggggacccattgagtgttaactgacatgaagagcaccgcaacattggtgtgcaccaaaacaaaccatatagggggaggactcacccccggaagggcaacccagcaacaagccctagtcctctccaggcgagacccaaccgcgttgggatccatttcaaaacaagaacatgaatcccaaccaccccatgccaaagagagaacaccccttcgcggaccaaaccaggagctatctcgccgagagttcaccgggcacaccagcttcctggcaccacccccttggccgccttggcct

SEQ ID NO: 93707 - DNA, 183 bp, Oryza sativa
  Clone ID: PAT_MRT4530_92065C.1
atggcctttcgcttcccccgaggccacgcatccgaccgcgatgccgccacatctgacggctgctgcgggttttaccggtcacctcaatccaacccgacgcggcggccacaacttgcgccgctgtgcgatcggagctatgccgctcgccgtgggatgccgttccagcccctggaggtgaggtag

SEQ ID NO: 93708 - DNA, 875 bp, Oryza sativa
  Clone ID: PAT_MRT4530_92066C.1
ccggccgggaagttctgaagtgctctctctctctctctctctcggtgtttccccttcggccttctcgtccgccccttctctcctccaccatccgcctcaccggcgtacggctccgacgagatggccgccccgctccggcggagcctcccctccctggggcgcacgctcctctcgccgtcccccgcgcccgcgcggatgctctccgcggcggcgtccgacgccctcgtcgagatcaagccaggcgagatcggcatggtctccggcatccccgaggagcacctccgccgcaaggttgtaatatattcacccgctaggactgcatctcagcagggttcaggcaaagtcgggaggtggaaaatcaactttgtgtcaacccaaaagtgggagaacccattaatgggatggacatctactggagatccatatgctaatgttggtgaagcagggcttacgtttgacagtgcagattcagcaaaggcatttgctgaaaagcatggatgggattatgtggttaggaaacgccatacacctcttttgaaggccaaatcttatgcagagaacttcaagtggaggggtcccccgaaggcagagcaagcctgagcactaatcttgcatgctacattgctagcaggacatgcacaagatggtgtttacccccatatgtgttgtttttggtttctccaatctgttgtgcgagtgtgggcttagaccgttcctcaaccaactctcaattataataagcgtgcactgtgatcaaatagaatgatttcctgtgtactaaaattgtttaccattatccttccacatcatttcataaagatcctttacctgtttgcttaggttgttaaagcaaaaaaaaaaaaaaaaaagcggcc

SEQ ID NO: 93709 - DNA, 603 bp, Oryza sativa
  Clone ID: PAT_MRT4530_92067C.1
atggccgccccgctccggcggagcctcccctccctggggcgcacgctcctctcgccgtcccccgcgcccgcgcggatgctctccgcggcggcgtccgacgccctcgtcgagatcaagccaggcgagatcggcatggtctccggcatccccgaggagcacctccgccgcaaggtgcggtgcttcgctgaccttacctctgatttatgtagtggcgatagattggctagccctcgcggatccgtgtgggaatcgctcgagatgtccagaacttgggaggaatgtgctgctctccaggttgtaatatattcacccgctaggactgcatctcagcagggttcaggcaaagtcgggaggtggaaaatcaactttgtgtcaacccaaaagtgggagaacccattaatgggatggacatctactggagatccatatgctaatgttggtgaagcagggcttacgtttgacagtgcagattcagcaaaggcatttgctgaaaagcatggatgggattatgtggttaggaaacgccatacacctcttttgaaggccaaatcttatgcagagaacttcaagtggaggggtcccccgaaggcagagcaagcctga

SEQ ID NO: 93710 - DNA, 1249 bp, Oryza sativa
  Clone ID: PAT_MRT4530_92068C.1
ccgcttgcgccgccgaccacctccaactccggcgatggcgcggcgcggcggcgggcagacgtacgggttcccgatctactgcgcctcgtggctgcccctcgcccacatcctcaatccgcctcctccggtggaggagggggatgcggacgcggacgcgggcgcggcctcgtcggagtcccccgctacgccgcctccgcctccgccgctcatggcggcgctcgggggagggggcggggaggggcggagcggcgtgcccaacgcgctggtggtggccgcgctcgacacctccgctggggcggccgcggcggcggcgctgtcccccgacccggtgttgaggatggggacggaggagcaggtgccgtacaggatgggcgtccacccgcgcggcgacggcgtcctctgcgcattccccaatggctgcaggttatttcgatgggaatcacaggaaggagagggacctgataatatagctttgagggctgatcaggaggcactgacagagttgagtgatgctggtttgcagttagctgtgtcattcagtggagaaggttcaatacttgcgactggtggtgaggatggtcatttaagggtcttcaaatggccttccatggattccattcttgaagaacccgatacgaaaacatcagtgaaggatttaaccttcagctccgatgaacatttccttgctgtgaacagaagcagtggcccatgtagagtatgggacttgaagtcagcagaagttgtagctaatctcccaagagaagcaggagaaatatttggtttctgcagattctctaatcagactgacaacagtcagatcctctttgttacagcgatgcaaggtgattatgggaaaataatatcttggaatacgacctcgtggacgagaattgggtcaaataaaataacacgtgaggcaatttcagcatttgctgtctcgcctgattgtacacttcttgcaattggaactattgaaggaagcattattgtactaagttcaaaaaatatgcggtcgcttgtaacagttaaaaaggcacatcttggcattattactacattggcattctctcaagattcaaggaccttgctgtcgacttccttcgattctactgctagggtgacttcaattggatcacctaagagtcgtggtataagtatatggaccatgatactggttattattcttgcaattttggcatactactatatgcagcataaagaggatctcttagcaaggtttctacattga

SEQ ID NO: 93711 - DNA, 3109 bp, Oryza sativa
  Clone ID: PAT_MRT4530_92069C.1
gaggagctcaaaattcatattttattactatagtcagggcatccttttgacaacagatatgattgcctgcacatttcttcaaacaattagtgtacacagcccaactctgccctgaagcttatgaaagaatggaatgtgatttgtatgacattacaaaggacaggtacaaactattgtacaaagaatcctatcgagctaacttaactcaaaaacagtcaaaactcgaaactctacagtgtgtcaacaaggggacctccctaaatctgccgatgtaatgtacagagcgtgaccgacttgctcgtcggagatggcagcgacggggttttcctgccaccatgttttcaaagctcgaacactgcacatgatgaaacctccagtaaggcatgagcgatcatcgatgatgttctagcaagtctcatgacccatcatccgaagtggtttcatgagaggagcaaggatgctgtaatccatcctcaggcatgtcaaattcaagcaatagcttcaactgttctccaacagcaccttggtggagcttcatctcctctataaccatagtctctggttccttacatgattgctcatctctaaaagcaagggtccatcttccatcaacaaggtactttcttggcttccctttgtatttttctgtgtccaaaaagggaactctacagggtcggatccgtaaatcttaccaatttgcatgcatttcatctattcttggatcagacactgccaagggcgctgatacacgaacaagtccacttttttccttgagaggtaaatattctcaaacaagaatccacccagaagttccattagatagagccaagaagcagaaggggcgttctttgcccctctcaaatgctattcgacaagggaccgcatcaactaagttaacttcaagtccaggtttgggtactgagccatcgaaacctgctaaagttgctcgattatttacaggcaaatcagttggggaaaaaataggaggctggtcggtgagagtttctccaaggcagaagaggataacttgacgctgtagcacaaaaccctgatcattggactcaacatgagataaattcagtgacctcaaaactgcactggggccaagccatatatgcctgctggcagcatgagtaggcaccattactgacaagccacaccacactgctccacagcattgccatgagaccatgccaccatgactgagtacctgtcttggtgattcatatcgcgcaccattcacagtccaccttgctagccaagatcgtgacaacatcaaggactctgtgatggcacaagttttatcatgccttatgttagcattcatctcagttctctcccttggttgcttgtggtcagtggatatttctatgcttggagattgatagaggatttcatcagcatttgggtgggtattgtgtttgggagtcctccgcatcttttgtagatctacagctagcaagagtatagaactacactgctggtaatgctcgaaatatttcagagaacattttgaagtttgatattcagtatgacaaacaaaagtaggacggtaaggaactttgcagactccaaagtaattataaactttgtacatgagcacaatgatgactgaagtaaatctttgtggccacatttccttcaccatctcatagattctctctgcgatggcaatggacgaatcacctttcttgcaattcttccaggcttctttaacaataggaacaagcaagtcccgccagcatcctccagattcgtccaaaagttttatactgtaatccttatgcgaatcctttagccattttagatgaaaagcagtgaactcttcttctccatggggtagcagttgcctgaaaagccagccaccaactaagcgaacatctgcagatacattagatctgcagaaaagggcaactaatgcatcgagcacctgatatctgtggaatttagaggtcatttgccgtggatgatgacactttaaaccgtatttatcctgaagcttccttacatacatatcaaaatcactgcagatgctgtcatctgctagaccgctactggatgaaaataattgcctttcagctagatcttctcctaccaaagcttgtaatagaagcttcttatgctgctttctttgaggcagaattccaagtgcatctagcattgattcatcaagttcttttgtgataataatgaccacactatcatccacgcacctgatatcatgaacatcatgtttagaaatatataacatactacagactactgccttatccccatttccagtggaaattaccatagtgctctgcctttgcaacgatgggagtaagaaccgaaacaccaaaagttgcaagatattttcagtgatgaatcttccaagatcaggaatcccagaagacataacgtcactgaaataatagagtgtatcttcaatttgcacaattgcatcctcaacagaggctgttggcacagcagaatctgcatttcgaacagaacgaacaaccaacttatccaagtcaatacattgtttctgaaaatgattgaccatgtctgaaaaatagtctgacagtggtgcacgtgagacaaatctgttaacagattcatctccaactgaaagaaaagaacgatcatggtacacattaagcgtcaaagtacgtatagcaactctaatcatgctgtcctcatgaaaagcaaactttaaggcctcaacatacagcggaaaggaaatgacctcatcctgcatatagtatagagaaaatctgttacaagactgtgtttcatataacatgtacagctcaaaaattgaatgttcattccgcaaattctggatcatgatgctcattgtctgtagtaactgtagagacactcttgagagcttagaaattctcaaaatacgagcaaattcacccataatctgtttctccatgaaaaattcgaagtatgacggatcatgctgatctccatagatcatcaattctgcaattgatctcaatgcttcaacaacaaaatccttattagcttcataaacaatatgaaccttctgtagctgatctgttagataccggagctcttcgagggagaagcggttcctgctgcgccagaacagccacat

SEQ ID NO: 93712 - DNA, 1531 bp, Oryza sativa
  Clone ID: PAT_MRT4530_9206C.1
ctaggcctgtccaggaccatgatatgtcacctccccaccacggtcaatacggtgaacctcaaaaggagcatctttaacatcgaaatggaggtagtcctcggtgctgtcagtgcctagcgtataaactggtggatgctgcagcgcgattaaggtgtcggagtgatcttcatccgtgcctaccaaccctttcctccttgtcacaatggactcctcctgctcacgccaccagcagcggagccggacaccagagcggcgtcccttggcgcggcgtggaagcatccggcgggtggtaggctgggccttctcccccgggagcgcggtggcggcgaggaggccgccctggagaccacggcggggaagggcagggcggcgcagtgggagccataggagcagggcaaggccatgcccgccctcctctcgcggtggggcggtgacttgtagggtggcgcggctgagccggtccggcgagaggagggcctcggggtcgccgcaccggagccggctggacgcggcagcggcggcgctggcgcgcctcgccgcggcgaggatggagggtggctctgacgcgagcgacatgaagaacccgcctccgggggcggtggcgccgccggggccggtgccgccgcggcggcgggagaacggggaggatttcgcggcggcggagcggtaggagcggaaggagaagacgcgggaggcggcggcggcgccgccgccgccgccgaacggggatggccagcgcttgctccagaagctgctgcggccgccgcggtttgggccgtccgcgccgccgccgccgccgccgatgttgaggcggtagcgccacggcggggacgcggtggagggggcctccacggcgaggaggtggcgctcgaagccgaaggagtaggagcgcttgaggaggaaatcgtctctcgggccgacggggttccgggctttgccggggttgatcctccgccggcgcggcggaggggtcggcggcggcgtggggtggttgcgggacggggtggaagaagaggaggtcgtcgaggctggggcgcacgcggcgggcggcgcggagcggggaggcgaccgggggcgggagcgcgacggcggcgcggcagagcgggcacgaggcgtgcgcgcggagccagacgtcgatgcagtccgcgtggaacgcgtgcgcgcagagcggcagcgcgcggagctcgtcgccgtcggcgaactcgagcaggcacacggcgcagtcgcgcgcggcggtgtcggctccgcctcccccgcccccgccgcgcgccgccatcgccgacgacttgaggtactgcgccgacggcagcgacttgatggcggcgtcgtcgaggccgtacggcgagaaggtgtggtagtagttgtcgtaggtggtgaacgtcgcgaacgagtcgtcggcgggggagcccgggatcatgagcagccgccgcctcctcctcctccgccaccgccgcctcgccgccctgaacacccggctcaccagcctcgcgtacagcaccaccagcagcgccgccccgaccaccgccagcat

SEQ ID NO: 93713 - DNA, 930 bp, Oryza sativa
  Clone ID: PAT_MRT4530_92070C.1
atggcggcggcggcgacggtgctggtggtgtgctcgacggcgttggcgtccgccgcgactccgccgaagccgagcagcatggtggtgatcactccgacgaagcagggaggagtggggaagcgaaacagcgcgttcacgtgcgaggacacccggcggcggcggcccaagtgcatggcgacgtgccccgaccggtgccggaccaagtgcctggtcctctgccccacctgcaagaccttctgcctctgcgacttctacccgggcgtctcctgcggcgacccccgcttcaccggcggcgacggcaacaacttctacttccacggcaagaaggaccgcgacttctgcctcctctcagacgccgccctccacgcgctcggcgtcctgttcggcgaccgccaccaccgcctcgccctcgccgccgcccgcgccgcgcgctgggaccccgccgccgaccacctcgagctcactttcgacgacgaccgcgtcgacttgcctcgccacgacggcgcgcgctggtcgccgccgggagccccggcgctgtccgtgacgcgcaccgcgccggccaatggcgtggtggtgaagctccggggcgtgttccgcatcgtggccagcgcggtgcccatcacgcgggaggagtcgcgcgcccacaactacggcgtcgccgacgacgactgcctcgtccacctcgacctcggcttcaagttcgaggcgctcaccgacgacgtccatggcgtgctcggccagacctaccgctccgactacgtcaacaccctcaacgtcacctccaacatgcccgtcatgggcggcgccgccaacttcctcaccaccgggctcttcgccaccgactgcgccgtcgctcgctttgccaaacctgccacggccgccgccgccggcgccggcatctccttggtcaccgacgccaagtacgtgtag

SEQ ID NO: 93714 - DNA, 993 bp, Oryza sativa
  Clone ID: PAT_MRT4530_92071C.1
atggcggcggcggcggcggtgctggtggtgtgcgcggcggcgttggcgtccgccgcgactccgccgaagccgagcagcatggtggtgatcactccgacgaagcagggaggagtggggaagcgaaacagcgcgttcacgtgcgaggacacccggcggcggcggcccaagtgcatggcgacgtgccccgaccggtgccggaccaagtgcctggtcctctgccccacctgcaagaccttctgcctctgcgacttctacccgggcgtctcctgcggcgacccccgcttcaccggcggcgacggcaacaacttctacttccacggcaagaaggaccgcgacttctgcctcctctccgacgccgccctccacgtcaacgcccacttcatcggcaagcgcaacgccgccatgtcccgcgacttcacctggatccaggcgctcggcgtcctcttcggcgcccgccaccaccgcctcgccctcgccgccgcccgcgccgcgcgctgggaccccgccgccgaccacctcgagctcaccttcgacgacgaccgcgtcgacctgcctcgccacgacggcgcgcgctggtcgccgccgggagccccggcgctgtccgtgacgcgcaccgcgccggccaatggcgtggtggtggagctccggggcgtgttccgcatcgtggccagcgcggtgcccatcacgcgggaggagtcgcgcgcccacaactacggcgtcgccgacgacgactgcctcgtccacctcgacctcggcttcaagttcgaggcgctcaccgacgacgtccatggcgtgctcggccagacctaccgctccgactacgtcaacaccctcaacgtcacctccaacatgcccgtcatgggcggcgccgccaacttcctcaccaccgggctcttcgccaccgactgcgccgtcgctcgctttgccaaacctgccacggccgccgccgccggcgccggcatctccttggtcaccgacgccaagtacgtgtag

SEQ ID NO: 93715 - DNA, 444 bp, Oryza sativa
  Clone ID: PAT_MRT4530_92072C.1
atggctgaacaatttaactaccttcgtgttctcttgactgagcataccacggcaaatgacagacctgatgtgagaaactcgaaatattctagtgacattctgaagacgagccacctctatcttgtccaacgcagtgaactgcctccttgcctcaattggaagtttatctggaacaacaaagcaccgctcaaggtccagttcttcgcctggctccttgctaaagatcggctcccaatgaagaaaaacctttgtaagaagaacattgtgtccacccccgcctggtgttctacctactttgtttctggtgtctttggaatcatcgtcatggtgtggtcttccggcatgaggaagcttccctgtgtcgggtggttcacattggatcaaggtttggcacccgatgttggctcttcgtcaccgagagttgcaggtgctttcacggattag

SEQ ID NO: 93716 - DNA, 204 bp, Oryza sativa
  Clone ID: PAT_MRT4530_92073C.1
atgctatactggtaaatatttgataagctcctggtttggaatggtatattctggtttgaagatagaactgtgcagccgggatggttgtccagaatggttgggcctatgcaacagggtatgttgtatagcgttggattaatattgtttaattacttaactgttttattaaattctcaaatgtttgctaaatgctgcttttgcaaa

SEQ ID NO: 93717 - DNA, 684 bp, Oryza sativa
  Clone ID: PAT_MRT4530_92074C.1
ctttccgcgatcaaggtcccattcgcttctaggccgcgaccgtcaatggcctggtattctttccggtggcgttggcgctacctgtcccgatcgaccgagaccgtgacttcggtttgttcccagcgaggcagccgtctcctctgaacaagcgccaagatagcgatccgatggacggggcgggtgcttcgacgtcaaacgtcagcggcatgagcgtcccggaagagtccaacgaggaggataagcctggacccaccgtacccaagctcggagtccccaaacccccaccaggacgcaagtctcatgaatcaagcaaggaatagtaagccgtagcagtactgtttttttggctatacacccttcgcatactcgggacttttttgatggctatatcaatacttctacgtaaatcactgtcactcctacattcctcgagcttcccagccactacgttgcgacttttgtacatcatgtacctttagctctgttcctttattcttctcttctcctttgatctggtcgaacgggtcgcagctcttgactctcaaaatgcggcttggtttattcatatggcattgaatttttgcttttggcacggcgttcggcgttgataatgttcactacattttggtgaagaggtgcaaacaactcgagtctaagagagagaaaaaaaaaaaaaaaaaaaaa

SEQ ID NO: 93718 - DNA, 184 bp, Oryza sativa
  unsure (1)..(184): unsure at all n locations
  Clone ID: PAT_MRT4530_92075C.1
gggtgttttgcgtcgggaggatttttgctctccttgtttgctttgcaagagggaggcattggttttcntcttgattttcgcttttcctctctctctgcctctttatgtaatatctctttgcgctggtgcctacaagaggaagcaccaagccaagaaagcggatgacaagttttccaagaattgc

SEQ ID NO: 93719 - DNA, 264 bp, Oryza sativa
  unsure (1)..(264): unsure at all n locations
  Clone ID: PAT_MRT4530_92076C.1
gccaggcggcggcgtgtcaaatggacgatggattatgatgatattaatatgtagttaagcatataaattaaattaatacgtgtttatatatagcaacggggcggcctaactaatgcgtggtcaattaattaccctgctgctttagattgtatatcgtgccatgcgtcgtttctctatgtataccagttcatgtgggcttctaaaattatgctatatatgtactgtctaatactatgctaatgttgttcgtttgtcaaaaaaaan

SEQ ID NO: 93720 - DNA, 182 bp, Oryza sativa
  Clone ID: PAT_MRT4530_92077C.1
gctgccactcgtcccagctcctaccggacaggactgggctcgccccaatggaaaccatccgtatctttgcaagaatcatggatacgcacatcaggatgcttgcggtcctcaatggttaccagacacaaggggagacggatgccgaccttcaacaaggctacagaggaggtggaggaggatct

SEQ ID NO: 93721 - DNA, 1245 bp, Oryza sativa
  Clone ID: PAT_MRT4530_92078C.1
actgctgcctcgcgttctccatctcctcccctcacgcacccagacgacgacgagatggatttctccggcggcggcggccgcggcgacccggcacggtggctggagatcgccgggaagctgctcgcggcgcgggacctggtcggctgcaagcgcctcgcggagcgcgcggtggacgcggagcccctcctcccgggcgccgacgagctcctcgccgtggccgacgtcctcctcgcgtcccagcgcctgctcccctccggccgccccgatcccatcgccgtgctccacctccaacccaaccccgaccccgccgaggtcaagcgctcctaccgccgcctctccaacctcctctcctccaaccctcgccccggcgctgacgccgccctccgctgcgtgcaagaagccttcgctcacctctccgattcctcggctaatcccgctcccgctctcgctcctcctcctgctcctgcttccggcggcgacgcctcggccgccgcggccgatgcgttctggacggcgtgtccgtactgctgccatgtgtaccagtaccagcgtgctctgatggggcgcgcgctaaggtgcccaggcgccggctgcaggcgcgcgttcgtggccaccgagatcccggccgcgccgccgattgtgccgggcactgacatgtactactgcgcttgggggttctacccgatgggcttcccgaaggccgctgatctgagcaccaactggaagccattttgccccatgtatccatggaatttgtcgtctccgcagcaagcgcctgccgatgctggtaatgttagcaagcaaaatgttgagagtaatggtggaaatgttaatattaatgtcaatacaccgccgtcgaatgcacagccagcgaataagagcggcgccagcagcggtgttggggtcgggccatctagaggtaggattaagaagacaacagcccgcaagaaggttggtggtggcttcaagaagaatgcctctggaggcgtagaaagtggcattgagccatcgttgcttgggccggattcgtggaatggggttgcagagagtggatcgatggtaggtgcaagaggaattaacataaatgaggtggcaaagggaactgatggcagcagcatgatgcatttcggtggggacgaggaaattggttttgatttggatgtcgatgcaacggatgctatattggggaatttgcagcatctgccattcttgagggatgatgacaatgccagacggttattttag

SEQ ID NO: 93722 - DNA, 843 bp, Oryza sativa
  Clone ID: PAT_MRT4530_92079C.1
atggctccagctcgacctttcgcgttgctgtttctcgcagtcacggtcggcttcgttctgctgacggcggccgacgactcggccaatgcgacggcgacgacgacgacagcgatggctccgtcgtcatcgaccgacgacgcggctccgcccgtgtggctgaaggcgcacgcgacgttctacggcggcgcggacgcgtcgggcaccatgggaggcgcgtgcggctacggcgacctttactcgcaggggtatgggacgcggaacgcggcgctgagcacggcgctgttcaacgacggcgcgtcgtgcgggcagtgctacaagatcgcctgcgaccgcaagagggcaccgcagtggtgcaggcccggcgtcacggtcaccatcaccgccaccaacttctgcccgcccaactgggacctccccagcgacaacggcggctggtgcaaccctccacggccgcacttcgatatggcgcagccggcctgggagaagatcggtatttaccgtgccggcatcatccccgtcatctaccaaagggttccatgtgtaaagaagggtggtgtgcggttcaccatcaacgggcatgactacttcaatctcgttcttgtgaccaacgttgcaaccaccggcttgatcaagtcgatggatgtgatgggctccaactcaaccgactggctgccaatggtgagaaactggggtgcaaattggcactcgttatcgtatctcactggacagatgctttcctttagggtgaccaacatggacggccagacgcttgtcttcagaaacattgtgccgtcaggatggaagttcgggcaaacatttgcaagcaaactgcagttcaagtga

SEQ ID NO: 93723 - DNA, 649 bp, Oryza sativa
  Clone ID: PAT_MRT4530_9207C.1
tgagtagagagaagagtagagggtagtagagagccaaaaaaaatcgatcatggagaggccatgtggagctcgccaagtgtgagcatttgccttcttggaaagaatcccaagctagaaatccacagaattatctgctctcaaacattggctcatctgctcaacaatcctatcctcctcctcctcctcactggcagtgattcccccaaccccatttctctctgaattgggcttgtttctttgctgaattattattttgctcattccactctggttgcttgttcagagactccatgtacaattagttgaccattcttctagttagcttctcttgtgttcttggagttgtagctggtctgtccatgtgagccatgttgcagattgggctagctttgggagcaagagagtggtagatcttcttcttgccagatttattgtagatacaatacaatcccatttcttgttcagatttcttggtgaaaattcctagctagatccatactttctccagtgtagtgtgtagagaagaagaggccttgtgaatcttatcttgggaaaaagaggtatatccatccacccatctgtgtgctgttcttgattggcggcaatggcgatggagccgacggtgaaggtggcgctggggacggcggcg

SEQ ID NO: 93724 - DNA, 216 bp, Oryza sativa
  Clone ID: PAT_MRT4530_92080C.1
atggcggagagcggtgctttacagctgggtgtaaaacacgctcgtcatcccaaccagcctggggcacgccgtgcccccgcgtccctaaaaagagttgagcccgggttccatgacaggtccaggtccgacgccaacctctacttgtgttccaaagatgtatatcttatatgtttctacgctgctcctactaaggatcgtagatcttacgaggactaa

SEQ ID NO: 93725 - DNA, 396 bp, Oryza sativa
  Clone ID: PAT_MRT4530_92081C.1
tttcttctcccgatcgttaccttttcctcctcggttggtttccgtggtgcgtttagggtttagtgggttgtgatggcggggccggatgtcgagtaccgctgcttcgtcggcggcctcatctgggccaccaacaaccgttccctcgaggccgccttttccaccatacaggaagatcctcgacttcaagatcatcacaccactgcagacggggaggtcacgtgggttaggctttgccaccttctcctccgagcagtcgatgcgcgacggcatagaaggcatgaacggcaaggcgctcgacagccgaaacatcaccgttaatgaggcccaatcccgtcgctcctgtggaagatgccgaggctacagtggacgcagtggccgctactgctgaagtcgttg

SEQ ID NO: 93726 - DNA, 837 bp, Oryza sativa
  Clone ID: PAT_MRT4530_92082C.1
atggaagggcacaagagtggcatggaagctgtagcagttgccatccctcccttgcacactggtgagagcaaccacaggattgacagcaatgtcagctcgcaatgccatgctgatcctgcagagctctctgatgaaactcagcagcaatctctgtggcatctaggcctaagaaagataataccatcatctgttcctctcctcaagaaggtcagtgctgagttctttggcacattcatactgatcttcaccgtgctatcaaccatcatcatggatgaacaacacaaaagtatcgagacgctcctcggaatcgcaacatctgcaggcttagcagtcactgttctagttctgtccctcatccacatatcaggatgccatctgaaccctgcaatcagcatcgccatggccgtctttggtcacctcccttctgctcatcttctaccttacatttcttcacaaattctcggggccgtcgccgcctccttcgccgtcaaaggtctgtatcatccggtgaaccccgggattgtcaccgtgccaaatgtcggcacggttgaggcgtttttcgtcgagttcataataacattttttctactgttcatcatcactgctcttgccactgatcctaatgcagtgaaagaactgatagcagtggcagttggggcaacagtcatgatgaacattcttgtggcagggccatcaacaggagcatcgatgaatccggcgcgtacaattggcgcggctattgccacagggagatatactcagatttgggtttacttggtggcaactccactgggtgctatagctggaactggggcttatgttgcaattaagctgtag

SEQ ID NO: 93727 - DNA, 1114 bp, Oryza sativa
  Clone ID: PAT_MRT4530_92083C.1
gcgggccggcgggaggaagacgacgacgccggccggaacggatggcggacggcggcggcgagcagcggggcgaaccacggcgatacaggcgaaagcgagcacaccgggagcccgacggcggcggattgcggcggcggcaaccggcggcgaggaaagagggtaacggcgacggcgcgacgggagttcgattcgagcgagctagagcatctacgcgactccaggaatccgtttctagcgtcggattggacgggtcatcgccgaggaaggccggcgacgggcggctactaccgagcgcgggcggcgacggcggcgagcctactgcgagcggcggcgtggcttggggcggcgccaactagctactggggcgcgcaccggctcctccggcacacgcgacggcggtggtcggtggtagagagacagaggggacagcaatggcgcggtggagcgagggcgaatgggagagggaaaggaagggagggtgccttggtttaataggagggcaatgtcggtttggaaaccgacctagggcggtcaaggagcgagctggcgctcggcgctcgcggccaaaacgacgacagagggcatgacgccggcggtggaagagaaaagggaaaaaggaaggaagaaaaggggcttgccccttgcctctttgggaaaagaaagagggagagagggcgatgaggcagatggaggaggagctctgcctccattccttggaagcatgcacgcggagtggcggggccaggtcgatgacgacggcgatgacggcggggcggtttggaagggcgcggctacagggcggcagacgcgggctcaggcgcggcaggtgctgacggcgtcggcgattggccggtcggccaccacggtgcgcacgcgcgtgcgggaagcaacggcacggcgatttgggcggcgtcggcaggagagacaacgagagggagcgagagcagagagagatggaggaaaaaaagatagagcgagctctctctctcgctcagtgcccgagcggcgcacgtgcctcgcacgtgcgggcgaggatggaggggagagaagagatgggctgagaggaaatgggccggggagaagagatcggcccacaaactcgagggaggcaaaa

SEQ ID NO: 93728 - DNA, 1642 bp, Oryza sativa
  Clone ID: PAT_MRT4530_92084C.1
tttttttttttttttttttttgggtaccgtgagttccatactttcttaacacacaaaattatacaatacaggatcctgccgcctgtctcactgatgctagtgacattaggagattgcaaacatcaggcggcgtggtgtatattattcccagctacaaaatttgaaactgctatatgtcggcatgtaaaattccatgcatccaaccaaactatatcttcttgcccctgcaaatttcaggcagcagcctattctatctcgcgatatatgatgagactaaagcactaatcaaatgtacgggtcgctcctaaaatcagctatcccgatgctcctgctgcctttgcgtctttctcctcttcagcttgctcttccttcgcaaattcctcgatcagcacgcgctgtctcggtgtcaaattcgcagggatgttgacattgaagtggacatactgatctccatagtacgatgaatttctcgtcttgattccttttcctctcagaaccaccttttggccaggctgagtaccaggcttgacctttagaactacatctccagagagagttggaacctgaactgtcccgcccaaaattgcctgagtcacgttcaatacagcatctacatgaatatcacctttctctcttcgaaataccggatcctcacgaaccttcagagttacataaagatcaccaggactaccaccatctggatctgctccacctgatctaaccaactttataacgtcaccatcatccgtaccaggcactatgttgagtcggatgttttttgttcctggcacaactttccttcctttgcatgacttgcagaattccttcacagtcttcccactaccaccacactgtgtgcatgttgattgcatcctgaagggaccagtttgcatgaagataaatcctgaacccctgcaggctaggcaagtttcaggtttggttccagggggtacgccagctccttgcaggtgtcacatgtaacagcagtctgaaaattgatcgtctttgtgcacccctgaactgcttccataaatgatatttcaagtgcaaccttggcatcatgcccgctaaattctctctctctgaatatgtttctaaagaaatcattcattccaccgccgccgccacctccaccaaaaatatcctcaaacggattgccaaaacccccttcatatgcaccaccaggtcctcctccagcggaagctttctcatactgatcagggccaacctgatcatataatgatctcttctgatcatccttcaaagtctcataagctcgctgaacctcttgaaacttcctctctgcatcagaatcacctttatttgtatccggatggagctttttcgcaagcgcgtaatacgctttcttgatctccccctggctcgcgttcctgctcacgccgagcacatcgtagtagtccctcgctgccaccggcctcgtcccgtggaagagcctggcactagtcggcgaggagaacggcgacctccacgcgggagccgcggcgcgaaacgcgtcgccccacctcgctccgtgggcgcgcgagccgtggaagggggacgccgacgcggcgggcgaggaggaggggagggcgcggcggcgagcgaggaggagggcgaggcgagcgtcgccggggagccgcat

SEQ ID NO: 93729 - DNA, 939 bp, Oryza sativa
  Clone ID: PAT_MRT4530_92085C.1
atgcacgtgcctgaaggcccgtgcatcgaagcacaacacttgatcctcgaaatcctcgcactgcgggtcttcgggctccgaaactacacgcgaaacgggacaactcaacaaacgggaagagatgtagactttgcgggcggcttgagcgcggcccgagaggagttggcgcggctcggccaaccaattgggctggcgcgggctcagaaggcggcccaacaaaaggaggcgtggagagagagagagatccgggtgagccggatccatcgtgcggggtcctggacgagcccacgagtcagtgactcggtgcacgggagagagggtttacgcggcgcgggggagctagtgtttgcggacgcggctcacagatggtgcaccaggtggactgggagacggcgggcccaagcgcagccggctggctctccgtggaccacgcgcgtacaggagaacggatcggaggagcggttgactgaggtcaaaccgacctggcccgtggccgagctggcgccgacgtggcgcctttgtggcagccacgcgggccggcgggaggaagacgacgacgccggccggaacggatggcggacggcggcggcgagcagcggggcgaaccacggcgatacaggcgaaagcgagcacaccgggaggttgcacgggacgaggggagacgagccaatggattggattcgccggaaggagcccgacggcggcggattgcggcggcggcaaccggcggcgaggaaagagggtaacggcgacggcgcgacgggagttcgattcgagcgagctagagcatctacgcgactccaggaatccgtttctagcgtcggattggacgggtcatcgccgaggaaggccggcgacgggcggctactaccgagcgcgggcggcgacggcggcgagcctactgcgagcggcggcgtggcttggggcggcgccaactag

SEQ ID NO: 93730 - DNA, 380 bp, Oryza sativa
  Clone ID: PAT_MRT4530_92086C.1
cccacacgtgctaaacatatagggcgcgcatatgaacgagtctttatataacgaacaagaacaaacaatgcggcgggaggtgcgggtcagccctctggacgctttacgctagcgtgctcgaccatcacctcacctatctgtacagttttcagaccatattccaccgccctggcgcgctctgactaccgatgcaacgctgacaacagctgcgttacccaagttaatagtgtcgctgcacctccatccttcggatggtgaggaaataccaagagagcatgcccatgcccctccttcaaagcatgttgcctcagcctcaatggcaaactacacccgcgatgtttcgtcgcattaacagcggtgctactggtagttatcaccag

SEQ ID NO: 93731 - DNA, 131 bp, Oryza sativa
  Clone ID: PAT_MRT4530_92087C.1
acggcacgaggaagcactgccagtccaagggcgtaccaggtcctcctactaccatacggcggccaggggcggcgagtactacgctcccgtacctcccagtacggcctaccgacgtacgccgataaacctac

SEQ ID NO: 93732 - DNA, 363 bp, Oryza sativa
  unsure (1)..(363): unsure at all n locations
  Clone ID: PAT_MRT4530_92088C.1
taaaaccattatttattctataagtgatcttcagcacactgccactgcactttcttgctagattaataactctgaatatctgatattttcctcctattggtctgaatatntgggttagttccaacttgattattcacttanactctggcagcatttcaattccagaatccatttgattacagtcttttcttctctgtgctaaattctggaagttgctagcttctattcatcaagttatacatacaagtttgtagtctgaaattcattcagaacaccaggtttagtcaattatttctttttccatctatgtatgcataaagatcaaattctctctaggtggagtgagcagctctttgaatcttg

SEQ ID NO: 93733 - DNA, 478 bp, Oryza sativa
  Clone ID: PAT_MRT4530_92089C.1
aaagtcatgaaaaaatcaattttatcttcattagtcttaggtttaagtgtactttcagtacctgctatgagccaagcggtattaccaacaatattaggcggtcaagcattaccaagtttagcatctatgattaaaagggttcgcccggcagtagtcagtattgctattgaaggtacaactaaagttgaaaatgcacaatataaacgtgaacttccggaagaacttcaatttttctttggcccagatatttttggtgagcgtgtgccacgtaatttccgaggtcaaggatcaggcgcaattattaatgctgaaaaaggctatgtgattactaataatcacgttattaaagatgcagaaaagatcaccattaaattagaagatgggcgagagtttaaagcgaaattaatcggttcagatgcgttatcggatgttgcgctagtgcaaattgagaatcctaaaaatttaacggaacttaaat

SEQ ID NO: 93734 - DNA, 1339 bp, Oryza sativa
  unsure (1)..(1339): unsure at all n locations
  Clone ID: PAT_MRT4530_9208C.1
aaaatcgacaacgatgagctatatacagtttgttcatggttgtgatacaaaggtcggtgtgtagtatttgctttcgcaatttatacatttcataaacacacatatcacactggactactaaactataaccgggagtaaatggagactgctggacctttttggttcagagttgagagacttgagagccccctttttctgaataataactttgtttcacgatcaacttaggtggcaaccggccatggcattcttggaattgcagatttgcggttttaccagtggcgcctttattccattcattcattaacacttttgattttgaatctgcagaattcagcaatttatcatcaccatgatacctgcaaaaccacanatgcggtgttgtggttcctccgggcggctcgccccccgccgttgttggtttttctgttctgggcgccttgctgctgtacgaaacttgaccctctctagcatctccatctcatatttttcatcttttatccacgattaataaagttttattatcataaactatatactcaagtgtgctgatcaacagcaacaaatgttctcaaccaacaatgaaaatacggccaatggacacccaacaataaggagcatatttgcccttccatcaggacctatacctgttacgaacaatctcataaatcactcgaaggaaactcttcggcgattcgtcttcaggtaaatgcagcaacttcgcaatccgagcatacgagaactggttctttgggaaagagtcctgtgggatatctgcagtctgcttgtggagttttgggtttgatagtgcccactgtatggcccatattgcaagagggcgcatgtagcacaacgatcggtattcatcgtcattgttccaagcttcaggggtttgaaatgagtacccaagtccttctggagaccaggcagcatgataaatcccctcagctgttttgaaccccttctcaaccatgccttcttgaatcatggttgcagcaagtgcatatgtcacacctggccatatctcccgagattgcattgcggacatgtccactgtgccatctggccacatcccattcattgctccccttttaccatccttgaatttcatcacattgaaagaatatatcttttctagtgcactttccgccttatccttgtcaacaattgggaagagaccgcaagctttggcataccattgtccagccaattgatccgcatggatggatgcactcattatgttgtcgccatcatcataattgaagtaagcaccattccacaacttgccataacagacttagccttctcatacttgtcccagaaaagtttcctcgtgccg

SEQ ID NO: 93735 - DNA, 438 bp, Oryza sativa
  Clone ID: PAT_MRT4530_92090C.1
gcacgaggttaaacattttgtctggcaaatgggcttcaaaaacgtttcttgcatttgattttcggccctgtagataataggctgtgcagattaattaggctcgaacagatgagcactccaaataatgggcttccattgagctgttggaaacaaaccatcgaggattaggaattgagctcactgtttacgaaatggaacaagtttactttgcatcccttatctcttgctttggattgaataggctccctcgaccataaatctgggtattaacaccttatccatcttcaaaaacccatacaaactgatttgggaagcagtttctgctgaagtgataggttgactgtggttgacttattgaatcaacaggtgggatccacgtgtcagcaacttccaccccatctcatcttcaattcttcctcacttccctctatttctctc

SEQ ID NO: 93736 - DNA, 2289 bp, Oryza sativa
  Clone ID: PAT_MRT4530_92091C.1
atgtcatcctccgccagcccgtctggtgcgccaatagccgagtacgccgagaaccactacttccttggcccaatcggcaatctcgaccccaccgatttcatcactggtgagaccaaccggattccctttaggctatccaaccctaacctaggtcattggaagaacacctttaaatcctggccatctctcgaaaaacccacacccgacaggagttggtccacttggtatcaacgtgtatcggctagtaagaaagttcactgggatgagattggaatcggccaagcactagccctcaccatagccaattctgccaaagacgaacctctgatggctgccgccacctacttctggtcaaacaccatcaacgctttcctgttcaaccaagggccgatgactccaaccttaattgacatcactatgatcaccggactagatgtaacttcatcggccaaccccatgagcatgaataccaagaaccaattcgatttcaaaaccaagagcataggttgttggtccggctatgtggcagcatatatgggtcaaggatccgttacccctcgagagcacgtagcctttttgctcatgtggctggaaaagttccttttctgtggatccagttgtggccctacaaccaactggcagttcgtagccgaagccctggagtcaaagaaagaattccctttgggcaaaatccttctcggctatctgtaccagatgttgaacaacacatcggctagaatagccgtcggctcggcagttggagcaggtggaccctggtggctactgcaaacttggttaaacctgatggttatgaaggttgtcaatcggccttctgtaacagaagctgagttcccactgccagagccgattgtgggtgacgacggagaagaatgtactcatcgcagcttctatgagggctttaagaaagatacccggatctggttcccttatgaagaatcagcagacctcgaacttccatcagattttagattcgaagatattaaccatgagaaattccagaaatccagagaagttcttatagccgcaatcagcccttgcatccttcctgtcggcattcaccaagggagaaacatccaaacaacagagtcctcccctcctcaccaaagcaatagtggcaagaacattgagtatgcttcgggcttaattccaaatggaggtgggctatctccccctgttattggctactatgcccccaagacctcaactctccttcacggcctaactagagaaccagccgatgcaggcccaaaaaggaaaaccagatcctcggctgtgagcacttcaatcttggctccaaagaaaaaggccaagttcaagaaaaccaaaccgactgacaagccggccgatgatctgcccaccttggatccatctattgaacaagccttagatgaagagataattgaagacgaagttgatcaggccgcagctgaagtaagcgatactgaaagaacaccatcggcttcgcctaagcaaacccttccaactccttctgccccagtccacttctcaaggaaaaagaagactgcggtgaagaagaaatcggctgcaacaacatctaaaccagctccaccaccttcacctcctccttctccttttattcaacaatcatcaagtgatcagaccccttcagctgcagggagtcatcacgtcgaggaagaagaacaaccaactgctcctgctatcttagcattggccgatcttttctctttcaatatcagagactatcttgatgaaggagaagaagatactacaagcaaagcattggctcctttatctgatgacgctcggctgcatgagattcaagccttaatcccggatgagttagccgacatccttactccagctgtttaccttgagcaacaccaattcaagctggagaaagccaagttaagattagtcgaacggcgagaatgtaagaacattgaagccactatccaagccagccgacaacttgtgcatgaagagaaatccaagcttgaccaattatctgaaggcccaatcaagtctaacattgatcggcttgaggctcacaagattgacctcttagcacaacttgaagaatgtaacgccgagctggatatggagcgcaagaagctagccgatctccccaagtctattgaagaacagaaagcaagacttaaatcggctatcaagcatgttgctgaactgaccaagtccctaaaagttatccctcgaaccgatgctcaagatgcccaagccatagaagaagtagagcagattaggcagaaggctatttcggccatctag

SEQ ID NO: 93737 - DNA, 645 bp, Oryza sativa
  Clone ID: PAT_MRT4530_92092C.1
gactagttctagatcgcgagcggttgccctggtgagcatccgttcgacgaggtcgaggcctgctgtatgctcgatgacaactgtgtttagtctaataatgactacctgagcactgcgctctatgaggatgtgctggattgcctggcgaggctgctgtagggctctttcacgttccacgtgaacttagctcatgttctattagtgttacctcttgatttcttttgtcattctcgcctttttttttctttctcttcacttcttcttcttttttcctccttttttccttcatttctccttcttctctttcttccttcctcttttttcttttcttctttcccttcccctcctccttctccctcctttcttcttttcctcttttcccctctttctttctctttccctctcctcccttctcttcttctcctccttttcttcctccttttccttcttccttccttcttccctttctcctctcttccttttctcacttttctcacttcctcttttccattctttctcatctctttcctttctccttttcttcttcctctctttctctttttcttacttttcacccttcctcttcttttctccccttttcccccttctttttttctcatccttttccattctttctcctctctc

SEQ ID NO: 93738 - DNA, 321 bp, Oryza sativa
  Clone ID: PAT_MRT4530_92093C.1
atgccccccatacatcgcaccgcatcgtctccacagtttggcattgtcacgccgtgcggtatacgtgtggccgacgccacaggacgaggatcacgcagtgccgtctccccctgcactggttggctactgttgccgtcgtcgtcgctgctgcgctctggcggcaggggatcaacaacggcgcttgagacgacgatgatcttcgtggcggagaatgcgacggcgcctgatggtggagaaggggatgtgatcttcactgtttggaggaacgtcgatggcgcacggcagggagtgctgggcgcgcggatgagcgcagattggtag

SEQ ID NO: 93739 - DNA, 2716 bp, Oryza sativa
  Clone ID: PAT_MRT4530_92094C.1
atgtcatcctccgccagcccgtctggtgcgccaatagccgagtacgccgagcatctttcccaccaagtcgcaattccaagcctttcacaccagaaccactacttccttggcccaatcggcaatctcgaccccaccgatttcatcactggtgagaccaaccggattccctttaggctatccaaccctaacctaggtcattggaagaacacctttaaatcctggccatctctcgaaaaacccacacccgacaggagttggtccacttggtatcaacgtgtatcggctagtaagaaagttcactgggatgagattggaatcggccaagcactagccctcaccatagccaattctgccaaagacgaacctctgatggctgccgccacctacttctggtcaaacaccatcaacgctttcctgttcaaccaagggccgatgactccaaccttaattgacatcactatgatcaccggactagatgtaacttcatcggccaaccccatgagcatgaataccaagaaccaattcgatttcaaaaccaagagcataggttgttggtccggctatgtggcagcatatatgggtcaaggatccgttacccctcgagagcacgtagcctttttgctcatgtggctggaaaagttccttttctgtggatccagttgtggccctacaaccaactggcagttcgtagccgaagccctggagtcaaagaaagaattccctttgggcaaaatccttctcggctatctgtaccagatgttgaacaacacatcggctagaatagccgtcggctcggcagttggagcaggtggaccctggtggctactgcaaacttggttaaacctgatggttatgaaggttgtcaatcggccttctgtaacagaagctgagttcccactgccagagccgattgtgggtgacgacggagaagaatgtactcatcgcaggtgcacatgatatggggaatatgcatccacaccaaccgatgctggagcaaagttatcggctgagctgcttaaggactggttctgcagcttctatgagggctttaagaaagatacccggatctggttcccttatgaagaatcagcagacctcgaacttccatcagattttagattcgaagatattaaccatgagaaattccagaaatccagagaagttcttatagccgcaatcagcccttgcatccttcctgtcggcattcaccaagggagaaacatccaagtctcctacgagttttatcacccaatgagctcggctaggcaacttggattaggccaactcccaatcggcttattttttgccgacaagattcagtgccgaggacaaatcacgtctgctctaatgatggatcggctactcaatctatcgggacctcctcttggcagcattgaaaatattgagttggctggattcagaagcaaaaacttcgacagatggtggggtgaatagaagctacatctgtttcatcaatcagccacgatgtatatgacagatctgtcccccgacgtcataccctagacaacagagtcctcccctcctcaccaaagcaatagtggcaagaacattgagtatgcttcgggcttaattccaaatggaggtgggctatctcccccctgttattggctactatgcccccaagacctcaactctccttcacggcctaactagagaaccagccgatgcaggcccaaaaaggaaaaccagatcctcggctgtgagcacttcaatcttggctccaaagaaaaaggccaagttcaagaaaaccaaaccgactgacaagccggccgatgatctgcccaccttggatccatctattgaacaagccttagatgaagagataattgaagacgaagttgatcaggccgcagctgaagtaagcgatactgaaagaacaccatcggcttcgcctaagcaaacccttccaactccttctgccccagtccacttctcaaggaaaaagaagactgcggtgaagaagaaatcggctgcaacaacatctaaaccagctccaccaccttcacctcctccttctccttttattcaacaatcatcaagtgatcagaccccttcagctgcagggagtcatcacgtcgaggaagaagaacaaccaactgctcctgctatcttagcattggccgatcttttctctttcaatatcagagactatcttgatgaaggagaagaagatactacaagcaaagcattggctcctttatctgatgacgtgaagaaaactcaaggaaatgagttagccgacatccttactccagctgtttaccttgagcaacaccaattcaagctggagaaagccaagttaagattagtcgaacggcgagaatgtaagaacattgaagccactatccaagccagccgacaacttgtgcatgaagagaaatccaagcttgaccaattatctgaaggcccaatcaagtctaacattgatcggcttgaggctcacaagattgacctcttagcacaacttgaagaatgtaacgccgagctggatatggagcgcaagaagctagccgatctccccaagtctattgaagaacagaaagcaagacttaaatcggctatcaagcatgttgctgaactgaccaagtccctaaaagttatccctcgaaccgatgctcaagatgcccaagccatagaagaagtagagcagattaggcagaaggctatttcggccatctagcgatacttatctcag

SEQ ID NO: 93740 - DNA, 318 bp, Oryza sativa
  Clone ID: PAT_MRT4530_92095C.1
atgggcgagtactgcggcgctactccggaggaggaccctgccatggccctcgtcacgccgctccccgccaccaccaccatcaccatggcggcggccaacaagcaaccccacttcactactacggctgcttcgaccgctactccaccaagcaggtcttcgacaacctccacggcaacatctcgctcgacccgatatggggtatccataatctccacagtagcccccgagaccttcgcagttgacaaaatagacttctcaaaacaaaaaacagtaatccgagtgcttcaattcaacttgctccagcttgccgagtactaa

SEQ ID NO: 93741 - DNA, 2132 bp, Oryza sativa
  Clone ID: PAT_MRT4530_92096C.1
caaaaccctaacacatcccagcggcctcctccgccatgccatcgccgccgccgccgccgcagccgtcgccgccggagctgccgatctcggagcacgaggacgagatcatggctgcggtggaggcgaacccagtggtggtggtgatcggtgagaccggctcggggaagagcacccagctctcccagatactccaccgccgcggctacacccgccgtggtgccatagccgtcacccagccccgtcgcgtcgccgccgtctcggtttccaggagagtagcacaggagctcagtgttccccttggtgatgaagttggttatgccatccgatttgaagatagaacttcagagaaaacctgcataaagtacctgacagatggtgttcttctgcgcgaaagcctttcagaccctgagttgaagcagtattcagtaattattctggatgaagctcacgagcgcagtttaaacactgatattcttctaggtttaatgaaacgattaattaaggatcgagcttcagatttgaaagttctgatcacttctgctactcttgatggtttgaaagtgtcaaagttcttctctggatgtcctgtgttgaatatccctggaaccttattccctgtggagaagttttacagcacgacggctgcggcgaattattcagtcgctggcagtggagcgaaggcgaatattcatgttaaggaatcccctggtgatgtcttaatattcatgacaggaaaggatgacattgataagatggtatcaaaattggaggaaagaattcaaaatctagaggaaggttcttgtatggatgctcttgtccttccacttcacggttctttgccacctgaacaacaggtccgggtatttgctccagcacctccaaattgtcgacgcttcattgttgcaacaaatgtagctgaaacatctcttactgtggatggtgttgtgtttgtgattgattgtggttatgtaaagcaacgccagtataacccatcgtctggaatgtattcacttgacgtagttcagattagcagagtgcaggctgaccagcgagctgggcgagctggaagaactcggcctgggaagtgctataggttatacccaatttccatttatcaaaaggagtttctcgaggctacaatcccagaaatccagcgttcttctcttgccggaagtgttttgtatctaaaatcgttagatctacctgatatcaacatactgaagtttgatttccttgacccaccatctcgtgaatcattagaagatgctttgaggcaattatacctcatcgatgcaattgatgaaaatgggcaaataacagatgtaggacgaattatggcagagctccctcttgagccttctctttcaaggactttgattgaagcaaacgaattgggatgtctatctcaggcattgactgttgctgcagttctgtcagctgaaatcacattccggtcaactagaagcaaagacatggagggaaagaggaaaaggcaagagcttcctgatggttctggttggggcgaccatatacagttgcttcagatatttgaaagttgggatcgaacaggctatgatccaagatggtgctcagatcatgagttgcaggtgagaggcatgaaattcagcaaagatgtgagaaaccaattaagtcagattattcaaaaaattgcaaaagcaaagaaagagcggaagagtgaccctgattatagaaaattaaggagagctctatgtgttggatatggtaaccagctcgctgagaggatgctgcatcacaatggttatcatacggttggatacagggcacaactagtgcatccattttccgtactggaaggtgatgaatacgggaaactgccggtatatgttgtctaccatgagttaataaatactactcgtcctttcatgagaaatgttagtgccgtggatcagtcttgggttaaacctatattgaagaagcttgaaagattggacatgaacaaattaagtggttccagcggatcgaaagatccagaacctctagaggataaacaagtaagctccccaaagaaagcaatggatgttaaacaatctgacgtggacagtaaaatacaggcagctcgcgagcgctacctggctcgaaaaggcaagaaa

SEQ ID NO: 93742 - DNA, 157 bp, Oryza sativa
  Clone ID: PAT_MRT4530_92097C.1
aaaagcagaagcagctttatttattaacgcgacgccgaatcaacactaaaagcgcattcataaatagtgcatacacgcccagggtcacaaaaggtggtacagataagcaaaattaaccagctacgtacctaaccatggttcggtcgatagctcacaa

SEQ ID NO: 93743 - DNA, 668 bp, Oryza sativa
  unsure (1)..(668): unsure at all n locations
  Clone ID: PAT_MRT4530_92098C.1
ctcactctctccctccgtgccgtcctccacctctgttcctccctccctccacgctgctccggcactctctccatctgcgccgccgtttgcctctcctccctctccgagccgngccgcgcacaccaccgtcgcgnactgccacgacccttcctctccctctccttcagttctcggtgagtcggcgatggtgatggcgacgggaggtgggcggcanggatctgacggcggggtcacagggttgcgtggatccagcggccccaggccccacgatggcgacgtggtcacgggtgggagactgggagagcttcagcgcggggcatagggcgtggatcgacgacagcgtgcccctccctcctggatctggtgtcggcgggtctgggcggtggatccgatggggccctcagcaacaaagcaacggggtcgcaggccaccgctagaagatctccggaggtcattgggtccggccgtgggagcgccgtggtgactctgccctnactcccctcntctcagatccggcgacgacgacccagccttcccctgccctccntntntnagatctgatgccgacgaaactgcatttccgttccctntcggcgacgagttgttgctcatgttgttgttcatcatgctatattgtgacatgttgttcttggaaaaaannttnaaaa

SEQ ID NO: 93744 - DNA, 2458 bp, Oryza sativa
  Clone ID: PAT_MRT4530_92099C.1
atggcgcaaccgcgacgcaatgaggaggatgtgctcgtgggcttcaccgttgacgagatactgcgacggaccgagggacagatggacgctaggatgctggactccaacattggcatgatctctatggtcgtgcactacttcgtcctgctaccgcttgttgacactagcctcctcacctatgcattgaaagcgagccgtggcagcttcaaccgcatcagcagcctccccgatgtgcacttgcatgacatcgtgtcccacctccccgccaaggactcgcccctaacaaagcccattactgagcggaaccacgcgcagccgccagctaaaaccctagctcatctccctccaacgcctccttcctctttcctcctcctcccctcctcggcccttccttcccttcttccctcggcggcggcggcggcggctagcaatcgcgaggaggagaagatggtgaagaagagcaagaagagcaagagcaagcgcgtgacgctgcggcagaagcacaaggtgctccgcaaggtgaaggagcaccaccgcaagaagcgcaaggaggccaagaaggaagggaagagccacaggaagaaggtcgagaaggaccccgggatccccaacgagtggcccttcaaggagcaggagctcaaggccctcgaggcccgccgcgcgcaggcgctccaggagctcgagctcaagaaggaggcgcgcaaggaaagggctaggaagagaaagcttggattgcttgaggacgaggacattgctaatttggcctctgcagcttctgctcagggcagcgagtttgcagagaaggatgcagcaaaggagaatgcctctttagacgtggttaagagccaagatcattcagagagagccttctacaaggagcttgttaaagttattgaagcgtctgatgtcattcttgaggttctcgatgccagagatccactgggcactcgttgcattgacatggaaaagatggtcaggaaggctgatcccagtaaacggattgtgctacttctcaacaagatagatcttgttcccaaggagtcagtagagaaatggcttacgtacctaagagaggaaatgcctactgtcgcatttaagtgcaatacccaagagcagaggacaaaactgggatggaaatcatcaaagattgataaatcaagcaatatcccacaaagcagtgattgtcttggtgctgagaacctgatcaaattactcaagaattattccaggagtcatgagctcaaactggcaattactgtgggtattgttggtcttcctaatgttggcaagagcagtctgattaacagtttgaagaggtcccgtgtggttaatgttgggtccactccaggagttactagatcaatgcaagaagttcagttagacaagaaggtgaagctgctagattgtcctggtgttgtgatgctgaaatcttccaatagtggtgtatctgtggcccttcgcaactgcaaacgagttgagaagatggaagatccaatcagtcctgtaaaggaaattctcgatctatgcccgcacgagaagctgctatccctttacagggttccaacatttacttcagtggacgatttccttcagaaagttgccacactccgggggaaattgaaaaaaggtggtatagtggatgttgaagctgctgcaagaattgtacttcatgactggaatgagggtaaaataccctattttacggtaccacctaaaagggatgctgtagacgactccgatgcagtaattatttcagagactgggaaagaatttaacattgatgaaatttacaaagctgagtcatcatatattggtggtctgaaatcactggaggagttccgtcacattgagattccatctaatgccccaccgcagattgacgaagagatgctagaggatggcaagaagcagaatgaacctgcgcaggaaaaccatgatgagtcgatgtccgatgcaaatgagcgtgaaggagccaagacggccagcgcgagcacacagaatgacaagctgtacacagcagagggaatacttgatcctcgcaagaggaaagccgagaagaagaggcgcaaggcaaacaagttcagcgtgctgaccgacatggatgcagactacgatttcaaggtggattatcagatgaaggatgccctggccgaagagggcaacgatggtggagatgaggagcccaaggaagctgaccctatgactggtgtcgatgatgcgtgaactgatggaactcggcagattgagaatacgaagtagatcatataattataatatgatggtggactgccatcccaagttttgtaccctattagttgaatgagagaagataatggacgctgcttgattcacatagccactgagctggaatcagaattttttgcccatatgcatgcaatggttgcaaaattgcaattcctgcaccagcgatcaaaaaaaaaaaaaacccccccacccc

SEQ ID NO: 93745 - DNA, 261 bp, Oryza sativa
  unsure (1)..(261): unsure at all n locations
  Clone ID: PAT_MRT4530_9209C.1
atgaacattgctttgttggcaaaatggattttcaaactagaatctccggatcaaagtctgtgtacttccctcctaaggaacaaatacctncaagagggtggagtgttccagtgcagagctgaggagggctcccaattctggaagtgagtgctaagcactagagattgggtgaaactgggaacagaatcactagtgggagatggtagacacagtttattttttgaaggatgtctaggttcaccctnatcctttaaaaaacat

SEQ ID NO: 93746 - DNA, 366 bp, Oryza sativa
  Clone ID: PAT_MRT4530_920C.1
atggcgaaggcaaaccgcagcgtggagcacggcacgatgaggtcgtcgtcgacggagaagatggcgtcggaagggccagatccagcggcagcggcggcggatcccaggcacacgccgcgccgccgcgaggccttcccggcacgctgtgccgcctcctcgcaccggagacgggccgccgctggggtttttggccccgccaccgccatcccagcgtccacgcggttttcggcggcggcgaggcggctgcaggtgtcggcgtcggcctccttgttcttcatcttcctcctcgggctcctttgcgtcagcagtaggggtctcgacgcgaggagaggagatcgtggcgatattggggtgggggtgaggtag

SEQ ID NO: 93747 - DNA, 544 bp, Oryza sativa
  Clone ID: PAT_MRT4530_92100C.1
taagaagatgagtaccatctctgcgctgttgttgttgctgctgctgctgctgttgctgctgttgctgctgctgctgttgctgctgctgctgctgctgctgtgctgctctttgtagcaacatttgttgcatttgtatatgctgtggttgctgttgtcgctgttgaggaggttgctgctgctgctgctgttgttgctccctggctttcatgtgctgagtttcaatatatgaagccgcaacatctgaatgcttctcatttgtccttgctatgaaaatatcccaaaaaactgaccaccactcaaaaagaaaaccaccaggagcatcaatcgcaactggatccgaagagaccttcccttctgcttggaaggcctttgcagttgcctgcagatttctcttcataaaatagtcatatatgtagacatccagcatcttatccgcctcccagttcgtctgcgacatggctaccccaaacacggcggcgcgcccgcccgaaccccaccaaaccctagaagcgccccccacccccacccccaccgccccttgccc

SEQ ID NO: 93748 - DNA, 3224 bp, Oryza sativa
  Clone ID: PAT_MRT4530_92101C.1
gggtccggttcacgaattcctcgtctccacctctctctccctctctctccgctttctccccctttcctccactcgcctcacgccacacccctctctcccgaccaccacccgcctccgccgccgcctccgcctcggttcgggtcggcttggctgctccggcgtctgttggacggtgggcgcggcggcggcggcggccgcgggcaaggggcggtgggggtgggggtgggggcgcttctagggtttggtggggttcgggcgggcatgccggaggtggggttctacaatgtggtaatatcacgaagatggaaactggagcagtggctggatgtctacatatatgactactttatgaagagaaatctgcaggcaactgcaaaggccttccaagcagaagggaaggtctcttcggatccagttgcgattgatgctcctggtggttttctttttgagtggtggtcagttttttgggatattttcatagcaaggacaaatgagaagcattcagatgttgcggcttcatatattgaaatccaccacaagcagactcagcacatgaaagccagggagcaacaacagcagcagcagcagcaacctcctcaacagcgacaacagcaaccacagcatatacaaatgcaacaaatgttgctacaaagagcagcacagcagcagcagcaacaacagcagcagcaacagcagcagcagcaacagcagcaacagcagcagcagcagcaacaacaacagcgcagagatggtactcatcttcttaatggtactgcaagtggacttcctggaaacaatcctttaatgcggcaaaaccagagtactgcaaatgttatggcaacaaaaatgtatgaggagaggttaaagttgccttcccagagagatggtttggacgaggtgtcaattaagcaaagatatggagagaatgctggacaactacttgattcaaacgaagcgttgttgaaagcatctgcaagtggacaatcttcagggtacctgctgaatttgtgaattaagcaaattttgcatggtactgttggtggtctgtcaggcagtctgcaacaagttcagtccaggagtccacagattcctgggccagctcagagtatcaagacagagatgaatcccattttgacaccaaggtcagcaggtcctgaggggtcatttattggtgtccaagggtctaatcaagctggaaacaatttgactctgaaaggatggccactcacgggacttgaacaacttcgctctggacttctgcagcagaagtcatttgtgcagaatcaacagcaattacaacagcagattcattttcttaccccgcaacagcagcagcagcttatgttgcaggctcagcaaaatatggcttccccaacatctagtgatgttgacagcagacgattaaggatgatgcttaacaacaggaatgttgggcagacaaacagtggtggtgatattattccaaatattggttctcctagtctaagtggtggagatgtagatatcctgataaagaagaaaattgctcagcagcaacaattattacagcagcaaagcaacagccagcagcatccacagcttcagcagcctgctgtctccagtcagcagtctcaaagctcaaatcagtttctccaacaagaaaaaccaggaatcggaactatgcctgttgatgggggcatgccaaactctttcggtggagttgatcaaactacaaagaagaggaagaaacctggttcatcctctggtagagccaatagttcaggaactgcaaatactgctggcccttctccaagttctgcaccatcaacgccttccactcatacaccaggagatgcaatgtctatgccacagctgcagcagaatggtggttccgcaaaaccattggtaatgtttggctctgatggtgctggaagtttgacgtctccagcaaatgcactggctgacgtggatcgtttgctagaagatggttcattggatgaaaatgttgaatcttttctatctcaggatgacatggaccctagggattcattggggcgctccatggatgctagtaaagggtttggttttgctgaagttgcgaaggcacgtgcaagtgcaaccaaagttacctgttgtcacttctcctctgatggcaaactgctcgctactggtggacatgataaaaaggttcttttatggtgtacagagcctgctctaaagcctacatcttcattagaagaacattcggcattgattacggatgttcgatttagtccaagcatgtcacggcttgctacatcttcctttgacaaaaccgtgcgggtttgggatgctgacaatacaagttattcactccgtactttcacgggtcattcagcatctgttatgtcacttgacttccatccgaacaaagaagatatgatttgctcctgtgatggtgatggtgaagtccgcagctggagcataaataatggtagctgcctgacctttgttaaggtctttaagggaggtgctactcagatgcgatttcaacctcaaaagggaaaatatcttgcagctgcctcagagaaggccatctacatacttgatggagagacacaacttgcttgtagaaaccctctgcaggggcacacaaagaatattcactcactttgttgggattctaccggtgacaatctggcttctgtcagtgaagatagtgtcagaatatggtcgtttgctcctggacatgacggtgaatttgtgaatgagttgagttgcagcgggaacaagttccagtcatgcgtttttcacccctcttacccatatttgctagtaattggatgctacgagtctttggaactctgggacattagggagaagaacgccatgacggtccacagtgctcatgatggtttagttgcagcgctagcagcatcgagcgcaacaggcaaggttgcctcagtaagccatgataggtttgtcaagctctggaaatgacttgctccaggtgaccacatgacaaaagagggtagctaacaaaaaaaaaaaatcttgaaccgctttgggtgcaagaactaacctggtttgtgttttgtggttgtcttcagttgtaccgtgtatgctgctctattagcttctgaagtttgtaactctgtagaaatgtttgttggcgtgctgtaactctcaacatgtctctgatttgtactgatcataagttacaaagtctgttagtctttttccttaaaaaaaaaaaaaaaaaaaaa

SEQ ID NO: 93749 - DNA, 897 bp, Oryza sativa
  Clone ID: PAT_MRT4530_92102C.1
atggcgcacgcgcgcgcccaggcgatccgcgcgctgctcgccaggtgctcgacggaatgcccccgccgcgccgccgcctcgtcctgcatccgccgcgcttctctcccttattgttccccaggttcctatccccggagcctcctccctgcggtgcgcgcggctggcgcggattggacgcgctctctcgcgagcagggcgcagggcggcgctggcgcaggcgaggccggcgccgaggagggtgaggcgcaggagtggatggcggagtgggaggaggaggaggaggaggaggaagatgtcgagcccgagatcggtgacggtggcgacggcggtggggtcgccctgaggggcgtcgagtgggggaagcgcgctctggcggcggccgaggaggttcttggcgagcacttcggcgacgacgttgcgatgttcgccttcaaggtgtcgcccaagggatacgtctacgtcaggcttgacaagctcaccaacagatatgggtgccctggtatcgaggaaatcgagagttttaataaactctacaagcagaaactggacgagctaatcgaacaaggcgaaataccgctggacctggcaattgaggcaagagccgaacgacttctcaaggtgcccaaggatctggatcgttttaaagatatggccatgagggtgcaataccttgttgaaggcgatgatgtcgtcccgaagcagatcctgcagaaggatggaatcttcttgctcgagtctgttgacattcaggcagaacattgcatctggaagctggcagatgtcaaggagaaccgagctgcagctgggaaaggaaggccattgaacaggaaaaaaagggactggaggctgcaaacttcgttccaagcagtgaagaaggcaacactatacttggactaa

SEQ ID NO: 93750 - DNA, 159 bp, Oryza sativa
  Clone ID: PAT_MRT4530_92103C.1
atggcgacaatgaccactcggggactacggattggcggcgggtcaccatacccactagcaagaagtgttggggagcaccagatccgccgcctggcgctgcccatccaccgcgacgacgaccacgacatcaagtgtgtcgaggatgacagtgacctctag

SEQ ID NO: 93751 - DNA, 488 bp, Oryza sativa
  Clone ID: PAT_MRT4530_92104C.1
tcgcctcaggagaggagagcatctcctgcatctgcggcctcccccatcccactgctgctgctgctggtttgaaaccaaggcgacctcctcctgtagtagcgaggaggagaggagaggagggagaggcgggttcttggctcctggggggccgaatcgcgggggttcttgcctgcccggatcgatccggcaatggatgcggctgccggaggcgcgccgccgcggcccgcggccggaatccgcgtccgggtgccactggtagagtctgtgtcttgttactgcagggtagatggaggtcttaaaactgttgtgagtgctaggaagtttgtccctggtgcaaagctgtgcatgcaacctgacattaaaccaaacaagcgcaagtcaaggagctcacacaaagagaggtgccgaactcaggcaccacttctacctggccttcctgacgacctagctattacctgcctcatgcgggtccctcgacttgagcacac

SEQ ID NO: 93752 - DNA, 1757 bp, Oryza sativa
  Clone ID: PAT_MRT4530_92105C.1
cgctttttgatcgaagccaaaccaacccaccctcccaggagaggagagcatctcctgcatctgcggcctcccccatcccactgctgctgctgctggtttgaaaccaaggcgacctcctcctgtagtagcgaggaggagaggagaggagggagaggcgggttcttggctcctggggggccgaatcgcgggggttcttgcctgcccggatcgatccggcaatggatgcggctgccggaggcgcgccgccgcggcccgcggccggaatccgcgtccgggtgccactgtatatgacaggccaaacctaccaaggtggtagctgtaggggtgtaagtgggtcagccgcgaacccacttataggtcaaaataagtgggtttcgctggttgccacttacacccctaggagagttacttcttgtggttttgtttcacttatgctgttccacattcaggtagagtctgtgtcttgttactgtggttttgtttcacttatgctgttccacattcaggtagagtctgtgtcttgttactgcagggtagatggaggtcttaaaactgttgtgagtgctaggaagtttgtccctggtgcaaagctgtgcatgcaacctgacattaaaccaaacaagcgcaagtcaaggagctcacacaaagagaggtgccgaactcaggcaccacttctacctggccttcctgacgacctagctattacctgcctcatgcgggtccctcgacttgagcacacaaatcttcggttagtctgtaaacggtggaaccgactgttatctgggaactattattattccttgcgtaagaaacttggcatggcagaagaatgggtttttgtcttcaaaagggaccgtgatcggaagatttcttggcatgcctttgacccagttcaccaggtgtggaagtcactccctccagttccagcagagtattcagaggccgtgggctttggctgtgctgttcttagtggctgctatctgtacctgtttggtggcaaagacccagtccgagggtctatgaggcgtgttgtattttacaatgctcggataaacaagtggctccgagccccagatatgctacaaaagcgtcactgctttggttcctgtgtcataaacaaccgcctctatgttgctggtggggagtgtgaagggatacaaagaactctaagatctgctgaattttacgacccaaacaggaatagatggtcttacatcagtgaaatgagcacgggaatggtaccttttattggagttgtatatgatggcaaatggttcctgaaagggcttgattctcatcgtcaggttgtgagtgaggtctatatgccaacatccaacgtatggtcagtcactgctgatgaaatggttacgggctggcggaatccaagcatttgctttaatggacgtctttattcagcagaatgccgggacggatgcaagcttagagtctatgatagggacacacgatcgtggaccagattcatggacagcaggcgccatctgggcaattcacgagcttttgaagctgcagctctggtctccctaaatggaaagatctgcattatccgcaacaatatgagcatcactcttgtcgatgtctcaaacacaccaacagttatcgagattaacaatgctcacatgtgggatgtttttgctcggaagggccagcacaggtctttcatagcaaacttgtggttcaccattgcgggtcgtaatttcaagactcacattatccattgccaagtgctccaagtttga

SEQ ID NO: 93753 - DNA, 163 bp, Oryza sativa
  Clone ID: PAT_MRT4530_92106C.1
gcatcgtacacctcgacgagcaacgcttctcttcgcgcactgtccatcaccactcgcatctcatgcggagcggacggcacaggcggcgagcggcacgtctctccgccgtcactaccgctccgtctccccgacgcgcgtcaagctcgccggcggcggagcacgc

SEQ ID NO: 93754 - DNA, 129 bp, Oryza sativa
  Clone ID: PAT_MRT4530_92107C.1
atggacggcgccgtcggcgagcccccgtccatggctgacgctaccattttggtgcacgacatcggctgcaatttcatgggctccaaccgaaattcggcggcagttgagacctgtgtcctcggcggttga

SEQ ID NO: 93755 - DNA, 801 bp, Oryza sativa
  Clone ID: PAT_MRT4530_92108C.1
atgggggttgtcagcgacggcgtgatgattgctccggccgccggcgactcgccggtcgccgtcgccggcagcatccgcgcggccaccaccacccaccaccacacccctcgtctccgcaaactcgacgcgccactcgacagcgaccccgcagccgatccatcccgccgccgaagcagcagcaaccgccacggtgcgccgccgccgccggtaccgatgtcgacgagctccggcgccgactcgtccccgcccgtctcgggcctcgactacgacgacaccgccctcaccctcgccctccccggctcctcctcctcctcctcctccaccgccgaccccgaacgcaagcgcgccgcccacgccgaccacgccgacgccaagccgccttccccaaaggcgcgggcggtggggtggccgccggtgagggcgtacaggcggaacgcgctgcgggaggactccgcgagggcgaagctggtcaaggtggccgtggacggcgcgccgtacctgcgcaaggtggacctcgcggcgcacgccggctacgcgcccctcctccgcgcgctccacggcatgttcgcctcctgcctcgccgtccgcggcggcggcggcggcgacggcgagggtacaaagctcgtcgacttggtcaccggcgccgagtacgtgcccacctacgaggacaaggacggcgactggatgctcgtcggcgacgtcccctggaagatgttcgtcgagtcctgcaagcggatccgtctcatgaagagctccgaggccgtcaacttatgtaagaacttgcgatccaatccactataa

SEQ ID NO: 93756 - DNA, 2022 bp, Oryza sativa
  Clone ID: PAT_MRT4530_92109C.1
atgccaccaatactaccaagacctggattaaaaatggaagactctccttgttatgtttgtgggaaaattggacattttgcaagactatgccctaatcgtcaaaatatgggaggccaaacttcttatcagaaaccatctactacaggttttataaagaaaaatcctccaataattaagagtggacataatcttggacgtggtcaagtacatcatattaaagcagaagaagctcaacaagatcctaatatattgatggatatcattttgggcatggattggttagccaagaataatggactgatcaattgtgcaacaagagaggttatccttactgatgaacaaggaatgaatacaaggataatagttaaatccaatctatctatggaacaacatatgacagacatttgtatgcttaaaccaaaagaagaagttccagtggtgcaagaatatttcgatgtatttcctgaagaactaagttcattacctccagatcgggaaatagaatttattatagaattacttcctggaatggcacctatatcaaaaagaccctataggatgccaattaatgaattggaagaattgaagaaacagatagctaagctgcaagaaaaaggctttattcgaccaagttcttcagcttggggagctcttgtattattcgtaaagaagaaagatggaagtttaagaatgtgtgtagactaccgggctttaaatgaagtagctattaaaaacaaatatcccttaccaagaatcgatgatctatttgatcaattaaaaggagcaagtgtattttctaaaatagatcttcgatcagcatatcatcagttgaaaattaggcaagaagcatttggattaaccaatgcccctgcctatttcatgaatcttatgaacaagatatttatggaatatctggatcaatttgtggttgtatttattgatgacattctgatatattccaaaaataaggaagaacataaacaacacctacgaatgatggatcttaatcttcggcaaagaagatggttagaattaattaaggactacaatttggaaattctataccatccaggaaaagccaacgtagttgctgatgccttaagccgaaaagctaattgcaatctacaacaagaaataatatcagaacaattgcaagcagaaatgcttaaactaaatctgggtattattaagtttgaagaattaaacactttggagttaaaacctaccctaatggatcaaataaaagaacatcagaaggaacattctgaaatacaaacttttaaggaacgaaaggtacaaggaaaggctgcagatattaccgaagacctggaaggaatattttggtacggagatagaattgtcgtaccacaatcaggaaacttgaggaaggtaatactaaaggaagcacatgattcagcctactctttacacccaggtagtacaaaaatgtaccatgatttgaaagacttatactggtggccaaatatgaaacgacatattgcagaatatgttgcactatgtcatgtttgtcaacaagttaaagcagaacaccaaaagcctacaggattattacaacccttacaaatacctgaatggaaatgggatgaaataggaatggattttattactggattacctaaaacttctactggatatgactctatatgggtaatcattgatagacttacaaagactgctcgattcattcctgtgaaaacaacttatactggagcacaagttgctgaactctatatgacaaggataaaattacattatgaattaggaagttatctggatttcagtacagcatttcatccgcaaatcggaggacagacggaaagactaaatcatacattagaagatatgttaacagcctgtggtctagattttgctgctagttgggacaaatgtctaccttatgcagaattttcatataacaataattatcaagccagtttaaaaatgtcaccacatgaagccttatatggaagaaaatgccgaacaccattgatatggacataa

SEQ ID NO: 93757 - DNA, 1368 bp, Oryza sativa
  Clone ID: PAT_MRT4530_9210C.1
atgctccgcgccgctcgcccccgccgagccggcgcgctcctcctcgccgccgcggccgccgcctcctcctcaggagcgctcgcgtacgaccgccgcggcggcgacggcgacggcgacggtgacggtgaagccttctccaccaccaccaccgcagtccgcatctcggcgtcctcgccgctccgccgcgcgctgtcctccgcggcctcggggatcctcccggggggcagtgcacacctcctcccgtcgccgctccctctcggtgaagaagatcttaatgtgtacagtttacgtgcagggttttccttcctaaatttcttcacatctgcatcaaattggagtgcagggtttcccacccaaaattccttcgcatctgcgtcagttccacccactaatttgagcaaccagagctctgatggaaactcagatgattcaaaatgttgcccaggatgtattaaccgaaatacaatcgccaaggctgcagctgcagttggtcctgctgttgtcaacatttcttctacacaagaaactcatggatgggttctagagaagagcattggatctggaaccataatagacccagatgggacaatattgacatgtgcccatgttgttctagattttcaaagcacaaaaccaatcttgaggggaaaggttagtgtgactttgcaagatggtcgtgagtttgaaggcactgttctcaatgctgatcgtcactctgacattgctgttgtgaagattaaatcgaagacccctttaccatctgcaaatcttggatcatcatctaaacttcgaccaggtttggaaagaattagaacttctacgttgattactttgaagttattatttgatgaattagattttctctttaaatttggaatcctgaaggatgaaaaaggaaactctggtggtccacttgtgaatcttgacggtgaaattgtcggagttaatgtgatgaaagtttgggcagctgatggtttgagctttgcagtaccgattgactctattgtgaaaatagtggagaacttcaagaaaaatgggagagttgtaagaccatggcttggtttaaagatgcttgaccttaacccaatgatcattgcacaacttaaagaaagatcaagttcttttccagatgtaaaaaatggtgtgcttgttccaatggttacaccaggatcaccagctgaacatgcaggatttcgtcctggggatgtggtcgttgaatttgatggtaaactggttgagagcatcaaagagatcattgatatcatgggggacaaggttggagtgccatttaaagttcttgttaaaagggcgaacaatgtaactgtgtctttgacagtgataccagaggaagcagattctagcagatga

SEQ ID NO: 93758 - DNA, 2889 bp, Oryza sativa
  Clone ID: PAT_MRT4530_92110C.1
atggatgccgaagactggctaagggctattgaaaagaaactaaccttggtcagaacaaacgaacaagagaagataacctttgcaacccatcaactagaaggaccagccaatgaatggtgggaagcatatcaagcttctatagaagatcctacacatattattacatggatggaatttactacagcttttagagatgcttttatacctacagctgtgatcaggatgaaaaagaatgaatttcgaagattgaggcaaggttttatgacaggacaagaatatttgaataaatttacacaactagctcgatatactgcctcagacattcaagatgaaaaagaaaagattgaaagatttatagaaggattacatgatgaacttcaaggatcaatgattagtcaagatcatgaaaattttcaaagcctagtcaataaagtggttaggctagaaaatgatcgtagaatggtggaaggactccgtaagagaagaatgaatttacaacgacaatcgccaactagaagttcactacaagttcggaggccttatccatttaaaccatctctacccaatccaaagccaggcatgccaccaatactaccaagacctggattaaaaatggaagactccccatgttatgtttgtgggaatattgggcatttcgcgagactctgccctaatcgtcaaaatatgggtggccaaacttcttatcagaaaccatctactacaggttttataaagaaaaatcctccaattattaagagtggacctaatattagacgtggtcaagtacatcatattaaagcagaagaagctcaacaagaccctaatatattgatggacatctatatgcgtataccaaaagaagaagttccagtagtgcaggaatatttggatatatttcctgaagaactaagttcattacctctagatcgggaaatagaatttattatagagttacttcctggaacgacacctatatcaaaaagatcctataggatgccaattaatgaattggaagaattgaagaaacagatagctgagctacaagaaaaaggttttattcgaccaagttcttcaccttggggagctcctgtattattcgtaaagaagaaagatggaagtttaagaatgtgtgtagactaccgagttctaaatgaagtaactattaaaaacaaatatcctctaccaagaattgacgatctatttgatcaattaaaaggagcaagtatattttctaaaatagatcttcgatcaggatatcatcagttgaaaattagacaagaggacataccaaagactgcttttgtgataaggtatggattatatgagtttacagtaatggcatttggattaaccaacgcccctgcttacttcatgaatcttatgaacaagatatttatggaatatctagatcaatttgtggttgtatttattgatgacattctgatatactccaagaatgaggaagaacataaacaacacctacgattggtattggagaagttaaggcaacatcagttatatgccaaattgagcaaatgtgaattttggctagatcaagttgcatttctaggacatataataactaaggaaggagttgccgtggatccgcaaaagattaaagcagtaatggaatggaaaacaccaacctcagtatctgagataaggagtttcttaggacttgctggatattatcgaagatttattaaagatttttctgctattgcaaaacccatgactagattacttaaaaaggacatgaaatttgaaaggacaccagaatgccagagtagttttcaaagattgaaacataagcttactactacaccagtattaatcttgccaaacatccaaaaagattttgagatctattgtgatgcctctcgacaaggattaggatgtgttcttatgcaagaagatcttaatcttcggcaaagaagatggttagaattaattaaggattataatttggaaattctataccatcctggaaaagctaacgtggttgatgatgctttaagtcgaaaagcttattgcaatttacaacaagaaataatatcagaacaattacaagcggaaatgcttaaactaaatttgggtattattaagtatggagaattaagcactttggagttaaaacctaccttgatggatcaaataaaagaatatcataaagaagattctgaaatacaaacttttaaggaatggaaggtgcatggaaaggctgcagatattaccgaagacttggaaggaatattatggtacggaaataggatcatcgtaccacaatcaggaaacttaaggaagataatactaaaggaagcacatgattcaccctactctttacacccaggtagtacaaaaatgtaccatgatttgaaagacttatactggtggcccaatatgaaacaacatattgcagaatatgttgcactatgtcatgtttgtcaacaagttaaagcagaacaccaaaagcctataggattactacagcctttacaaatacctgagtggaaatgggatgaaataggaatggattttatcactggattacctaaaacttctactggatatgactctatatgggtaatcattgatagacttacaaagactgctcgattcattcctgtaaaaacaacttatactggagcacaacttgcagaactctatatgacaaggatagtatgtttacatggagtgccaaaaacaattatttctgatcgcggtactcaatttacttcacatttttggcaaaaacaacattatgaattaggaagttatttggatttcagtacaacatttcatccacaaaccggaggacaaacgaaaagactgaatcaaacattagaagatataataagagcctgtgctctagattttgctgctagttag

SEQ ID NO: 93759 - DNA, 356 bp, Oryza sativa
  Clone ID: PAT_MRT4530_92111C.1
gggttttggtacctgatcggcatcagcgctgacctatgttactttttattagctgaacacttggttttttcttcttaaagaaatcactcgcctcattctatttatatagattttatccgtctcctgcttcttatccttctccaaggagagctacaaggcgcgaaaggagtgctgtaaaggggaagggggttgggcggcttatgatgcttgagctttctttcctcccttatggcggcgcattggggcactagaaatcaaagaaatctgctatgttatgtgttatgagtttgggacccagctgctgatgttagagctcttttcgaaagagcagcttatccacgaaaaaaaaaaaaaaa

SEQ ID NO: 93760 - DNA, 1515 bp, Oryza sativa
  Clone ID: PAT_MRT4530_92112C.1
atgaatacaaggataatagttaaatccaatctatctatggaacaacatatgacagacatttgtatgcttaaaccaaaagaagaagtcccagtggtgcaagaatatttcgatgtatttcctgaagaactaagttcattacctccagatcggggaatagaatttattatagaattacttcctggaatggcacctatatcaaaaagaccctataggatgccaattaatgaattggaagaattgaagaaacagatagctaagctgcaagaaaaaggctttattcgaccaagttcttcagcttggggagctcttgtattattcgtaaagaagaaagatggaagtttaagaatgtgtgtagactaccgggctttaaatgaagtagctattaaaaacaaatatcccttaccaagaatcgatgatctatttgatcaattaaaaggagcaagtgtattttctaaaatagatcttcgatcagcatatcatcagttgaaaattaggcaagaagcatttggattaaccaatgcccctgcctatttcatgaatcttatgaacaagatatttatggaatatctggatcaatttgtggttgtatttattgatgacattctgatatattccaaaaataaggaagaacataaacaacacctacgaatgatggatcttaatcttcggcaaagaagatggttagaattaattaaggactacaatttggaaattctataccatccaggaaaagccaacgtagttgctgatgccttaagccgaaaagctaattacaatctacaacaagaaataatatcagaacaattgcaagcagaaatgcttaaactaaatctgggtattattaagtttgaagaattaaacactttggagttaaaacctaccttaatggatcaaataaaagaacatcagaaggacattctgaaatacaaacttttaaggaacgaaaggtacaaggaaaggctgcagatattaccgaagacctggaaggaatattttgaatatgttgcactatgtcatgtttgtcaacaagttaaagcagaacaccaaaagcctacaggattattacaacccttacaaatacctgaatggaaatgggatgaaataggaatggattttattactggattacctaaaacttctactggatatgactctatatgggtaatcattgatagacttacaaagactgctcgattcattcctgtgaaaacaacttatactggagcacaacttgctgaactctatatgacaaggataaaattacattatgaattaggaagttatctggatttcagtacagcatttcatccgcaaatcggaggacagacggaaagactaaatcagacattagaagatatgttaacagcctgtggtctagattttgctgctagttgggacaaatgtctaccttatgcagatttttcatataacaataattatcaagccagtttaaaaatgtcaccacatgaagccttatatggaagaaaatgccgaacaccattgatatggacataa

SEQ ID NO: 93761 - DNA, 840 bp, Oryza sativa
  Clone ID: PAT_MRT4530_92113C.1
atgaccgacgggccctcgaccaccggcgattcgccgccgccgccgccgccggagagcggcggctccatctcctccatggttgcctcctctgcggagagcggcggctccacctcctccatggttgcctcctctgccgcctccgctgcggccgcggccgcggatttcactcgccgtggcgaggccttcggcgccgatgtggcctccgcagctagggctgccatggacaccgccatcgcccactctcagtcaaccgccctcgccgccgcagaagctgcctccttcggccaagagccgacgccctcagccgccattccccaggcctcacgctcatcgcaaaggaggagttcgaatggataaagaaggagtacacggttcacgagcaggtggtgttcggcaagatcaaagagggtgccatcatggccatcgagcatccgggttgtgctcttcaaaaggccaaggagctacctgatccaacgggtgcgacgcatatttgtaagcaaggagaccctactttctggcatccaagctggcgtgaatcacatgagacaaactgtcaatcttgtgtccaatgaaagccaaaagttgctgcattggatttgctgtctacttgtttcagggaagaagggcgtgccattcaaaagcggaaattgcctcatcttgaatttgacatataatgagttgtgtcctataggtctcaagagcattctcaatcagcttcccagagcacatgcatctgagtttcaatcagagatatctggcctagcctctcaggtgaagaaggagaagagagtacttaacaacaccctcacgaagattgcgaactatggtgtccctatctga

SEQ ID NO: 93762 - DNA, 2568 bp, Oryza sativa
  Clone ID: PAT_MRT4530_92114C.1
atggaggcgctcgtcggcaagtatactccgtgccttgccaaaggtcggcaagctgttggaatccatctagcttttggagatgcttttatacctacagctgtaatcaggatgaaaaagaatgaatttcgaagattgaggcaaggttttatgacagtacaagaatatttgaataaatttacacaacttgctcgatatgctgcctcggacattcaagatgaaaaagaaaagattgaaagatttattgaaggattacgtgatgaacttcgaggcccaatgattagtcaagatcataaaaattttcaaagcctagtcaataaagtggttaggctagaaaatgatcgtagaatggtggaaggactccgtaagagaagaatgaatttacaacgacaatcgccaactagaagttcactacaagttcggaggccttatccatttaaaccatttctacccaatgcaaggccaggcatgccaccaatactaccaagacctggattaaaaatggaagactccccatgttatgtttgtgggaaaattggacatttcgcaagactctgtcctaatcgtcaaaatatgggtggccaaacttcttatcagaaaccatctactacaggttttataaagaaaaatcctccaattattaagagtggacctaatcttggacgtggtcaagtacatcatattaaagcagaagaagctcaacaagatcctaatatattaatgggtgcctctcattcctttttatctgcaaaagccagttggaatcagtctttacctaaagataatttagataaggctatgctaatacactcacctggaggaaccatattagtatcatctatttgtagaaatgtaccaattaaattaggagatcaaatatttttaattgacttgatggtactacctacccaaactatcgatattactttgggcatggattggttagccaagaataatggactaatcaactgtgcaacaagagaggttatccttactgatgaacaaggaataaatacaaggataatagttaaacccaatctatccatggaacattatatgacagacatctgtatgcttataccaaaagaagaagttccagtagtgcaggaatatttggatatatttcctgaagaactaagttcattacctccagatcaggaaatagaatttattatagagttacttcctggaacggcacctatatcaaaaagaccctataggatgccaattaatgaattggaagaattgaggaaacagatagctgagctacaagaaaaaggagcaagtatattttctaaaatagatcttcgatcaggatatcatcagttgaaaattagacaagaggacataccaaagactgcttttgtgacaaggtatggattatatgagtttacagtaatggcatttggattaaccaacgcccctgcttacttcatgaatcttatgaacaagatatttatggattatctagatcaatttgtggttgtatttattgatgacattctgatatactccaagaatgaggaagaacataaacaacacctacgattggtattggagaaattaaggcaacatcagttatatgccaaattcagtaaatgtgaattttggctagatcaagttgcatttctaggacatataataactaaggaaggagttgtcgtggatccagaaaagattaaagtggtaatggaatggagaacacaaacctcagtacctgagataagaagtttcttaggacttgctggatattatcggagatttattaaagatttctccgctattgcaaaacctatgaccagattacttaaaaaggacagaaaatttgaatggacaccagaatgtcagagtagttttcaaagattaaaacataagcttactactacgccggtattaatcttgccagacatccaaaaagattttgagatctattgcgatgcctctcgacaaggattaggatgtgttcttatgcaagaaggtaaagtagtagcttatgcgtcaagacaactaagaccccatgaagataattacccaactcatgatttggagttagcagcagtcgtacatgcgttgaagatttggcgacactacttaattgggaatcattgcaagatctataccgatcataagagtttgaaatatatttttacccagacggatcttaatcttcggcaaaggagatggttagaattaattaaggactacaatttggaaattctataccatccaggaaaagctaacgtagttgctgatgccttaagccgaaaagcttattgcaatctacaacaagaaataatattagaacaattgcaagcaaaaatgcttaaactaaatttgggtattattaagtttggagaattaaacactttggagttaaaacctaccttgatggatcaaataaaagaacatcagaaagaagattctaaaatacaaacttttaaggaacggaaggtgcaaggaaaggctgcatatattaccgaagacatggaagaaatattatggtacggaaatttgaatcatcgtaccacaatcaggaaacttaaggaagataatactaaaggaagcacatga

SEQ ID NO: 93763 - DNA, 541 bp, Oryza sativa
  Clone ID: PAT_MRT4530_92115C.1
cccacgcgtccgcccacgcgtccgctcacgctcaacgcaaaggaggagttcgaatggttaaagaaggagtacacggttcacgagcaggtggtgttcggcaagatcaaagagggtgccatcatggccatcgagcatccgggaattgctgcaggctccacagcaattgctggaattgtgctcttcaaaaggccaaggagctacctgatccaacgggtgcgacgcatatttgtaagcaaggagaccctactttctggcatccaagctggcgtgaatcacatgagacaaactgtcaatcttgtgtccaatgaaagccaaaagttgctggatagagcagcaactgctgaaaaaagatttcagaaaggatggaacacactcagggaagaagggcgtgccattcaaagtgagctgaaccaaataagtgatattgagaagcaagcagtaggtctcaagagcattctcaatcagcttcccagagcacatgcaatctgagtttcaatcagagatatctggcctagcctctcaggtgaagaaggagaagaga

SEQ ID NO: 93764 - DNA, 835 bp, Oryza sativa
  Clone ID: PAT_MRT4530_92116C.1
ttctatagaagatcctacacatattattacatggatggaatttactacaacttttagagatgcttttatacctacagctgtgatcaggatgaaaaagaatgaatttcgtagattgaggcaaggttttatgacagtacaagaatatttgattaaatttacacaacttgctcgatatgccgcctcggacattcaagatgaaaaagaaaagattgaaagatttatagaaggactacgtgatgaacttcgaggaccaatgattagtcaagatcatgaaaattttcaaagcctagtcaataaagtggttaggctagaaaatgatcgtagaatggtggaaggactccctaagagaagaatgaatttacaatgacaatcactaactagaggttcactacaagttcggaggccttatccatttaaggcatctctacccaatgcaaggccaggcatgccaccaatactaccaagacctggattaaaaatggaagactctccttgttatgtttgtgggaaaattggacattttgcaagactatgccctaatcgtcaaaatatgggaggccaaacttcttatcagaaaccatctactacaggttttataaagaaaaatcctccaataattaagagtggacataatcttggacgtggtcaagtacatcatattaaagcagaagaagctcaacaagatcctaatatattgatgggtatgttcaccataaactctaaaccagttactattctatttgattctggtgcctctcattcctttctatctgccaaagccaattggaatcagtctttaccttaaagataatttagataaggctgtgctaataca

SEQ ID NO: 93765 - DNA, 432 bp, Oryza sativa
  unsure (1)..(432): unsure at all n locations
  Clone ID: PAT_MRT4530_92117C.1
ttttgcatttccattaaatggaaagacagtttgcagagtaagttatgaagggtccacttgcgcttcactatgcgaatnatgtttgatgcctcttgtgcaatgaatgcaacacaatgcaatcatataaagtaaaatgtataccatggttcataactttttactgtttgtgtgttcattggttatatttcaggccagtggacacaggacgagtaccaaaacttgtttgatttggtgaacttggacttgcgagtgaaagctcatcaagagtatgatgctggtaatcgtaagttaagagacaacattgcatgggagggctattagtgataaattgncaacccgnaatcacaagaattgctgccttaagtggtctaccngttagcatcaccnctgggtcagaaaaggcatctgggcagacactgatgattatcgctt

SEQ ID NO: 93766 - DNA, 161 bp, Oryza sativa
  Clone ID: PAT_MRT4530_92118C.1
ataaaatgtactattgctcagggggagtgttaatattgatatgcagttcacatagctagtacatatttgcagtttaaagataatattattagaacattattgttccagagcattgtgaatcatacttctaacatgaagaactatcatagattaccaaagca

SEQ ID NO: 93767 - DNA, 324 bp, Oryza sativa
  Clone ID: PAT_MRT4530_92119C.1
atgcggcctggagtgattaggccggaccggcggcggcgcagatggaacgggggaaccaccggattcgggggctgggtgggggctctctgcggccggccagatctagttcctcccggcgattcccaacgcctgaaaggctgcgtctggacccttggagggacggcggtgcgagcgggtggcgttcgccgacggctcggcatctccgcggacactggcggatcgatcgccgactcgccgtccacgacaactgcgccggggccgccgttcgtccgagcactccatgctgacgttgctctccttcgtgggccaagcccagtgcagccc

SEQ ID NO: 93768 - DNA, 271 bp, Oryza sativa
  unsure (1)..(271): unsure at all n locations
  Clone ID: PAT_MRT4530_9211C.1
cctgcagtacgtccgatcctgtcgccacgcgtccgacacatgagacattttcgtatttgctctccttgctttgttgcatgcaatgcctctgcgcggttgatcctttagcaaagtataggcaatcaactacagcgcattctatcagnacaggctacccagcagtgagtcgaaggacagatagcatagggacccctctggcaaccactcgttcattgaaaacaccatcatgcacacatgtgccacactcagctggaaacacaattcctaccag

SEQ ID NO: 93769 - DNA, 1324 bp, Oryza sativa
  Clone ID: PAT_MRT4530_92120C.1
ggacttcaaattgctgtatagaatgggttgtctgttaataacaaaaaatttttctaccttgatttatttcctgctacttttctttgcccacgctgcattgtgtggagtgagagcaagaacagttctggacatttgagcaacaagttgaatctaaacaaagaatataatgaaaatctatgtaaacaaaatgaatctgcatcttgttcaattctctcaagtacactaatgtttcgtagcagaaccgacggatttgcagatggggcaccaattcttttgccgaagccattgttggatgcaagcaagatgatagtaatgcttgcacgccatctcggccacctcctcggcaggtaaatattcctcctggcatattatgcatttgatatcaccatcttcatgacttgttgaagctgagggcacatagtggattctcttcagacaatttgacagttcatcctctggaaggccagtgctcacggtaccaattgtttcccctagagcaagcaattcctcataagacatgtcgtcgatgtccattctcattcctctatgcctatcactggaagcatcctcatcactttcatccacaccgaagcgccagtaaatcagcgagtctatcaaactgtgctccaaatgagatactgctatcaccacgatttctggcattgcttccatttgtgcctccatccttccttgtcttggaactgatcgatgcaatgtcttgaaattgatctactactactactcaaggaacctgcactagatgtgtttgatgatgatgggctactccctccactcaatgagcgcttcctcgacgaatttactctttctttcaaatggtccagaagatcctgtccagcagtttctcttctaggtctgttgccggtttcgctacaggtgccggctgcattcctcctgctgccataagccattcttccttgaggtaacagcctgttggatccactgacaagtagtgatctctgaggaatcactgcttctttggttggcctgcgcattttcttctctttgtcacggaaaagcttactgctacagccagtgcgcgtacagcaagcggtcgctttgtggcgcgggctatcttccctatatacaaggattgagccccctttggtcaatagaaggccaccaactgttctcctccccatggtttcgtccatattcaacctcccaatcttcttcttcctcttcctctgctgcgtgctccagctagaagggtagagagagagagagagagagccgaacaactcaactcgatgagagaggaggtctcaaaccctcaacaatgtctcgtgcgcttgcggacgcgtgg

SEQ ID NO: 93770 - DNA, 649 bp, Oryza sativa
  Clone ID: PAT_MRT4530_92121C.1
atgtcgatggaggacacggacgatgttccacagctcctgacagatgacgacctcgacctcgtcgacagacgagagaagcaaacctaccagatgttgaagaaccgatcgttcgctcacacccgagcatacgatcctgagctactccggaaaacagtgcaaggtcatactttgaaacatggagcagatgtgaccttagtattcttccaacccggttgtagaaatgaaatcctgttacctaacccggggtatcatttgtataactgttatgcactaaccattcccctgcagacgatagaggaatcccgtgcaggtgcgacacataggagtaaccgcagaatggcagcagatgaacaggaggattcaacgtactcaccacccggtcatgcttatgagagtggctggaaatcagctagagatgcctccggctgggcccaagccctacgtcatagcactggaggatctgcctagccgagtgccggcagttcctagtggcagatgcctcatgaggtgcgctgggggcacaccaactcagcaggctcaagtggcgtgcctccaacctccagctggtggtgctcgagttcctctcgctgggacaacagtccctcgaaggacacgtgatccaggcgcaggagtagcagcaaagtgttga

SEQ ID NO: 93771 - DNA, 380 bp, Oryza sativa
  unsure (1)..(380): unsure at all n locations
  Clone ID: PAT_MRT4530_92122C.1
gcaatgctcatcgatgtctctatcctgactgtgacaatggcgtataaccacagcaagctctcggagctgctcgtggctgtggcgctggtgcggctgatggtgctcgtgaccggcgccaaccccacggcggctgcgtgcggcgagaactactactgcggcgccgcacgcgcggcggatgggtgccagccctagcaggacgtggtgcaccaacgatacgatgacagggtgccgcgcgtacctgctgacacactgcagaaatttaaaatcccccgtggacgcaggcaccgaactacataaagtaaggggatcatcagagagagaatggatcgctccatgtctgcccnaagtgatagtataattactttngaaatatatgctgt

SEQ ID NO: 93772 - DNA, 229 bp, Oryza sativa
  Clone ID: PAT_MRT4530_92123C.1
atctctatcgctggcgcgtcggcggcgcggttcagacggtacggtcgggactgtcacggacacggacaccactgacacggcctactcttcgtacggtcagccgcgacgggcacttttcacgtcacacgtatcgacgcgctgcgtattctgcacgctggctgcggtctcgcgacttcccgcgcgcacgcaccagggtaactcgcgtcgcggccacgcatgagcacgagtc

SEQ ID NO: 93773 - DNA, 393 bp, Oryza sativa
  Clone ID: PAT_MRT4530_92124C.1
atgggcgacaacggcggggccaagcggagctgccgcaccgacgctagggcccgggcggcggggcggccagatctgacgcctggcggcggcggcggtagcggggccaggcggagttacggctgcggcgccgggccccgggctgcggggtggccagatctgacgcctggcggcggggccaagcggagctgcggcgccgacgcgggggctcgggcgacgatggagacgggcggagtgtcggcgctgacgccggggcggccgagaatcacccctcgtctcctccctcgggaatattcggtttttggtgtggaggctgaatgccacggctcgggcacagccaccatgggagatgggactcgctcgcagtcgcagcttccatctcttgcatacgcctag

SEQ ID NO: 93774 - DNA, 939 bp, Oryza sativa
  Clone ID: PAT_MRT4530_92125C.1
atggaggcggaggcggagacgacggtggccgtgacgacgggcggcgagggggagatcgtgagggggaggaagctgctgagccacggcaaggtgttcgtgggaggggtgccgctggggacgagcgagtccgagctccgcgcccacttctcgcggttcggcacggtggccttcgtcggcgcgcccaagaacaagcagacgggcgccgcgcgcggcttcgcgttcgtgcagttcgtcaaccccgacgacgccgccgccgccatcgccgcggggcccgaccgcaacgtcatccgcggcaccacgatggatatcaagttagcccaactaaagccatcagccggcggcccacaactcagtccaggtgaccagaagaggaagattttcgttggcggcttgccggtgtccgccaccgaaaagaagctcaaagaatacttcaacaaattcggcgaggtcaatcgggcaatcgtggtcatcgaccttaacacgaagatgcccagggggttcggcttcatccagttcgcatcggaggagtccacagcgagggcgctcaagaaggacaaacacttcctctgtggccagtgggtggaggtgagccttgcaatgcccaagcagcagaatgcagcttctggcactagcaaattgtcagttcaggctcgcccgttttatccgacgacatcatcaaacttcacaaccgccgctaattatcctgacgtcgttaatattgtccctatggtgacacctatgaactgcgtcatcagcaatgcttttaaccctcatatcggctttgaggtacccgggatgatacttagtgatggtgtgagcaattctgtcagtgctaattactcctaccagaacccctacttgggaggtggtggtgttcagcctcaaggctcggcggtgtatcttcaagcagcacattattatagtggtgtgatgatgtga

SEQ ID NO: 93775 - DNA, 1617 bp, Oryza sativa
  Clone ID: PAT_MRT4530_92126C.1
atgttattacctaggaaggatggccggatggatggatggatcgaagatagaagagagatcaagaaaaggaaaggccctttaggggaggaaatggctccagggaaagaggaggaaagatgcggtggctgccgcgatggtgtgggaagggtgttactattggagcgtcgtttttttcacgccaagaccaatcagtacaagactagtagagccatccagcctccctcgtcgtcgtcgtcttctccgcggcaggaagggcccggaaccaacggtggaaatcgcgcggcagcagcagcggtagtacagcacggcgcgcctactgccgcgcggtgggcctggggtggctgtcctacggcgatcgaggaggacgaacggacggaggaggaggagccgagagcgcctctggtctcgccacgcgcgggccctcgtggcgcacggcgactagcgggcgatccacccgcttgtcctcacgcgcgacccaccaccccacctcggatcgtactggtgctcgtgttgcgtccccagcggccagcgccagcggctgcctacacacgtgccctgaaaaaagagcgaaatcatgcacgcggatcgggcaaatgtgcggacgatatgctagcagaggcaaagcatcgctgtcgggtgccgaactgccgatcggccggttttccctttcacggctttcacctaagtgtcgagatatttaaccatttgccatatttagatgtgtgcgcactaaacatcgatcgccatatcttcagctcgcgcaccgcagagatagaattgagaattctctcctccaattaccatcctgcaagttggttgggccgacgactcaagcacacggatactatgctcaggcgttcagctaggcgtatgcaagagatggaagctgcgactgcgagcgagtcccatctcccatggtggctgtgcccgagccctgcacatgattgctgcaggtgcacgatgcacactgcacacagtggcccctgggtcggacgcagctacactgtactcactgctcagcttccaagtttggctacgagttcctcaggtctcggtgggacccacactcgtgctagaggagagaggggagaggggcgaggcagccgacgggctggaggaggaggcgatagcgggggaggagaagaggaggttggcgccaccgtcgtcgccgtcccggcaggtcaaagcgccacagccaacttgaggtcgtcgctggcgaggtcactccatggactgggagaggaggagaggcgccgaccgagggaggagacgaggggtgattctcggccgccccggcgtcagcgccgacactccgcccgtctccatcgtcgcccgagcccccgcgtcggcgccgcagctccgcttggccccgccgccaggcgtcagatctggccaccccgcagcccggggcccggcgccgcagccgtaactccgcctggccccgctaccgccgccgccgccaggcgtcagatctggccgccccgccgcccgggccctagcgtcggtgcggcagctccgcttggccccgccgttgtcgcccatggcgagctccgcccgtcgcgcgatagaggaaggggaaaggcatcggtggttgaggagagagggaggggaaaaagt

SEQ ID NO: 93776 - DNA, 686 bp, Oryza sativa
  Clone ID: PAT_MRT4530_92127C.1
ggagagaactagtctgagtttttttttttttttttttaagagaacaattcgtcaagctatttattcagctcaatttgggaagcacagtggaatatccaagtattaaatccaataaagcaaacatctgtttgctgccatcttattttttaatgcttcaagctgctacacctagagttcaggtttattgtgtaaacaaagcgacggagtagtatatctcgataaaaatttgccaaaaccagattacagcacttgtgcacgactcaccttttttttcctaaaagcgagatttttatttactattcaccgtgtttcagttgcagccttgcttccttttgctcaagacacattgcggctgtcaggattaagctggaaatttcatcccaatctttgatataaaaggaatgcatgcaataattctctatttgcacttttgaaatttaatggatgcaaggttaggcacacataacaagaggaaaatgcacccagcagctgctaggaaactcagcaaatttctttgttcagagatcatagtactactatgcagtttcagttattaatttccttttttccctttttagataaaaatccattaaacttctataagtggtgtctagctatgatcaatggtattagctgtgaaagtaatcaaatcatcaatctgaggaacttacttctgacagcaattc

SEQ ID NO: 93777 - DNA, 591 bp, Oryza sativa
  Clone ID: PAT_MRT4530_92128C.1
atggctttgatgtttattaagagccacactgctcaagaaatcattggaggtattgttgattctgacaatgcaaagacatacttagccaacattcaagagaatttcaaatcctcttctaagaattatgctagtacaatcattagcaagatgctttctagcacctataatggtaccatggtgcacgtttccaactcattacagggattcagtaccgtgcggaagaatgtagtgcgccaacaacgagtaattctggaccctctggccctacaactgatgttgaagaaagtgttgatgaaaataatgatgaaagtaatgagcatcaatagaattatgcgacatagaatgaagaagaaatatccaaaagaagatgctcaacgacatgtgaacaacgatgaaaatcagcaattaagaagatcacaacaggtaaggaaatttgccattcccgattatcatgaagtttatatgagtgaagatatagggaaggtagatggccctacctcatttaaagaagccataagcagtaaaaactcatccaagtggtttgaagaaatggaagatgaattaaagtgtgggatcagtagaagttcctaa

SEQ ID NO: 93778 - DNA, 348 bp, Oryza sativa
  Clone ID: PAT_MRT4530_92129C.1
atgtcctccgcccgccgtcgccagccgacgccgccgctcaccgctgccaactgttgcgaccaccaccgcccgccacccctccaccgctatcgcggccaccacacctccgtctccagcgcctccgcgccgtcgtgcccatcgccgccagattcggccacctccgcaccagtcatcgtccggctctaccgccgccagttccggccgtcgtggcatcggcgctgccagaaacctccccgccagatccgcgccggatctggcggcctcgtccactgccgccagtgcctgcaaacctctgccgccatccccccaaataacgccgcccgaacacactaccctgccgccgactaa

SEQ ID NO: 93779 - DNA, 108 bp, Oryza sativa
  Clone ID: PAT_MRT4530_9212C.1
atgggcaaatttgatcagctgggaggcccgggtggcgtcgtggatggggaacggcaggtgagcaacggggatgcgacagcggcggtgtggatggggaacgacaggtga

SEQ ID NO: 93780 - DNA, 407 bp, Oryza sativa
  Clone ID: PAT_MRT4530_92130C.1
atgaattgtaatttcagcagtaacctttttgagcaggaagctggagggagaggctttccatgggggtcgggccatgcgacggatgtcatcgctgattcaactactaggttcattctgctgatcatgtcacatctcgtcatcgccgtctgcaaagccaatgagtgcacccctcaggcctcagtgttggcatgctgtgcagatgcagttgcactgtgtactacctgtgatgcagaggttcactctgcaaatccacttgctcagaggcaccaagagtacctgtgctaccactcccagttgcctctggtttaattaggcagaagctgcccatggaagcgaggaagatgaagtgaactcttggctcctgctcagcagaggttctgatgacagaggttgtacacttgtactga

SEQ ID NO: 93781 - DNA, 3225 bp, Oryza sativa
  Clone ID: PAT_MRT4530_92131C.1
aattgctcatggttaaagcatagttagctaagaaaggtaatactaattctgaagaaatatctaatgtggatgaatccttttacactgaattttcccttaatacttggtgggttgactcaggtaccatggtgcacgtttccaactcattacagggattcagtaccgtgcggaaggtagcaaaaggggagcaaaacctaagagtagctgatagggcagagattgatgtgacggctgttagagacctcacacttagactccctagcggttacaatttaattttgaataatgctgtgtttgctccctctattaagagaaaccttatttcattgcaaagacagattatgagtgtcattttaaaaagagaacatgttacatttagtttgataataaagttatgggtcttgccttcgtgcgagacaaactctatttcttctctttggatgacactgtgatgaatgctacaaatgtctgtaatgataaagctgagacatcatcaaaattatggcactattttttaggccacatttctagggggagaattgaacgtatcattaaagaagaaatactcctctacttagatttttcctacgcagatcattgcatagattgcattaaggggaaattcaccaatacaataaagaaaggggccactcggagcacaagtccacaaaaaaataatgatcgttccattcagatatgattattcccgttatgactatatttacccccattaatgatcgttctgaatctcttgagaaatttaagatatttaggactaaacaagaagatcaacataatgccaaaattaaagttgtgagatcagatcgtggtggtgaatactatgggaaacatgctccatttggtcaaatcttggtccgtttgccttatatctctagcaacatggaatagttgcccaatatttatgcccgaagaacctcagcagaatggagtagcaggatgacacaaccgcacactcatggatatggtgcgcagtatgctaaatcattctactccgtcaagtaaattgtggattgaaggcttaaagacaactacccacattataaatagaattccaagtaagtcagtacctaagatctcttatgaattatggattggaaggaaaccgacattaaattatttacgcgtgtgggattgtcgtgcaaaagtcagaatatttaatccacaactaaagaaattagacccataagactatgagccatcatttcatcggatatccagaaatatctaagggataccaattttattgtctagaccatatcgctaagtttgtggagactagacacgttgtcttcttagaaaataatgaagtggagagctcacaacataaggagattaatcttgaggaaattaaaactaatgttccaattatgaaaatccaagagaataatattccatttatcaaacttgtgccatagaatgtagtgcgccaacaacgagtaattctggaccctctggccctacaactgatgttgaagaaagtgttgatgaaaataatgatgaaagtaatgagcatcaatagaattatgcgacatagaatgaagaagaaatatccaaaagaagatgctcaacgacatgtgaacaacgatgaaaatcagcaattaagaagatcacaacaggtaaggaaatttgccattcccgattatcatgaagtttatatgagtgaagatatagggaaggtagatggccctacctcatttaaagaagccataagcagtaaaaactcatccaagtggtttgaagaaatggaagatgaattaaagtgtgggatcagtagaagttcctaaggaggcaaaacaataggctgcaaatgggcctacaaaactaagctggactctaaagggaacatcgaacgattcaaagcaaggcttgttgataaatgtttttttttgcgtagataaggaattgattataatgatacattttctcctgtctctaagaaagactcatttagatatattttggctttagtagctcaccataacttagaacttcatcagatggatgcatagactgcatttctaaatggtgatttaaatgagaatgtctacatggcaaaaccagaaggttttgttgtggaaggaaagaccatttagcatgcaaattaaataaatccatttatggacttaaggaggcatccagacaatggtaccttaaattcgatgaagtaattaaaaatttttggattaaaggaaaatgtgatggacaactacatttatatgaagaataaaagtggaaaattcatcatactagtactctatgttgatgacattttgttagcaagcagcgataagaatttgctgcgagaaagtaaagaaaatctgtcatctaaatttgatatgaaatatcttggttaagcatcttatgttttgggcatggaaattcaaatagataggtccaaaggattgctaggattatctcaagaatcatatatttccagagtgttggaaagatataatatgagcaaatgctctacgacacctgccccaataataaaaggtgataaatttggttaattctaaagcccaacaaatgacttagaaactaaagaaatgaagacgaaaccgcatgctttgactgtcgaaatcagatttggcgttcgttactaggatgcttggtagatttttatctaatcttggattggaccactggaaaggagttaagaaggtcctccattatttgtaaggaactaagcattatatgctcacatataagaggtctgataagcttgtgatattagactattcagatattgactttgtagggtgcttaggtactaagaaatccacttcaggttatattttcactcttgtgggagagctatttcatggaaaagctccatgtagacgattattgtatcatctacaatgtaggcagaatctgtggcatgatatcatgtaacggggcatgcagtatggtttaagaatttcatcccaaaattaagagtggtcgacagtatagccaaaccactggcaattacttcagaagcaaaataaactacagcttactagaccgagagaaaagcattatctcaatatcaaacactgaacattaataatatatttaattttgagattaccacacatcacacaagtcaagtacaacatattgcaaagcattgttggcttaccaggcatagtaccttggggtgccaaaaacggtcttcaattcgctcatctggagagtttgggcgccagagaaatgcaa

SEQ ID NO: 93782 - DNA, 686 bp, Oryza sativa
  Clone ID: PAT_MRT4530_92132C.1
gcgcccactcttacgcccacgcgtccgatctgctgctgcttgttatgcttgtggatatcgacaagcactaagagcaaaatacaatcttccggtacgagcttgaaacttactcttttctggcctttgacatttctcggatgttactggttacatgttttagatttagtagtcaatagaggcagttttttcacgacatattgatataaatggatgatatttccttactgcacaatttaatcaatagtgggatttatggtgaaaattcttcataggtgaactttagttgaaactgaaatctaccttacatatatgtaaggactgcatataaggcaatccttccactgttgctattagtctagcaatttgagctctgccatggtgtcttgcctaccaaagtatgtttcttttgcaagcagtacagtgagaagtgaatagaatctttaactgtcaattgaaacatgcatttggttgctggtttcagggtcttgtgtgtaatttgattcagctacaaaggtcatgaccaaattgttaatctcaataggagccaatctaggcttccacatgactatgatttcttgatgtgttgtcgatgcatttgtccataaatctacagtaaaacattatgaatttatattttaattgcatggatctgggaactggatgctttgaaagcctacaagaacaaa

SEQ ID NO: 93783 - DNA, 822 bp, Oryza sativa
  Clone ID: PAT_MRT4530_92133C.1
aggactcgcgacttctctacgcttctcctcgccgccgaaacgaagcaacccgtcgcctcgccgccgccgccatgtcggtgacgctgcacacgaatctcggggacatcaagtgcgaggtgttctgcgaccaggcgccgcggacggcggagaacttcctggcgctgtgcgcgagcggctactacgacggcaccatcttccaccgcaacatcaaggggttcatgatccagggcggcgacccgacgggcacggggaaggggggcacctcgatctgggggaagaagttcgccgacgagttcagggagtcgctcaagcacaacgcccgcggggtgatgtcgatggcgaacagcgggcccaacaccaacgggagccagttcttcatcacctacgccaagcagcctcacctcaacggccactacaccgtgttcgccaaggtcatccatggattcgaggtgctcgacctcatggagaaggcgcagacggggcccggcgaccgccccctcgccgagatcaggctcaaccgcgtcaccatccacgccaaccctctcgccaactaatcctatctactccatctagtttaaaatctttggaattctgattgcttttttctgtgtggatgtgttgtgttctgctgctatctgaatctttgttgcaagaacaccgtacaaactgagtctgtaactgatatcccaaaaagtgtttggcttcacgattgatgcatctgcagacttgggttttgtgattgtgttttcatgtttcaactggctgtgtgatctatggctaagtacatcaattaagctaaaaaaaaaaaaaaaaaaaaaaaaa

SEQ ID NO: 93784 - DNA, 267 bp, Oryza sativa
  Clone ID: PAT_MRT4530_92134C.1
atggcccgtcgccaccaccacccagtctctgtgaaggggcggcgcgagcggcggagggaggggcagtggggtcagaagagcggcagcgccggcggagaccctgagcgacggggacggcggcgacctcactaccagatctgctgcctctccacctctactctggtgatctccacctccaaatccggtctgctggagcgttgtttttcacctccatgcgccaaaaaggggatggaggaccggatagaggagctgctggggatgctctaa

SEQ ID NO: 93785 - DNA, 357 bp, Oryza sativa
  Clone ID: PAT_MRT4530_92135C.1
atggcaccgccacccaccgtcgcacgccgcctcccctcctgccggatccggcggaggggagggcacctccgcctgccgcctcccctcccgccggatcgggcggaggggagggcgcccgccgttgcctgccgcctcccctcccgccagatcgggcagaggggagcgcactgctgcccgccgtcgctcgccgcctcccctcctgccagatccggcggaggggagggagcccgccgtcgcccgccgcctccactcctgccagatcgggcggaggggagcgtgccgctgcccgccgtcgcccgctgcctcccctcccgccggatccggcggaggggaggctggatcggctcggctcgatag

SEQ ID NO: 93786 - DNA, 101 bp, Oryza sativa
  Clone ID: PAT_MRT4530_92136C.1
gtagccaaaacgaaacagcaagtggacgtggtggtgtggtcatcattggagggaggattgatgccggcgtcgccatccagaagccgcttttcatggacgcc

SEQ ID NO: 93787 - DNA, 252 bp, Oryza sativa
  Clone ID: PAT_MRT4530_92137C.1
atggacggcggaggcgaggcagagcacgggagcggcgacaacggtgaggagacgaatgggagaggaaaggaagggagggggaagacgggtttaaaagggcggcaatgtcgagggagaggggctctctgcctccgccccttggaggctagcgcgcggagtggcgggggccgggcgatgacgacggcgatgatggcggggcgcttgtttgaaactttgattgtttggaattggctggagcccaagctcgggtag

SEQ ID NO: 93788 - DNA, 711 bp, Oryza sativa
  unsure (1)..(711): unsure at all n locations
  Clone ID: PAT_MRT4530_92138C.1
attcggctcgagcctgtctgcttccgaaacgttgagaaggagaataagtattttgtggaagccttaaacgtgcgttttagagagagaaaacaaaaccaaacaaacaaacaagtcagaatctcttctcttctctttctctatcgtaactctcttctctgctctcagatcttccaaaaccctcctttccttcattactaaaatcacttctcttcaaagattctttttctctttctttctcagcctccacttcttttttctttcccgcgccctccaaccgcttcttgctccgtttttcccttcccgcatttcatctcacttgcattttccgctccgtacggaattgttgtccactctgcaattattttccgggaaaaacagagcattctcccgatgacagtaacatttttgtgaggaagtgaagaaaaatggacgatagaggcggttccttcgtcgccgtgagaagaatttcgcagggtcttgatcgaagcaacacgtgccattcaagttccgctgagtttgtgacaggatcaacagcatggcttggcagaggtctgtcctgtgtctgtgcacagagaagagaaagcgatgccagaccctcttttgatttaactccggcccaggaggagtgcttgcagaggctacagaatcgcattgatattccatatgatggttctatccctgagcaccaggatgccctaaaagctntatgga

SEQ ID NO: 93789 - DNA, 759 bp, Oryza sativa
  Clone ID: PAT_MRT4530_92139C.1
cggccgccgcggcagggggaagttggcgacgttcttgaacgcggcggtgacgatgccggcgtcagggagcggcacggtgcagttggaggtgctgtttcgcgcggccgcaggcgccgtcgccgcggacgccgagcccttgatgaggacatcctagctacacacgtacatcaacatgacgtaaacaagggtgataatttacgtcgtacatcacatgatgaaaataaagatagcgtaaaccaagttgaaagattatttctcagcaagaatgatcatgcattccattgtccaattacgcgcattcgtactaggaaaatacaacaagagatgaactcactctttgctcaacttaacccaaatattagtgagaattttatactatctaaatgctctactttgtattgctaaggtttacaaccgaagacatgatcactacaccaagaaagatgagttacatcgaggacgacaagggttacgccgagtaggaatcaactcatatactaccagcagctatttacgccaacgagaagataatttacgctgcaacaagtcaacttccaaggcttgtgtagcctagccaatcaaagagatggggtgcatggcatacatggttggaaagaggaccaagtctagtttccaatgcaataaaccccaccttgatagcattttccaatgaggagttggactattttactgaaggctacgtgagagctgaagggttgtgcacgaacccgagaaaactctgagcattctcatttatgt

SEQ ID NO: 93790 - DNA, 231 bp, Oryza sativa
  Clone ID: PAT_MRT4530_9213C.1
atgtcgcggcgagatgagagagggagagggaggctcaccatggctgaggcggcggcggagaggcgccgaggaggaggaggcggcggcggcggcggcggagcgagcgaaggatggaagagggaaacgacggcgcaggagaagcatttatataggggggagacgaaacctagggagcaaaaccctaatgggccaagtttaggagaaaaagtccgtgtaactgcatcttgctaa

SEQ ID NO: 93791 - DNA, 409 bp, Oryza sativa
  Clone ID: PAT_MRT4530_92140C.1
ccacgttggatcgtatgagggatgtgattgaggtctatcgatagcggagtgttttggaacttattaaggtcgaaatgtttatatgttcgcaagatgaatcagaacctaactgattatatcaagttcaatgtttcctgctatatttcaatttgacattgtttgtctaatactctaatcggcttctttcagtaatcaggtacttgagtccatatagtattattgttcctattcccaggctgcatcacatattttagccatgtgaattatgagctaatgttatatctgtatgtctaatattagctctatttgttgcagaccctgtaaattcgaaagaatgctttttgatggtaaatttgcttacaaaaccctattcgatatatgttaccaaacttaaaaaaaaaaaaaaaaa

SEQ ID NO: 93792 - DNA, 1685 bp, Oryza sativa
  Clone ID: PAT_MRT4530_92141C.1
atggagctcggcaaggaggccctcgtcggcgtcagcatggaccacatgcgatcctccatgcagcgcggcggcctgccgccggagatgctggaggtcggcatggagctgatgcgggtcctcgtgggggactccatcccggacccgcccgtctccaccctcccgcgcctcgcccccgccgccgccgcgcgcgcccccgccgacggcgtcgaccgcatcagccgcctccccgacgagctcctccgcgacgtcgtgtcccgcctccccgccagggacggcgcgcgcaccgccgcgctgtccacgcgctggcgcggcgtctggcactcggtgcccctggcgctcgtcgacgcccacctcgcaccgcagggacgcggcggcggcggcgtcgttgccgccgtgtcccgcgtcctcgccgcgcacccgggccccttccgctgcgcgcacctcaccaccacctccatggaggcgcaccggggcgaggtcgcgcgctggctcgaggccctcgccgccaagggcgtccaggacctagtgtttgtcaaccgcccgtggccgctcgacctccgcctcccggccgcgctcttcgcctgctcctccctcacccgcctccacgtcggcgtctggcgcctcccggacacccgcgccgtcccgcgcggcgccgccttcccccacctccgtgagatggtgctctcctgcgtcgtcatggaggaccgggacctcgccttcctgctcgacaggagccccgccctggagaagctcgccatcatcacgtgccaagacggcgcccgcgtccgcctcaccagccgcagcctccgcatcttgcaggtctgcctgaccgtcgtcaactacgtcgacgtggtggacgcgccgcgcctggagcggctcatgctctggatgacgagcaagcaccggagctgcctctcctccatggtcaagatccgcaatgcgcccaagctgcggtcgctgggattcatggagcctggaatgcacgagctggagatcggcagcaccatcatccaggcggggatgaaattgagcccaagcactgttgtcccgagtgtcaagatcttggcactagaggtgaaattcacagtccgctatgaagccagaatgcttccaagcttcctcaaatgcttccccaatgtcgagactctccatatccattctgcagttgaagatgagccaaccggcaagagcaagctcaatctcaaagttctgggcaggatgccggcccgatcgagtgtgtccagcaccacatcaagaaggtgatcatgcgcgagttccgcggaacaaagagcgagctcacgttcctcaagttcgtcgcggagcgtgcgcggaagctggagaggatggtcgtcgtggtgaccaatggatgcttctgctcgtcgggctgtcaaggagatacgcaggctcagatggagaccctcatggcttccgcgaaatgggccagcgaagggagtaagctggtagcattcgagaaccctcactctcaggttggaactccagcttggagcttccaatttgcattcaattttgattggagtgaccctttcgattatggctacgatcaagcatccctgggtgagcctgtcagtaaaaggaaagcaacagagttaaagtcactgggtaataaggcggtcgagaaaaaggattatctttctgcaacaggattctacagtcagagattatga

SEQ ID NO: 93793 - DNA, 369 bp, Oryza sativa
  Clone ID: PAT_MRT4530_92142C.1
atggccgagctcgatctcgagctcgccggcgacaaacgatggctcgtttggggggatccgaataggagtcctacgggccttggaggcccgagtgatggatcctatatattcgtgaggggtgtgaccggcggaggcattgcatcacgaattgcgccgaagctcacccgggatcaaggaatcgaagatcgacgccggcggccggagttggagaagatgacgccgatctccctcctcgattcaccgatccatgagtttggtcggaacgacgacaagaacccgacagcggtcatcgttgtgcgctccaaggcgtttgtgggcacggtggcattcccgctcaaccactgcatagaatgggatgaaattagatga

SEQ ID NO: 93794 - DNA, 344 bp, Oryza sativa
  unsure (1)..(344): unsure at all n locations
  Clone ID: PAT_MRT4530_92143C.1
gaggtgatcaaacggccacctcgcgctaagctcgatcgatcggcccccccctttgctttaggcatccatggcgtccacctagctagctcctccgcttcattctctagcttagctagctcctctaattactattcgatcaattgcttcttcttaattcttcttcttcttctcatcactgatgcataaattgatgtgctgcatctcactgcttctgtagttagccatccatcatccatcgatccatgaggttaattactccataaagttggaactagtagtactagctaagctagggagcaatgattaaaaatgaaaaatcctctgacagttagtnnaaaaaaaaa

SEQ ID NO: 93795 - DNA, 337 bp, Oryza sativa
  Clone ID: PAT_MRT4530_92144C.1
cagataatcacaggacttatgtagaaaggatagtaagatacacaaatgcaaaaataagctgtgttactcctgcaaattgcaagtgaacagaacaatctcaagctaagctgttctttaatcagaagaacaggatatgaacaagcttcaagatattttgtggcgccggtttcgctttcttacctcgctatagattctgtgagagatcaaattacatgacccataaattgtagagcaatgcaggagtaacactcccagctgagaaattgattgatgtatagcactccgatcttcgttaggcgataggcgatgcaacgagagaattcaaaattttcaccaa

SEQ ID NO: 93796 - DNA, 1881 bp, Oryza sativa
  Clone ID: PAT_MRT4530_92145C.1
atggcgagcatggagggtctgatcggcctgatgaaccgcatccagcgagcctgcaccgccctcggagaccacggaggtggagaaggagccaacctccctaccctctgggagtctctccccaccatcgccgtcgtcggaggccagagttcgggcaagtcctccgtgctagagagcattgttggcagagatttccttccccgtggttctgctcttgttcgtcaagaaattgcagatgagacagatagagtgactgggaaaactaaacaaatatcccctgtgccaatacatctcagcatctactcacccaacgtcgtgaacttaacattgattgatcttcctggattgacaaaagtcgctgtagagggacaacctgaaagtgttgttcatgatatagagaatatggttcggtcgtatgttgagaagcccaattgtatcattttggctatatctccagcaaaccaggacattgccacttctgatgccattaagctttcgaaggaggttgacccatcaggtgagaggacattcggtgtgttgacaaagttggacttgatggacaagggaacaaacgctcttgatgttcttgagggaagagcctatcgtcttcagtatccgtgggttggaattgtcaaccgctcacaagcagatattaacaggaaagttgatatgattgttgcaagagaaaaggaaagagagtattttgaaaatagtcctgattatgcacacctagccagtaagatgggttctgtgtatctagctaagcttctttctcagcatcttgaagccgttattaaagcacgcattcctagcatcacatcattaatcaacaaaactatagatgaacttgaatcggagctggataccattgggaaagaagtggctgctgatccaggggctcaactgtacactatattggagctctgtcgtgcttttgaccgtgttttcaaggaacatctggacggagggagatcaggtggtgataaaatttatggcgtgtttgatcataagctccctgccgcttttaggaagctgccttttgatcgttatctatccgtgcaaaatgtgaagaaggtggtatcagaagcagatggctatcagcctcatcttattgctcctgaacaaggttaccgtcgtcttgttgaagccggccttgcgtatttcaagggaccagctgaagctacagtcgatgcggtccatgttgttttaagggacttggtgaggaaatccataggagagacagagccactgagaagattccctaccctgcaagctgcgattgcaactgctgctaatgaagctctggaaaggtttcgggaggatggacgtagcactgcacttcggcttgttgacatggaggcatatttgacagtggaattcttccggaaactcccgcaagatccagatagtggcagcaaggttgggaataataccaatgaatccaatggctcaggctcaggctcagtgacagtggaccgctacggcgacgggcactacaggaatatcgcgtccaatgtgtcccagtacataaagatggtgggagaccaactgttacacaagatcccaaaggcggtggtgcactgtcaggtccgagaagccaagaggtctctgcttaaccatttctacgtgcacatcgggaagaaagaggcgagccagtttgggcatttactggatgaggacccagcgatgcttgagcgtaggcagcaatgctggaagaggttggagctgtacaaatcggctagggatgaaatcgactctgtcgcatggaccagggagataacaaaggcagaaaagtgcataaaaagaaaaagaaaatccgcaaaaaaaaagaaagaaaaacaacaacaacaacaacaacaacaaaagtctgtttctcctaagtga

SEQ ID NO: 93797 - DNA, 186 bp, Oryza sativa
  Clone ID: PAT_MRT4530_92146C.1
gtcagaagtttcataggaagtttctatttctcgacaactgttgaactatgatcttggttagctgtgagattctaccgatgtaacagttttgcggataatttaccggatgtctagttgagcaaaaaaaaaaaaaaaaaaaaaaaaaaaaaaaaaaaaaaaaaaaaaaaaaaaaaaaaaaaaaaaaaa

SEQ ID NO: 93798 - DNA, 169 bp, Oryza sativa
  Clone ID: PAT_MRT4530_92147C.1
cggcgcccatgcggacgagggcattgatggagacactacggaagacggtgctagggttgatccgagcccggcggcgaagaagcccgcggaggaggagcccacggcggagaaggccccggctgccgaggcggtgctcggggcaagcgcgtggcggctcagcacgaggtaa

SEQ ID NO: 93799 - DNA, 3858 bp, Oryza sativa
  Clone ID: PAT_MRT4530_92148C.1
atgccgctggtgccgctgtccagagatggtggcgcggctgcaaggctgccgatgctggcgaggacgaactaccccgactgggcgttgctgatgcgagtgagtctccaggcacaagggctgtgggtggcgatcgaccccggctacgcggagtaccgcgaggaccgcgcggccctctctgccatactccaggccattccgcgggagatgttgcgcgggctagcgaagcatgacatggcgaaggcggcatgggacgccatcaagaccatgcgggtcagtgtcgatcgcgtgcgtgaggccaaggagcaagggtttcgccggcaatttgaatcgatgcggttcaaggagggagagacaccggaggagtttgcgatgcggctcactgccgtcgttgcggacatccgcgacatgggaggagtcatggaggacgaacatgttaacaagaagctgctgcgtgttgtccctaagaagtacaagccggtggcaatttcactcgagcaactcctagatatcaagaccatggccttggaggagctcgtcgggtggttgtccacgattgattcgtacagtgacgatgaggaggctagtggcagtggcaagctatacctcaccgaggaacagtgggaggcgcgcgcgaagcagaaggagcaggaaggcgcagccgccaacaagggtcgtggctgtgctggcgcgcaatatcgcctgggcaaagttactgggcaatgtcgcaaaccacgacgacagcgtcgtgcggaggcaaacctcgcgcaggcagaagaagaaccaaccttgctgatggcgcacgtcatgggtgtatcgctcgccggtgaggctgcactgggtcgaacacctagggtgcaggaagtgcatctcatggagaagaaggttgtgctggaccgtgaggatgtgcgtgaggaggagaagactggagagtggttcctggacaccggggccacgaatcacatgacgggcgcgcgctcggcgttcgcggagcttgacactggtgttgtgggcatggttaaattcggcgatggctcggtgattgacatccagggccgcggaactgtggtgtttcagtgtaagaacggtgatcatcgctcactggaggcggtgtattacatccccaagctgagaaaaaacatcatcagtgtaggtcgcctcgacgcgcgcggctatgacgcacacatttggcatggtgttttcacactgcgcgattcggatgggatgttgttggcgaaggtaaaccgtgattccagctatctgtatgttctcaaattaaaccttgcaaacccaatttgtatggcggcgagcggcaccgagatggcgtggcggtggcacgctcgtttcggacacctgaactttcaggcacttcgaaggttggcgcaaggagggatggtccgtggtctcccgccaattgaccatgttgatcagctgtgcgatgggtgcctggcgggcaaacagcgacgcacaccattcccagaggaggcgaagtacagagctcaaacggcacttgagctagtgcatggtgacctttgtgggccaatctcgccggcgacaccaggcggtaggaaatatttcctgctcctagttgatgacataagccgtcacatgtggattcggcttctctccgacaagcacgaagcagcggcagcaatcaaacagtttcaggctggtgtggagatggagagcaaccgcaagctcatggcactccgcactgatcacgggggtgagttcacttctgtggagttcatggagtactatgcagatcgaggggtgaagcggcagctcacggcaccctactcaccgcagcagaacggtgttgtggaacgacgcaaccaaatcgtggtggcagcagcgaggtctatgctgaaggccgcgggaatgccggtgcatttctggggagaggcagtggtggctgcggtgtatgtgctaaaccgatcgccgacgaagagtcttgatggagtaacaccatatgaggcgtggcatggtcggcgtcctaccgtcgaacacctgcgagtctttggttgtgtgggtcatgtcaagacggcgaagcccaatctgaagaagcttgatgatcgtggcacgaggatggttttcatcggctacgagcaaggatcaaaagcttaccggatgtatgatccggtggcgcgactgacggagcaagcaactggcagtacctcaccaagcacgccggtagcagtatcggcaggagaagaggcgtttggacctgcgtcgagcctaccaccggggatggaattttgttctcctccaagtgatgctagtgaggggactgatgaagcaccaagacgctacagaacagtggcaaacacacttgcaacgacaactccaatccttgatttcgactatgatgatcaatgccttatggcaactgaagaacctgctagttttgctgaggctgagaaggagagttgttggaggaaggcaatgattgaagaaatgaattcaattgagggtaacaaaacttggacacttactgaattacctcctggagtaaagccaattggtttgaagtgggtgtttaagattaaaagggatgcaagtggtgctatcattaagtacaaggccagattagttgctaaagggtatgttcaacagtttggtgttgattatggtgaagtgtttgctccggttgcaagaatggagacagttcggatgctgattgctcttgcagcacagagtggatgggagatacatcatatggatgtgaaatctgctttcctgaatggtgaacttgaggaggatgtgtacgtggtccagcctccaggatttgtagatgaaggaaatcctgcaaaagtgttgaaactcagaaagtcattgtatggccttaagcaggctccgagagcatggaatgccaagttggatgaaagtctgaattctcttaattttgttagatcagctacagaacatgcagtctatacaagaggaagtgggagttctagactgatagttggtgtctatgtagatgatttactgattactggagcaagtgtgattgaggttgaaaaattcaagaagcaaatgcagaaaatgttcagcatgagtgatcttggattactgagttattatttgggaatggaagtctgccagggcaaaggaagtgtgaccatttgtcaggctgcgtatgctgaaaaaattgttgcaaaggctggtatggaagggtgcaacactgctcaagttccaatggagacaaggctaaagctgagcaaagaagatttagctttctctgtgggatatgtgagtagattcatggaggctcccacaactgaacattgggctgcagtcaagcatattctaaggtatgtgaatggtacattgaagcttggatgcaagttcgagaagaatggaggaggttttcagctaactggctatagtgatagtgatatggctggagatataagtgataggaagagcacaactggtgttttgtttaaattgggaaacaacctgataagttggcaatctcaaaaacagaaggtggtggcattatcttcatgtgaggctgaatacattgccgctactactgcagcatgtcaaggagtttggcttagtaggctgctgggagagttgatgcttgaagacccaagttgtgctgttctgaaaattgacaataaatctgcaatagacctctgtaagaatccagtgcttcatgatagaagtaaacacatagatacccgctatcattttatcagggagtgtgttgagcaaagaaagatcaaggtggagcatgtctgttcagaggaccagcttgctgatattctgacaaagccattgggcaaaattcagtttcaggagctgtgcaagaaaatgggactggtgaaagtacaggcacatcaagattag

SEQ ID NO: 93800 - DNA, 501 bp, Oryza sativa
  Clone ID: PAT_MRT4530_92149C.1
atgaagctgacggaggcggagacggcgcctgcggtgctcttcctgaccgcagcgggcgtgagcacgctgctggacagggccatcgcagcgcctgcgtcggcggggctcggcgccgcagctgacgactcagaggtgacgatgtgggccttggtcgccgggagagggggcaagggtgccatcttcaacgcggatccctctgtccgcttcccgccgctgccgctccttcccttcacgagcgggcaccgacacatgtcccctccgcatgcatcctgctgccgccaccgccccctacctccacaagctggcgccggcgcggatccactctgcgagcttccctccgcccccgcccccgccccctacctccacgagccggcgctaccgcgggttccctgccgacaccgagcaccgccgccgccccctacctccacgagctggcgccgacgcgggttccctgccgacaccgagtgccgccgccacaactcgccggcacgcgagacatag

SEQ ID NO: 93801 - DNA, 4326 bp, Oryza sativa
  Clone ID: PAT_MRT4530_9214C.1
atggcgacgccgccggaatccctctcaccggctgcagcggcggtggaggatgattgggaggaggcgcgggggctgctgtacgaggcctacaacgagctgcagggcctggcggcggagctgggcggcgcggcggcgcccgcgccagcggtggtggtcgtcggccaccagacggacggcaagagcgcgctggtcgaggcgctgatggggttccagttcaaccacgtcggcggaggcaccaagacgcgccgccccgtcgcgctccacctccgcttcaacccgcgctgccacgccccgcgctgccgcctcctcgccggctcgggcgcgggggacgacgaggacgaagaggccggtgtcgccggccgcgcaatgccgctcgccgacatccaggcatacatagaagccgaaaacatgaggctggagaatgatccttcccaattttcagaaaaagaaattataataaggatagaatacaagcattgccctaatctcaccattattgacactccaggcctcatcctaccagctcctggccgtaaaaaccgagtttgcagatggttccttactgggggattatccctttttcacatcagtgcttcggggagagttggctcctgccatgaagctgtattcagatcaaatgaagagttcaagaaggccatctcattgagagagttggaagatgtcgcatctcttgaggacaagttgggaaggggacttacaaaggaggagaaaaacagaataggagtgagtaacttgagactatttttggaagaattgctgaggaagaggtacattgagagtgttccattaattattccacttcttgagaaggaacatcgtggtgcaacaaggaagctgcgtgaagtcaatcaagaaatcagtgatttggatgaagcaaaaatgaaggagaaagctcgcctgttccatgattcattcttgtcgaagttatctttgctattgaaaggcatggtggtggcaccgcctgatagatttggagaaactttaattaacgagaggataaatggaggaacttttactggaagtgagaatttcctgatcccaaacaaattgatgcctaatgctggaatgcgtctctacggtggcgcacaataccatcgggcaatggctgaatttcgtctggttgttggaagtattagatgccctccaattactagggaggaaattgtcaatgcttgtggtgtggaagatattcatgatgggacaaactactccaggactgcttgtgtgttagctgtggcaaaagcacgtgacacatttgagccttatcttcaccaggttattatacataatgaagagactgattccgatatctgcttttctgttggagaattccaacagaaagatggtgagaactgtagcagccatgatgtacttgtgaagcgatgtcaaagctgtcaatttgatagagtttgcatgaatctactgagcaatcatgtcgtgaaagaatttagtgttgtgtcaaaatgtatggaggatttggtgagcaccactcgttatgtcacttggtcccttcacaataagttcaattgctttctcctcatgccgattgttgacaaattaccggcgcttctaagagaagaccttgaatcagccttcgaagatgatcttgacagcatatttgatgttactcagctgcgccattcacttgggcagaggaagagagatctggagatcgaattgaagcggatcaaacgcttaaaggagaaattcgcagagataaacaagaagctgaattctctccaggttagacagtattacccaacaccacccctctctctcccgcgcaaaccatggtggcttgctccccgcattggacaccgccaagaacgcggcgtcgtcgacgacatgaccggcggtgacaaggaccaccgccgcggcggcagcggcggcgggaaggagaccttcctacgcagcctcgaccgcgtgccgtccggcctgcacatcgacgccgacttcccctccgacgacgatgacgacgacgacgacgaggaggtccgcgtctccttcgcctccaccatgggcgaccacaagatgtacagcttccgccaccatcaggccgccgtgctggaggaggaggaggaggacgacgacgacgacgagttctccaagtatgacatggacgaggacatgtcgatacaggagcggcgccgccgtcttcaccaggggctcggcctcgccagcagccgggatctcgcgctccggcgacatagcaccagaaggcgcctgtttcgaaacgccatggctaaacgtgatctccccaccgccgccgtgcccccgacgacgccgccgccggcggcggcagcggttgcggcagcgccggtggataaaggccgcaccgacgacggcggcggcaaggaccgcgacgacgcgaccaagaaccaggagagcagcaaggaggtcgccgtcgtcgcggcgcccaaggatgccgcccccgcgtcgaacacccagaccggcgtgcagctggggctagaggagatcgagaagttcatcggcaacacccccatcgtgaagcacctgatgcggcgcggccagagccagcatcacagcggccagctcgcgtcgccctccggcggcgcgccgcccaaggccgagaagccggcgggcggcaagaagaagggaggctggctcaagaacatcaagtccgtcgccatcggcttcatcgacagcggcggcaacagcaagtcgaccacatccacgaccacctcctccgccggcgccaacgccacctcgtcgtcgtcatcctcggcgtcgtcgacggagcggctcaaggtgcaccaatccggcaagtcgtgcaaggagctcaccgggctgtacatgtgccaggagatcatggcgcacgaggggtcgatctggagcatcaagttcagcaccgacggccggtggctggccagcgccggcgaggaccacgtggtgcgcatctggcaggtggtggaggcgaactccccggcgtgcctgccgaacgacggccactcgggccccctcccgccgcatccccccggcgccgcgccggcggacgggacgtcgtcgtcgtcgacgccagcgctgtcccagctgtccaagaagtcggtgaaggggaagagcggcagggacacgctgccggagcacctcgtcgtccccgacaaggtgttcgcgctcgccgaccagccggcgtgcgtcctcgagggccaccaggacgacgtgctcgacctcacctggtccaagaccgaccagcttctctcctcctccatggacaagacggtgaggctttgggacaccaccaccaaggcctgcctcaaggtgttcgcccacaacgactacgtgacttgcatccagttcaacccggcggacgacaggttcttcatcagtggatcgctggacgccaaggtgcggctatggagtatccctgatcggcaggtcgtcgactggaccgacctcaacgagatggtcaccgccgcctcctacacccccgatggccagggcgccatcatcggctcgcacaagggtagctgccggttctacaagacaacagattgcaagctggatcaggaggcgcagatcgacatcgagacgaagaagcgcaagtcgcaggcgaagaagatcaccggcttccagctgctgaaatttaagagcttggcaagaacatggcctaattgttcatcttggccatggccatggacacctcagtttgctccggggaacccctccgaggtgctggtcacctccgccgactcgcagatccgcgtcttcgacggcgtcaccatggtccaaaaattcagaggtttcaagaacacgagcagccagatctcggcggcgtacacgtcggacgggcggtacgtggtgtgcccgagcgaggactcgcacgtctacctgtggcgcgcggcgcgcggcgcgccgccggcggcggcggccatcggcagcatcggcggcatcggcatgaagcccaagacgtggtgcaccatccgctccttcgagaacttctactgcaaggacgtctccgccgccgtgccgtggccgctggccccctccggcgccggcggcgacgggtcgacctccggcagctcgccgtcgcggcggcagggcggcgtgtcgtgcaccgacgacgtgtgcagcatgccggcgaagagcggcgagctgggcagcgccgggacgccgctgacgcactccggccagctaggctcgccggcgccagaaggcggcaagggcggcgccgacggcaatgcgtggggattggtggtggtgacggcgagcttacagggcgagattagggtttatcaaaactttggaatgccgttcaggataagaggccagggtaacctgttctactga

SEQ ID NO: 93802 - DNA, 270 bp, Oryza sativa
  Clone ID: PAT_MRT4530_92150C.1
ggttgtgacaaagtgacgacgacgaggagtcgaatagagccaaaacccctgcagcatgcaacacggcgcgccgggaaaggagaagaagaaattgatcaagacggaccaccgccgatctaccggtcgacaaagggacggcgcgtgcgcatgcggcacgcacacctagatcgaccgatcgcctggaagacggcggcggcggcggcggcggcggcgggcgatgatcgatatctatctgttcccagcggcaaccagatcagcgccgcacccctt

SEQ ID NO: 93803 - DNA, 594 bp, Oryza sativa
  Clone ID: PAT_MRT4530_92151C.1
atggaaaccaaggcggaggccgccggcggcggcggcgagaagaaggcggcgtccgtggcgccgcgcgacgccggcgacgccccgtcgtcaccgcgagcggcggtgggaggagagcagcagagctcagcggcggcggcgtcgagtggcgatggtgtggcggcggcggcgaatgtggatcggagcggcggtgtcgccgccgccggcgaggcggaggaggacgaggacgacgagcagcgggccgtggagaggttctacgcgctggtcgccaacgtgcgggccatgaggggcatgtacaggagcagcggcgacggcgccagcgcggacagcgccaccggcggtaatgccggcggcggcggggagaggaagcgggcgaggcgcgccgaccagccgtggaggccggtgttcaggatggaggacttcgccgacgacgtcgcgggcggcgccgccaccaccaccaccaggtcggacgacggcgccagagcgccgccgattgagattgaagatttgcaattagtctttgacttagaagactcattatttttggatgtggaagctggaggtgttgagcccttgatggagctaggctcactatag

SEQ ID NO: 93804 - DNA, 454 bp, Oryza sativa
  Clone ID: PAT_MRT4530_92152C.1
attgagcctcttggatacccactcagggtataaccaggtgccaatcgccgaagaagatattaacaagaccgcatttagatgccctggtccagagttggtgcctatgagtggagagtaatgcggtctcaagaatgcaggagccacataccggaggactatgaatagcatattccagggtatggtacgccgagaattggtggtgtacattgatgatattgttattatccctcagcccgaggaacaacatctcctgaatctgaggaaagcgttcgcagtataagtttcaaatgaatcctttgaaatgcgcctttggtgtctcggctggtaactttctcgtattcttagtccgtcagaaggggatcgagaaaattaaatataaactaatggtttgcaaaatcaatgtcttactggatttcgtctatccttagcttactgccctaagatttatatgctt

SEQ ID NO: 93805 - DNA, 1924 bp, Oryza sativa
  Clone ID: PAT_MRT4530_92153C.1
atggcggcggtggcgggtagcgcgagcgcaggcgccaacggttcggcggcggcgcatcgggtgggggcgccgacgaaccccatggcgacggcgctgctcaccgatcagtaccagttctccatggcctacgcctactggaaggccggcaagcacgccgaccgagccgtgtttgatctgtacttcaggaaaaatccatttggtggagaattcactgtttttgctggtcttgaagaatgcattaagttcattgcaaattttaagttcacagaagatgacattttgttcctgcaatcagtcatgccaatgtgtgaggatgcgttctttgattatctcaggaaaaccgactgctctgatgtggaagtgtactccattcctgagggttcagtggtttttccaaaagttcctttgatgcgagttgagggtccagttgctgtggtccaactacttgagacaccgtttgtaaatcttatcaattatgcctctttggtaacaacaaatgctgcgagacaccgccatgttgctggaaaatcaaaagttttactggaatttggtttgagacgagcacaggggcctgacggtgcaataagtgcttcaaagtattgtttcatgggaggttttgatgcaaccagtaatgttttggctggaaatctgtttggcataccacttcgcggaacacattctcatgcttatgttagctcatatatgttagcagattcgttatgtggtgtatttggtgagacaaatcaaagtgagctggcagcatttgcatcctatgcattggcttttccgaccaattttctagctcttgtggacacatatgatgttatgcgaagtggaattccaaacttttgtgcagtagcgctagcactccatgacttagggtacaaggcatctggtattagattagattctggtgatctggcctatttgtctattgaggcccgtaaagtgttccgtacactagaaaaggagtttaatgtgcccgcttttgggaagatgataattactgctagcaatgacctgaatgaggaaacaattgatgccctgaacaagcagggccatgaagttgattcctttggtattggaacttatctagtaacatgttattcccaggctgctcttggctgtgtctttaagctagttgagataaacagtagacctcgtatcaaactttctgaggatgtggctaaatgtcatgatgggttccaggtatccattccatgcaaaaagcgatgtttcagattgtatggaaaagaaggctaccccttagtagatatcatgatgcgtgaaagtgaaccatcaccgaaggctggagaacgaatcctttgtcgtcatccattccttgaatccaagagagcatatgttgtcccccagcatgttgaggagctcctacaatgctactggcctggtacatcaaataaacctagggtagagttaccctctctagaggagatcagagggcgctgcatgcaacagcttgaaaaacttcgaccagatcacatcaggcggttaaatccaacaccttacaaggtgattgattcagaaactaaggcagccaagcattggtataatatccgtactccatattcagagttgaaacttgagcagaacaaaaatgtagttgcaccctgtgtcggctcgtattctttgatgcttagcaaattcgcaatacatcaaagaaaagtagagctctgttgtaaaaaaataaaaaaaatcgtcagttcatgggcccaaccttataggatttttgctccccaatttttattagtacaaactagttatcagtatagagataggccaacctatctgactgtacatccatgatccattgtactatacgtcgttatggaattgaacatcctttttggtgatttgagtccaaaaaaaaaaaaaaaaaaaaaaaaaaaaaaaaaaaaaaaaaaaa

SEQ ID NO: 93806 - DNA, 2865 bp, Oryza sativa
  Clone ID: PAT_MRT4530_92154C.1
atgtgggtgaggccggtgaaggcccaccagcacatgagccagcggtcggtgtcggaaagcctacgactgcatctccctgcagcaaagcaaagcaaatggaagcaaagaagattgagcaaagagatgttggaatttagcgagccgagaggagaaggaaggaagaaaggaataccggagatgagccagacggcgaggaggaggaagagggaggtggcgaggtcaacgcggcattgtttgcggctggctgtttttaggctatcagtggatttctcttacattacacttgaagcacttccaagttgttttcaccacattttaaggaagcatttttcactcttgatgtcacaggttggaaagcagatcgttctgggcacgttggaagataatttcaaagctgacatgctcttgtcactctcaagattggcatccaagtcagttcttctgtttggcgatcaggtggaattgctgttattgttcctggagcatgaatcttctcattgcatgaagaccgtgtcattgaaatgtttatgttttatgtttcacggaagcatctgccattttcctgttttaaggactgtttttggaacgttattacagctaattgatgatgatgatttcccacttgattgtaagagagatgcatttacggttcttcaaaagatagtctgtggcaaagctccaattgttcattttgtcgatacttctgagctatctaagcttgttctggctgctgagagttctttgcattcttcttcctgggagatgcaagcaaacaagatcacatcagaacatgattactcaggaaggttcatcattgacttacaatgggtgtcaagggattaccagcaacttcctgtcaactcatgcctgataaaagaactagcccgactagatgacagtgattgctccaaagtttctgttgccaatgttgaatcatttcaaacatattctgcccgtgaagtacttggcacttcaaatgatattaagccagagactgctagtgtgatggcttctcacatgggagcagattttgataagttaaaattcgacccaactgaatttagtagcaagaaggaagtatttatagtgcgtaatataattctttcgacactcaagtttgcaaatacttgtcataatatgctttctaaaactcctggtgctagctgcaatctttatgatagaatcaaggagctgattgagtgtgtgcagcagaatgcttctcagtattgtagcacatacgaatttttccatctgataatgtgtgcttgtatttcatggtatgcttgtaaaactagagatggcaatcaagaatcaggtgatccaacagaacagcctgacatattctctagtccttctatttggttaactcaggagctctgtgcgattcggataacaaaaatgcttttcagaaagcagaggtattgggatgcctatatgtctgctatgtactgttgtcgtgaaggcctctggtttgtggtgtcgtttgtctttagaaaacttgcagatgattttgggtcaggctctttcagtttttggttcaaatcattgctgcttatttcagctggagaaattgagatgaagctactgcttttcccttcagcaatcattaagttggtcagtgagcttaaaacagattgcgatcttcatgagagtttttactgtgttgaaacaaatgttgacagtagtcttgctggctcttcagagttgcatggttcccaagcaaagattactgatatttgcagcaaaacattcttagctactgatcacctcttatcgaatacctcttcaagtcatgagctgtttttccagaggtggtttattagtctcagggcatcgtttcttgagatcctagcagattttcttggtatccttactgcacatttaactgatcagagagatgaatctcatcatgatgctattggagaccattccagtgtacctagagagcataataacagccaattacttgctttggtgaattgttcattacgattaagtgaactggcacatagttatgatctacttgctgtatcccatggggacatggatcgccaaagtttttctagcatagccaggcttgctttcatgtgctcacttctggcattttgtattgcattttctgtggatttctcaaaggattcttatcgtctttgcaaatttgctgtggcatatttcctccgcttacgtggggacaccaaaggaatagcgactggagaggacagtgtatctcctttgcatggagggatgcaatttctgtccagcattttacagagggttatggaattgccatttgttctacccaaatacttcttcagagtaaggccttgctttggtgctgaacttcatatatatgattcaaatccagaaaacagagacgggatatcagtaccaagtggcctccagctttccctaaccctttgcttgcagtggaaatgtgtgttaggagtaacattgatatctcgaagctactcgaagctatactgcgttttagctgcaagctcagcatcctgctgcttagatgcaacaggaacaagaagcaaagagtttgagatacacaagaaaactgctggaatggttggtcttaataccaagctgatgcagtacatagaggatgatttgagaaagaagagggagaagaagaggaaaaaggtccgtgtggaggagaaggaaatggtgacagcatttgcgcgtttcgaagcaagtgacagtgggatgggattctctagctacctgctggatgtgtctgaatttcctcaaggttcatacaagatgaagtggcatgcgtgctgcatcgacaaagatggcgcctattatagcttgctgcctctcaacgacggcgcagccttctccgttcgcaagtcttga

SEQ ID NO: 93807 - DNA, 3522 bp, Oryza sativa
  Clone ID: PAT_MRT4530_92155C.1
atggacaagttaccggcggcgtcgtccgccatgcaatggagcatcgacctcgacagggctctccgctcccgccaccccgccacgcgcctccgcgccgtcgacgccgtcgccccgcgtctccgggagctcggagcctcgccgccggccgccgtcccccccgcggtcgcctccgccttgggcgtcctcccctccgaaccgcgcctcttcgcccacaccatcctcctccgcctcgccacccacttcgccaccgccgacaacgccgtccgggcccgcatcctccgcgccctcctcctcctcggcctcgacggctcgctgcccatgaccatggcatgcgtggcggcggaaccccaacatcaggtggcggtgctcgcgagggtcaaggccgcctacgacgctggctgcccgcgggccagggctctcgcgctgcggatgttcggatgcctcgcccacctcgcccaccacagcctccacctccgctctctcatcctctccaccttctcttcctccaatgcgctacaggttggaaagcagatcgttctgggcacgttggaagataatttcaaagctgacatgctcttgtcactttcaagattggcatccaaatcagttgttctgttttgcaatcaggtggaattgctgttattgttcctggagcatgaatcttctcattgcatgaagactgtgtcattgaaatgtttatgtttcatgtttcacggaagcatctgccattttcctgttttaaagactgtttttgggacgttattacagctaattgatgatgatgatttcccacttgattgtaagagagatgcatttatggttcttcaaaagatagtctgtggcaaagctccaattgttcatttagtcaatacttgtgagctatctaagcttgttctggctgctgaaagttctttgcattcttcttcctgggagatgcaaggtactgctcttaaagttattgctggcaccttatgttttcttcagcaaacaaggtcacatcagaacatgattactcaggaaggttcatcattgacatacaatgggtgtcaagggattaccagcaacttcctgtcaacagttgaaaatgcggaggacaaattcgtgcataagatatgcctgataaaagaactagcccgactagatgacagtgattgctccgaagtttctgttgccaatgttgaatcatttcaaacaaattctgcccgtgaagtacttgacacttcaaatgatattgtcaagccagtatctgctagtatgaaggcttctcacatgggaacagattttgataagttaaaattcgaccccgctgaatttagtagcaagaaggaagtatctatagtgcataatataattctttggacactcaagtttgcaaattcttgtcataatatgctttctaaaacacctagtgctagctgcaatctttatgatagcatcaaggagctgattgagtgtgtgcagcagaatacttctctgtattgtagcacatacgaatctttccatctggtaatgtgtgcttgtatttcatggtatgcttgtaaaactcgagatgtcaatcaagaatcaggggattcaaaagaacaacctgacatattctttagtccttctgtttggttaactcaggagttgtgtgcaattcggataacaaaaatgcttttcagaaaccagaggtattgggatgcctatagatctgctatgtactgttgtcgtgaaggcctctggtttgcggcgtcgtctgtcttcagaaaacttgcagatgattttgggtcaggctctttcagtttttggttcaaatcattgctgcttatttcagctggagagattgagatgaagctactgcttttcccttcagctatcattaagttggtcaatgagcttaaaacagattgcgatcttcatgagaacttttactgggttgaaacaaatgttgacagtagtcttgctgactcttcagagttgcatggttcccaagcaaagattaccgatatttgcagcagaacgttcttagctactgatcccctcttatcaaacacctcttcaagtcatgagctgtttttccagaggtggtttattagtctcagggcatcgtttcttgagatcctagcagattttcttggtatccttactgcagatttaactgatcagagagacgaatctcatcatgatgctattggagaccattcaagtgtacctagagagcataataacagccaattacttgctttggtgaatcgttcgttaggattaagtgaactggcacatagttatgatctgcttgctgtatcccatggggacatggatcaccaaagtttttctagcatagccaggcttgctttcatgtgctcacttctggcattttgtattgcattttctgtggatttctcaaaggtacatagtagtgtggagccttgcaggcttccagagaggttttctcatgcttcagttgtacaagatttacatgaaagagtggataggactgatagccaaattgtttcacaactgcaacaattaatgcccatttgttgtgatgaagtgcactccatacagattgtcacaagaatgaattgttcaggtattctggaaaaggattcttatcgtctttgcaagtttgctgtggcatatttgcttcgcttacgtggggacaccagaggaatagcgactggagaggacagtgtatctcctttgcatgaagggatgcaatttctgtccaacattttgcagagggttatggaattgccatttgttctacccaaatacttcttcagagtaaggccttgctttggtgctgaacttcatttatatgattcaaatccagaaaacagagacgggatatcagtaccaagtagtttccagctttccctgaccctttgcttgcagtggaaatgtgtgttagagaggagtgacattgatatctcgaagctatactgcgttttagctgcaagctcagcatcctcctgcttagatgtaacaggaacaagaagcaaacagtttgagatacgcaagaaaactgctggaatggttggtcttaataccaagcttatgcagttcgtacaggatgatttgggaaagaagagggagaagaaaaggaggaagaaggtccatgttgagcagaaggatatggtgacagcatttgcgcgtttcgaagcgagtgacagtggggtgggattctctagctgcctgctggatgtgtctgaatttcctcagggttcatacaagatgaagtggcatgcgtgctgcatcgacaaagatggcgcctattatagcttgctgcctctcaacgacggcgcagccttctccgttcgctcgtctccaatgcagtaggcgcggaccaccaccatcctcctcccgaccctgttcgccgcgaagctcacgcggctggccccgccgccgccgctgccgccgttcccgccggccagcaggaacctcgaggtggccgacgccacgttaatggtgctcgccatcgccgccgccgccgccgccgcgctcgtgtggatttcgaattccaagtgaagtgggagcagg

SEQ ID NO: 93808 - DNA, 824 bp, Oryza sativa
  unsure (1)..(824): unsure at all n locations
  Clone ID: PAT_MRT4530_92156C.1
ctatttaaccaacataaaaaaggggccggccgggcctgcggccctagccgccacaccctcccccttggcaccaatggaactcacatattcttttctcccctggtaaccctactccatggatctccaagaaccatagccctaatcaagaatctgattggaaaaacggatcgaggaagacgagggaagcaggaggagtggtgggttggcgttcccatcataatctcacaagttctccgagcaaaccctagttttgctccataggtgtggagatatctggtgtggagggtggtctgtcgggttgccgtcgaggttaaaaggtttatgtccgaggatcatttcgctgctacaacaatgaatgattgcataaaggatgagatgtattgcatagaagatggagtggcactcactcaagtggagatggttaacgacaacgagcagaccggttatgcatagatgcttcaacttctaagggggtgtgtgacccagccagtcaaattcctccatgcataatatatatggttcgaaagataatcaagtctagtttcacttccaataaacggctcatcgtttcgacttcctattagagagtaatgtctattttagtggaggctgcacaaaagctgaaaggctctattgaacctgctcgggaatgactcatggagacacttgagctagcccacttaccttgaatttcaaaagccatgtttatccccatctaggaggggctttcctagtataaatatcccctatgttttatcatttggaagacttttgacaatgagaatatgaaccccttttgttcagctgtgtgctaacanatcccg

SEQ ID NO: 93809 - DNA, 340 bp, Oryza sativa
  Clone ID: PAT_MRT4530_92157C.1
aacggcagggccgacccacgcgacccatcggttgcttctagacgcatccgcgggcgatggcgatccgcctgaggatgctccacttaggccattcgctatgggtcgcgccattgctcacgatgtgatgcgtcttgcaccccatcactatggcgttaccgaaagggatggacgatgacggatgggaacgtcagcggatgaagtcagaacggaagaaggatgagaacacggctgctgaatggaaccacacatatggcatgcgtgctgtgagagcccgtggacaccggatttcaaacctcagaggactgcaggctctacgataattcagcggagtaccgagaat

SEQ ID NO: 93810 - DNA, 468 bp, Oryza sativa
  Clone ID: PAT_MRT4530_92158C.1
atggcggcggcggggccttctccgcggcggcgctccctcttcggcgtgatggaggtggtgttcgccggcgtcggtacgccggtgagaggtggcggcgaggtctcccggctaggcggcggcagatctggcgtcgccgtcgccggatctggcaagccctccgattttcggcggtggaggaggctgctgcgacgtgtgggcggcgacggctcgcgcagcggcgcgtgggcggagtcggtgctggcggcggccgctggctccggtggtcgaaggccagcgctgacggtggccgccgtctccgaagtggaggagttcctcgccggagacatggttgacaccgaggtcctgggttcccctgactccaactctcagctcctcttcaggccggccaggatcggcgacatcgacgcctgcgggtgccgtttcctccttggaggtgttgtcttgtggactctttctccctttgggtga

SEQ ID NO: 93811 - DNA, 496 bp, Oryza sativa
  Clone ID: PAT_MRT4530_92159C.1
ggagaaaagcattgcaaactgatgcttctcacgactttcatttccgttttgattgtaaactttacaggtgtcaatatcacatcatagaccaggacaagaattcatcacccacagtttctgggcccttttttctggagagattaattgtggaggaagaaaaagaccaagagctgagggtcatagtgaggggaaaaggaaaatacagctattcatcttgtggcagaaagaaattagggcgaagaaaagttcaactgtatccccgccttcccgaggtcataatcaaactgttttaggatgtggcagtaattcacctctatgcgaaataatcttgttggcacaactacaccaaatcctgcagaactcctgaatgtttgtagaaactcagcaagagggaatttcctgagatcaggctctgttagtttggcaagatttccagctgagacaaatgcatggccatggattcccagctccctgagaggcttcagaggtatatcaa

SEQ ID NO: 93812 - DNA, 4767 bp, Oryza sativa
  Clone ID: PAT_MRT4530_9215C.1
atggcgacgccgccggaatccctcccagcgggagcagcggcactggaggatgatggggaagaagcccggcggctgcttttggaggcctacaacgaggcgcagggcctgccggcggagttcggcggcgcggcggcgcccgcgccagcgctcgaggtgggctgcaaccagacgtacttcaagagcgtgctggtcgaggacctgttgggggccctgctcagccacgtcggcggagccgccaaggcgggccgccttgtcgcgctccacgttcgctttcacccgcgctgccccgcctggcgctgacgcatcctggccggctcatgcgcgggaagcgacgcgaacgaagaagcgggtgtcgcccgccgcgaaatgccgctcgccgacatccaggcatacatagaagccgaaaacatgaggctggagaatgatccttcccaattttcagaaaaagaaattataataaggatagaatacaagcattgccctaatctcaccattattgacactccaggcctcatcctaccagctcctggccgtaaaaaccgagttttgcagagccaagcttgtgctgtagagacccttgttcgtgcgaaaataaagcataaggaaaccataatactttgccttgaagattgtagtgactggagcaatgcaactacaaggagagtggtgatgcaggttgatcctgatcttgcaaggactgttctagtctccacaaaactggacactaaaattttacagtttgcacgagcctctgatgttgaagtctttcttcaccccccgacctgtgctctagatggttccttactgggggattatccctttttcacatcagtgccttcggggagagttggctcctgccatgaagctgtattcagatcaaatgaagagttcaagaaggccatctcattgagagagttggaagatgtcgcatctcttgaggacaagttgggaaggggacttacaaaggaggagaaaaacagaataggagtgagtaacttgagactatttttggaagaattgctgaggaagaggtacattgagagtgttccattaattattccacttcttgagaaggaacatcgtggtgcaacaaggaagctgcgtgaagtcaatcaagaaatcagtgatttggatgaagcaaaaatgaaggagaaagctcgcctgttccatgattcattcttgtcgaagttatctttgctattgaaaggcatggtggtggcaccgcctgatagatttggagaaactttaattaacgagaggataaatggaggaacttttactggaagtgagaatttcctgatcccaaacaaattgatgcctaatgctggaatgcgtctctacggtggcgcacaataccatcgggcaatggctgaatttcgtctggttgttggaagtattagatgccctccaattactagggaggaaattgtcaatgcttgtggtgtggaagatattcatgatgggacaaactactccaggactgcttgtgtgttagctgtggcaaaagcacgtgacacatttgagccttatcttcaccaggttattatacataatgaagagactgattccgatatctgcttttctgttggagaattccaacagaaagatggtgagaactgtagcagccatgatgtacttgtgaagcgtgtcaaagctgcatttgataggtttgctgaatctactgagcaatcatgtcgtgaaagatgtatggaggatttggtgagcaccactcgttatgtcacttggtcccttcacaataagttcaattgctttctcctcatgccgattgttgacaaattaccggcgcttctaagagaagaccttgaatcagccttcgaagatgatcttgacagcatatttgatgttactcagctgcgccattcacttgggcagaggaagagagatctggagatcgaattgaagcggatcaaacgcttaaaggagaaattcgcagagataaacaagaagctgaattctctccaggttagacagtattacccaacaccacccctctctctcccgcgcaaaccatggtggcttgctccccgcattggacaccgccaagaacgcggcgtcgtcgacgacatgaccggcggtgacaaggaccaccgccgcggcggcagcggcggcgggaaggagaccttcctacgcagcctcgaccgcgtgccgtccggcctgcacatcgacgccgacttcccctccgacgacgatgacgacgacgacgacgaggaggtccgcgtctccttcgcctccaccatgggcgaccacaagatgtacagcttccgccaccatcaggccgccgtgctggaggaggaggaggaggacgacgacgacgacgagttctccaagtatgacatggacgaggacatgtcgatacaggagcggcgccgccgtcttcaccaggggctcggcctcgccagcagccgggacctcgcgctccggcgacatagcaccagaaagcgcatggtggacatcccgcggagcgtgtccaagatgcccccgctgccttcgccggccgccgcctccgccgccgccgccgccgccgcgccgaccaccgcggcggcggcggcggcggctccggccccgcggccgtcggcgcgcgacatgctgatgcagcggccggcgaagcccatcacgcggcgccggtccgacggctgcctcgccgcgcgggacggcggctcctctggaaagccaccaccgccgtcgtcgccgtcggtgcgtcgtgttcgatccttgccggcccggcacgccggctgcgacgatgtctccctcgtcgagaagtttcgaaacgccatggctaaacgtgatctccccaccgccgccgtgcccccgacgacgccgccgccggcggcggcagcggcggcggcagcgccggtggataaaggccgcaccgacgacggcggcggcaaggaccgcgacgacgcgaccaagaaccaggagagcagcaaggaggtcgccgtcgtcgcggcgcccaaggatgccgcccccgcgtcgaacacccagaccggcgtgcagctggggctagaggagatcgagaagttcatcggcaacacccccatcgtgaagcacctgatgcggcgcggccagagccagcatcacagcggccagctcgcgtcgccctccggcggcgcgccgcccaaggccgagaagccggcgggcggcaagaagaagggaggctggctcaagaacatcaagtccgtcgccatcggcttcatcgacagcggcggcaacagcaagtcgaccacatccacgaccacctcctccgccggcgccaacgccacctcgtcgtcgtcatcctcggcgtcgtcgacggagcggctcaaggtgcaccaatccggcaagtcgtgcaaggagctcaccgggctgtacatgtgccaggagatcatggcgcacgaggggtcgatctggagcatcaagttcagcaccgacggccggtggtggaggcgaactccccggcgtgcctgccgaacgacggccactcgggccccctcccgccgcatcccccccggcgccgcgccggcggacgggacgtcgtcgtcgtcgacgccagcgctgtcccagctgtccaagaagtcggtgaaggggaagagcggcagggacacgctgccggagcacctcgtcgtccccgacaaggtgttcgcgctcgccgaccagccggcgtgcgtcctcgagggccaccaggacgacgtgctcgacctcacctggtccaagaccgaccagcttctctcctcctccatggacaagacggtgaggctttgggacaccaccaccaaggcctgcctcaaggtgttcgcccacaacgactacgtgacttgcatccagttcaacccggcggacgacaggttcttcatcagtggatcgctggacgccaaggtgcggctatggagtatccctgatcggcaggtcgtcgactggaccgacctcaacgagatggtcaccgccgcctcctacacccccgatggccagggcgccatcatcggctcgcacaagggtagctgccggttctacaagacaacagattgcaagctggatcaggaggcgcagatcgacatcgagacgaagaagcgcaagtcgcaggcgaagaagatcaccggcttccagctgctgaaatttaagagcttggcaagaacatggcctaattgttcatcttggccatggccatggacacctcagtttgctccggggaacccctccgaggtgctggtcacctccgccgactcgcagatccgcgtcttcgacggcgtcaccatggtccaaaaattcagaggtgcgctggcggcggccatggatgagaaaatctcagctctaattgaaaatcagagagatcaattaatggtggtggtgtccgtggtggatgtcaggtttcaagaacacgagcagccagatctcggcggcgtacacgtcggacgggcgaacttctactgcaaggacgtctccgccgccgtgccgtggccgctggccccctccggcgccggcggcgacgggtcgacctccggcagctcgccgtcgcggcggcagggcggcgtgtcgtgcaccgacgacgtgtgcagcatgccggcgaagagcggcgagctgggcagcgccgggacgccgctgacgcactccggccagctaggctcgccggcgccaggaggcggcaagggcggcgccgacggcaatgcgtggggattggtggtggtgacggcgagcttacagggcgagattagggtttatcaaaactttggaatgccgttcaggataagaggccagggtaacctgttctactga

SEQ ID NO: 93813 - DNA, 140 bp, Oryza sativa
  Clone ID: PAT_MRT4530_92160C.1
atggtcggatcggattgtgacgtggttgtaacgaagcgagcccgcgtgccgtgtgctgcaaccggcgcgcgcccgcgcgtcgttttcgctggccacgcgatacccccggagctcacgctgtactacgtgcttccatgctg

SEQ ID NO: 93814 - DNA, 1997 bp, Oryza sativa
  Clone ID: PAT_MRT4530_92161C.1
atgatgacccgtcgccaggatgcctactaccgctacccaaccacgtcgaccatcgtcgcgtcggcgccaatgcccaccggccaccacgtcctcaggatcgacggctactccctcaccaaggccaagttcgccgccggcgaagaatgcgacgagtcgtgcagcttcgtcgtcggcggccacgcctggcgcatcaggtactaccccaacggcgccgtcgtctccggctccggtggcttcgtatccctcatgctctcccttgatcatcagcccggcgccgcattgccggccgccgtcgtcaaggcgcggttcgcgttcagcttgctcgacatggacggcgagccggtgccgtcgcgcacctacgcgagcgacggcgtggtcagcttcagcgctaattcgtcgagcacgttcggggcggagaggttcatcggccacggcgagctcgaggcgtcggggcacctcaccggcgaccgcctcgccttccggtgcgatgtcaccgtcgtgaagcgcgacgggcctccgacgatgtcgaccctctgcccggtggagcacgacatgttcagatgcctgctcgacaccggggacgacgcggacgtcgcgttcagggccgccggcggcgagacgatcgccgcgcataggcgggtgctcgagcgacgggcaccggagctggccaagctctgtcgtcgtcgcggcggcgcctcctgcttcatgggactcgtcgggaggcacatcgacgtcggcgacatggacgccgctgcgttcaaggctctgcttcacttcgtgtacaccgacacgctgccggagacgatggccccgcgagaggtgccggccatggcgccgcagctgatcgcggcagcgcgtaaatacggcttggactgggagaggttgaggctcctctgtgaggacaaggcgtggggatggcgcgtcgacgacacgagcatggacacgacggcggcggctgctccggctaccggcgatgatccgaagcgtagccagcgaccaccgcgcgcctccttcactgccgccgccgcctcactgttccgtcacccggcctcgccggctggccgaaaagtgtcaacgacgccggcgaggccccgccggctggcccccttcccctcccctcctttgcctcaagccggcggcggtgcgctgtatgtcgtcttccccgtcgccggcggcggggcgccatcaccggctacctcctcctaccactctttcagctttgcccccgtcgcctcaaccggcccgccgcccgctcccgaccccgcggggggtaatgctttatattttagaatggtgggagctaaggctacactttactgctataagatcggcgtcttctctccacacgttctatccataagtgtcgtggcgacgtatactcagcttctcttcctcgctcgaaagggtgtcgccatgcgcgcgttcgagagcttcaccggtcgtcacgacgaccgccgcctcgccttcatcaaggacggcgtcgagctgcgagccgggctgccaccagggccggctgggacagtaaggacggtgcgactaccttcattttttttccacaccgaaccactaaagagtcagtgccggccctggccaccgccgccacccgtcggcgaccctgagtccggcggcctgcgccgccgcttgctctccttgctggacgggacggacgtcaccttcagggtcggcggcgaggcgttcgccgcgcatagctccgtggtcgccgcgtggtcgccggtgctcagcccccctcccccccccacccccctcgcggtcgccgccaccgccgccgccgtcttcgacgcggagacgatgccggccggccccgccgcgcaagacgacgacggggtgccggcggcggcgatggcgcagcagctgatcgtggcggccgatagattctgcctcgacaggttggagacgatgaggttgaggcttctctgcgaggagttgttgaccactggtgacaatcttctagtgtagccagcgacgacgtcttccat

SEQ ID NO: 93815 - DNA, 1708 bp, Oryza sativa
  unsure (1)..(1708): unsure at all n locations
  Clone ID: PAT_MRT4530_92162C.1
ctacatgtgaatattttgatgtgacgtgaagagaaaaattaatcttggtttttggttgttgtcatgcaccccgggctgcaggaatccggcacgaggcagcacacatccatccatccatccatctatccagagagcacagcaacggctcatatatagtacccctctaccaaagcacaacaaccagaatctcctgagctcgatctagctactagcttgatctatccgatcaatcgactggcccgcgaggatcgatcgagactcgaaagggagggattttgatccggatcggtcgacgatggacatggcgcacgagagggacgcgagcagcgaggaggaggtgatgggcggcgacctgcgtcgcgggccgtggacggtggaggaggacctcctgctcgtcaactacatcgccgcgcacggcgagggccgctggaactcgctcgcccgatcagcagggctgaaacgcacaggcaagagctgccggctccggtggctgaactacctccgccccgacctccggcgaggcaacatcacgccgcaggagcagctgctcatcctggagctgcactcgcggtggggaaaccgctggtccaagatcgcgcagcacctcccgggacgcaccgacaacgagatcaagaactactggcgcacgcgggtgcagaagcacgccaagcagctcaagtgcgacgtcaacagccagcagttcaaggacgtcatgcgctacctctggatgccccgcctcgtcgagcgcatccaggccgccgccgccgggcagcagcagcagcaggaaggcggcaccgacacgccgcccctgtcgtggcagcacggcggctccgacgggctctacgagtcgccggagctcccggcgcccgatgccagctgctggccagccgagtactgcgcggcggccggcggcgcgcagtcgggcggcacgcctgcaccggagctgtcgagcaccacggccgggtcgtcgtcgctgtccacggactccggcgccggggcgcagcccagctggcccacgcaggccgacggcgccgagtggttcaccaccgcctgcgacgcctccagcgccaccggcggcgtggccatgcgcgacacggagctggagctggcccagccgccgtgccagggcgggcagacgtggacgacgtccgagtcgtcgctgcctggcctcaccttccccgacctcgccgtcgcggacttcgagatcggcggcttcgacgtcgatagcttctggacgagcatggaggacgaccagctgtggtgccccacccaggccgccgtgtgaaaagtcagcacggccgccatgggaatccgccgcggcgagcgagcgcgcgcgcgcgcgacacccgcgggtgcacaaccgccggggacgcgtagcggagcggagaagcggattagaagaaggagagaagctatctgggggattagaacaagattaatcgcctccccgatgccatttttggactcctagctcccagactattctagctccagttcttttccgtttcctttctccttnttttacttcctagggtaaaaaaacagaagttaaagtgtagccgttatactagtgttgacgctgctgttactaaagtttgtccgttcaattttactcattctttttgagtaaatacagtactggcactactgtatgtacgagctgaactctgtaggattgacaggattactgtacacttctagaaaccgg

SEQ ID NO: 93816 - DNA, 657 bp, Oryza sativa
  Clone ID: PAT_MRT4530_92163C.1
atggacggcaacagcggcggcagcggcggccacgcgcggcggcctcttgcggccggcggcggtggcggcctcttacgagccgcaacgtcgacgaccaagggcacggccatcggcgtcggtgtcagcggcgcatccgtgacagcgacggcaagggctagcatcgcatccacggcagcagcggccatgaagggcacatccgcgcgtcgcctcggctcctcgctcgtcaatcatcagtcgtcagccgggtggtgcgggggcccactcacccgcgggtcccctgcgggggcggggacgggtgatggtattcacccgaccatctctgcggggccggggccgggggagaagtctgggagcggtggcgggggcgttctggcccaacccgccccgttgccaaccctactctcctatttcctcagcgcgccatgggccaacaaggcggccgcgagatgctcgtcctcatcctctttctcctttatctatccctggcaagtccagccgcccatcgcactcccggacggcgcgagccggtccgccgcggcatcgcccccggtgtgtgccgcctcctccgtggccccaggtggcggcagcgatgggctcgtcgtggcgacgatgaggtttctgacggcagcgatggtgagcttgtcgtggcggcgataa

SEQ ID NO: 93817 - DNA, 475 bp, Oryza sativa
  Clone ID: PAT_MRT4530_92164C.1
tggatccccgggctgcaggccaatatgaacataactgaaattcccaaaaaaaaacaacaaggcaaattttagggagccagcaattcagttttctgtatttgagtaaactaggtcttcttggtatcttctatgcactttgatacaggaacggcaaaatgttgaacgcatattctagttattgaaacagattccatttcatgtcatgtccaacatgtttaagaatgccaaaagttgacgatgatcctagttcgtgtcttgtgcataactttgagttgtcaccaagttctttttcttctctagataccctaaaatcacttatatgtatcctacactgatgcaaatcctagtttttacatgccatccgcaaagattgttcctcagccatagttaccactgtttacttttcatttgaatttaattactgaagtgtgttcttcataaatgttgaccattcttatctatagtaaattactaa

SEQ ID NO: 93818 - DNA, 300 bp, Oryza sativa
  Clone ID: PAT_MRT4530_92165C.1
atggcgaacctgtttctggtcatcatcgcccgcactgattgtttctccgccaatgacaagcccgttcttgtcgtcgttgccggccataccaacatgtacctctacaccgagccagagacctaccgcgacgataatcgagcaaaacgattgcctcctagtgcttacaaccaaaaaacctatgccaactacatacgctttttaagactgatgaggctaaatggcacggacaagtggagtctatatgaagtcgatgtcacctacaccggcgcacggaccgacgaggccgtgaaccgctactag

SEQ ID NO: 93819 - DNA, 666 bp, Oryza sativa
  Clone ID: PAT_MRT4530_92166C.1
atggacggcaacagcggcggcagcggcggccacgcgcggcggcctcttgcggccggcggcggtggcggcctcttacgagccgcaacgtcgacgaccaagggcacggccatcggcgtcggtgtcagcggcgcatccgtgacagcgacggcaagggctagcatcgcatccacggcagcagcggccatgaagggcacatccgcggtggcggccagggaggcgcatccgcggcgacagcggcagcgatgcccagtccccagccacctgtctatcgttgtccctcgtcagcgtcgcctcggctcctcgctcgtcaatcatcagtcgtcagccgggtggtgcgggggcccactcacccgcgggtcccctgcgggggcggggacgggtgatggtattcacccgaccatctctgcggggcccgggccgggggagaagtctgggagcggtgccgggggcgttctggcccaacccgccccgttgccaaccctactctcctatttcctcagcgcgccatgggccacaaagcggccgcgagatgctcgtcctcatcctctttctcctttatctatccctggcaagtccagccgcccatcgcactcccggacggcgcgagccggtccgccgcggcatcgcccccgtcctctaacaaaatatttctacagtgattactga

SEQ ID NO: 93820 - DNA, 3021 bp, Oryza sativa
  Clone ID: PAT_MRT4530_92167C.1
atgccgtcatcggtgaggcatccggccgcggcccgtcataggtatcccctcacctgtgacgggccgaaaggaaaactcgtcacaggtgagtcagtgacgagttttgcttccaacccgtcactgatggatcgtagatggatatactatgcgcatcgttcgtctaccgagtatagagagggggtcactgaatttgtcacatttgcggataatgacagaaaaagtaggatgagcatgcacatgttgtgtccatgtagggactgtaagaatgaacagatgatcgttgatagcgatgaagtgcatgctcatttgataatgaatggatttatgaagaaatatacctgctgcaccaagcatggagagcaagaggcgcctgatgtcgcagctgaagatttgttggatcaggatgcagagaacaccgccgcagctcgagaaggcatgttcgtaccttctcctttaggtggagagaccatatatttggacactcaatgtctatctacaatgttgcatgacattgaagatgtaaaggacaacgacagagattttgagaagtttagtaagttggtggaagattgtcagatgcccttgtatgatggatacaagtcgaagcacagcaagttgtcatgcgtgttggaactcatgaagcttaaggctagtaatggctggtcggacaagagttttacaaaacttcttgagctgttaaaggacctgttgccagaggggaacaatttaccgcagacaacatatgaagcgaagcaagtattatgtccgttgggcctgaaggtcagaagaattcatgcatgtccgaatgactgcattttgtactacaaggaatacgctgacttggatgtctgccctgtctgtggggcatcaagatacaaacgagcaaagagtgaaggtgaaggaagtaagtcaaagaggggaggcccagcaaaggtggtgtggtatctcccaattgcggagcgcatgaagagaatgtttgcgaatatggaacaagctaagctagtgcgctggcatgccgaagaacggaaagtcgatagtatgctgaggcacccagcagattcagtacagtggaggacaatcgataggatttaccaggaattctcaaatgacccaagaaacatgcgtttcgcaatgtgtacggacggcattaatccatttggtgatttgagcagtcgtcacgggaaatgggcgtgttcggagtgtatggaggaaacaagatgcaaatggttgaagcattcacacaagacggtctacatgggtcacaggagatttctcccaaggtatcacccgtataggaatatgagaaagaatttcaatggacacagagatatagccggacccccggcagagctaacagggacagaggtgcacaacttagtgatgggaataactaacgagtttggaaaaaagaggaaagttggaaagacaaaagagaagagcacatcaaaggaaaaaacagaggagcatgtggaaaaacaaaagacaaaagagaggagcatgtggaaaaagaagtcaatattttggagactaccatactggaaggatcttgaagttcgccactacatagatttgatgcatgtcgagaagaatgtatgcgagagtttaatgggattactgcttaacccagcctgctacactctctcgaaagaagagaagattgatttactaacatgtttgagtggtataaaggttccatctggttactcatcaagaatcagtaggctcgtttcactgcaagatcttaagttggtaggaatgaagtcgcatgattgccacgttcttatcacacagctgttgcccgttgaaataaggaatattttgcctcctaaggtgcgacacacgatccagcggttgtgttccttcttccatgcaatcggccagaagatcattgatcccgagggactagatgaactacaggcagaacttgtgagaaccctatgtcatcttgagatgtactttcctccaactttctttgacataatggaacatcttcccgtgcaccttgtgaggcaaacgaagtgctgtggtccagcattcatgacacagatgtatccttgcgaaaggtacctggggatccttaagggttatgtatggaaccgttcacaccccgaggggagtatcatcgagagttacaccaccgaagaggtcatcgatttttgtgtggactacatgtcagaaacatcttcaattggattaccacgatctcatcacgaagggaggcttgatggtgttggtactgttggaagaaagactattaggttggatcggaaggtgtacgataaagctcatttcacggtactgcagcatatgactgaggtggtgccgtacgttgacgaacgccttgcagttctccgacaagagaacccaggccgatcagagagttgggtcagaaataagcacatgtcttctttcaacgagtggctgaagaaccgaattgccaggttgcagaacttgtctagtgaaacacttcagtggttgtcacagggtcctaaatggagtgccaccacctggcaaggatatgacataaatggatacacctttcacacggtaaagcaagacagcaaatgcaccatgcagaacagtgggttacgcatcgaggctgctagtgacggtggtcgtcgtgatcaatactatggtagagttgagcaaatattggagctagattacttgaagttcaaagtcccgttgtttcgttgtcgatgggtcgatcttcgcaatgtaaaagttgacaatgaaggtttcaccactgtcaacttggctaacaacgcgtacaaggatgaaccgttcgttctcgctaaacaagttgttcaagtgttctacatagttgacccgtgtaacaagaaactacatgttgttcgcgaagagaaaaggagaattgttggattggacaatattgcagacgaggatgattacaaccagcacgtccacggtataggtcaagaaatacctctagaagaggaggaagaagaagatgaagttcaatatgcacgcgtcgaccatgaggaaggattatttttgtaa

SEQ ID NO: 93821 - DNA, 837 bp, Oryza sativa
  Clone ID: PAT_MRT4530_92168C.1
atgggattactgcttaacccaggtactacaaaggatggtctcaacgcccgacgagatctggaagatatgggtgttcgctcggagctacatcccataaccacggaatccggcagggtttaccttcctccagcctgctacactcgctcgaaagaagagaagattgatttgctaacatgtttgagtggtataaaggttctatctggttactcatcaagaatcagtaggctcgtttcactgcaagatcttaagttggtaggaatgaagtcgcatgattgccacgttcttatcacacagctgttgcccgttgcaataaggaatattttgcctcctaaggtgcgacacacgatccagcggttgtgttccttcttccatgcaatcgaccagaagataattgatcccgagggactagatgaactacaggcagaacttgtgaaaaccctatgtcatcttgagatgtactttcctccaactttctttgacataatggaacatcttccggtgcaccttgtgaggcaaacaaagtactgtggtccagcattcatgatgcagatgtatccttgcgaaaggtacatggggatccttaagggttatgtacggaaccgttcacaccctgaggggagtatcatcgagagttacaccaccgaagaggtcatcgatttttgtgtggactacatgtcagaaacatcttcaattggattaccacgatctcatcaagaagggaggcttgatggtgttggtactattggaagaaagactattaggctggatcggaagggtcctgaatgcactgccaccacctggcaaggatatgacataaatggatacacctttcacacg

SEQ ID NO: 93822 - DNA, 543 bp, Oryza sativa
  Clone ID: PAT_MRT4530_92169C.1
cggcgagggagagagagagagagaactagtctcgagttttttttttttttttttgtacggaccgggtactagttataaactgaaattcaacaaaactgagatacaaagtagataagccttcatcatatacgaatgcatgggttatggactactagtatctaaattaacatccaggttgatatatacaagtattgcctgtggccgcgtgcaggaacccggaagaacgtaataacacaactctgaatatggtggaccctcgtgacgtcatttcatcctggttcgttacgttgcgcgaggacgtgtacgtcttgattcgcatcgaatcactggtgtcgtttgttacggtggcgttcattctgatgtttaccatggacatctaccgtgcccggtctcgcggatctggcaccatgtccactttggacaaggtcgatcgtatctctgaccgcatagtgctgtatctgttgggcaccatgcaagctgcgcctttcagcaatgagctcttccctgtctggtcaattgtgctggtgagtcttcatgctagca

SEQ ID NO: 93823 - DNA, 501 bp, Oryza sativa
  Clone ID: PAT_MRT4530_9216C.1
atggcgacgccgccggaatccctctcaccggctgcagcggcggtggaggatgattgggaggaggcgcgggggctgctgtacgaggcctacaacgagctgcagggcctggcggcggactggggcggcgcggcggcgccgcgccagcgtggtggtcgtcggccaccagacggacggcaagagcgcgctggtcgaggcgctgatggggttccagttcaaccacgtcggcggaggcaccaagacgcgccgccccgtcgcgctccacctccgcttcaacccgcgctgccacgccccgcgctgccgcctcctcgccggctcgggcgcgggggacgacgaggacgaagaggccggtgtcgccggccgcgcaatgccgctcgccgacatccaggaggttttgtggtgctaggaaatgatttatttgcgaaattggtgaaatataaaactcgtttaagaagaaccaggaaggggggaaatgagggcatgagctatgttatgctgtactag

SEQ ID NO: 93824 - DNA, 1524 bp, Oryza sativa
  Clone ID: PAT_MRT4530_92170C.1
atggtggtggtaccagttcatcagcagcaagtggggacgctagatcgcatggtcctgccgaagagttgtccaactatttggatagcgatgccatcaggcatgaaacgcaatagacacacggtgacggacagcgtcagcaagtccagcgccaccgccgccacgtgtcgcccttcggccggccggtcgcgcggccccggccgctcgctcccgcgtgccgcgttgaaaatttcagccgcgccgcgcgcgcgccttgtcggcgactcggcgttgtcgcctagccgagtccttcggccgtgccgcgtgcccgcgtccttggctgcagtccgtcgtgccaacgggctgaccacggcccatgggccattgacgtgcccgtgccggcacggcacggcacgacgttccctcgggccgtgcttgggccggggagtaggcacgtgggccggcacggcacggcccgctataggagtcgtgcctaacgggccgtgccctagcgggccgtgccgccggcgtgcccgtgccgtgctgggccgggccgcccgtttggccaggtataagcagcccggaggagagatcgtgggcgagtgcgagtaccggggcgaggtggtgttggtgacgccgagctcggccatgccgcggcgctccctctacctctctaacctggacgaccagcgattcctccgtttctccatcaagtatctctacgtcttcccgccctccgccgccgtggccgccgacgccctcagggccgcgctcgccaaggccctcgtccactactacccactcgccggaaggctcaggcaccacgccgacgataagcttgtgctcgactgcaatgccgagggcgcgctcttcgccgaggccttcctgcccaccctcaccgccgccgacttcctccgtgccggtgccaccgccaagccgcacaagtcctggaggaagctgctctacagagtccacgccgccaccttcgtcgccgtcccgccgctcgtcgtccagatgatcgaagacaaggatgaagtgcatgctcatttgataatgaatggattcatgaagaaatatacctgctggaccaagcatggagagcaagaggcgcctgatgtcgcagctgaagaagtgttggatcaggatgtagagaacaccgccgcagctcgagaaggcatgttcgtaccttctcctttaggtggagagaccatagatttggacactcaatgtctatctacaatgttgcatgacattgaagacgcagaggacaacgacagagattatgagaagtttagtaagttggtggaagattgccagatgccgttgtatgatggatgcaagtcgaagcacagcaagttgtcatgcgtgttggaactcatgaagcttaaggctagtaatggctgggccgtcacaggtgacctcacctgtgacggccccagagtgctgggcccgtcacaggtggtcttacctgtgacggctccacggttggcgcccgtcacaggtgacctcacctgtgacggccacatagttggagcccgtcacaggtga

SEQ ID NO: 93825 - DNA, 1494 bp, Oryza sativa
  Clone ID: PAT_MRT4530_92171C.1
atggatcgtagttggatgtaccatgttcatcgttcgtccatagagtatagagagggggtcaatgaatttgtcacatttgcggagaatgacagaaaaagtaggatgagcatgtacatattgtgtccatgtagggactgtaagaatgaaaagatgatccttgatagctcagaagtgtattctcatttgataacgaatggattcatgaagaaatatatctgctggaccaagcatggagagcaagaggcgcctgatgccacggctgaagaagtgttggatcaggatgtagagaacaccgccgcagctcgagaaggcatgttcgtaccttctccattaggtggagagaccatagatttggacactcaatttctatctacaatgttgcatgacattgaagacgcagaggacaacgacagagattttgagaagtttaaggggaacaatttaccgcagatgacatatgaagcgaagcaagtattatgtccgttgggcctggaggaatatgctgacttggatgtctgctctgtctatggggcatctagatacaaacgagcaaagagtgaaggtgaaggaagtactaccaaggatggtctcaacgcccgacgagatctggaagacataggtgttcactcggaactacatcccataaccaaggaatccggcagggtgtaccttcctccagcctgctacactctctcgaaagaagagaagattgatttgctaacatgtttgagtggtataaaggttccatctggttactcatcaagaattagtaggtgcgacacacgatccagcggttgtgcgtgcgacacacgatccagcggttgtgcgtgcgacacacgatccagcggttgtgctccttcttccatgcaatcggccaaaagatcattgattccgagggactggatgaactacaggcagaaattgtggtccagctttcctgtgggactagatgaacatctttccgtgcaccttgtgaggcaaacaaagtgttgtggtccagttttcatgacgcagatgtatccttgcgaaaggtacctggggatccttaagggttatgtacggaaccgttcacaccccgaggggagtatcatcgagagttacaccaccaaagaggtcatcaatttttgtgtggactacatgtcagaaacattttcaattggattaccacgatctcatcacgaagggaggcttgatggtgttggtactattggaaggaagattgttaggttggatcggaaggtatatgataaagcacatttcaagggtcctgaatggagtgccaccacctggcaaggatatgacataaatggatacacctttcacacggtaaagcaagacagcaaatacacagtgcagaacagtgggttacgcatcgaggctgctagtgacggtgatcggcatgatcaatactatggcagagttgagaaaatattggagctagattacttgaagttcaaagtatcgttgtttcgttgtcgatgggtcaatcagtga

SEQ ID NO: 93826 - DNA, 2910 bp, Oryza sativa
  Clone ID: PAT_MRT4530_92172C.1
atggcgatgagcagtcgtacgggaggcactccccaaaaacctgatcacccgcctacccggtgcagatctcaggtgaagatggatcgtagatggatgtactatgcgcatcattcgtctaccgagtatagagagggggtcactgaatttgtcacatttgcggataatgacagaaaaagtaggatgagcatgcacatgttgtgcccatgtagggactgtaagaatgaacagatgatcgaagacaaggatgaagtgcatgctcatttgataatgaatggattcatgaagaaatatacctactggaccaagcatggagagcaagaggcgcctgatgtcgcagctgaagaagtgttggatcaggatgtagagaacaccgccgcagctcgagaaggcatgttcataccttctcctttaggtggagagaccatagatttggacactcaatgtctatctacaatgttgcatgacattgaagacgcagaggacaacgacagagattatgagaagtttagtaagttggtggaagattgccagatgccgttgtatgatggatgcaagtcgaagcacagcaagttgtcatgcatgttggaactcatgaagcttaagactagtaatggctggaatacgctgacttggatgtctgccctatctgtggggcatcaagatacaaacgagcaaagagtgaaggtgaaggaagaattctcagatgacccaagaaacatgcgtttcgcaatgtgtacggacggcattaatccttttggtgatttgagcagtcgtcacagtacatggccagttctgcttgttaactataaccttcctccctggttgtgtttcaaaagaaagtacattatgcttgccatgctcattcaaggaccgagacaacctggcaacgatatcgatgtgttccttgaaccgataatcgatgacttcgaaaggctatggaatgagggcacacgaacatgggacgcatatgcacaagagtatttcaacctccatgcgatgctgttttgtaccatcaacgattatccggcccttggcaacctttctggccaaactgtgaaagggaaatgggcgtgttcggagtgtatggaggaaacaagaagcaaatggttgaagcattcacacaagacggtctacatgggtcacaggagatttctcccaaggtatcacccgtataggaatatgagaaagaatttcaatggacacagagatacagccggacccccgacagagctaacagggacagaggtgcacaacttagtgatgggaataaccaacgagtttggaaaaaagaggaaagttggaaagcgaaaagagaagagcacatcgaaggaaaaaacagaggagcatgtggaaaaacaaaagacaaaagagaggagcatgtggaaaaaaaagtcaatattttggagactaccatactggaaggatcttgaagttcgccactgcatagatttgatgcatgtcgagaagaatgtatgcgagagtttaatgggattactgcttaacccaggtactacaaaggatggtctcaacgcccgacgagatctagaagatatgggtgttcggtcggagctacatcccataaccacggaatccggcagggtttaccttcctccagcctgctacactctctcgaaagaagagaagattgatttgctaacatgtttgagtggtataaaggttccatctggttactcatcaagaatcagtaggctcgtttcactgcaagatcttaagttggttggaatgaagtcgcatgattgccacgttcttatcacacagctgttgcccgttgcaataaggaatattttgcctcctaaggtgcgacacacgatccagcggttgtgttccttcttccatgcaatcgggcagaagatcattgatcccgagggactagatgaactacaggcagaacttgtgagaaccctatgtcatcttgagatgtactttcctccaactttctttgacataatggaacatcttccggtgcaccttgtgaggcaaacaaagtgctgtggtccagcattcatgacgcagatgtatccttgcgaaagggacctggggatccttaagggttatgtagggacccgttcacaccccgaggggagtatcatcgagagttccaccaccgaagaggccatcgaattttgtgtggactacatgtctgaaacatcttcaattggattaccacgatctcatcacgaagggaggcttgacggtgttggtactgttggaagaaagactattaggttggatcggaaggtgtacgataaagctcatttcacggtactacagcatatgactgaggtggtgccgtacgttgacgaacaccttgcagttatccgacaagagaacccaggccgatcagagagttggggtcctgaatggagtgccaccacctggcaaggatatgacataaatggatacacctttcacacggtaaagcaagacagcaaatgcacagtgcagaacagtgggttacgcatcgaggctgctagtgacggtggtcgtcgtgatcaatactatggtaaagttgagcaaatattggagctagattacttgaagttcaaagtcccgttgtttcgttgtcgatgggtcgatcttcgcaatgtaaaagttgacaatgaaggtttcaccactgtcaacttggctaacaacgcgtacaaggatgaaccgttcgttctcgccaaacaagttgttcaagtgttctacatagttgacccgtgtaacaagaaactacatgttgttcgtgaagggaaaaggagaattgttggattggacaacattgcagacgaggatgattacaaccagcacgtccacggcataggtcaagaaatacctctagaagaggaggaagaagaagatgaagttcaatatgcacgtgtcgaccatgaggaaggattatttttgtaa

SEQ ID NO: 93827 - DNA, 2724 bp, Oryza sativa
  Clone ID: PAT_MRT4530_92173C.1
atggcgagaccaactgccatgcgtcctgatagatacatccatgctgtgttctttccgatggatcgtagatggatgtactatgcgcattgttcgtctaccgagtatagagagggggtcactgaatttgtcacatttgcggataatgacagaaaaagtaggatgagcatgcacatgttgtgcccatgtagggactgtaagaatgaacagatgatcgaagacaaggatgaagtgcatgctcatttgataatgaatggattcatgaagaaatatacctgctggaccaagcatggagagcaagaggcgcctgatattgcagctgaagaagtgttggatcaggatgtagagaaaaccgccgcagctcgagaaggcatgttcgtaccttctcctttaggtggagagaccatagatttggacactcaatgtctatctacaatgttgcatgacattgaagacgcagaggacaacgacagagattttgagaagtttagtaagttggtggaagattgccagatgccgttgtatgatggatgcaagtcgaagcacagcaagttgtcatgcgtgttggaactcatgaagcttaaggcttgtaatggctggtcggacaagagttttacagaacttcttgagctgttaaaggatctgttgccagaggggaacaatttacctcagacgacatatgaagcgaagcaagtattatgtccgttgggcctggaggaatacgctgacttggatgtctgccctatctgtggggcatcaagatacaaacgagcaaagagtgaaggtgaagaaagtaagtcaaagaggggaggcccaggaaaggtggtgtggtatctcccaattgcggagcacatgaagagaatgtttgcgaacaaggaacaagctaagcttgtgcgctggcatgccgaagaacggaaagtcgatactatgctgaggcacccagcagattcagtacagtggaggacaatcgataggatttaccaggaattctcaaatgacccaagaaacatgcgtttcgcaatgtgtacggacggcattaatccttttggtgatttgagcagtcgtcacagtacatggccagttctgcttgttaactataaccttcctccctggttgtgttttaaaagaaagtacattatgcttgccatgctcattcaaggaccgagacaacctggcaacgatatcgatgtgttccttgaaccgataatcgatgacttcgaaaggctatggaatgagggcacacgaacatgggacgcatatgcacaagagagatttctcccaaggtatcacccgtataggaatatgagaaagaatttcaatggacacaaagatacagccggacccccggcagagctaacagggatagaggtgcacaacttagtgatgggaataaccaacgagtttggaaaaaagaggaaaattggaaagcgaaaagagaagagcacatcgaaggaaaaaacagaggagcatgtggaaaaacaaaagacaaaagagaggagcatgtggaaaaagaagtcaatattttggagactaccatactggaaggatcttgaagttcgccactgcatagatttgatgcatgtcgagaagaatgtatgcgagagtttaatgggattactgcttaacccaggtactacaaaggatggtctcaacgcccgacgagatctggaagatatgggtgttcgctcggagctacatcccataaccacggaatccggcagggtttaccttcctccagcctgctacactctctcgaaagaagagaagattgatttgctaacatgtttgagtggtataaagctgttgcccgttgcaataaggaatattttgcctcctaaggtgcgacacacgatccagcggttgtgttccttcttcgatgcaatcggccagaagatcattgatcccgagggactagatgaactaaaggcagaacttgtgagaaccatatgtcatcttgagatgtactttcctccaactttctttgacataatggaacatcttccggtgcaccttgtgaggcaaacaaagtgctgtggttcagcattcatgacgcagatgtatccttgcgaaaggtacctggggatccttaagggttatgtacggaaccgttcacaccccgaggggagtatcatcgagagttacaccactgaagaggtcatcgaattttgtgtggactacatgtcagaaacatcttcaattggattaccacgatctcatcacgaagggaggcttgatggtgttggtactgttggaagaaagactattaggttggatcggaaggtgtacgataaagctcatttcacgggtcttgaatggagtgccaccacctggcaaggatatgacataaatggatacacctttcacacggtaaagcaagacagcaaatgcacagtgcagaacagtgggttacgcatcgaggctgctagtgacgttgacaatgaaggtttcaccactgtcaacttggctaacaacgcgtacaaggatgaaccgttcgttctcgccaaacaagttgttcaagtgttctacatagttgacccgtgtaacaagaaactacatgttgttcgtgaagggaaaaggagaattgttggattggacaatattgcagacgaggatgattgcaaccagcacgtccacggcataggtcaagaaatacctctagaagaggaggaagaagaagatgaagttcaatatgcacgtgtcgaccatgaggaaggattatttttgtaa

SEQ ID NO: 93828 - DNA, 231 bp, Oryza sativa
  Clone ID: PAT_MRT4530_92174C.1
atggtgactccggcaatagcgaactggccggtaactgtcccggaggcgcagaccgatgcgataggaggaggggccggcgggtggatggggggtggcggcggcgagatagagggtggcgaaatgcaaggcggattgacgaagaagcgagctgaggagtgcgtaattgagtttactgctcttgatgttatcaagttcactgaaagaaaagaaaagataaagacattaagctga

SEQ ID NO: 93829 - DNA, 1624 bp, Oryza sativa
  Clone ID: PAT_MRT4530_92175C.1
atggggatcttctggagcaaggcgctgccgctgctgaggaatggggatcttctggagcaaggcggagccgccgccgccgatggtgctcgtcccgccgctcttcgactacccacccatcgccgcccgcaccaggatgtcggtgccagcgtatgagctaatgtttgggaagctctcgctgcggactctgtttgaggactactttgatcgtgcggggaatatgtcgctttagggtcatgctgaagccactggaggatcctcatgttgatctgatttccactgtgtctgcagctgctgataaaatagacggaacacaagtaaagggctggtttggctcataacttgttatccagaatgttgcaggttaggtcatgtgcttaccatcctaagtaccgtgttggtgcgtttgggacattccctttactaatgggaaacagagagataagttttttcagggtgcgttctgaggattatggtgtcatgggagtaagatacggttcagagaatctatcatttgggtcttcctttgtgccatttcctggatctgctgaactaccctctggagcatggtggaaacaaacatcttatgccatatacagattggaagaactggaattgtgcaatcagttatggtgtaggattaacaagcccactcagtccttccttcattttttctctagagcttgccagaagtacagagctcttacattcattgcatcgttctatcaacacatggttgttcaaagaagggttaaaaacccttttgaagatgatcagattgttggaatcacaaactacattgattttgggcttgaattggctacaaggattgataaagataaaccatcagagagtgccaacaattccttgtttcagtttgcagcaagttggcaagctaataagaacttcctattcaagggaaagctaggtccttccaagtcttctgtagctttggcattcaagtcatggtggagaccatccttcacatttagtgtcacagctgtgaacgatcatttgaaggggacaagatcatatggatttggaattcgtgttgaggatcttagacagccaagttaccaaagggctgatccaaactatgtaatgctaacaccaagcaaggagcacttggcaccaggtgttttgcgagagtacgggaagcggcccatgttccaggcagaggttgattcgggcaactatgatcatttacctacagagttgaagcctatcagcaagatattctagcagtggccgtttttggtcaatcctttgctcaaaagaacttcacccggtacatctgaaaggcatcatcaaacgtaggtctgtttcaactttgcaagacagttggtccattatgatgtacaagttttgtcgtgaagaatgtctaggttgaaacttagtgatatctcaccttggaagtgtagccatcaactccgtagattatagaagaatgtgggcaatcaagttgaagttattattgagcgtgttgaattaattaatagaccatatggttcggtctactcttctgcacttcacaaacacggaccagaactatccaagtctatttgaggtacgtaatcaatttgcatttcattttttggacaaaaaaaaaaaaaaaaaaaaaaaaaaa

SEQ ID NO: 93830 - DNA, 2346 bp, Oryza sativa
  Clone ID: PAT_MRT4530_92176C.1
atgggggatccagtggtggggagcacagcggcaacggatccggcagtagggagcggcggctgccgcggtggatccaacggtggggactgtaagaatgaacagatgatcgaagacaaggatgaagtgcatgctcatttgataatgaatggattcatgaagaaatatacctgctggaccaagcatggagagcaagaggcgcctgatgtcgcagctgaagaagtgttggatcaggatgtagagaacaccgccgcagctcgagaaggcatgttcgtaccttctcctttaggtggagagaccatagatttggacactcaatgtctatctacaatgttgcatgacattgaagacgcagaggacaacgacagagattatgagaagtttagtaagttggtggaagattgccagatgccgttgtatgatggatgcaagtcgaagcacagcaagaatatgagaaagaatttcaatggacacagagatacagccggacccccgacagagctaacagggacagaggtgcacaacttagtgatgggaataaccaacgagtttggaaaaaagaggaaagttggaaagcgaaaagagaagagcacatcgaaggaaaaaacagaggagcatgtggaaaaacaaaagacaaaagagaggagcatgtggaaaaagaagtcaatattctggagactaccatactggaaggatcttgaagttcgccactgcatagatttgatgcatgtcgagaagaatgtatgcgagagtttaatgggattactacttaacccaggtactacaaaggatggtctcaacgcccgacgagatctggaagatatgggtgttcggtcggagctacatcccataaccacggaatccggcagggtttaccttcctccagcctgctacactctctcgaaagaagagaagattgatttgctaacatgtttgagtggtataaaggttccatctggttactcatcaagaatcagtaggctcgtttcactgcaagatcttaagttggttggaatgaagtcgcatgattgccacgttcttatcacacagctgttgcccgttgcaataaggaatattttgcctcctaaggtgcgacacacgatccagcggttgtgttccttcttccatgcaatcggccagaagatcattgatcccgagggactagatgaactacaggcagaacttgtgagaaccctatgtcatcttgagatgtactttcctccaactttctttgacataatggaacatcttccggtgcaccttgtgaggcaaacaaagtgctgtggtccagcattcatgacgcagatgtatccttgcgaaaggtacctggggatccttaagggttatgtacggaaccgttcacaccccgaggggagtatcatcgagagttacaccaccgaagaggccatcgaattttgcgtggactacatgtcagaaacatcttcaattggattaccacgatctcatcacgaagggaggcttgacggtgttggtactgttggaagaaagactattaggttggatcgtaaggtgtacgataaagctcatttcacggtactacagcatatgactgaggtggtgccgtacgttgacgaacaccttgcagttatccgacaagagaacccaggccgatcagagagttgggtcaggaataagcacatgtcttctttcaacgagtggctgaagaaccgaattgccaggttgcagaacttgcctagtgaaacacttcagtggttgtcacagggtcctgaatggagtgccaccacctggcaaggatatgacataaatggatacacctttcacacggtcaagcaagacagcaaatgcacagtgcagaacagtgggttacgcatcgaggctgctagtgacggtggtcgtcgtgatcaatactatggtagagttgagcaaatattggagctagattacttgaagttcaaagtcccgttgtttcgttgtcgatgggtcgatcttcgcaatgtaaaagttgacaatgaagctttcaccactgtcaacttggctaacaacgcgtacaaggatgaaccgttcgttctcgccaaacaagttgttcaagtgttctacatagttgacccgtgtaacaagaaactacatgttgttcgtgaagggaaaaggagaattgttggattggacaatattgcagacgaggatgattacaaccagcacgtccatggcataggtcaagaaatacctctagaagaggaggaggaagaagatgaagttcaatatgcacggccgtcacaggtgacctcacctgtgacggcccaaagtgctgggcccgtcacaggtggtcttacctgtgacggctccacggttggcgcccgtcacaggtga

SEQ ID NO: 93831 - DNA, 5819 bp, Oryza sativa
  Clone ID: PAT_MRT4530_92177C.1
gtttaatccaatcttttcatggtatcagagcctgcttcctcgacgtcgtgattatagcgtcgtcttcatcctcgctagccggtggcgctgctccttctctcgcgcacgcggtcacagagaaactctcccgcagcaactatcctctctgaaaggcgcaagttcttgctgcgctcaggggagctcagatggctggatacatcgacggcacaaaggaggagccgccggccaccatcatcaccaagaaggacgacaaggatgtgcgggtcaccaatcccgcgcataccgagtgggtggcgcaagagcagcaggttctcagctacctgttgctctccctctcacgtgatgtcctcatccaggtggtctcaattcccactgctgttggggtttgggatgccataagtgggatgtttgcatctcactcccgtgcgcgtgtgatgaacacacgcatggctctgacggccacgaagaagggcaatctgaaggttgccgagtacgtggccaagatgcggggtcttgctgatgacatggcctcggcaggaaagaagctcgacgacgacgacatcgtctccgacatcctggctgggctcgatgatgattttgacccggttgtctctgcagtcgcccaacgttctgagccaatctcagtcggtgagttgttttcacagcttgttacttttgagcagcgattggaacttcgacagggtggcattcagtcgtccaccaactctgcttctcgcggcggcaatggaggaggtcgcggccatggtcagccaaaccagggccaaaatctgaaccgtggtcgcggcggccaaggccgcggccgtggtggcttcaccaacaaccaaggaggagatcaccccaagtgtcagctgtgtgacaaattgggccatacggtggtcaagtgctacaagaggtttgatgcttccttcactggcgaagagaagagtgctgctgctgctacctcctcctacggtgttggtaccaattggtatattgacaccggggcgacggaccacatcaccagcgatcttgacaagctgacggtgcgggagaagtacaatggaggtgatcaagttcatactgccagtggttcagcctatgctcagatgcctctcaagttttgggatgaggcattccttacagaacatcttttgaatccttctcgggacgaacatgttgaccaatatgtgattaattcttctactaaccctgctcatgagtctccagttgatgttgctacgagtgcagatgctgctgctgaaatttctgggcgaacagggcaaattttggagcaaaacacccatggttttctgctcggcgggcggcccgggcactccgcggctcctaacactcacgcagcccctgacgacgctgcgacttctgacgcaactgcggcgcatcatcctggggatataggcgctgcagccggctcttctctcagccgatcgccatccaccagccattcctcgtcgcgtgtctccgacagtgcgcccgagccggcgtctcctccacgcggcgatgactccttggctgttccgatcgacgggggctcgtcggagcctctctcggacagctcgtcgtcaagatcgtccatggcgaccaactctacggcgaacaactctaccacatccagcgaagctgccctgactcagcctcaacgaccagccactcgtctacaacagggaattcgtaaacccaaggtttacacagacggtacagttcgttgggcaaatttaattactgctgagtcagaacctgatactttgaatgatgctttgaatagtaaaaattggaagctagccatggacaatgaatttctagcattgcagaaaaacaaaacatggcatttagtccctcctacaaaagggaagaatataatagattgtaagtgggtctataaaattaaacagaaggctgatggaactatagatagatacaaggctcgtcttgttgctaaaggttttaaacagagatatgaaattgactatgaggacaccttcagtcctgtagtcaaagctgccactattcgtcttgtgttgtcagttgcagttacaagaggatggagcttacgccagctggacgtacagaacgcattcctttatggagttctggaggaagaggtatacatgcggcaacctcctgggagttacaaagagctggagagcaagagagttcaaactctagaaaccctcttcctctttctctcctctacgagctcaggtcttctcccccctctttccccagctccccccttcttaagtgggcaagttgccagttcttcacaaagtgctacagatgctttattaaagggtcttgaagcagattttgccttaaaagatcttggagacttgcactactttcttggcattgaagtacagagaacagatgatggtctcacaatgagacaagaaagatatgcaactaatttacttcagcgtgtagggatgaccaactgtaagtcagtcacatctcctttatcagtgttagaaaagctgtctattactagtggagaacagctagggccattggactccactcggtatcggaatgtagttggagcactacagtatctcaccttgactcgtccagatatttctttctctgttaacaaggtttgtcagtttttacatgctcctactactactactcattggtcagcagttaaaagaattcttcgtgctttctccgatacagattgggcaggatgtctagatgacagaagatcaacaggaggttttgctgtgtttcttggaaagaatcttatttcatggagtgcacgcaagcaagccacggtctctcggtctagtacagaagcagagtataagtctttggctaatgctacagcaaagatggatcgtagatggatgtactatgcgcatcgttcgtctaccgagtatagagagggggtcactgaatttgtcacatttgcggataatgacagaaaaagtaggatgagcatgcacatgttgtgcccatgtagggactgtaagaatgaacagatgatcgaagacaaggatgaagtgcatgctcatttgataatgaatggattcatgaagaaatatacctgctggaccaagcatggagagcaagaggcgcctgatgacgcagctgaagaagtgttggatcaggatgtagagaacaccgccgcagctcgagaaggcatgttcgtaccttctcctttaggtggagagaccatagatttggacactcaatgtctatctacaatgttgcatgacattgaagacgcagaggacaacgacagagattatgagaagtttagtaagttggtggaagattgccagatgccgttgtatgatggatgcaagtcgaagcacagcaagttgtcatgcgtgttggaactgatgaagcttaaggctagtaatggctggtcggacaagagttttacagaactccttgagctgttaaaggatctgttgccagaggggaacaatttacctcagacgacatatgaagcgaagcaagtattatgtccgttgggcctggaggaatacgctgacttggatgtctgccctatttgtgggggatcaagatacaaacgagcaaagagtgaaggtgaaggaagtaagtcaaagaggggaggcccagcaaaggtggtgtggtatctcccaattgcggagcgcatgaagagaatgtttgcgaacaaggaacaagctaagcttgtgcgctggcatgccgaagaacggaaagtcgatactatgctgaggcacccagcagattcagtgcagtggaggacaatcgataggatttaccaggaattctcaaatgacccaagaaacatgcgtttcgcaatgtgtacggacggcattaatccttttggtgatttgagcagtcgtcacagtacatggccagttctgcttgttaactataaccttcctccctggttgtgtttcaaaagaaagtacattatgcttgccatgctcattcaaggaccgagacaacctggcaacgatatcgatgtgttccttgaaccgataatcgatgacttcgaaaggctatggaatgagggcacacgaacatgggacgcatatgcacaagagtatttcaacctccatgcgatgctgttttgtaccatcaacgattatccggcccttggcaacctttctggccaaactgtgaaagggaaatgggcgtgttcggagtgtatggaggaaacaagaagcaaatggttgaagcattcacacaagacggtctacatgggtcacaggagatttctcccaaggtatcacccgtataggaatatgagaacgaatttcaatggacacagagatacagccggacccccgacagagctaacagggacagagaagaatgtatgcgagagtttaatgggattactgcttaacccaggtactacaaaggatggtctcaacgcccgacgagatctggaagatatgggtgttcggtcggagctacatcccataaccacggaatccggcagggtttaccttcctccagcctgctacactctctcgaaagaagagaagattgatttgctaacatgtttgagtggtataaaggttccatctggttactcatcaagaatcagtaggctcgtttcactgcaagatcttaagttggttggaatgaagtcgcatgattgccacgttcttatcacacagctgttgcccgttgcaataaggaatattttgcctcctaagaagatcattgatcccgagggactagatgaactacaggcagaacttgtgagaaccctatgtcatcttgagatgtactttcctccaactttctttgacataatggaacatcttccggtgcaccttgtgaggcaaacaaagtgctgtggtccagcattcatgacgcagatgtatccttgcgaaaggtacctggggatccttaagggttatgtacggaaccgttcacaccccgaggggagtatcatcgagagttacaccaccgaagaggccatcgaattttgtgtggactacatgtcagaaacatcttcaattggattaccacgatctcatcacgaagggaggcttgacggtgttggtactgttggaagaaagactattaggttggatcggaaggtgtacgataaagctcatttcacggtactacagcatatgactgaggtggtgccgtacgttgacgaacaccttgcagttatccgacaagagaacccaggccgatcagagagttgggtcaggaataagcacatgtcttctttcaacgagtggctgaagaaccgaattgccaggttgcagaacttgcctagtgaaacacttcagtggttgtcacagggtcctgaatggagtgccaccacctggcaaggatatgacataaatggatacacctttcacacggtaaagcaagacagcaaatgcacagtgcagaacagtgggttacgcatcgaggctactagtgacggtggtcgtcgtgatcaatactatggtagagttgagcaaatattggagctagattacttgaagttcaaagtcccgttgtttcgttgtcgatgggtcgatcttcgcaatgtaaaagttgacaatgaaggtttcaccactgtcaacttggctaacaacgcgtacaaggatgaaccgttcgttctcgccaaacaagttgttcaagtgttctacatagttgacccgtgtaacaagaaactacatgttgttcgtgaagggaaaaggagaattgttggattggacaatattgcagacgaggatgattacaaccagcacgtccacggcataggtcaagaaatacctctagaagaggaggaggaagaagatgaagttcaatatgcacgtgtcgaccatgaggaaggattatttttgtaa

SEQ ID NO: 93832 - DNA, 216 bp, Oryza sativa
  Clone ID: PAT_MRT4530_92178C.1
atgaactaggttcggcattggaaacagagtggattcggcaaagaaatagattcgaagaacagagtatgcatcagctgcgaaggaatcggctggagtctgcatcggctgagatggatcggacagaggacagccgatatagccgattttgttgaagacagttgtaaaattgtttctagaatcaatcaacgtactacacaaggattgccacgatgcgag

SEQ ID NO: 93833 - DNA, 1161 bp, Oryza sativa
  Clone ID: PAT_MRT4530_92179C.1
atgttgaaaaagaagtcaatattttggagactaccatactggaaggatcttgaagttcaccactgcatagatttgatgcatgtcgagaagaatgtatgcgagagtttaatgggattactgcttaacccaggtactacaaaggatggtctcaacgcccgacaagatctggaagatatgggtgttcgctcggagctacatcccataaccacggaatccggcagggtttaccttcctccagcctgctacactctctcgaaagaagagaagattgatttgctaacatgtttgagtggtataaaggttccatctggttactcatcaagaatcagtaggctcatttcactgcaagatcttaagttggtaggaatgaagtcgcatgattgccacgttcttatcacacagctgttgcccgttgcaataaggaatattttgcctcctaaggtgcgacacacgatccagcggttgtgttccttcttccatgcaattggccagaagatcattgatcccgagggactagatgaactacaggcagaacttgtgagaaccttatgtcatcttgagatgtactttcctccaactttctttgacataatggaacatcttccggtgcaccttgtgaggcaaacaaagtgctgtggtccagcattcatgacgcaaatgtatccttgcgaaaggtacctggggatccttaagggttatgtacggaaccgttcacaccccgagggagtatcatcgagagttacaccaccgaagaggtcatcgatttttgtgtggactacatgtcagaaacatcttcaattggattaccacgatctcatcacgaagggaggcttgatggtgttggtcgatcttcgcaatgtaaaagttgacaatgaaggtttcaccactgtcaacttggctaacaacgcgtacaaggatgaaccgttcgttctcgccaaacaagttgttcaagtgttctacatagttgacccgtgtaacaagaaactacatgttgttcgtgaagggaaaaggagaattgttggattggaaaatattgcagacgaggatgattacaaccagcacgtccacggcataggtcaagaaatacctctagaagaggaggaagaagaagatgaagttcaatatgcacgtgtcgaccatgaggaaggattatttttgtaa

SEQ ID NO: 93834 - DNA, 369 bp, Oryza sativa
  Clone ID: PAT_MRT4530_9217C.1
cccacgcgtccgctcctaaccaccgctccggcctctccatctcccgccgctcgccgtcgccgccgacggccgccatgtgggagcgcgcgaccttcggtctgctgcaccaccgatccaacctcacccgccgatccccggcgatcggcggcgacgtgaccacccgagcatcttaaatgcacactcagctgaccagctaagcaatggaagagacgacatgccacagcaaagtggcaccgcaggagacaagcgccgcgcctggtacaacacaggcgcaggacaacacacgtggtaagggtcaaaactaatctgagaacacctgattgcaagaaaagaataacccctgaagttggcacaatgcgcatgcatcaa

SEQ ID NO: 93835 - DNA, 819 bp, Oryza sativa
  Clone ID: PAT_MRT4530_92180C.1
atgaaggccctctccgccgccgacagcgcggcatccccggcgacaaagatcaccatcccgtactactccgcggcggcgggggccggcgaggcggggccgccgttcgggaaggggcggtacaaggtgtgggccttggcggccatcgcgctcctcgcgctctggtccatgtccgccgcctccgcctccctccgctggtcctccggccgcttcctcctcgccgccaccgcctccgaggacctcgacgcgcccctcctcgacgacctcgactcgctcgaagcctttgaggctgcctacgaagagcttgctggtgatgatatgcaggtccgtgatgcagccatctctgagatagctcgaatgtcagcccacaggcttgaactggagcagccagtgaatgaggagcagccggaagggcaggcgcgggaggatgttgcactcgataaggagaaaggaaggaggtcgtcgtcgccgtcgctgaccgagcagcagctgattcttgccatagctggatccaatgggggagccaacaaattcaccggcgaggaggtgttggcggcgagaccgtgggagggagagggggaggaggaggagaaggagaagaagagcccgcctcctgtcgccgtcgccgccgtgcatcgctaccggagccaccgccgccacctgagaaccgccaccggagccgccgcctgttgggagggaggaggagagggtgctgatggaggaggaggagggcgggggtcatggaggatgaggtcgcgccaggacctacagaagatggcgaggcacatgagcaccgagaaggcaggcacgagaggatgttga

SEQ ID NO: 93836 - DNA, 3102 bp, Oryza sativa
  Clone ID: PAT_MRT4530_92181C.1
atgacacagtcgaacaagtttgaggacctgaacggtcgatttgcgagtttagggactgggatgacacagcgagtttgtcctatcactttatatcactacgccagaaccctacatctattacggcataccagtgacgggcctatgaattggtcacagatgaccgtcacctttgacgggtcactaggtttgccgtcatcggtggggcatccggccgtggcccgtcacaggtatcccctcacctgtgacgggccggaaggaaaagccgtcacaggtgaggaagtgacgggttttcctccctacccgtcactgatggatcgtagatggatatactatgcgcatcgttcgtctaccgagtatagagagggggtcactgaatttgtcatatttgcggataatgacagaaaaagtaggatgagcatgtacatgttgtgtccatgtagggactataagaatgaacagatgatcaaagatagcgatgaagtgcatgctcatttgataatgaatggattcatgaagaaatatacctgctggaccaagcatggacagcaagaggcgcctgatgtcgcagctgaagaagtgttggatcaggatgtagagaacaccgccgcagctcgagaaggcatgttcgtaccttctcctttaggtggagagaccatagatttggacactcaatatctatctacaatgttgcatgacattgaagacgcagaggacaacgacagagattttgagaagtttaaggggaacaatttaccgcagacgacatatgaagcgaagcaagtattatgtccgttgggcctggaggaatacgctgacttggatgtctgctctatctgtgaggcatcaagatacaaacgagcaaagagtgaaggtgaaggaagtaagtcaaagaggggaggcccagcaaaggtggtgtggtatctcccaattgcagagcgcatgaagagaatgtttgtgaataaggaacaagctaagctagtgcgctggcatgccgaagaacggaaagtcgatagtatgctgaggcacccaacagattcagtacagtggaggacaatcgataagatttaccaggaattctcaaatgacccaagaaacatgcgtttcgcaatgtgtacggatgacattaatccatttggtgatttgagcagtcgtcacagtacatggccagttctgcttgttaactataaccttcctccctggttgtgcttcaaaagaaattatattatgcttgccatgctcattcaaggatcgagacaacctggcaacgatatcgatgtgttccttgaaccgataatcgatgacttcgaaaggctatggaatgagggcacacagacatgggacgcatatgcacaagagtatttcaacctccatgcgatgctgttttgtaccatcaacgattattcggcccttggcaacctttctggccaaactgtgaaagggaaatgggcgtgttcggagtgtatggaggaaacaagaagcaaatggttgaagcattcacacaagacagtctacatgggtcataggagatttctcccaaggtatcacctgtataggaatatgaaaaagaatttcaatggacacagagatatagctggacccccggcagagctaacagggacagaagtgcacaacttagtgatgggaataaccaacgagtttggaaaaaagaggaaagttggaaagacaaaagagaagagcacgtcgaaggaaaaaacaaaggagcatgtggaaaaacaaaagataaaagagaggagcatgtggaaaaagaagtcaatattttggagactaccatactggaaggatcttgaagttcgctactgcatagatttgatgcatgtggagaagaatgtatgcgagagtttaatgggattactgcttaacccaggtactacaaaggatggtctcaacgctcgacgagatctggaagaaatgggtgttcgctcggaactacatcccataaccacggaatccggcagggtttaccttcctccagcctgctacactctctcgaaagaagagaagattgatttgctaacatgtttgagtggtatcaaggttccatctggttactcatcaagaatcagtaggctcgtttcactgcaagatcttaagttggtaggaatgaagtcgcatgattgccacgttcttatcacacagctgttgcccgttgcaataaggaatattttgcctcctaagatgtatccttgcgaaaggtacatggggatccttaagggttatgtacggaaccgttcacaccccgaggggagtatcatcgagagttacaccaccgaagagatcatcgatttttgtgtggactacatgtcagaaacattttcaattagattaccacgatctcatcacgaagggaggcttgatggtgttggtactgttggaagaaagactgttaggttggatcagaaggtgtacgataaagctcatttcacggtactgcagcatatgactgaggtggtgtcgtacgttgacgaacaccttgcagttctccgacaggagaacccaggccgatcagagagttgggtcagaaataagaacacgtcttctttcaacgagtggctgaagaaccgaattgccaggttgcagaacttatctagtgaaacacttcagtggttgtcacagggtcctgaatggagtgccaccacctggcaaggatatgacataaatggatacacctttcacacggtaaagcaagacagcaaatgcacagtgcagaacagtgggttacgcattgaggctgctagtgacggtggtcgtcgtgatcaatactatggtagagttgagaaaatattggagctagatttcttgaagttcaaagtcccgttgtttcgttgtcgatgggtcgatcttcgcaatgtaaaagttgacaatgaaggtttcaccactgtcaacttggctaacaacgcgtacaaggatgaaccgttcgttctcgccaaacaagttgttcaagtgttctacatagttgacccgtgtaacaagaaactacatgttgttcgtgaagggaaaaggagaattgttggattggacaatattgcagacgaggatgattacaaccagcacgtccatggcataggtcaagaaataccttga

SEQ ID NO: 93837 - DNA, 2001 bp, Oryza sativa
  Clone ID: PAT_MRT4530_92182C.1
atggcgagcggcgcggttgttgagccggacgggagaggtaaatgcagagttgaaaacggggcgtgcacaaccgaggccgatctcgtgcaggcgtggccgtccctggccagcggcggcggctgcggaaggggggataccggggccagaagagacgacggcgttgtcttgctggtggggggaacgaggcttgagcgaagcgccagcggggagggccacgaagcggcggagaccgcggaaggccggcggagaagggtgcgcgtgggcggcgccggctggggcgccagcgccggcggcggcgggcgcaggggcatgcttaccttactccccaagcgcatgaccgacccctgcattgtccaagagttattcacagtgttgcatagttctgcaacttttgactctccaattctccgttgccgttccgctgccggtgctcgcgtaaccgcgttgcccctcatcgccgcaacaacgttttctcgtctccctatcactgtcctgatctgcattgctgcattagcactcgttgtacggttcatctcccgcgatgcagccgccgtccatgagccagttgctgctgctcctacttccgacgacgactcaattggcggcggcgggctttctttcatcctctgcattgctgcattggcgttcatctccggcgatgcaaccatcgtccatgagccagttgctgctgctgctgcaccttcttctgacgaggctgattccatcgacggcggcggtggcggattttctctccccctcgttcgccggaggtccaccaccaccaccaccatgatcgacgttgccaaaaaggagatccagcttgccaccgccatcgccgccggagacaagaagctcctcgtgccgttgtacggccggccacaaggtggcagcacctacctcgtgcagctccgcatcggcacgcccacggaccggatctcgccgaggtacgtcctgttcgacaccggcagcgacctctcgtggacgcagtgcgagccctgcaccaactgctcctccttcaccccgtacccgccccacgatccgtccaagtcccgcacgttccgccgcctctcctgcttcgacccgatgtgcgagttgtgcaccgccgtcgtcgatggcggaggcggatctgcagggtgcctgttcaggcggcgctacggcgacggcggcgccgtgtcaggcgagctcgtgtcggacgtcttccacttcggcgcggcaggcgacggcggcgggtaccagctcgagcgggacgtcgcgttcggctgcgcgcacgtcgaggattccaagtctgtcaggggttacagcaccggcatcctcgcgcttggcatcggcaagccgtcgttcgtgacgcagctgggtgtggataggttctcgtactgcatcccagcatcagagataaccgacgacgacgacgacgacgacgacgacgaggagagatcggcgagcttcctccggtttggttctcacgcaagaatgacagggaagagggccccgttcaagcaggacggcagcggctacgccgttcgcctgaagagcgtggtgtaccagcacggcggtcgcctgaatcagcagcaacctgtacccgtatatgttgccggagaagaagcagcagcagccatgccgatgctggtggactccggaacgacgctgctctggctaccgggcagcgtcttctaccctctgcagaggaggatcgaggaggacatctctctcaccaggaggtacgacctcacgcatccaagcctctactgctacctcggaaacatgacggatgtcgaggcggtttcagtgacgctcggcttcggtggaggcgcggatctcgagctgtttggcacttcgctgttcttcactgacgagaatttaacagaagactgggtttgtctagctgttgctgcggggaacagggcgatactgggagtgtatcctcagcgtaacatcaacgtcgggtatgatctgtccaccatggagatagcgtttgatcgtgatcagtgtgatcgtgtgtag

SEQ ID NO: 93838 - DNA, 412 bp, Oryza sativa
  Clone ID: PAT_MRT4530_92183C.1
agcacaaaaaggtaactcaaggagtgcatacgtgtatatgtacttttaagagtaccactaccttcactaaccatttgccttttgggttcattacaaaccatgcatatcttcagaagaaaaattgtgaaaactttagaatgttttttatgcctgttttaattcccactatggttatctctatcattacaattgcattaacatatgatctgcataataagcataatgcttgcacgcattagcagctaaatcattcttccatatcatccacttatccacttaggctgtgttcggaatcggacgttcccagcgtgcacagtaagtacggaaaacgaagcggttcattagcgtgtgattaattaagtattggctatttttttttcaaaaatggatcaatatgatttttttaagcaac

SEQ ID NO: 93839 - DNA, 262 bp, Oryza sativa
  Clone ID: PAT_MRT4530_92184C.1
ctggcaagagcacaacggtcagaatggtggctacctggcggtcagatcatcggagctaaggcggttgaaccggcggcatcagacaacggcgatagaagctagacggttggaccggaggatctacactggtcagattcggaagttccggcacagtcagactggagcaaacacaccaggggaagtttctagctacagcagcttcacccagaatcataagctcaaaaacagtccagcttttagattagattctaagaagttgtag

SEQ ID NO: 93840 - DNA, 1679 bp, Oryza sativa
  Clone ID: PAT_MRT4530_92185C.1
ccggccgggggcttatgcatttgctagctagctcatcgtcgataccaatggcgactaccagggccacatcgacgctgctgctgctgctgctgctggtttcggcaacatgggcggcatcggcgccgacgacgagtcgggcgaggaacgtgataacacacgtgaaggggttccaagggaggctgccgttccacctggagacggggtatgtggaggtggacaacaccgataccgttgagctcttctactacttcatccagtcggagcgcagccccgccgatgaccccctcatcctctggatcaccggcggccccggctgctccgccctctccggcctcctcttcgagattggccctctcaagtttgacgtagctgggtacacggaagggttccctcaattgttctacttccaagattcctggaccaaggtgagcaacgtgatatttctggacgcgccggtggggacggggttctcctacgcccgtgaggaacaagggtacaacgtcaccctcacacagacgggacagcagctggtggtgttcctcaccaaatggctgggcgatcacccagagttcgcctcgaaccctctctacatcggcggcgactcctactccggctacaccgtcccagtgacggcgctccagatcgccaacgacgacgacgcccgggcgcggctgaacctcaagggctacctggtgggcaacgctgccacggacgtcaagtacgacagtgggggcaaggtgcccttcatgcacggcatggggctcatctccgacgagatgtacgaggccgcgcggagcagctgccgtggcgactacgtgtccaccccgaccaacgccgactgcgccaacgcgctgcaggccatcagcatggcaaccttcgccatcaacccggtgcacatcctggagcccatatgcggattcgcgctgcgcgggcgcgcgatgcctgagacgacgatggaccagcgcctgcgcctgggcctccccgtggagtgcagggacaacggctaccggctgtcgtacctgtgggcggacgacccggaggtgcgcgccacgctgggcatccacgagggctccatcgcctcctggagccgctgcacggcgctgccgctcttccggcacgacgtggacagcgccatcccctaccacgcggagctcacgcagcgcggctacagggcgctggtgtacaacggcgaccacgacctggacatgacgttcgttggcacgcagcagtggatccggacgctgggctacaacgtggtgaccgcctggaggccgtggtactccaaccgccaggttgccggcttcaccaccgtctacgaccacaacctcaccttcgccaccgtcaagggcggtggccacaccgccccggagtaccgccccaaggagtgcctcgacatgctcgacagatggacctctccggccggcgagctctgaattactttactatactaattcatcaccgtgcgtatatatgtccgtttatgggaaatcttacccccttcataatttatctacttatcttttatcatgtcttatctttctcttttcttagcctatactacacacacttacttacaaaattcggagcatttgtgtggtctgtcgttcttttccaaaaaaaaaaaaaaaaaaaaaaaaaaaaaaaaaaaaaaaaaaaaaaaaaaaaaaaaaaaaaaaaaa

SEQ ID NO: 93841 - DNA, 2780 bp, Oryza sativa
  Clone ID: PAT_MRT4530_92186C.1
atgtccacgcgcgccactcgccccgggatgctccaccagaaggagaacgccgccgacgcgcaggccggcaagcgccagcgcacggccgccgggtccgccgcccgcgccccgctctccgccaacgccgctccgcccagtacaccaacagaaacactaggccatctttgccatgacctcctggaggatgatcttggtgtcggcataggaggagccgatctgggtgtcgtccttggtgccgcaggccttctggaggcgctcgaagctgtcgaagaggcgggtggcgaggtcgagcagcggggggcgctggtcgtcggaggcggcggagatgagcttgtcgaagtcgaagtacatgaaggtggacttgaggcggaggtacttggtgacgtagttggccctgtcggcgttgttgcccagcaggtcctccagcgccagcaggtcgaacgccgtgctccgcagcctgtacgcgtgcgccgcgtagctcggcccgatgtcggctatgtagatgccgttcctcacgaacgtccggctccccgtctcgccattgttcagctccttgttgacaatctttggcaccggcaaagggaactcggtgagccaccacccattgtttgccggctcgtcgtcggtggcggcgcaggcgggatgatgctggaagatggtggcggcggcggctgcgaggccgacggagaggcaggctgatctccgtccgccagtggagcacgccgccacgaggaggagcagcctccgtggtgttggccggaggaggcggctggtgccggcagtggcggcggtgaggcctgctgattggagataagtggccatcctaaaacaaaagaccgacttgctaaaggaagttgataatctcaggggtgaactccagcaagtaagggatgaccgtgatcataaattagctgaaatacattccttgttggccgatgtaagtacatacaaggaaatgactggaaagtcggtagcagaattggataatgccatgacaagaagtactgcccttgaggaaacatgttcgtcccaagcagagagaattaaaacattggagctgcagcttgcatcagctaacgaaaagttaaagagatctgatttgactactatggagacgatgactgagtatgagaagcaaaaaagaatgttggaggatctgcaattacgactcgaagaagctgagcaacaaattttggacggagagaatttgcggaaaagactccataatacaatactcgtactgtctcttaaactgttcttggtcttttgtgtttctagtgttgttgctaagactcttgcattgcaggagcttaagggaaacattcgagtattctgtagggtgcgacctttattgccaaatgaatcaggagctgttgcttatccaaagagtggagaaaacttaggtcgtggcattgagttgacacataatgctcaaatgtattctttcacatttgacaaagtatttgagcagtcggcatcacaagaagatgtgttcattgagatttcccaactcgtccaaagcgcccttgatggctacaaggtgtgcatatttgcatatggccaaactggctcgggtaaaacatacacaatgatgggaaatccagaattgcatgaccagaaaggattaattccgagatcacttgaacaaattttccaaacaagccaggctcttatttcacagggatggaaatataagatgcaggcatctatgctggaaatctacaatgaagccatacgtgatctgctagccactaatcgcacaactgttcaagatggtggcgcttcaaagtacagtatcaagcatgatgccaatggtaatacccatgtatcagatctcacaattgtcgatgtatcgagtatcaatgaagtttcttctctcctcaagcgggctgctcagagcagatctgttggaagaacacagatgaacgaagaatcatctagaagtcattgtgtgttcacgcttcgaatttttggtgtcaatgagggaacagaccagcaggtgcaaggagtgctcaatctaatcgatcttgccggcagtgagcggcttaacaagagcggtgccaccggagataggctaaaggagacacaggctattaataagagcctctcatgcttgagcgatgtaatcttctccattgcaaagaaagaggagcacgttccgttcaggaactcaaaattaacgtacttgctacagccatgccttggaggagactcgaagacacttatgtttgtgaatctgtctccagaggtgtcgtctacaggggagtcaatttgctcgctacggttcgcagcacgggtgaactcgtgcgagattggcatccctcgtcgtcaaacccaagtgcgtagcttggcgcaaggatgagttggcttggacaaaatgaatgtccatgactaattgtatttgtgtgttgtttgagggatgcaatggatcatttgcatcccctccgtgtgttggttgcttagagggtgtgtataatattctgatttggcatgtggctttgttgattgtacgagcatcgcattgcattacattacagatagtactgtagtatctaatttgtggctgcatcaatgtgcagtggtagtaacaagatgtgaggttggttgtattttattggagaagtgccctgtgttgtgttgggctggctttgtttggatgataaagacagacaagtaattggaattgaaatgctctgttgctttttagtaaaaaaaaaaaaaaaaaaacgcgacgggggccccggtacccaattcgccctatagtgagtcgtattacaatt

SEQ ID NO: 93842 - DNA, 158 bp, Oryza sativa
  Clone ID: PAT_MRT4530_92187C.1
attacaaagggaataaaagaactcggtgatatcgacgagaccgtagtcgagttggcccgactagatctcccggtgacttggctcctggggtcccttttataccgcgggtcagtcgatctccaagtagaactcggagatatcggacccctcacaatatg

SEQ ID NO: 93843 - DNA, 183 bp, Oryza sativa
  Clone ID: PAT_MRT4530_92188C.1
atgtacttgtctgcaatctttgcagacatatcaataacacagcagatcattgatgaccagaatatgggcaatccaaggagccaagggagaagaggaggcctcggcagaatgttgaaggagcacaaggcgaggctgtacatcatccggcgatgcgttgtcatgcttctctgcaaccgcgactga

SEQ ID NO: 93844 - DNA, 417 bp, Oryza sativa
  Clone ID: PAT_MRT4530_92189C.1
atgtcgagtgattgtgacaagacccttcatataaccccctctgaccaatcgcaccacacctcaggtttcgccctcgcccccagcaagcaacgggcaggcccccctcatgccacgttacccattcccgcttgtggggcggccggcgccgacacatgggccccacacgttagcgggcaaagaggacgtggcctcgggcgcatggacaacccagatagggggccggggccgatccaacggcccagaccggccgcggctgagatcaaggggaggcaacctaccggcggtggcgcacagcggcagcggcctggccggacagccatcggcggcggtggcgcgtcgcgaacaggcctcgagttggtcggtgaaggggagaatgagagagggaggggagtgctcaccgagctcatgcaacggtga

SEQ ID NO: 93845 - DNA, 151 bp, Oryza sativa
  Clone ID: PAT_MRT4530_9218C.1
cactgacacatcacatatattcatttggggggggcagctaattaaggtctttgtactgaatattgatttatacaaaacacaaacagggatattctcttttatgcacttgacattcttaacaattattattccaaaaactactatatttttt

SEQ ID NO: 93846 - DNA, 678 bp, Oryza sativa
  Clone ID: PAT_MRT4530_92190C.1
atgtcggaggcgatgttccggttcatgtccaagaacggcgccggcgatgggtgcggcggcggcggaggcggaggaggaggaggggtggcgctggaggtgaccgtcttgtcggcggagtcgctgcggctgccgccgccgtcgtattattcgctgatcccgaggcggctgcggccgtacgtgacggtgtcgtcggcggcgtcggcgtgcagcacggacgtggcggcggcggcgagcggcgagcactcgtggaacgacacgctcgtcgtccccgtgggcgcggagttcctcgagagccgcggcggcggcggcgtgcacgtggcggtgtactcggagccggcgtgccggctcgtcggcggcgccacgccgctggggtggtgcaggatccccgccgccgacgtgctcgacggcctccgcccgccgcgcgcgctccgccggctcagctactccctccgctgcccgcgcaccggcggccccgcccgcggcgtcgtgcacctcgccgtccgcgtcctcggcgacctcgtcccgccgcctccgccgcagcatgccccgtcgacgccgccggcgcagccagggtggtgccgcgtggcgatgggcatcccggtgtcggggacatccgccgccgtggtggggatgccggcgtgggcggcgtggggcggcgaggcggcggcgtcgcggtga

SEQ ID NO: 93847 - DNA, 345 bp, Oryza sativa
  Clone ID: PAT_MRT4530_92191C.1
cacaccccaccagcagcagcagcaggagctgagcttgaaacatcaaagctaggtacacatgggcgccgccaccatggccctctcggccccggcgctggacgggcaggccgccgcgaaggtgttcggcgaggggcgcatcaccatgcgcaagtcgtgcgcgaacgccaagcccgccgcgtggatcagcccgatgtacgggccccaccgcagtgctctacctcggcccggtctccggcaagcgcgcgagctacctgaccgaggagttccccggcgactacaggtgggacaccgtggggctcttctgcgacccggggacgttcggcaagaacgcggagctggagggga

SEQ ID NO: 93848 - DNA, 375 bp, Oryza sativa
  Clone ID: PAT_MRT4530_92192C.1
accgacaggggcgagggaaggtgcggttgcggacgacggcgggaggggaagtggccgaggcccgacggcggctgtggtctccacctctgccgcctctgccggcgacacctccagccgtgcctccgcttccgcctccgcccgcgccagccggccgccacctacacctccacctccgctagcgcctccccccgcctcctggccaccaacaccaccgaggcctccctcacctccgccactgactcagcagaggagtgcctcttcgagatcctccactgcctccctggcggcatcgagcgtggcgcttccacctgcgtctcccgtcgctggttcgtcatggaggacttcaaactgtcggccagtgtgccccttttgtaa

SEQ ID NO: 93849 - DNA, 393 bp, Oryza sativa
  Clone ID: PAT_MRT4530_92193C.1
atgttcgtgctggggcaggcgctggtctacctcatcctccgtagctcgtggagcgtcttctccaaggacagcaagctcagcggtgatgtggcggcggagacacgggagaaggggatgcggccggaccggaccgaggtggcgagcgtcgacaacgacgaggcgtgcgagctggtgagcggcacggacctcgtcatcggtgtcgacgttgatgacgagggcgaggacatgtccgcgcctcacctgccagccgcagcgtcgcgccgccatcgccaacggcaacgacttgatggcggcgtcgtcgagtcgatcttggtgatgatggccatagccgcacgccaccatcgccgaccgcacgagtgggacggggatgccagcgagcttgctccaccctga

SEQ ID NO: 93850 - DNA, 735 bp, Oryza sativa
  Clone ID: PAT_MRT4530_92194C.1
atgcaacttcatggggcagctgccagatccgggctaggggcggtcgcccgccgccgcgcgcacatcaagcagcgagcacatcccctcctcgtcaagggggcagcaagcagacagatcaagcagcaacacatccaaatccaaacaagcaagaaagatcgagcagcaagaaacacgagcactcaactcatcaagaaagatacaaggcaatacggcaacgaagtcttactctattacataatacatggattcggtccacctcctaccgctagtcggataggcaggccaagtgggtatgcggtacccatgatgtccacaaagggagtagcaataactaaggatatcttgcaccgagaagaggaagcgaatcaagtttttgggagagcattgtgcaactgctcgcttgtgcttgagtacgactacgtcgactacttcttcttcatcatggctgatgacaagaacaggaacaacgacgggaacaacaacagttctctttccgctaccgttgcaaccactgctccatcaccatataagaagagtggcaagattttgacaataacaaaggttgtggttagagacggtgatgaaaatctggagatttcccttaatcgtactcaaacccaagtaactgaaccaaatcttctgttgtttttttatggaggaggatggaacacactttcggcaggaattcctctaccatcggttgaacaacaacaaaccgttattgcctgcgattct

SEQ ID NO: 93851 - DNA, 3293 bp, Oryza sativa
  unsure (1)..(3293): unsure at all n locations
  Clone ID: PAT_MRT4530_92195C.1
atgaactacacgcatagatgcctccacagccacaaactccctcttctcatcctcctcattgccatcgtcgtcatactcatacagccatactccatccatgctgctgccaacagcagcaacaccaccatcagatgcctgacatctcagtcatccgccctcctccagctgaagagctccttccacgacgcgagccgcctctcgtcctggcaaccggacaccgactgctgccgatgggagggcgtcacctgccgcatggcttctgggcatgtcgttgtgctggacctcagtgatggttatcttcagagcaatgggctgcaccctgcactgttcaacctcaccttgctcacaaacctcgccctcagtggcaatgacttcatgggagcacaactcccagattctgggtttgagcggctttcgaaacttgtcagccttgacctctctgcgaccaactttgctggccagatccccattggcattggaaatctgagcaacatgcttgctcttgacttgtctcataaccccaatttgtacctcacggagccaagttttcagaccttcatagcaaacctgagcaatctgagagagctctaccttgatgagatggacctctctagcagcggggcaacttggtcaagcgatgtagcagcttctgctccacagattcagatacttagcttcatgtcatgtggcttgtctggtttcattgatccctccttctcacgactccgttcactgacaatgatcaacgtcagactcaatgtcatcagtggcatggttcctgagttctttgccaacttctctttcttaacaattctggagctatctggcaatgcttttgagggtcagttccccacaaagatcttccaactaaaaaggctgcagtttattgatttatactggaacaataagctttgtgtgcagttgccagaattcctacctggtagtcgtctggaagtgttggatctcatattgaccaaccgttctaacgccataccagcatcagtggtcaatctcaagtatctaaagcatttgggccttacaacagtagaggcttcaatgaattctgatatccttttgatcagagaactccactggctggaagttctccggctctatggaggatcaggacaagggaagctggtgtcgttctcttggataggcagccttaaacatttgacatacctggagcttggcaattacaacttctctggattgatgccctcttcgattatcaatcttacaaatctgacaagtttaacgctctacaattgcagcatgtctgggcccataccttcttggattgggaacttgatccaactcaataatttgaacttcagaaacaacaacctcaatggaacaattccaaagtccatcttcgcacttcctgcgttgcaatcactatatctagattctaatcaactttctggtcatttagaagacatccctgttccattatcttcatctgtgtatgacattgatttaagcaacaattggcttcatggccccattcccaaatcatttttctgtcttccaaatcttgagtatctcaatcttgagtcaaatcacttgaccggcatagtggaacttaggcctttctggagactaagaagcctttattttctgggtttctctaacaataagctgtcggtgattgatggagaagattctccatctcaatatctccctaagattcagcacctaggactagcatgttgcaacctcacaaaacttccaagaattctgagacatctatatgacattcttgagctagacctttcaagtaataagattggtggagttataccaggatggatatgggagatttggaaggacacccttggatcattggacctctcgaacaatgcatttactagcctggagaactctccctctcttgttacatttacacatctaagccatctaaatctcagtttcaatagacttcaaggagaaatacccataccagccatatcattgccttatggtgtagttgtattggattactcaaacaatgggttctcttccatactacgtacatttggtaggtatcttaacaaagtagcctatattaacttgtccaaaaacaaactaaaaggctatgtacccatttccatttgtagtatgaagaaactccaattcctgtacttatctgataacaactttagtggtttcgttccatcttgtctggtagaaggcagaagcttaagggtactgaatttgagggggaataaattcaacgggatgttgcctaagggcattaaagaaggatgtaagcttgagactatagatttgaacagcaaccaaattgaagggaggctgcccagaacactatcaaactgcaaaagtctggaactcctcgatgttagtaacaatcacatcctcgatctgttccctttgtggctggggaatcttcccaagcttcgagttcttgtactgagatcaaaccaattatatggcacaattaagggtctccataatagtgatctaacaagggatcacttctcaagcttgcaaatacttgatttagccaataacactctatctggtcagttgcccccaaaatggtttgagaaactgaaatcaatgatggcaaatgtcgatgatggacaagttttggagcaccaaacaaacttttcacaaggatttatctatcgagacatcatcactatcacatacaaagggtttgatatgacattcaatagaatgctaactacctttaaagcaattgatttctcaaataactcatttgttggagttattcctggaacgatagggagtcttgtttcacttcatggacttaacatgtcacataataatttcactggagcaatcccgcaacagcttggtaacttggctcagctagagtccttggatctctcttggaaccagctctcaggggtaataccacatgagttaacatttctaacttctctttcttggctgaatctttcgaataacaacttgactggaagaataccacagagcaaccagttcttgtcgttttccaacagttcatttgaaggtcaaagggggaacctactgtatttgttagaaatatcactgaatctactttgctttggctttggaaaataggaagcttcttcagaagacagcagtttgtggcaagataaagtaggggtcatcctaatgtttgtctttgctggcttggngtttgtggttggcttatgctgacaatcatatntcaactggtttgccaagtcaaagggggaacctacttgtattgtagaaatatactgatctacttgctttgccttggaaatatgagtatactt

SEQ ID NO: 93852 - DNA, 581 bp, Oryza sativa
  Clone ID: PAT_MRT4530_92196C.1
ttttcagagttctaccatatggagtacgaccatctctgagcagaagggacactacaaatttacggcgtcttgcccgtgggctgccacctcactttgctcttgggcgaagcagacaactccaaggcttagcagctgctatggtgaagttgtgggagaaaagttctattgcaaaaattgctctgaaaagaggagtgcagcttaccacaagtgagaggatggctgaagatataaagaaattgacaggtggtgtaatgctttcgaggaacaatgactttatggtcttctacagaggaaaggatttcttgtccccagaactcgcggagaaactgctagagagggaaagatgggcaaagtccttacaagatgaggagcaagcgcgattaaatgcagcgtcttccttttcttccagaactgaggcacctgtagagcctactgtggctggtacccttggagaaactcttgaggctaactctaaatatggaaataaactggatgagaattatgagaacaagatgactagaactgtagaagctgcaagacatgctgaccttgtaaggaagctagagtggaagctccaactt

SEQ ID NO: 93853 - DNA, 1650 bp, Oryza sativa
  Clone ID: PAT_MRT4530_92197C.1
atgaagcttaagactagtaatggctggtccgacaagagttttacagaacttcttgagctgttaaaggacctgttgccaaaggggaacaatttaccgcagacgacatatgaagcgaaatataaacgagcaaagagtgaaagtgaaggaagtaagccaaagatgggaggccccgcaaaggtggtgtggtatctcccaattgtggagcgcatgaagagaatgtctgcgaataaggaacaagctaagctatcgtcacagtacatggccagttctgcttggttgtgcttcaaaagaaagtatattatgcttgccatgctcattcaaggaccaagacaacctggcaatgatatcgatgtgttccttgaaccgataatcgatgactttgaaaggctatggaatgagggcacacaaacatgggacgcatatgcacaagagtatttcaagctccatgcgattatgttttgtaccatcaacgattatccggcccttggcaacctttctggccaaactgtgaaagggaaatgggcgtattcggagtgtatggaggaaacaagaagcaaatggttgaagcattcatacaagacggtctacatgggtcacaggagatttctcccaaggtatcacccatataggaatatgagaaagaatttcaatggaaacaaagatacaaccggaccctcggcagagctaacagggacagagaagatcattgatcccgagggactagacgaactacaggcagaaattgtgagaaccctatgtcatcttgagatttactttcctccaactttctttgacataatggaacatcttcccgtgcaccttgtgaggcaaacaaagtgctttggttcagctttcatgacgcagatgtatccttgcgaaaggtacctggggatccttaagggttatgtatggaaccgttcacaccccgaggggactatcatcgagagttacaccaccgaagaggtcatcaatttttgtgtggactacatgtcaaaaacatcttcaattggattaccacgatctcctcacgaaggaaggcttgatggtgttggtactattggaaggaagattgttaggttggatcggaaggtgtatgataaagctcatttcacgggtcttgaatggagtgccaccacctggcaaggatatgtcataaatggatacacctttcacacggtaaagcaagacagcaaatgcacagtgcagaacagtgggttacgcatcgaggctgctagtgacggtggtcggcgtgatcaatactatggcagagttgaggaaatattggaggtagattacttgaagttcaaagtcccattgtttcgttgccgatgcgtcgatcttcgcaatgaaaaagttgataatgaaggtttcaccactgtcaacctggctaacaacgcatacaaggatgaaccgttcattctcgccaaacaagttgttcaagtcttctacatagttgacccatgtaacaagaaactacgtgttgttcatgaagggaaaaggagaattgttggattggacaatattgcagacgaggatgattacaaccagcacgtccacggcataggtcaagaaatacctctagaagaggaagaagaagaagatgacgttcaacatgcacgcgtcgactatgaggaaggattatttttgtaa

SEQ ID NO: 93854 - DNA, 786 bp, Oryza sativa
  Clone ID: PAT_MRT4530_92198C.1
gaaatccccaatctgagaaatccctaactacgccgccagcgcgtgactccgcggcgtcaccgtcctgcgcacgaagccgccgccgcctccaccgccgcaggccaactcctccacgcaactcccccacgccagaccccaacgccgaccaactcctccacccacctccctgcctaatcctcctcttcccccaccgtctccgccgtccatcgccgcctccaccgtccatcgccgcctccgccgtcacccctttggacctcctcttcccccactcagctcatccccacctcagccatcatccaccaggctgagccatactccatctccaggccttcctctaccctcctcggcttcactggttgttcccacccagccatatccgttcacttttttttttttttttgttcagagagtgatttggtcatccagatcataagcaagactccggaaggatggaaattgtgtgcggaactgcgttggtgtaatgaagagtggataaaagagtcatgtgaaggtagggtatacagggaaatgatggatgggccagcacaccgtcaaggcagcgcttcacttgaccgattccaaaagaacatggagaagaaggagaagaggccagtgggtatatttgaggcttatgcagaagcaaggaagaatggaaaagatggagaggactattgtactgaccgtgtcaaggcacccgagaagtattctgttgccgtttccgttctgttgaacatcccgagcgttggatttttctcccgtgctgctctaaccacccaggatgtctag

SEQ ID NO: 93855 - DNA, 537 bp, Oryza sativa
  Clone ID: PAT_MRT4530_92199C.1
atgaatggatttatgaagaaatatacttgctggaccaagcatggagagcaagaggcgcctgatgttgctgctgaagaactgttggatcaggatgtagagaacaccgccacagctcgagaaggcatgttcgtaccttctcctttaggtggagagatcatagatttggacactcaatgtctatctacaatgttgcatgacattgaagacgcagaggacaacgatagggattttgagaagtttagtaagttggtggaagattgtcagatgcccttgtataatggatgcaagttgaagcacaaggggaacaatttaccgcagacgacatatgaagcgaagcaagtattatgtccgttgggcctggaggaatacgctgacttggatgtctgccctgtctgtggggcatcaagatacaaacgagcaaagagtgaaggtgaaggaagtaagtcaaagaggggaagccccgcaaaggtggtgtggtatctccgaattgcagagcgcatgaagagaatgtttgcgaataagaacaagctaagctag

SEQ ID NO: 93856 - DNA, 1383 bp, Oryza sativa
  Clone ID: PAT_MRT4530_9219C.1
atgtcgtcgtcctcgccgtcgctgctgtctcgtcggagtacggcggagctggagctgcctgtcccgccggagttccggtgcccgatatcgctagagctgatgcgcgaccccgtcgtggggccaaccggcatcacctacgaccgtgccggcatcgaggcgtggctgctcgccgccggagcggggaagacggcggcggcgtcgtcgacgtgcccggttaccaaaggtgacctccgcgccgacgacctcgtccccaaccacgccctccgccgcgtcatccaggcgtggtgcgtcgccaaccgctgccgtggcgtcgagcggatccccacgccgcgggtgcccgtcacgccggcgcaggcgggcgaggtgctgggcgaggtcgaggccgccgcgcgggcgggcgacgcggcgaggtgcgtcgcggcggtgcgcgaggtggggcgcctcgcgcgggagtccgaccgggaccgccggtgcctcgcgtccgccggcgcggcgcgcgcgctcgccgcggcggtcgcgtcgttccccgcggcgagtgactcggcgtcggcgtcgtcggtcctgctcgacgacgtcctggcggcgctggtgctcgtcatgccgctcgacgaggaggccatcgtggccatcggctcgtcggccgcgtcggtggcgctgctcgccaacgtcgccaagcacggcgacctgcagaggaggctccaggcggtggtcgtcatcagggagatcgtcgcgttgtcctcctgctgctcacgcaacggcggcgccgccaccgccattgatctcagcgacaaccttgacgggatcatcgaggtgttggtgaacacgatccgggacccgatctcccctcaggccaccaaggcctccctcgtcgccgcgtaccacctcgcgctcgccgacggccacgctgcggcgcgcctcgcggaggccggcctcgtgccgtccctcgtcgagctcctcatcgacggcgaccggagcacggccgagaaagcgctcgccgcgctcgacgcgacgctggcgtccgaggccggcagggcgcgcgcccaagccgacgcgctcgccgtgccggtgctcgtcaagaagatgttccgcgtgtccgacacggccaccgagctcgtcgtctcggcgctccaccgcatctgcaagaaatggcacgacggtgatgacgacgaggtggggtcgccggcggcgaggcggagcgccgtcgtggaggcggtgcaggtgggcgcgttccagaaggtgatgatgctgctgcaggttgggtgcagggatgcaaccaaggagaaggcgactgagctgctcaagctgatgatcaagtatgaaactagaggaggagctcactgcattgacgccatggatttcagagggctcaagagggtttcttga

SEQ ID NO: 93857 - DNA, 179 bp, Oryza sativa
  Clone ID: PAT_MRT4530_921C.1
gaataatgactgtatatcccagtactagttttttcttgtccccacatcccatctaattcaacacatgaccaagagatgtgaaatcattttacatgtaaatgtggtgacaccttgccaacctcacttttgagaagatgccttacacatatattcagttactcaaaaaaaaaaaaaaaaaa

SEQ ID NO: 93858 - DNA, 2514 bp, Oryza sativa
  Clone ID: PAT_MRT4530_92200C.1
atggatcgtagatggatgtactatgcgcatcgttcgtctaccgagtatagagagggggtcactgaatttgtcacatttgcggataatgacagaaaaagtaggatgagcatgcacatgttgtgcccatgtagggactgtaagaatgaacagatgatcgaagacaaggatgaaaccaagcatggagagcaagaggcgcctgatgtcgcagctgaagaagtgttggatcaggatgtagagaacaccgccgcagctcgagaaggcatgttcgtaccttctcctttaagtggagagaccatagatttggacactcaatgtctatctacaatgttgcatgacattgaagacgcagaggacaacgacagagattatgagaagtttagtaagttggtggaagattgccagatgccgttgtatgatggatgcaagtcgaagcacagcaaattgtcatgcatgttggaactcatgaagcttaaggctagtaatggctggtcggacaagagttttacagaactccttgagctgttaaaggatctgttgccagaggggaacaatttacctcagacgacatatgaagcgaagcaagtattatgtccgttgggcctggaggaatacgctgacttggatgtctgccctatctgtggggcatcaagatacaaacgagcaaagagtgaaggtgaaggaagaccgagacaacctggcaacgatatcgatgtgttccttgaaccgataatcgatgacttcgaaaggctatggaatgagggcacacgaacatgggacgcatatgcacaagagtatttcaacctccatgcaatgctgttttgtaccatcaacgattatccggcccttggcaacctttctggccaaactgtgaaagggaaatgggcgtgttcggagtgtatggaggaaacaagaagcaaatggttgaagcattcacacaagacggtctacatgggtcacaggagatttctcccaaggtatcacccgtataggaatatgagaaagaatttcaatggacacagagatacagccggacccccgacagagctaatagagacagaggtgcacaacttagtgatgggaataaccaacgagtttggaaaaaagaggaaagttggaaagcgaaaagagaagagcacatcgaaggaaaaaacagaggagcatatggaaaaacaaaagacaaaagagaggagcatgtggaaaaaaaagtcaatattttggagactaccatactggaaggatcttgaagttcgccactgcatagatttgatgcatgtcgagaagaatctgttgcccgttgcaataaggaatattttgcctcctaaggtgcgacacacgatccagcgattgtgttccttcttccatgcaatcggccagaagatcattgatcccgagggactagatgaactacaggcagaacttgtgagaaccctatgtcatcttgagatgtactttcctccaactttctttgacataatggaacatcttccggtgcaccttgtgaggcaaacaaagtgctgtggtctagcattcatgacgcagatgtatccttgcgaaaggtacctggggatccttaagggttatgtacggaaccgttcacaccccgaggggagtatcatcgagagttacaccaccgaagaggccatcgaattttgtgtggactacatgtcagaaacatcttcaattggattaccacgatctcatcacgaagggaggcttgacggtgttggtactgttggaagaaagactattaggttggatcggaaggtgtacgataaagctcatttcacggtactacagcatatgactgaggtggtgccgtacgttgatgaacaccttgcagttatccgacaagagaacccaggccgatcagagagttgggtcaggaataagcacatgtcttctttcaacgagtggctgaagaaccgaattgccaggttgcagaacttgtctagtgaaacacttcagtggttgtcacagggtcctgaatggagtgccaccacctggcaaggatatgacataaatggatacacctttcacacggtaaagcaagacagcaaatgcacagtgcagaacagtgggttacgcatcgaggctgctagtgacggtggtcgtcgtgatcaatactatggtaaagttgagcaaatattggagctagattacttgaagttcaaagtcttgttgtttcgttgtcgatgggtcgatcttcgcaatgtaaaagttgacaatgaaggtttcaccactgtcaacttggctaacaacgcgtacaaggatgaaccgttcgttctcgccaaacaagttgttcaagtgttctacatagttgacccgtgtaacaagaaactacatgttgttcgtgaagggaaaaggagaattgttggattggacaacattgcaaacgaggatgattacaaccagcacgtccacggcataggtcaagaaatacctctagaagaggaggaagaagaagatgaagttcaatatgcacgtgtcgaccatgaggaaggattatttttgtaa

SEQ ID NO: 93859 - DNA, 231 bp, Oryza sativa
  Clone ID: PAT_MRT4530_92201C.1
cactgctttacatgggtctctgggtgttactgctacacccacaatgcacagtcgtctaagaggagtttttgctggagctaagactgcacacatcgctcatcagacaacactgacaaataacatttgtggtcagccaattacttctgagctgtggacacaactggtgagctcagctgtgccagagtgctataagtgaatggctcagcctgagcctttcagtgacaggaaaga

SEQ ID NO: 93860 - DNA, 165 bp, Oryza sativa
  Clone ID: PAT_MRT4530_92202C.1
atgcagaggaaggtgtcggcagaggcgatgagtgaaacagtggaggtgggctcggcgtcgcctggtcctgtccccgcattccgtgaaccgcaggagcggccggggggtcggggcctcggggtgccacgttatgcccctcgggcccttgcactgctttgcccctag

SEQ ID NO: 93861 - DNA, 3303 bp, Oryza sativa
  Clone ID: PAT_MRT4530_92203C.1
atgggacccacatatcatgctcccctctctcttcctctctcttctctctctcactctctgtctctcactcttcctctcgctttatcgccggcggcgcagacgggggatgcggcggcggaggcggcagcgggtgacgcggacgcagtggctgtggtggcgggggacgaggcggcggtgtcggccgtggccacgacgagcaggcacccctcgtcgcggggacagatggaggcgatggatcgtagatggatgtactatgcgcatcgttcgtctaccgagtatagagagggggtcactgaatttgtcacatttgcggataatgatagaaaaagtaggatgagcatgcacatgttgtgcccatgtagggactgtaagaatgaacagatgatcgaagacaaggatgaagtgcatgctcatttgataatgaatggattcatgaagaaatatacctgctggaccaagcatggagagcaagaggcgcctgatgtcgcagctgaagaagtgttggatcaggatgtagagaacaccgccgcagctcgagaaggcatgttcgtaccttctcctttaggtggagagaccatagatttggacactcaatgtctatctacaatgttgcatgacattgaagacgcagaggacaacgacagagattatgagaagtttagtaagttggtggaagattgccagatgccgttgtatgatggatgcaagtcgaagcacagcaagttgtcatgcgtgttggaactcatgaagcttaaggctagtaatggctggtcggacaagagttttacagaactccttgagctgttaaaggatctgttgccagaggggaacaatttacctcagacgacatatgaagcgaagcaagtattatgtccgttgggcctggaggaatacgctgacttggatgtctgccctatctgtggggcatcaggatacaaacgagcaaagagtgaaggtgaaggaagtaagtcaaagaggggaggcccagcaaaggtggtgtggtatctcccaattgcggagcgcatgaagagaatgtttgcgaacaaggaacaagctaagcttgtgcgctggcatgccgaagaacggaaagtcgatactatgctgaggcacccagcagattcagtacagtggaggacaatcgataggatttaccaggaattctcaaatgacccaagaaacatgcgtttcgcaatgtgtacggacggcattaatccttttggtgatttgagcagtcgtcacagtacatggccagttctgcttgttaactataaccttcctccctggttgtgtttcaaaagaaagtacattatgcttgccatgctcattcaaggaccgagacaacctggcaacgatatcgatgtgttccttgaaccgataatcgatgacttcgaaaagctatggaatgagggcacacgaacatgggacgcatatgcacaagagagatttctcccaaggtatcacccgtataggaatatgagaaagaatttcaatggacacagagatacagccggacccccgacagagctaacagggacagaggtgcacaacttagtgatgggaataaccaacgagtttggaaaaaagaggaaagttggaaagcgaaaagagaagagcacatcgaaggaaaaaacagaggagcatgtggaaaaacaaaagacaaaagagaggagcatgtggaaaaagaagtcaatattctggagactaccatactggaaggatcttgaagttcgccactgcatagatttgatgcatgtcgagaagaatgtatgcgagagtttaatgggattactacttaacccaggtactacaaaggatggtctcaacgcccgacgagatctggaagatatgggtgttcggtcggagctacatcccataaccacggaatccggcagggtttaccttcctccagcctgctacactctctcgaaagaagagaagattgatttgctaacatgtttgagtggtataaaggttccatctggttactcatcaagaatcagtaggctcgtttcactgcaagatcttaagttggttggaatgaagtcgcatgattgccacgttcttatcacacagctgttgcccgttgcaataaggaatattttgcctcctaaggtgcgacacacgatccagcggttgtgttccttcttccatgcaatcggccagaagatcattgatcccgagggactagatgaactacaggcagaacttgtgagaaccctatgtcatcttgagatgtactttcctccaactttctttgacataatggaacatcttccagtgcaccttgtgaggcaaacaaagtgctgtggtccagcattcatgacgcagatgtatccttgcgaaaggtacctggggatccttaagggttatgtacggaaccgttcacaccccgaggggagtatcatcgagagttacaccaccgaagaggccatcgaattttgtgtggactacatgtcagaaacatcttcaattggattaccacgatctcatcacgaagggaggcttgacggtgttggtactgttggaagaaagactattaggttggatcgtaaggtgtacgataaagctcatttcacggtactacagcatatgactgaggtggtgccgtacgttgacgaacaccttgcagttatccgacaagagaacccaggccgatcagagagttgggtcaggaataagcacatgtcttctttcaacgagtggctgaagaaccgaattgccaggttgcagaacttgcctagtgaaacacttcagtggttgtcacagggtcctgaatggagtgccaccacctggcaaggatatgacataaatggatacacctttcacacggtcaagcaagacagcaaatgcacagtgcagaacagtgggttacgcatcgaggctgctagtgacggtggtcgtcgtgatcaatactatggtagagttgagcaaatattggagctagattacttgaagttcaaagtcccgttgtttcgttgtcgatgggtcgatcttcgcaatgtaaaagttgacaatgaagctttcaccactgtcaacttggctaacaacgcgtacaaggatgaaccgttcgttctcgccaaacaagttgttcaagtgttctacatagttgacccgtgtaacaagaaactacatgttgttcgtgaagggaaaaggagaattgttggattggacaatattgcagacgaggatgattacaaccagcacgtccatggcataggtcaagaaatacctctagaagaggaggaggaagaagatgaagttcaatatgcacgtgtcgaccacgaggaaggattatttttgtaa

SEQ ID NO: 93862 - DNA, 750 bp, Oryza sativa
  Clone ID: PAT_MRT4530_92204C.1
atgaccgtcacctttgccgtcatcggtggggcatccggccacggcccgtcacagatggatcgtagatggatgtactatgcgcattgttcatctaccgagtatagagagggggtcactgaatttgtcacatttgcgaaaaatgacagaaaaagtaggatgagcatgcacatgttgtgtctatgtaggaactgtaagaatgaacaaatgatcgttaatagcgatgaagtgcatgctcatttgataatgaatggattcatgaagaaatatacctgctggactaagcatggagagcaagaggcgcctgatatcgcagcagaagaagtgttggatcaggatgtagagaacaccgccgcagctcgagaaggcatgttcgtaccttctcctttaggtggagagaccatatatttggacactcaatgtctatctacaatgttgcatgacattgaagacgcagaggacaacgatagagattttgagaagtttagtattttggaatacgctgacttggatgtctgccctgtctgtggggcatcaagatacaaacgagcaaatagtgaaggtgaaggaagatcgagacaacctggcaacgatatcgatgtgttccttgaaccgataatcgatgacttcgaaaggctatggaatgagggcacacgaacatgggacgcatatgcacaagagtatttcaacctccatgcgatgctgttttgtaccatcaacgattatccggcccttggcaacctttctggctaa

SEQ ID NO: 93863 - DNA, 1345 bp, Oryza sativa
  Clone ID: PAT_MRT4530_92205C.1
atgaatcgtagttggatgtaccatgttcatcgttcatctacagagtatagagagggggtcactgaatttgtcacatttgcggagaatgacagaaaaagtaggatgagcatatacatattgtgtccatgtagggactgtaagaatgaaaagatgatccttgatagctgagaagagcattctcatttaataacaaaaggattcataaagaaatatacttgctggaccaagcattgagcgcaagaggcgcctgatgccgcagctgaagaagtgttggatcagaatgtagagaacaccgccgcagctcgtgaaggcatgtttgtaccttctccgttaggtggagagaccatagatttggacactcaatgtctatctactatgttgcatgacattgaagacgcagaggacaatgacagagattttgagaagtttagtaagttggtataagattgtcagatgcccttgtatggtggatgcaagtcgaaccacaacaagttgtcatgcgtgttggaactcatgaagtttcaggctagtaatggctggtccgacaagagttttacataacttcttgagctgttaaaggacctgttgccagaggggaacaatttaccgcagacgacatatgaagcgaagcaagtattatgtccgttgagcctggaggtcagaggaattcatgcttgtccgaacgactgtattttgtactacaaggaatacgctgacttggatgtctgccctgtctgtggggcatctagatacaaacgagcaaagagcgaaaggtgaaggaagtaagtcaaataggggaggccccgcaaaggtggtgtggtatctcctaattgcggagcgtatgaagagaatgtttacgaataaggaacaagctaagctagtgcgctggcatgctgaagaacggaaagtagatagtatgcttaggtacctagctgattcagtacagtggaggacaatcaataggatttaccaggaattcttaaaggacccaagaaacatgcgtttcgcaatgtgtacggacggcattaatccatttggtgatttgagcagtcgtcacagtagatggccagttctgcttgttaactataacattcctccctagttgtgctttaaaagaaagtatattatgcttgctatgctcattcaaggaccgagacaacctggcaacgatatcgatgtgttccttgaaccgataatcgatgacttcgaaaggctatggaatgagggcacacgaacatgggacgcatatgcacaagagtatttcaatctccatatatgttaatgaatctaggcacacatatatcccgcaccattacacctctctggtagcctacccaaacaatta

SEQ ID NO: 93864 - DNA, 2355 bp, Oryza sativa
  Clone ID: PAT_MRT4530_92206C.1
atggcgcgcggcgggggcggcgggtgctgcccgccgatggatctgatgcggtcggaggcgatgcagctggtgcaggtcatcatccccacggagtcggcgcacctcaccgtctcctacctcggcgaactcggcctcctccagttgaaagaccttaacgcagacaagagtccttttcaacgaacatatgctgcccagataaaaaggtgtggtgaaatggctcgcaaattaagatttttcaaagaacaaatgtccaaagctggcatatcaacttctgcacaattaactgaaatttcgttggactttgatgatttggaggctggtgaatttttctattcggctcaaagaagtgctgcggcgcaacagagagaaatggaggcaaatcaatctggtgagagttcactggagagccctctgctggagcaggatacgttaacagatgcatcaaaacaagtgaagcttggatcattgagtggtcttgtaccaaaggaaaaggcaatggcttttgaacgcatcttattccgtgccacgaggggaaacattttcctcagacaagagtctgttgatgaacctgtcactgacccagtctctggagaaaaggttgccaaaaatgcatttgttattttctactctggggatagagcaaaagccaaaattctgaagatatgtgatgcgttcaacgcaaatcgctacccatttccagaagatgttgctagacaattacatgctgttcaggaggtatctgcaaagatatcagagttaaaggcaacaattgacatgggattagcacatcgtgacaatatattgaaaaatatcgcgtctgagtttgagaattggaaccgtctggcaaataaggaaaaaataatttaccacactttgaacatgttgagtgttgatgtgacaaagaaatgcttagttggtgagggctggagtccagtttttgcaacaactcagatccaagatgcgctccagcgagctactcttgatagcaaatcccaagttggttcaatttttcaagttctcaacacaacagaatctcccccgacatatttccagacaaataagttcacttcggctttccaggaaattgttgatgcatacgggatagccaaatatcaagaagcaaaccctggtgtattcactattgtcacttttcctttcttatttgctgtcatgtttggagattggggacatggaatttgcatattggtttcgacactctatctgataatccgagagaagaaatttgcttcacagaaacttggagacataatggagatgatgtttggtgggcgctatgtaattataatgatggcactcttttcaatctatacaggattaatatacaatgaatttttctctgttccatttgagctttttggtaaatctgcttatgcatgccgtgatccttcttgtggagatgctgcaacagaaggattactcaaggtaagacggacatacccttttggtgtggaccctgtatggcatggcagccgcagcgagttgccgtttctcaactcactgaagatgaagatgtcaattcttcttggagttgcacaaatgaaccttggaattgtgattagttactttaatgcgaaattcttcaggaacagtgttaatgtgtggtaccagttcatcccccagctgatcttcttgaacagcttatttggttacttatccatgctcatcattatcaagtggagcacgggggcaaaagcagatctgtaccatactatgatatatatgttcctcagtccaacagatgaacttggggagaaccaattatttcctggacagaaaacagtgcagcttgttttacttctgcttgctctggtgtctgttccctggatgctgatcccaaagccatttttcttgaagatggagcatgagcgaaggcatcaaggacaacaatatgcaatgcttcagagcacagatgactcagtggtagcggagatgggacatcataatggctcgaaccaccatgaggagttcgagttcagtgaagtttttgttcaccagttgatccacacaattgagtttgttcttggggcagtctcaaatacagcctcatatcttcgtctctgggctctcagtcttgcacactcggagttgtcaagtgtattctatgacaaggttctcctcctagctttcgggtacaacaacattcttatccgcatcgctggcattaccatcttcatctgtgcgacagttggtgtcttgcttgttatggagaccctaagtgcattccttcacgccttaaggctacattgggtggagttccagaacaaattctatgagggcgatggatacaagtttgcgcccttctctttcgcactgatcagtgaagaggaagactga

SEQ ID NO: 93865 - DNA, 3162 bp, Oryza sativa
  Clone ID: PAT_MRT4530_92207C.1
atgccgtcaccgatggatcgtagatggatgtactatgcgcatcgttcgtctaccgagtatagagagggggtcactgaatttgtcacatttgcggataatgacagaaaaagtaggatgagcatgcacatgttgtgcccatgtagggactgtaagaatgaacagatgatcgaagacaaggatgaagtgcatgctcatttgataatgaatggattcatgaagaaatatacctgctggaccaagcatggagagcaagaggcgcctgatgtcgcagctgaagaagtgttggatcaggatgtagagaacaccgccgcagctcgagaaggcatgttcgtaccttctcctttaggtggagagaccatagatttggacactcaatgtctatctacaatgttgcatgacattgaagacgcagaggacaacgacagagattatgagaagtttagtaagttggtggaagattgccagatgccgttgtatgatggatgcaagtcgaagcacagcaagttgtcatgcgtgttggaactcatgaagcttaaggctagtaatggctggtcggacaagagttttacagaactccttgagctgttaaaggatctgttgccagaggggaacaatttacctcagacgacatatgaagcgaagcaagtattatgtccgttgggcctggaggtcagaagaattcatgcatgtccgaacgactgcattttgtattacaaggaatacgctgacttggatgtctgccctatctgtggggcatcaagatacaaacgagcaaagagtgaaggtgaaggaagtaagtcaaagaggggaggcccagcaaaggtggtgtggtatctcccaattgcggagcgcatgaagagaatgtttgcgaacaaggaacaagctaagcttgtgcgctggcatgccgaagaacggaaagtcgatactatgctgaggcacccagcagattcagtacagtggaggacaatcgataggatttaccaggaattctcaaatgacccaagaaacatgcgtttcgcaatgtgtacggacggcattaatccttttggtgatttgagcagtcgtcacagtacatggccagttctgcttgttaactataaccttcctccctggttgtgtttcaaaagaaagtacattatgcttgccatgctcattcaaggaccgagacaacctggcaacgatatcgatgtgttccttgaaccgataatcgatgacttcgaaaggctatggaatgagggcacacgaacatgggacgcatatgcacaagagtatttcaacctccatgcgatgctgttttgtaccatcaacgattatccggcccttggcaacctttctggccaaactgtgaaagggaaatgggcgtgttcgaagtgtatggaggaaacaagaagcaaatggttgaagcattcacacaagacggtctacatgggtcacaggagatttctcccaaggtatcacccgtataggaatatgagaaagaatttcaatggacacagagatacagccggacccccgacagagctaacagggacagaggtgcacaacttagtgatgggaataaccaacgagtttggaaaaaagaggaaagttggaaagcgaaaagagaagagcacatcgaaggaaaaaacagaggagcatgtggaaaaacaaaagacaaaagagaggagcatgtggaaaaaaaagtcaatattttggagactaccatactggaaggatcttgaagttcgccactgcatagatttgatgcatgtcgagaagaatgtatgcgagagtttaatgggattactgcttaacccaggtactacaaaggatggtctcaacgcccgacgagatctggaagatatgggtgttcggtcggagctacatcccataaccacggaatccggcagggtttaccttcctccagcctgctacactctctcgaaagaagagaagattgatttgctaacatgtttgagtggtataaaggttccatctggttactcatcaagaatcagtaggctcgtttcactgcaagatcttaagttggttggaatgaagtcgcatgattgccacgttcttatcacacagctgttgcccgttgcaataaggaatattttgcctcctaaggtgcgacacacgatccagcggttgtgttccttcttccatgcaatcggccagaagatcattgatcccgagggactagatgaactacaggcagaacttgtacctgggatccttaagggttatgtacggaaccgttcacaccccgaggggagtatcatcgagagttacaccaccgaagaggccatcgaattttgtgtggactacatgtcagaaacatcttcaattggattaccacgatctcatcacgaagggaggcttgacggtgttggtactgttggaagaaagactattaggttggatcggaaggtgtacgataaagctcatttcacggtactacagcatatgactgaggtggtgccgtacgttgacgaacaccttgcagttatccgacaagagaacccaggccgatcagagagttgggtcaggaataaggacatgtcttctttcaacgagtggctgaagaaccgaattgccaggttgcagaacttgtctagtgaaacacttcagtggttgtcacagggtcctgaatggagtgccaccacctggcaaggatatgacataaatggatacacctttcacacggtaaagcaagacagcaaatgcacagtgcagaacagtgggttacgcatcgaggctgctagtgacggtggtcgtcgtgatcaatactatggtaaagttgagcaaatattggagctagattacttgaagttcaaagtcccgttgtttcgttgtcgatgggtcgatcttcgcaatgtaaaagttgacaatgaaggtttcaccactgtcaacttggctaacaacgcgtataaggatgaaccgttcgttctcgccaaacaagttgttcaagtgttctacatagttgacccgtgtaacaagaaactacatgttgttcgtgaagggaaaaggagaattgttggattggacaacattgcagacgaggatgattacaaccagcacgtccacggcataggtcaagaaatacctctagaagaggaggaagaagaagatgaagttcaatatgcacgtgtcgaccatgaggaaggattatttttgtaa

SEQ ID NO: 93866 - DNA, 3026 bp, Oryza sativa
  unsure (1)..(3026): unsure at all n locations
  Clone ID: PAT_MRT4530_92208C.1
atggcgcgcggcgggggcggcgggtgctgcccgccgatggatctgatgcggtcggaggcgatgcagctggtgcaggtcatcatccccacggagtcggcgcacctcaccgtctcctacctcggcgaactcggcctcctccagttgaaagaccttaacgcagacaagagtccttttcaacgaacatatgctgcccagataaaaaggtgtggtgaaatggctcgcaaattaagatttttcaaagaacaaatgtccaaagctggcatatcaacttctgcacaattaactgaaatttcgttggactttgatgatttggagataaagcttggagaactggaagctgaactagctgaagttaatgcaaacaatgaaaagttaaagcggacctacaatgagctgttggagtacagtactgttcttcaaaaggctggtgaatttttctattcggctcaaagaagtgctgcggcgcaacagagagaaatggaggcaaatcaatctggtgagagttcactggagagccctctgctggagcaggatacgttaacagatgcatcaaaacaagtgaagcttggatcattgagtggtcttgtaccaaaggaaaaggcaatggcttttgaacgcatcttattccgtgccacgaggggaaacattttcctcagacaagagtctgttgatgaacctgtcactgacccagtctctggagaaaaggttgccaaaaatgcatttgttattttctactctggggatagagcaaaagccaaaattctgaagatatgtgatgcgttcaacgcaaatcgctacccatttccagaagatgttgctagacaattacatgctgttcaggaggtatctgcaaagatatcagagttaaaggcaacaattgacatgggattagcacatcgtgacaatatattgaaaaatatcgcgtctgagtttgagaattggaaccgtctggcaaataaggaaaaaataatttaccacactttgaacatgttgagtgttgatgtgacaaagaaatgcttagttggtgagggctggagtccagtttttgcaacaactcagatccaagatgcgctccagcgagctactcttgatagcaaatcccaagttggttcaatttttcaagttctcaacacaacagaatctcccccgacatatttccagacaaataagttcacttcggctttccaggaaattgttgatgcatacgggatagccaaatatcaagaagcaaaccctggtgtattcactattgtcacttttcctttcttatttgctgtcatgtttggagattggggacatggaatttgcatattggtttcgacactctatctgataatccgagagaagaaatttgcttcacagaaacttggagacataatggagatgatgtttggtgggcgctatgtaattataatgatggcactcttttcaatctatacaggattaatatacaatgaatttttctctgttccatttgagctttttggtaaatctgcttatgcatgccgtgatccttcttgtggagatgctgcaacagaaggattactcaaggtaagacggacatacccttttggtgtggaccctgtatggcatggcagccgcagcgagttgccgtttctcaactcactgaagatgaagatgtcaattcttcttggagttgcacaaatgaaccttggaattgtgattagttactttaatgcgaaattcttcaggaacagtgttaatgtgtggtaccagttcatcccccagctgatcttcttgaacagcttatttggttacttatccatgctcatcattatcaagtggagcacgggggcaaaagcagatctgtaccatactatgatatatatgttcctcagtccaacagatgaacttggggagaaccaattatttcctggacagaaaacagtgcagcttgttttacttctgcttgctctggtgtctgttccctggatgctgatcccaaagccatttttcttgaagatggagcatgagcgaaggcatcaaggacaacaatatgcaatgcttcagagcacagatgactcagtggtagcggagatgggacatcataatggctcgaaccaccatgaggagttcgagttcagtgaagtttttgttcaccagttgatccacacaattgagtttgttcttggggcagtctcaaatacagcctcatatcttcgtctctgggctctcagtcttgcacactcggagttgtcaagtgtattctatgacaaggttctcctcctagctttcgggtacaacaacattcttatccgcatcgctggcattaccatcttcatctgtgcgacagttggtgtcttgcttgttatggagaccctaagtgcattccttcacgccttaaggctacattgggtggagttccagaacaaattctatgagggcgatggatacaagtttgcgcccttctctttcgcactgatcagtgaagaggaagactgagtttgcgcaattattgcatctattgtagcgtgtaatttcttggggcgtccttttttctcaaagcgtcaagtatttatcacggaagaatcataaacctccagtttgttccttcatcaggaaagggactagcagcatcattttttgctttgctacgaatgattcgtggcaagatgattttttgggtggccgttggcacatcgggtggcatcacccttattttggtgtaaggctaataaataataagtaaattctgcactcgggttgccatttgggcaattagttttctgcacataaataaacattgtatcaaatgttaatattccattgggttcttttattgtaataaagagtgcggcctacattctttaaaaaaaaaaaaaaaaaaaaactcgagggggggcccggtacccaattcgccctatagtgagtcgtattacaattcactgccgtcgttttacaacgtcgtgactgggaaaaccctgcgttacccacttaatcgccttgcacacatcccctttcccagctgcgtaataaccnaaaagcccgcaccgatcgccttccaa

SEQ ID NO: 93867 - DNA, 6456 bp, Oryza sativa
  Clone ID: PAT_MRT4530_92209C.1
atggaggccgccggcgccggggaagccgtggccatgacagcagcagccacgggtgctttgggtcctgtcatcgagaagctcggcgatttgcttcgcaatgagcacatggctgctctggagggaagccgcggagacattgagttcatcaaatctgaactcgagccgctgcgctccctcctcctgaggatatgggataaggaggatcgtcttgacgcggcgtgcaaggagtggatggcggaggcgaggatgctgtcctacgacatggaggacgccatcgacggcttcaggttcatgcttgctgtggaggctgctgctgcgacgagccctttcgagggaatgagaaatcaggtgcaggagctggtaaaccgttgctgcgagaagcagtggattacagaggccatcatcgacgcagacgcccctgcggctttgtcctcgtctccttccctgccccgcaagaatgcgtcggagctcgtggaggtggacgagaagaaagcggagctcatcaagttgctcaagcacaaagagagagtgtgcatacatggctctgctgggatgggcaagaccactcttgctggcctcgcgtaccaagcagtgagcgagcaattcgactgccgcaccttcgtgtcggtctgtccgagccaaagcatgatgcacgttctgactagcattaccagtgaagtcattgcgtctgctatcatcaaagcaatcagcgacaaacagagagaattaacagtgaataataatactgcaccaacaactcaaggcaccggtgaagccgacgaacaatgtctcatcgacagcatactggagctcctaacgtacaggagacaagtaacagacagcagcgcaccagttgcgggcaccggtatagcagacggcgccaaaactgacggttcagctcttcctaccaccgacactgcaactctcgctagcaccggtatagctgacacaaaaactgacggctcatctgtcgctcttgctggcactggtggtataggcgacgcaaagactgaaagcgcacctcatgctgcgactggtgcagacaacacaaagaaagctctcatcgacaggatatcaacgagattcgtcaccaacaaaaggaaactaaatgccagtgcacagcttgctggtgccggtgttgacgacgacaaacaatatctcgtcaacatcgtattgaaattgctaggagaaaaaagaaaagtaaccgactgtgcaccggttgctgggacgaccgatgtagaggatgatgaacaatatctcgtcgatatcttgtcacaattccttgctgaccaaaggtatcttgtcattgtggatgacatttggcattgccaacaatgggaagtcataaggaagtctcttgtaaagaatgaccggggcagtagaattatcatgacaactcgtgttaattcagtagttgaaaaatgttgcaaggacgaccatgctgttgtttgtgaagtaacggcgctttctatggatgctgcagtagctttatcggaaaagatattcaatgtccacactgctccatcagacaagaagagctgttcttctatagctaaactgtctggtcgtatgccgttagcaataatctgcatatcggccgcagtggcacagctgctatcaccgccatctgcaacaaatcggtttgatgtggccttgtgccaagcattaaaaggatttgcagaaattccctgcatgaaaccgttggttgagagtctagtccttggctaccactgccttcccccgcatctcaagacttgcttgctggaatgcagcatatataccccaaaccaaagattcgaaagggatgatctgatcaggatttggatggacgaagggtttgctgacgaggaacaagctcctggttactttgaggagcttgtcaaatgggggtatatttcgatttccccggctgaaggcagacgccatagccgggttgccgaatatgaaatcagcgccgtggtactagccttcctcagattccaggcagaagaacatggctttgttgcttccgcggggtatttctccaacatagagtccctgtgtggtcgacgacacagtaggatatctgtccagggaggcctgggttcatgggttgtttcaagattggatttctcatgcatgcgcacgctcgtggtttttggacgagcaagtttaataccattcgatcgtttgagccacctgcgagtgctgcatctagacgaggaggacacgagcttggagggtgcagcagatctatacaatttcccggatttgggcgacgatgatctggtggatatatgtgaactgcttttgctgaggtacgtgaaactaaagggctgcaaaatcaccatgctgcctccacaaattggacaactgaagcttctggagactctggacgtgagaggtacaggtgtcagggagctaccaagggagatcggggagctgcagcgactcaagactctgaatgtaagtaacacggcggtgacacaagtaccaaaggaaatcgggaagctgcacatgctcaagactctggacgtaagcgacacaaacgtgcgtgaactccccgcggaaataagagaactagaaaacctggagacgcttgacgtgagcaacaccatggttgcaaagttacccagggaaatcagagccctgcagctgttgaagacactgcacgtaagtggcatagatgtcacggaaacagagctagctgaggaaatcggacagctgcagcatctggagacacttgatgtcagtaacacaaaggttgcgaagctacccatggaaatttggaacctgcagcagctcaagactctgaatattagcaacaccaatgttagagagctaccttgggaagctggccagcgttccaactccatcagtgtggttgccggcaacaaggattcccctaaagtggtgaacttgcttgagggcgcagtggacaattatggtcatatttgttcgcgggagaacatatccattaccctctttgatcgtttcggctccagctgggaacctatacctgtggcgagatttaagattcccggcaaacatatcagtctcccggattggctcaataaagaaactctcagcgacatttcatccttagaaatcaatctctggaaactgagggaggatgacctcaagattcttcaggagatgcccaagcttcaggttcttgcactacgggtcgaagttctccccagaacagccatcactggcgcagggttctcaaggctggagagcttctgtgttgattgccgtgtgccacgactgagcttccagagtgaagccatgccggtgttgaaacatcttcagttcaagttctatgctttccgggcaaccaaacaagagcctatgggcatcgtgcacctctcgagtctccgaagtgtcgatttcaggtgtgcctccgggtacacaacggatgctccgggcatccgtgagattatcaatcaggtgaggaaagaagccaaggagcaccgcaaccgtatcaccctttgcatcaacacgaaagagatcgtccatgacattgtggctggtagcactggtacagctggtagcagtgcgggtgttgcactgatgggtgatgacaagaagccgatcgacggcacctccaaagaaggcgttatgatccagcgggtgattcgtgaggtgaagttgaaggcgagggcactctggcacgccatcaagaaggctggcgctgatccacaagacgagatgatggcgctcgacgctctatgcagcgcggtgcaatcggagatgatgaccgtcacctttgacgggtcgttaggtttgccgtcatcggtggggcatccggccgtggcccgtcacaggtatcccctcacctgtgacgggccggaaggaaaagccgtcacaggtaggttaatacctttgacgggcaactcaattgaagcccgtcaaagttcactgttcacaaatcggttgggagggcaagggggcgattttttgctaaaattcaagatggatcgtagatggatgtactatgcgcatcgttcgtctaccgagtatagagagggggtcactgaatttgtcatatttgcggataatgacagaaaaagtaggatgagcatgcacatgttgtgtccatgtagggactgtaagaatgaacagatgatcgaagatagcgatgaagtgcatgctcatttgataatgaatggattcatgaagaaatatatctgttggaccaagcatggagagcaagaggcgcctgatgtcacagcggaagaagtgttggatcaggatgtagagaacaccgccggcgccgtagctcgagaaggcatgttcgtaccttctcctttaggtggagagaccatagatttggacactcaatgtctatctacaatgttgcatgacattgaagatgcaaaggacaacaacagagattttgagaagtttagaatacgctgcttggatgtctgccctgtttgtggggcatcaagatacaaacgagaaaagagtgaaggtgaaggaagtaagtcaaagaggggaggcccagcaaaggtggtgtggtatctcccaattgcggagcgcatgaagagaatgtttgcgaataaggaacaagctaagctagtgcgctggcatgccgaagaacggaaagtcgatagtatgttgaggcacctagcagatttagtacagtggaggacaatcgataagatttaccaggaattctcaaatgaaccaagaaacatgcgtttcacaatgtgtacggacgacattaatccatttggtgatttgagcagtcgtcacagtacatggccagttctacttgttaactataaccttcctccctggttgtgcttcaaaagaaagtatattatgcttgccatgctcattcaaggactgagacaacctggcaacgatatcgatgtgttccttgaaccgataatcgatgacttcgaaaggctatggaatgatggcacacggacttgggacgcatatgcacaagagtatttcaacctccatgcgatgctgttttgtaccatcaacgattatctggcccttggcaacctttctggccaaactgtgaaagggaaatgggcgtgttcagagtgtatggaggaaacaagaagcaaatggttgaagcattcacacaagacggtttacatgggtcgcaggagatttctcccaaggtatcacccatataggaatatgaaaaagaatttcaagggacacagagatacagtcggacccccggcagagctaacagggactgaggtgcacaacttagtgatgggaataacaaacaagtttggaaaaaagaggaaagttggaaagacaaaagagaagagcacgtcgaaggaaaaaacagaggagcatgtggaaaaacaaaagacaaaagagaggagcatgaatattttgcctcctaaggtgcgacacacgatccagcggttgtattcctttttccatgcaatcggccagaagatcattgatcccgagggactagatgaactacaagcagaacttgtgagaactctatgtcatcttgagatgtacttttctccaactttctttgacataatggaacatcttcccgtgcaccttgtgaggcaaacaaagtgctgtggtctagcattcatgacgcagatgtatccttgcgaaaggtacctggggatccttaagggttatgtacggaaccgttcacaccccgaggggagtatcatcgagagttacaccaccgaagaggtcatcgatttttgtgtggactacatgtcagaaacatcttcaattggattaccacgatctcatcatgaagggaggcttgatggtgttggtactgttggaagaaagactgttaggttggattggaaggtgtacgataaagctcatttcacggtactgcagcatatgactaatgtggtgctgtacattgacgaacaccttgcagttctccgacaggagaacccaggccgatcagagagttggggtcctgaatggagtgccaccacctggcaaggatatgacataaatggatacacctttcacacggtaaagcaagacagcaaatgcacagtgcagaacagtgggttacgcatcgaggctgctagtgacggtggacgtcgtgttcaatactatggtagagttgagcaaatattggagctagattacttgaagttcaaagtcccgttgtttcattgtcgatgggtcgatcttcgcaatgtaaaagttgacaatgaaggtttcaccactgtcaacttggctaacaacgcgtacaaggatgaaccattcgttctcgccaaacaagttgttcaagtgttctacatagttgacccgtgtaacaagaaactacatgttgttcgtgaagggaaaaggagaattgttggattggacaatattgcagacgaggatgattacaaccagcacgtccatggcataggtcaagaaatacctctagaagaggaggaagaagaagatgacgttcaatatgcacgcgttgaccatgaggaaggattatttttgtaa

SEQ ID NO: 93868 - DNA, 360 bp, Oryza sativa
  unsure (1)..(360): unsure at all n locations
  Clone ID: PAT_MRT4530_9220C.1
tccaagcaagcacggctgcaccactcgccgtttacccgccgttctcctcctcctcctcctccacgcgcggcggcgtaggcggacaagccctaggaaggagcggcgcgtcaccngcgcggcggcggcatgcatcacgacccaacccgttcgacgagggcaacgcgacgcacccttctccaattggggaggtggtggtggcgcgcggcagcaggcagcagtacgggttcgccacgagccgcgcttcgcgcggagggggacgcaccgtcgatgtccgtcgacacatggcgactcagagcaagnaagnagtttatcgtggnacagatttaagcgcggagcgatataaaagaggagaagctgaga

SEQ ID NO: 93869 - DNA, 276 bp, Oryza sativa
  Clone ID: PAT_MRT4530_92210C.1
atgaggtgccagattctcttcgtgtatctacacatggtgacgaggtgcaaggccgtctcggcgtcacaacgacataaggggcaatggacttgtcaatattggctgctaggcaagaatgagatctccttcaaggatcccgtggcctctgggctttcgccgccggcgggctccttgccattttttttttctgccgagaccgtccttcttttcgcctcaaccttgacacgcaacatccccctgctggcctaccctgcttggtcgacaaggaagatgtga

SEQ ID NO: 93870 - DNA, 3120 bp, Oryza sativa
  Clone ID: PAT_MRT4530_92211C.1
atggatcgtagatggatgtactatgcgcatcgttcgtctaccgagtatagagagggggtcactgaatttgtcacatttgcggataatgacagaaaaagtaggatgagcatgcacatgttgtgcccatgtagggactgtaagaatgaacagatgatcgaagacaaggatgaagtgcatgctcatttgataatgaatggattcatgaagaaatatacctgctggaccaagcatggagagcaagaggcgcctgatgtcgcagctgaagaagtgttggatcaggatgtagagaacaccgccgcagctcgagaaggcatgttcgtaccttctcctttaggtggagagaccatagatttggacactcaatgtctatctacaatgttgcatgacattgaagacgcagaggacaacgacagagattatgagaagtttagtaagttggtggaagattgccagatgccgttgtatgatggatgcaagtcgaagcacagcaagttgtcatgcgtgttggaactgatgaagcttaaggctagtaatggctggtcggacaagagttttacagaactccttgagctgttaaaggatctgttgccagaggggaacaatttacctcagacgacatatgaagcgaagcaagtattatgtccgttgggcccggaggtcagaagaattcatgcatgtccgaacgactgcattttgtattacaaggaatacgctgacttggatgtctgccctatctgtgggggatcaagatacaaacgagcaaagagtgaaggtgaaggaagtaagtcaaagaggggaggcccagcaaaggtggtgtggtatctcccaattgcggagcgcatgaagagaatgtttgcgaacaaggaacaagctaagcttgtgcgctggcatgccgaagaacggaaagtcgatactatgctgaggcacccagcagattcagtgcagtggaggacaatcgataggatttaccaggaattctcaaatgacccaagaaacatgcgtttcgcaatgtgtacggacggcattaatccttttggtgatttgagcagtcgtcacagtacatggtcagttctgcttgttaactataaccttcctccctggttgtgtttcaaaagaaagtacattatgcttgccatgatcattcaaggaccgagacaacctggcaacgatatcgatgtgttccttgaaccgataatcgatgacttcgaaaggctatggaatgagggcacacgaacatgggacgcatatgcacaagagtatttcaacctccatgcgatgctgttttgtaccatcaacgattatccggcccttggcaacctttctggccaaactgtgaaagggaaatgggcgtgttcggagtgtatggaggaaacaagaagcaaatggttgaagcattcacacaagacggtctacatgggtcacaggagatttctcccaaggtatcacccgtataggaatatgagaaagaatttcaatggacacagagatacagccggacccccgacagagctaacagggacagaggtgcacaacttagtgatgggaataaccaacgagtttggaaaaaagaggaaagttggaaagcgaaaagagaagagcacatcgaaggaaaaaacagaggagcatgtggaaaaacaaaagacaaaagagaggagcatgtggaaaaagaagtcaatattctggagactaccatactggaaggatcttgaagttcgccactgcatagatttgatgcatgtcgagaagaatgtatgcgagagtttaatgggattactgcttaacccaggtactacaaaggatggtctcaacgcccgacgagatctggaagatatgggtgttcggtcggagctacatcccataaccacggaatccggcagggtttaccttcctccagcctgctacactctctcgaaagaagagaagattgatttgctaacatgtttgagtggtataaaggttccatctggttactcatcaagaatcagtaggttcgtttcactgcaagatcttaagttggttggaatgaagtcgcatgattgccacgttcttatcacacagctgttgcccgttgcaataaggaatattttgcctcctaaggtgcgacacacgatccagcggttgtgttccttcttccatgcaatcggccagaagatcattgatcccgagggactagatgaactacaggcagaacttgtgagaaccctatgtcatcttgagatgtactttcctccaactttctttgacataatggaacatcttccggtgcaccttgtgaggcaaacaaagtgctgtggtccagcattcatgacgcagatgtatccttgcgaaaggtacctggggatccttaagggttatgtacggaaccgttcacaccccgaggggagtatcatcgagagttacaccaccgaagaggccatcgaattttgtgtggactacatgtcagaaacatcttcaattggattaccacgatctcatcacgaagggaggcttgacggtgttggtactgttggaagaaagactattaggttggatcggaaggtgtacgataaagctcatttcacggtactacaacatatgactgaggtggtgccgtacgttgacgaacaccttgcagttatccgacaagagaacccaggccgatcagagagttggcaagacagcaaatgcacagtgcagaacagtgggttacgcatcgaggctgctagtgacggtggtcgtcgtgatcaatactatggtagagttgagcaaatattggagctagattacttgaagttcaaagtcccgttgtttcgttgtcgatgggtcgatcttcgcaatgtaaaagttgacaatgaaggtttcaccactgtcaacttggctaacaacgcgtacaaggatgaaccgttcgttctcgccaaacaagttgttcaagtgttctacatagttgacccgtgtaacaagaaactacatgttgttcgtgaagggaaaaggagaattgttggattggacaatattgcagacgaggatgattacaaccagcacgtccacggcataggtcaagaaatacctctagaagaggaggaggaagaagatgaagttcaatatgcacgtgtcgaccatgaggaaggattatttttgtaa

SEQ ID NO: 93871 - DNA, 3087 bp, Oryza sativa
  Clone ID: PAT_MRT4530_92212C.1
atggatcgtagatggatgtactatgcgcatcgttcgtctaccgagtatagagagggggtcactgaatttgtcacatttgcggataatgacagaaaaagtaggatgagcatgcacatgttgtgcccatgtagggactgtaagaatgaacagatgatcgaagacaaggatgaagtgcatgctcatttgataatgaatggattcatgaagaaatatacctgctggaccaagcatggagagcaagaggcgcctgatgtcgcagctgaagaagtgttggatcaggatgtagagaacaccgccgcagctcgagaaggcatgttcgtaccttctcctttaggtggagagaccatagatttggacactcaatgtctatctacaatgttgcatgacattgaagacgcagaggacaacgacagagattatgagaagtttagtaagttggtggaagattgccagatgccgttgtatgatggatgcaagtcgaagcacagcaagttgtcatgcgtgttggaactcatgaagcttaaggctaaggggaacaatttacctcagacgacatatgaagcgaagcaagtattatgtccgttgggcctggaggaatacgctgacttggatgtctgccctatctgtggggcatcaagatacaaacgagcaaagagtgaaggtgaaggaagtaagtcaaagaggggaggcccagcaaaggtggtgtggtatctcccaattgcggagcgcatgaagagaatgtttgcgaacaaggaacaagctaagcttgtgcgctggcatgccgaagaacggaaagtcgatactatgctgaggcacccagcagattcagtacagtggaggacaatcgataggatttaccaggaattctcaaatgacccaagaaacatgcgtttcgcaatgtgtacggacggcattaatccttttggtgatttgagcagtcgtcacagtacatggccagttctgcttgttaactataaccttcctccctggttgtgtttcaaaagaaagtacattatgcttgccatgctcattcaagaaccgagacaacctggcaacgatatcgatgtgttccttgaaccgataatcgatgacttcgaaaggctatggaatgagggcacacgaacatgggacgcatatgcacaagagtatttcaacctccatgcgatgctgttttgtaccatcaacgattatccggcccttggcaacctttctggccaaactgtgaaagggaaatgggcgtgttcggagtgtatggaggaaacaagaagcaaatggttgaagcattcacacaagacggtctacatgggtcacaggagatttctcccaaggtatcacccgtataggaatatgagaaagaatttcaatggacacagagatacagccggacccccgacagagctaacagggacagaggtgcacaacttagtgatgggaataaccaacgagtttggaaaaaagaggaaagttggaaagcgaaaagagaagagcacatcgaaggaaaaaacagaggagcatgtggaaaaacaaaagacaaaagagaggagcatgtggaaaaagaagtcaatattctggagactaccatactggaaggatcttgaagttcgccactgcatagatttgatgcatgtcgagaagaatgtatgcgagagtttaatgggattactacttaagccaggtactacaaaggatggtctcaacgcccgacgagatctggaagatatgggtgttcggtcggagctacatcccataaccacggaatccggcagggtttaccttcctccagcctgctacactctctcgaaagaagagaagattgatttgctaacatgtttgagtggtataaaggttccatctggttactcatcaagaatcagtaggctcgtttcactgcaagatcttaagttggttggaatgaagtcgcatgattgccacgttcttatcacacagctgttgcccgttgcaataaggaatattttgcctcctaaggtgcgacacacgatccagcggttgtgttccttcttccatgcaatcggccagaagatcattgatcccgagggactagatgaactacaggcagaacttgtgagaaccctatgtcatcttgagatgtactttcctccaactttctttgacataatggaacatcttccggtgcaccttgtgaggcaaacaaagtgctgtggtccagcattcatgacgcagatgtatccttgcgaaaggtacctggggatccttaagggttatgtacggaaccgttcacaccccgaggggagtatcatcgagagttacaccaccgaagaggccatcgaattttgtgtggactacatgtcagaaacatcttcaattggattaccacgatctcatcacgaagggaggcttgacggtgttggtactgttggaagaaagactattaggttggatcggaaggtctacgataaagctcatttcacggtactacagcatatgactgaggtggtgccgtacgttgacgaacaccttgcagttatccgacaagagaacccaggccgatcagagagttgggtcaggaataagcacatgtcttctttcaacgagtggctgaagaaccgaattgccaggttgcagaacttgtctagtgaaacacttcagtggttgtcacagggtcctgaatggagtgccacgacctggcaaggatatgacataaatggatacacctttcacacggtaaagcaagacagcaaatgcacagtgcagaacagtgggttacgcatcgaggctgctagtgacggtggtcgtcgtgatcaatactatgttgacaatgaaggtttcaccactgtcaacttggctaacaacgcgtacaaggatgaaccgttcgttctcgccaaacaagttgttcaagtgttctacatagttgacccgtgtaacaagaaactacatgttgttcgtgaagggaaaaggagaattgttggattggacaacattgcagacgaggatgattacaaccagcacgtccacggcataggtcaagaaatacctctagaagaggaggaagaagaagatgaagttcaatatgcacgtgtcgaccacgaggaaggattatttttgtaa

SEQ ID NO: 93872 - DNA, 326 bp, Oryza sativa
  Clone ID: PAT_MRT4530_92213C.1
aagccagatgatgtctctgaagagctgaacaaatctagattaagagtaaagttcatcaccggtctctaaacttgtaccgttgtgtcatcccggtccctaaactcgcaaatcgaccgttcaggtcctcaaacttattcgattgtgtcatcccggtctctaaacttgcagatcactcgtttagatcctccaacttattcaattatgtcaccccggtccctaaacttggatttgaatatcatctgggtcaaataggacgatctaaagactttatatttaaaaataatttataactttttcatgtgaactttaatgaagacaaactttat

SEQ ID NO: 93873 - DNA, 556 bp, Oryza sativa
  unsure (1)..(556): unsure at all n locations
  Clone ID: PAT_MRT4530_92214C.1
gatccccgggctgaggaatcggcacgaggtgggtcatatcccatcttaagttaaattatttngggacgaagggagtagtgttaaaaaatgttgtatgaagtataaatgattgatacagtatggagcatcacaggtcttaagtttggtggtggattgaagtgatatttttcttttctagacaaagcatcttgtcaaataattttgtgtaacgtgtgactgcatttctaacacataaataagtagtacctgaattccacctagtggccgcacgaaattcaatctgtaagtgttgaaaagaagtgttctttttaatagaccctgttgaataacagcgactataaaagacttcaagggatggagaggaagcttcttaacaggccctgttcacaagacatggtgttgtgtagcatgtcttgttgaagatgacagcaaaaaatttcttggtcggttctaacgatttgatctcattcctgacatggacttgaagcacatgtcaaacctccctgatttttggcatctgtgtactctggccaatttgtggcatgcaactatgtgc

SEQ ID NO: 93874 - DNA, 1369 bp, Oryza sativa
  Clone ID: PAT_MRT4530_92215C.1
atggcagtagtagttcctacgctcgcggtgtgcgtggtcgccgcggcgcttctatggctgtggcgccagcggaagcgccgccgcaagaactcaccgccgccggcaaacaatgacagcgaccagtactcctccgacgggcagcggcagcacggcaccgccgacctggagagagccgtgaccggcggcgggccgcggcggtaccagttccacgagctcgccgccgcgacgcgcgacttcgccgaggaggagaagctcgggcaaggagggttcggcaacgtctacctgggccgcctcgccgtcggcactggcggcggcgaggaccaccaggaggtggccgtgaagaagttctcgatggactccatgtctcagggaaggagggagttcgaggccgaggtgaggatcataagccagctgaggcatcgaaacctggtgcagctgcatggttggtgtgatagccgcaaggggctcttgctcgtctacgagcttgtggcaggaggaagcctagataagcacatctataacaccgacaggatactcacctggccagagagatacaagatcattatgggattaggagctgcgctacgttaccttcatcaagagtgggagcaatgcatcctgcacggcgacatcaaaccaagcaacatcatggttgactcgtcgtacaacaccaagctaggggactttgggctggcaaggctcgtcgaccacggcaaagcgtggcaggccacaaggtccgtgctcggcacggccggctacatcgacccggagttcgtgaacacgcggcggccgagcaccgagtccgacgtctacagcttcggcgtcgtcctcctcgagatcgtctgcgccaagccgccggtggtcttgcaggagaacgagccgagcttcgtgctgctgaggtgggtatggaacctgtacagccagaacgcgatcctcgacgcggtggacgagcggctgcgtgtcgttggcgtcgtgcgcgacgagcggcagatggagcgcgtgctggtcgtcgggctgtggtgcgcgcaccctgacctgagtgagcgcccgtccatcgcccgcgccatgaacgtcctgcagtccgacgacgcgaggttgccggatctctcgccgcagatgtacaagtccaaggcgtcaccgcctccaagagatgtcgccgtgggggtagattacggcggtgtcagtacaggctgggttgtcaaaatcattgacaagaagtgtcgcgccttcctgtggacggagcatccttaccaggctgacctgaaggctcccatcgagcggagcgtctccaacatgtttgcagcgtccaccttcttcgtgccaggaaataatgtgttgatcctcttctggacggaccagtggatcgagg

SEQ ID NO: 93875 - DNA, 435 bp, Oryza sativa
  unsure (1)..(435): unsure at all n locations
  Clone ID: PAT_MRT4530_92216C.1
gtcntacaatgtctcngactgggacaanantggcgtcacccancttaatcnccttgcagcacatccccctttcccagntggcntaatagcgaanaagcccgcaccgatcncccttcccaacagttgctcagcctnaatggcgaaatggcanatngtaancgtnaatatnttgttaaaattccgcgtcaaatttttgttnaatcagctcattttctaaccaatntgccgaaatccgctaaatcccttatagntcnacnnnaatataacccanatncggtgaattgtngttccaantctgggaacnagantcccctattnaaagaancgtggactccatcctcgaaaggggcgnaagaaancntctntttcgnctatggcccnctacgatgaaacnctctcccttaancaanttattttgggggtcnaangtgccct

SEQ ID NO: 93876 - DNA, 1157 bp, Oryza sativa
  Clone ID: PAT_MRT4530_92217C.1
atggcgctcgacgggaagccaccggtgccgccgccgtccacgccgccgatggactcgtgggcctgcggtggtcgccgctccaagcgccgcggcggcggcggcgggagcagcgggagtagtggcagctccggcggcggcggcggcggcgagtccgaggaggagtacctcgcggcctgcctcttgatgctcgcgcatggcgtccgcgacgaggccgaggtcgtcggcgtcgcggcggcgacggcgaagccacagcatgggtacgagtgctcggtgtgcggcaaggtgtacgggtcctaccaggcgctgggcgggcacaagacgagccaccgcaagccgccgtcgccggcggccgaaccggcggccggcgaagagccgtcctccggcggggtggccggcgaggcgaaggtgcaccgttgctccatctgcctccgcacgttcccgtccgggcaggcgctgggcgggcacaagcggctgcactacgagggcggcgccgtcggagacgccgtcaaggagaagaactccctgaagaccaaggcggcggtggcgacagcggtgctgaaggacttcgacctgaacctgccggccgcggcgacgacggcgggggacgaggccgagagctcaccaccggaggccaagagagcacgtctgctgcttctcgtctaattcacttctggttgggcgatggagacgggtggcatgataaacatgccgtgtttagatggttggccagcagttctggtggaaataatataatggggccccatgattccccagctcgctgtgtcgaatactcctacagtcctacatgcagatacggcacatttgcaactggtggatgtgacagttttatggcctttgggatggcgctagcaaaagtgccccagccctcaaatacccatgtaacatcacttcttgtctttcagcaaggatggccatctgcttcgctgtcgcatccaggtgcacgttcgataagccttacctttctattgagatatcaatcatatgaaacccactgggtatccaccgggtataccatacccaacgggtatgggcatgggtatgaatttctacccgccaattctatcgggtatcaatcgggcgggcaaaagcgggtcaggcataagcctgacgcaatctttatctgtaatgtcaactaa

SEQ ID NO: 93877 - DNA, 465 bp, Oryza sativa
  Clone ID: PAT_MRT4530_92218C.1
atggccggccggtgccgcagtggggagggagccagcgaacgcggcgacgcatgtcggaacgggacggcgtcgtgcggcggcggcggaggcggaggcgagcagaagcgggcggggggcgccgccgcgcgatcccggggtggcggccgggaacgccgtcgacgtcgcgacgcggcggggaacgaacgatcaaggaatggcgccgcggcggctgcggctgctcctcccaacacggcggcgctcatctcgcaccgccaccgctggctcgccggagctagctctagctccgggcgtgaagcgaattcgacgggggaaggcggcaacggcaaagacggcggcgccgccgagtgcgcgagcaccagcctcctcgccgccactggttgcgtcacggtcaccatcggcgatggagtggagggggtgaggaatgaggaaagagacagacgtcgcttgcccacctccgaaacctag

SEQ ID NO: 93878 - DNA, 201 bp, Oryza sativa
  unsure (1)..(201): unsure at all n locations
  Clone ID: PAT_MRT4530_92219C.1
ggcagcagcgtgcttgcttgtgcccgtcgtctccgtgctcgcggcgacggcgcaccatggcgcagtaccaccaccaagaccagtggtctacacccgggcccgntctgtcagccggaatgggctacccgatgtacccgtcccgcgttgccgggcgttggtgagcgcagtacgtcggtcgtggcacgcgtcacgccgcgagtg

SEQ ID NO: 93879 - DNA, 152 bp, Oryza sativa
  Clone ID: PAT_MRT4530_92220C.1
tggccttcaggcctacaagcaatggctaaacatagaggtttaagtgttcgtggtattatttatcgagattaaggactgtaatgaaaggtttagagattgcaggattaatttgggattctgcagtatttaggatggttttatcatccttgttc

SEQ ID NO: 93880 - DNA, 380 bp, Oryza sativa
  unsure (1)..(380): unsure at all n locations
  Clone ID: PAT_MRT4530_92221C.1
aaacagcggtttcatttcttttctatgttttattttttttttttttttgcagaagcatagggacagacgagccgagtaagttaaatttcaaggtagaggatggcacacatgagcagccacacgaaaagaccagaatgctctgggcggggggagaatacactgccgcattacaaattcccaatacacgggaatggaatacggccttaaaacggtgcagctacatgactgctgctatatgatatgacaggaacacacacagctgttcatgcataatgagaactgaggaatacaaggcctctaggttcacattcactgatngcttgggaaatccctcccattcactatcttgtggaggattgggcctgagcactactggaccc

SEQ ID NO: 93881 - DNA, 1669 bp, Oryza sativa
  unsure (1)..(1669): unsure at all n locations
  Clone ID: PAT_MRT4530_92222C.1
cacaccaccaccatcaaactccttgcatttctaccaacgatgcggcacgcggcgctgctcggcgtgggcttcgcgctctgcctcctccgcgcgcaggcgcagccgtacgactacccgacggcgaagccgtccacgacgtgggcgaacaccgacgccgcgctgcgccaccacgtcgcctacaccgacggctccgtggcgcgcgccgcgctgctgcgcctcaacccggcgcgcctcggcccctccttcgccttcggcttcttctgcaccaaccaccgcgccggggcgccgtgcgccgacttcctcctcggcgtcgccgtcgtgtactgcaacagcggcgccgggatcaccgcggtcaccaccggcatcccgcaggtggtgtggtcggccaaccgcgccgcccccgtcggggacggcgccaccgcggagctcacggcggacggcgacctggtcctgagatcgcccggcggcaaggtgctatggtcggccggcgcggcggggcgcggcgtctccgggatgagcatcaacagcgacggcaacctggtgctgttcgacgggagcaaccggacggtgtggcagtcgttcgaccacccaaccgacacgctcgtcgtcgggcagtcgctgaagcagggcgcacggctcaccgccaacgcgtcgtttgacaactcgtcggagggcaggatatacctcgccgtcgccgacgacggcctcgccgcctacgtcgacgccaagccgccacagcgctactacgtccttggctacagcaagaacgccggcgcctacgcggcgtacaccaacggcagcctcgccgtgctcgaccgccccggcggccagcagctggccaccgtccagctccccgccgtcgccgccggcacggtgcagtacatgcggctggagcacgacggccacctccgcctctacgagtggcgctcgaacgggatgagatgggaggccaccggcgacgtgctccacccctaccccggcgactgcgcgtacccgacggtgtgcggcgcgtacggcgtgtgcacggacatgcagtgcagctgccccgacgccgccaacttccgggcggtggacttccggcggccgaaccgcggctgcgtcccgacgtcgccgccggcgccgccggcgacatgccgttcccggcgcgcgcggcaccggctggtgtcgctgcgcgacacggcctacttcaacagccacgacaccagcatgcggacgctggagagggtgggcgaggcggcgtgcaaggcagcgtgcttgggcgactgcgcgtgcatggcggcgcagttcgtgtacggattcgaccccaacgacggcttctgctacctgcagtcggaggtgttgtcgctggagacgatgcagccggaggtgtttcactacaactcctccatgcatatcaagattgcccagggcaggttgccaagacgattctgatcgcctttttacagtctactatactatatcaaggaggagaaatccttgtaaatacatacatgaataaattcacgagaactagctaggattctcgattcatatgtttttgtattcaacatttgtttgtgggttttaacaaaatataaagaaaacatttttttttaaaaaaaaaaaaaaaaaaaaaaaaaaaaaaaaaaaaaaaaaaaaaaaaaaaaaaaaaaanggggcggggcgnttt

SEQ ID NO: 93882 - DNA, 405 bp, Oryza sativa
  Clone ID: PAT_MRT4530_92223C.1
atggccgcacgccgccgccaacgaccatcgtcgtcgccgcccctaccgccggagcactcacccttgccctctgtcatcgtcgccacagccagagcccgcacggcggatccgaagatcgcctgcgacagatccgccgccgccaagtcccccgcctctggatctaccgccgccgccctccctacagccaagcttcgccgctgcagccctccccatcaccggatccgccgtcaccgagtccctaccgccaccggcccaaggtgcctgccaccgctcgagcgcgccgtcgtcatcaccacaggggctcccaaggacggtggttctagctctcccgagggcggcgtcacagggcgagaagcgcgagcgagcatggacagacaacggcgcacgcgagcacggacgatgtga

SEQ ID NO: 93883 - DNA, 826 bp, Oryza sativa
  Clone ID: PAT_MRT4530_92224C.1
cccacgcgtccgcgcatcaccaacccttcaatccaactcgcctcttcctcctcccctacgacgccgggaaattcctccgctccgcgcctcgcctcgccgcctcggcatccgcgcccactcgtcgccgcctcgccgccgtcccttcgcgtgcgccggcgcgcggcggcggcggaggccgcctggggagcgtttccgcgggacgcggccagactgcaagggaaacaatggcgcgtagtatgaggacatgtttgcacagtggaagacttgcgcttcttgcaatactggtttctggtggaattgtattgcagattctggcctgtgctctgtataacaactggtggccaatgctaacagttcttatgtacctcatactaccaatgcccctcatatttttcctgggctccaacagcccctcaatgatgtctaatgatggcgatacttgggtgagcttcacaaaattcttgacgggcgcatcgatagtggggagcatcgccatcccgtcgatcctgaagcatgccggcgtcattggatggggagcgctcacgatggagctatcttctttcctggtctttggcgtcgcgatcctgtggctgattcaaatgaacagcgaagacgagtacagcagcgcgttctgatcgatcggtacgccccttctcttgcccgcgtggttaataccttgcgatgaagcagccgtaaacttgtgtacagatactgtcgaagccttggctcctgtggtcccattcagtagcgtgaacccttacatgttcagattgcatgtacaaatttgaaattcggtgtaagatggtttggttatgtcctccggctg

SEQ ID NO: 93884 - DNA, 504 bp, Oryza sativa
  unsure (1)..(504): unsure at all n locations
  Clone ID: PAT_MRT4530_92225C.1
cgcatgcgctannatgtaacnnattattagtctgtagcanacagacacaattagctcatgtgtattgttattatgttgcatgtctatcgatttaatanaaggaaataaatatncntgtnnaaaaaannnancaaaaaattnnaaaacctaacgaaactnccaaaaactcaaaaacccccgagggggggncnggtacccaatncccccnacaatnantcttnntacaatccnctggncnncattttanaacgtctngtacnggnaaaaccccgcccntntcccncctnaancnccntgnancatatcccccnttctccaactggcgttantttccaaaaaaggcccncacccnatcgccctncccaanaanttccnacaaccnnaaatgagcnaaanggcnaattntcnccntcaatattttgttnaaatccccnttnaattttngttaaatcaacnccattttttaacccaataggccnaaaatcggcaaaaatcccttngttg

SEQ ID NO: 93885 - DNA, 1683 bp, Oryza sativa
  Clone ID: PAT_MRT4530_92226C.1
atggctctgaggttgctggtggtggtggcggtggcggcggtggtgtcctgcgccgtcgccgccgatgaggggagcgtcgtcgaggtgtggccaatgccggcgacggcgagcaaaggcgggcagacgctgcacgtcagcagggagctcaggatgacggcggaggggagaaagtacgccgccggagaagttgtcctgtaggacgggttccagataatggtgaggctgatagagcagtaccacgtcaccaatgccgcataccaggggttcaagcggcaacggcgtttctcttcatcttcttgctccggcgtggtctggtcgccggcgttactgacggcgacggtttttgaagctgcattcaagtagggataggatggcgccggcgatggctctggaggttgctggtggtggtggcggtggcggcggtggtgtcctgcgccgtcgccgccgatgaggggagcgtcgtcgaggtgtggccaatgccggcgacggcgagcaaaggcgggcagacgctgcacgtcagcagggagctcaggatgacggcggaggggagcaagtacgccgacggggaggccatcctgaaggacgcgttccagaggatggtgacgctgatagagctggaccacgtcatcaatggcagctcccagggcttgccgctgctcgccggtgtgaatgtcgtcgtgcatttgcccggcgatgagctcaacttcggggtggatgaatcatacaatttgtcagtgcctgcaactggaagtccaatttatgctcaaattgaggcccaaacagtttttggagcacttcatgccttggagacgtttagccaattgtgtaactttgatttcgcctcaaggttaatggaacttcagtctgccccttggagcatcacggacatgcccagatttccttatcgagggcttcttattgatacttcaaggcattaccttcctgtcccagtaataaaaagcgtaatcgattcgatgacctacagcaagttgaatgttcttcattggcatatcgtggatgaacagtcatttcctatagaaataccttcatacccaaaattatggaatggtgcatactcttactcagagagatatacaatggatgatgctatcgacattgttcagtatgctgaacgacgaggtgtcaatgtcttagctgagattgatgttcctggccatgctctctcatggggtgttggttatccgtcgttgtggccatcagctacttgtaaagaaccacttgatgtcagcagcgaatctacattccaagtgattaatggaattcttggataagtggtacctagatcacttggaagttacatgggatggattttatatgaatgaaccactgagaaatatcaagaacccggcacagcagaagttggttcttggtggtgaggtatgcatgtgggctgaacacatagatgcgtctgacattcagcaaaccatttggccacgtgctgcagcagctgcagagcggttgtggactccgtttgagaagctttcaaaggagtgggaaatagcagcgctcagcgcaagactggcacgcttcaggtgcttgctgaatcatagagggatcgctgctggaccggtaactggttatgggcgtttcgcgccaagagagccaagctcctgtttaaaggcataggatttccaaagcagataaatattatattataatatt

SEQ ID NO: 93886 - DNA, 299 bp, Oryza sativa
  unsure (1)..(299): unsure at all n locations
  Clone ID: PAT_MRT4530_92227C.1
agattgggttatttaatttatctttttcatttcttttatctgacgcggngagaggaattcaccctaaaaaaaatcacaagcccaaaaaaacaccggaccccagacaaaagatcctaaaaacacacccccttgacaaagaaaagaacccaaggtcaacaacttcttatacaattaggagaggggccccaaaataagtttgacttgcccaacctcacagaggctgcccacaactgggagggggccacaaaataacctgaaccacccacacatccccgaaatcaccggccaacccagaaaga

SEQ ID NO: 93887 - DNA, 254 bp, Oryza sativa
  Clone ID: PAT_MRT4530_92228C.1
cccacgcatgcaggcacacggcacatggctatgcatcaacaaggagctgacgtgggaactcgactacagtgatgacctgaaccaggtacgtacacactaggggctctgacagctgatataggacttggaggtcatcacattagatgcgcaattgtggctgacagcaccggtgctgtcggacatgaacttctatgtggtgatgcacccatacaccacgatgtattgcctgacgcacacgaagctgagacaggact

SEQ ID NO: 93888 - DNA, 143 bp, Oryza sativa
  Clone ID: PAT_MRT4530_92229C.1
atggtcatcattgcccccacccggcagggttgtgtgcacgccaccttcccctttgtcaagatgcggtaccccgtgtttatgtttaccggcatgaatgatctaaccttggtggcgttgtcgtccaaggctacccatggagctgg

SEQ ID NO: 93889 - DNA, 354 bp, Oryza sativa
  Clone ID: PAT_MRT4530_9222C.1
ggaggaataaatcgctactcaatgctatattagttaaaccatgatcaaccgaattttaacaggtaaagaaaaaccggggacatatagaaagcctgcaccaaaacagatgtatgaacactaacaaattcacagttaaacgaacgacaagtaattggcagtataactaaaagcgattgaagactaatcatttacgagagtttctcaatcttgggccctcgcccgttaattacaccggcggccagcgcacaatgcttgtacatgcctacggccatgtcaatttcagcgccgtgggacataatgcctacgaggggggagcagacgccctgcagagagtttatcttggaaccgaactca

SEQ ID NO: 93890 - DNA, 3360 bp, Oryza sativa
  Clone ID: PAT_MRT4530_92230C.1
atgggccctacgccagatccttacacctctgacgggatacctgtgacgggcaaacgaattgaagccgtcagaggtgatgggccgccacctgtgacggctttcatttctggcccgtcacagatggatcgtagatggatgtactatgcgcatcgttcgtctaccgagtatagagagggggtcactgaatttgtcacatttgcggataatgacagaaaaagtaggatgagcatgcacatgttgtgcccatgtagggactgtaagaatgaacagatgatcgaagacaaggatgaagtgcatgctcatttgataatgaatggattcatgaagaaatatacctgctggaccaagcatggagagcaagaggcgcctgatgtcgcagctgaagaagtgttggatcaggatgtagagaacaccgccgcagctcgagaaggcatgttcgtaccttctcctttaggtggagagaccatagatttggacactcaatgtctatctacaatgttgcatgacattgaagacgcagaggacaacgacagagattatgagaagtttagtaagttggtggaagattgccagatgccgttgtatgatggatgcaagtcgaagcacagcaagttgttatgcgtgttggaactcatgaagcttaaggctagtaatggctggtcggacaagagttttacagaactccttgagttgttaaaggatctgttgccagaggggaacaatttacctcagacgacatatgaagcgaagcaagtattatgtccgttgggcctggaggaatacgctgacttggatgtctgccctatctgtggggcatcaagatacaaacgagcaaagagtgaaggtgaaggaagtaagtcaaagaggggaggcccagcaaaggtggtgtggtatctcccaattgcggagcgcatgaagagaatgtttgcgaacaaggaacaagctaagcttgtgcgctggcatgccgaagaacggaaagtcgatactatgctgaggcacccagcagattcagtacagtggaggacaatcgataggatttaccaggaattctcaaatgacccaagaaacatgcgtttcgcaatgtgtacggacggcattaatccttttggtgatttgagcagtcgtcacagtacatggccagttctgcttgttaactataaccttcctccctggttgtgtttcaaaagaaagtacattatgcttgccatgctcattcaaggaccgagacaacctggcaacgatatcgatgtgttccttgaaccgataatcgatgacttcgaaaggctatggaatgagggcacacgaacatgggacgcatatgcacaagagtatttcaacctccatgcgatgctgttttgtaccatcaacgattatccggcccttggcaacctttctggccaaactgtgaaagggaaatgggcgtgttcggagtgtatggaggaaacaagaagcaaatggttgaagcattcacacaagacggtctacatgggtcacaggagatttctcccaaggtatcacccgtataggaatatgagaaagaatttcaatggacacagagatacagccggacccccgacagagctaacagggacagaggtgcacaacttagtgatgggaataaccaacgagtttggaaaaaagaggaaagttggaaagcgaaaagagaagagcacatcgaaggaaaaaacagaggagcatgtggaaaaacaaaagacaaaagagaggagcatgtggaaaaagaagtcaatattctggagactaccatactggaaggatcttgaagttcgccactgcatagatttgatgcatgtcgagaagaatgtatgcgagagtttaatgggattactacttaacccaggtactacaaaggatggtctcaacgcccgacgagatctggaagatatgggtgttcggtcggagctacatcccataaccacggaatccggcagggtttaccttcctccagcctgctacactctctcgaaagaagagaagattgatttgctaacatgtttgagtggtataaaggttccatctggttactcatcaagaatcagtaggctcgtttcactgcaagatcttaagttggttggaatgaagtcgcatgattgccacgttcttatcacacagctgttgcccgttgcaataaggaatattttgcctcctaaggtgcgacacacgatccagcggttgtgttccttcttccatgcaatcggccagaagatcattgatcccgagggactagatgaactacaggcagaacttgtgagaaccctatgtcatcttgagatgtactttcctccaactttctttgacataatggaacatcttccggtgcaccttgtgaggcaaacaaagtgctgtggtccagcattcatgacgcagatgtatccttgcgaaaggtacctggggatccttaagggttatgtacggaaccgttcacaccccgaggggagtatcatcgagagttacaccaccgaagaggccatcgaattttgcgtggactacatgtcagaaacatcttcaattggattaccacgatctcatcacgaagggaggcttgacggtgttggtactgttggaagaaagactattaggttggatcgtaaggtgtacgataaagctcatttcacggtactacagcatatgactgaggtggtgccgtacgttgacgaacaccttgcagttatccgacaagagaacccaggccgatcagagagttgggtcaggaataagcacatgtcttctttcaacgagtggctgaagaaccgaattgccaggttgcagaacttgcctagtgaaacacttcagtggttgtcacagggtcctgaatggagtgccaccacctggcaaggatatgacataaatggatacacctttcacacggtcaagcaagacagcaaatgcacagtgcagaacagtgggttacgcatcgaggctgctagtgacggtggtcgtcgtgatcaatactatggtagagttgagcaaatattggagctagattacttgaagttcaaagtcccgttgtttcgttgtcgatgggtcgatcttcgcaatgtaaaagttgacaatgaagctttcaccactgtcaacttggctaacaacgcgtacaaggatgaaccgttcgttctcgccaaacaagttgttcaagtgttctacatagttgacccgtgtaacaagaaactacatgttgttcgtgaagggaaaaggagaattgttggattggacaatattgcagacgaggatgattacaaccagcacgtccatggcataggtcaagaaatacctctagaagaggaggaggaagaagatgaagttcaatatgcacgtgtcgaccatgaggaaggattatttttgtaa

SEQ ID NO: 93891 - DNA, 177 bp, Oryza sativa
  Clone ID: PAT_MRT4530_92231C.1
atggcgtgtgtcatcggcgcgttgaagagtgcggtactggcacatgttggcagggtggtggtcgcggcgaggggaggatcacagcagcatagggagagccaagccgtccagcaagcagatgttctaatcaccaaacctgactaccagcgtggcgaagatcttaaaaatatagagtga

SEQ ID NO: 93892 - DNA, 2823 bp, Oryza sativa
  Clone ID: PAT_MRT4530_92232C.1
atggatcgtagatggatgtactatgcgcatcgttcgtctaccgagtatagagagggggtcactgaatttgtcacatttgcggataatgacagaaaaagtaggatgagcatgcacatgttgtgcccatgtagggactgtaagaatgaacagatgatcgaagacaaggatgaaaccaagcatggagagcaagaggcgcctgatgtcgcagctgaagaagtgttggatcaggatgtagagaacaccgccgcagctcgagaaggcatgttcgtaccttctcctttaagtggagagaccatagatttggacactcaatgtctatctacaatgttgcatgacattgaagacgcagaggacaacgacagagattatgagaagtttagtaagttggtggaagattgccagatgccgttgtatgatggatgcaagtcgaagcacagcaaattgtcatgcatgttggaactcatgaagcttaaggctagtaatggctggtcggacaagagttttacagaactccttgagctgttaaaggatctgttgccagaggggaacaatttacctcagacgacatatgaagcgaagcaagtattatgtccgttgggcctggaggaatacgctgacttggatgtctgccctatctgtggggcatcaagatacaaacgagcaaagagtgaaggtgaaggaagaccgagacaacctggcaacgatatcgatgtgttccttgaaccgataatcgatgacttcgaaaggctatggaatgagggcacacgaacatgggacgcatatgcacaagagtatttcaacctccatgcaatgctgttttgtaccatcaacgattatccggcccttggcaacctttctggccaaactgtgaaagggaaatgggcgtgttcggagtgtatggaggaaacaagaagcaaatggttgaagcattcacacaagacggtctacatgggtcacaggagatttctcccaaggtatcacccgtataggaatatgagaaagaatttcaatggacacagagatacagccggacccccgacagagctaatagagacagaggtgcacaacttagtgatgggaataaccaacgagtttggaaaaaagaggaaagttggaaagcgaaaagagaagagcacatcgaaggaaaaaacagaggagcatatggaaaaacaaaagacaaaagagaggagcatgtggaaaaaaaagtcaatattttggagactaccatactggaaggatcttgaagttcgccactgcatagatttgatgcatgtcgagaagaatgtatgcgagagtttaatgggattactgcttaacccaggtactacaaaggatggtctcaacgcccgacgagatctggaagatatgggtgttcggtcggagctacatcccataaccacggaatccggcagggtttaccttcctccagcctgctacgctctctcgaaagaagagaagattgatttgctaacatgtttgagtggtataaaggttccatctggttactcatcaagaatcagtaggctcgtttcactgcaagatcttaagttggttggaatgaagtcgcatgattgccacgttcttatcacacagctgttgcccgttgcaataaggaatattttgcctcctaaggtgcgacacacgatccagcgattgtgttccttcttccatgcaatcggccagaagatcattgatcccgagggactagatgaactacaggcagaacttgtgagaaccctatgtcatcttgagatgtactttcctccaactttctttgacataatggaacatcttccggtgcaccttgtgaggcaaacaaagtgctgtggtctagcattcatgacgcagatgtatccttgcgaaaggtacctggggatccttaagggttatgtacggaaccgttcacaccccgaggggagtatcatcgagagttacaccaccgaagaggccatcgaattttgtgtggactacatgtcagaaacatcttcaattggattaccacgatctcatcacgaagggaggcttgacggtgttggtactgttggaagaaagactattaggttggatcggaaggtgtacgataaagctcatttcacggtactacagcatatgactgaggtggtgccgtacgttgatgaacaccttgcagttatccgacaagagaacccaggccgatcagagagttgggtcaggaataagcacatgtcttctttcaacgagtggctgaagaaccgaattgccaggttgcagaacttgtctagtgaaacacttcagtggttgtcacagggtcctgaatggagtgccaccacctggcaaggatatgacataaatggatacacctttcacacggtaaagcaagacagcaaatgcacagtgcagaacagtgggttacgcatcgaggctgctagtgacggtggtcgtcgtgatcaatactatggtaaagttgagcaaatattggagctagattacttgaagttcaaagtcttgttgtttcgttgtcgatgggtcgatcttcgcaatgtaaaagttgacaatgaaggtttcaccactgtcaacttggctaacaacgcgtacaaggatgaaccgttcgttctcgccaaacaagttgttcaagtgttctacatagttgacccgtgtaacaagaaactacatgttgttcgtgaagggaaaaggagaattgttggattggacaacattgcaaacgaggatgattacaaccagcacgtccacggcataggtcaagaaatacctctagaagaggaggaagaagaagatgaagttcaatatgcacgtgtcgaccatgaggaaggattatttttgtaa

SEQ ID NO: 93893 - DNA, 669 bp, Oryza sativa
  Clone ID: PAT_MRT4530_92233C.1
atgggcatgaagaagaggaggagattactcggggacgacgacgacgacttcgccctcaacgaaggcctctacatggcgctcgagtgcggagctctcaccgctggccaccccgacgccgaccgcctcgtccgcgcctggctcgccgtatcccgccgccgccatgcactcgtccgcaggctcgtcgggctgcttgaagactcatacggcgatggcagtgatggagacggctcgtcgtggccgtggaaccgcgcggctcatcgtcactgtcctctcgattccagcatcaattcttgcgccgctaccaccatccgccaaggcttcttggctgcagccacagctgcctatcaccccgacccaactgctcaagcaagcttcctcgcatcctgcaagtcgatgattggatcatcgtctgatttggcacgacgtctgcagagcggattggacgagcgcgccacgccgcatttaatgcggcgcagcgcacgcttatccggtccgcgactggtcgcggtgtgtgaccggtcacagaccggtcagatcgcggccggagccggcgtgctaactcctggagttggtatgtcagtcccggttgaaatgggcgtccaccggaaaagcgggcaagcggggcaggagacgtgcgctctgcttgtcaaaggtcacttccggctgtag

SEQ ID NO: 93894 - DNA, 241 bp, Oryza sativa
  unsure (1)..(241): unsure at all n locations
  Clone ID: PAT_MRT4530_92234C.1
tgnttacaaagcgcganagcatgntggatcgnaatcatgggatccgtcatcccccccctatgccaaggtntntntnntggcaaaanggngtgttggngtttttnttcgcccttggancantttaggnctttgnagggancncttcccttaaaaaaacccccccccccgtanntntacccncatnttcntcccccnanntttnaaaaaaaaaaaaaaaaaaaaaaaaaaaaaaaaaaaaaaa

SEQ ID NO: 93895 - DNA, 541 bp, Oryza sativa
  Clone ID: PAT_MRT4530_92235C.1
gcacgagggcgacgtgggagaaggggagggcggcggcgccggcctccgggtctcccccggcctcagcccgtcttcgccaccgccgctcttctactctgccggccaccggctctgtaacatgatgaaggggaaggacatcctcaagccgaggcgactgggatgcagcagcagggacgacgatcggggatgtacaacggcctcctgggatttggcggaggccacgccacaggcagagcggggtggaggcggtccaggtggccagctgcgcgttcccgccttccctccgcagcaccggcttcacgcgctgcaggaggagcaccacttccgagttgccctcgcctgcgattcccccgacccccgcagagaccaggaggcagcaaatcatgagacgcatcatcgatctcatctgcttgcttgaattgcgttggggcagagcatgtgaacacactggactggtgcagtggagtgaaagagtgtgcaagtgaatcgagcgagaaactgagaaccactcctaatactcaagggagggaagtgatgacta

SEQ ID NO: 93896 - DNA, 900 bp, Oryza sativa
  Clone ID: PAT_MRT4530_92236C.1
atgaccgtcacctttgacgggtcgctatgtttgccgtcatcggtggggcatccggccgtggcccgtcacaggtatcccctcacctgtgacgggccagaaggaaaagccatcacaggtggtggtccgccacctgtgacggattttttttacggcccgtcacagatggatcgtagatggatgtactatgcgcatcgttcgtctactgagtatagagagggggtcactgaatttatcacatttgcggataatgacagaaaaagtaggatgagcatgcacatgttgtgtccatgtagggactgtaagaatgaacagatgatcgaagatagcgatgaagtgcatgcttatttgataatgaatggattcatgaagaaatatacctgctggagcaagcatggagagcaagaggcgcctgatgtcgcaggtgatgaagtgttggatcaggatgtagagaacaccgccgcagctcgagaaggcatgttcgtaccttctcctttaggtggagagaccatagatttggacactcaatgtctatctacaatgttgcatgacattgaagacgcagaggacaacgacagagattttgagaagtttagtaagttggtggaagattgtcagatgcccttgtatgatggatgcaagtcgaagcacaacaagttgtcatgcgtgttggaactcatgaagcttaaggctagtaatggctggtcggacaagagttttacagaacttcttgagctgttaaaggacctgttgccagaggggaacaatttactgcagacgacatatgaagcgaagcaagtattatatccgttgggcctagaggtcagaagaattcatgcatgtccgaacgactgcattttgtattacaaggaatacgctgacttggatgtctgccctgtctga

SEQ ID NO: 93897 - DNA, 1625 bp, Oryza sativa
  Clone ID: PAT_MRT4530_92237C.1
atgggctgccatgtgggcccctacggtggtgcgcagtggcttggcctcgctggtaggtcaatacctttgacgggcaactcaattgaagccttgcccgtcaaagttcactgttcacaaatcggttgggagggcaaggggggcgattttttgctaaaattcaagatggatcgtagatggatgtactatgcgcatcgttcgtctaccgagtatagagagggggtcactgaatttgtcacatttgcggataatgacagaaaaagtaggatgagcatgcacatgttgtgtccatgtagggactgtaagaatgaacagatgatcgttgatagcgatgaaaccaagcatggagagcaagaggcgcctgatatcgcagctgaagaagtgttggatcaggatgtagagaacaccgctgtgactcgagaaggcatgttcgtaccttctcctttaggtggagagaccatagatttggacactcaatgtctatctacaatgttgcatgacattgaagacgcagaggacaacgacagagattttgagaagtttagtaagttggtggaagattgtcagatgcccttgtatgatggatgcaagtcgaagcacagcaagttgtcatgcgtgttggaactcatgaagcttaaggctagtaatggctggtcggacaagagttttacagaacttcttgagctgttaaaggatctgttgccagaggggaacaatttaccgcagacgacatatgaagcgaagcaagtattatgtccgttgggcctggaggaatacgctgacttggatgtctgccctatctgtggggcatcaagatacaaacgagcaaagagtgaaggtgaaggaagtaagtcaaagaggggaggcccaacaaaggtggtgtggtatctcccaattgcggagcgcatgaagagaatgtttgcgaataaggaacaagctaagctggtgcgctggcatgccgaagaacggaaagtcgatagtatgctgaggcacccagcagattcagtacagtggaggacaatcgataggatttaccagaaattctcaaatgacccaagagacatgtgtttcgcaatgtgtacggacggcattaatccatttggtgatttgagcagtcgtcacagtacatggccagttctgcttgttaactataaccttcctccctggttgtgtttcaaaagaaagtatattatgcttgccatgctcattcaaggaccgagacaacctggcaacgatatcgatgtgttccttgaaccgataatcgatgacttcgaaaggctatggaatgagggcacacgaacatgggacgcatatgcacaagagtatttcaacctccatgcaatgctgttttgtaccatcaacgattatccggcccttggcaacctttctggccaaactgtgaaagggaaatgggcgtgttcggagtgtatggaggaaacaagaagcaaatggttgaagcattcacacaagacggtctatatgggtcacaggagatttctcccaagatccgccgccctcctttccaccaccgcctcgacctattcaccggcaccctctccgccatctccggcgtcctccccaccgacaccataaactctccaccgccctcctcgacgtcgtcctcttaa

SEQ ID NO: 93898 - DNA, 435 bp, Oryza sativa
  Clone ID: PAT_MRT4530_92238C.1
atggagatgagactcgaatacggatctcgcgtcctcctctcgtggaataaatttcatcaccggtccctaaacttgtaccgttgtgtcatcccgatccctaaactcgcaaatcgaccgttcaagtcgttcgactgtgttatcccggtccctaaacttgcagatcactcgtttagatcctccaacttgttcagttgtgtcaccccggtctctaaacttggatttgaatatcatctaggtcaaatatttagagaccgggatgacacagtcgaacaagtttgaggacctaaacggtcgatttgtgagtttagagaccgggatgacacagcggtataagtttaaagaccagtgatagactttactcatatacaaatgaatactaatcaattgagtaactttcgactgaaatactctcttcgttcaaaaaaaattaactca

SEQ ID NO: 93899 - DNA, 3156 bp, Oryza sativa
  Clone ID: PAT_MRT4530_92239C.1
atggatcgtagatggatgtactatgcgcatcgttcgtctaccgagtatagagagggggtcactgaatttgtcacatttgcggataatgacagaaaaagtaggatgagcatgcacatgttgtgcccatgtagggactgtaagaatgaacagatgatcgaagacaaggatgaagtgcatgctcatttgataatgaatggattcatgaagaaatatacctgctggaccaagcatggagagcaagaggcgcctgatgtcgcagctgaagaagtgttggatcaggatgtagagaacaccgccgcagctcgagaaggcatgttcgtaccttctcctttaggtggagagaccatagatttggacactcaatgtctatctacaatgttgcatgacattgaagacgcagaggacaacgacagagattatgagaagtttagtaagttggtggaagattgccagatgccgttgtatgatggatgcaagtcgaagcacagcaagttgtcatgcgtgttggaactgatgaagcttaaggctagtaatggctggtcggacaagagttttacagaactccttgagctgttaaaggatctgttgccagaggggaacaatttacctcagacgacatatgaagcgaagcaagtattatgtccgttgggcctggagttcagaagaattcatgcatgtccgaacgactgcattttgtattacaaggaatacgctgacttggatgtctgccctatctgtgggggatcaagatacatacgagcaaagagtgaaggtgaaggaagtaagtcaaagaggggaggcccagcaaaggtggtgtggtatctcccaactgcggagcgcatgaagagaatgtttgcgaacaaggaacaagctaagcttgtgcgctggcatgccgaagaacggaaagtcgatactatgctgaggcacccagcagattcagtgcagtggaggacaatcgataggatttaccaggaattctcaaatgacccaagaaacatgcgtttcgcaatgtgtacggacggcattaatccttttggtgatttgagcagtcgtcacagtacatggccagttctgcttgttaactataaccttcctccctggttgtgtttcaaaagaaagtacattatgcttgccatgctcattcaaggaccgagacaacctggcaacgatatcgatgtgttccttgaaccgataatcgatgacttcgaaaggctatggaatgagggcacacgaacatgggacgcatatgcacaagagtatttcaacctccatgcgatgctgttttgtaccatcaacgattatccggcccttggcaacctttctggccaaactgtgaaagggaaatgggcgtgttcggagtgtatggaggaaacaagaagcaaatggttgaagcattcacacaagacggtctacatgggtcacaggagatttctcccaaggaaagttggaaagcgaaaagagaagagcacatcgaaggaaaaaacagaggagcatgtggaaaaacaaaagacaaaagagaggagcatgtggaaaaagaagtcaatattctggagactaccatactggaaggatcttgaagttcgccactgcatagatttgatgcatgtcgagaagaatgtatgcgagagtttaatgggattactgcttaacccaggtactacaaaggatggtctcaacgcccgacgagatctggaagatatgggtgttcggtcggagctacatcccataaccacggaatccggcagggtttaccttcctccagcctgctacactctctcgaaagaagagaagattgatttgctaacatgtttgagtggtataaaggttccatctggttactcatcaagaatcagtaggctcgtttcactgcaagatcttaagttggttggaatgaagtcgcatgattgccacgttcttatcacacagctgttgcccgttgcaataaggaatattttgcctcctaaggtgcgacacacgatccagcggttgtgttccttcttccatgcaatcggccagaagatcattgatcccgagggactagatgaactacagggagaagttgtgagaaccctatgtcatcttgagatgtactttcctccaactttctttgacataatggaacatcttccggtgcaccttgtgaggcaaacaaagtgctgtggtccagcattcatgacgcagatgtatccttgcgaaaggtacctggggatccttaagggttatgtacggaaccgttcacaccccgaggggagtatcatcgagagttacaccaccgaagaggccatcgaattttgtgtggactacatgtcagaaacatcttcaattggattaccacgatctcatcacgaagggaggcttgacggtgttggtactgttggaagaaagactattaggttggatcggaaggtgtatgataaagctcatttcacggtactacagcatatgactgaggtggtgccgtacgttgacgaacaccttgcagttatccgacaagagaacccaggccgatcagagagttgggtcaggaataagcacatgtcttctttcaacgagtggctgaagaaccgaattgccaggttgcagaacttgtctagtgaaacacttcagtggttgtcacagggtcctgaatggagtgccaccacctggcaaggatatgacataaatgtatacacctttcacacggtaaagcaagacagcaaatgcacagtgcagaacagtgggttacgcatcgaggctgctagtgatggtggtcgtcgtgatcaatactatggtagagttgagcaaatattggagctagattacttgaagttcaaagtcccgttgtttcgttgtcgatgggtcgatcttcgcaatgtaaaagttgacaatgaaggtttcaccactgtcaacttggctaacaacgcgtacaaggatgaaccgttcgttctcgccaaacaagttgttcaagtgttctacatagttgacccgtgtaacaagaaactacatgtagttcgtgaagggaaaaggagaattgttggattggacaatattgcagacgaggatgattacaaccagcacgtccacggcataggtcaagaaatacctctagaagaggaggaggaagaagatgaagttcaatatgcacgtgtcgaccatgaggaaggattatttttgtaa

SEQ ID NO: 93900 - DNA, 651 bp, Oryza sativa
  Clone ID: PAT_MRT4530_9223C.1
atgggcggtggacagcggacaccgttgcgcgggggcacgggacgcggaggtgggagcggccgcgaatggtgctcgacgtggaggtgggaacgtctgaacgtgctcaccgccggccgcgaaatgtgcggcacggcgaccacagcccatcccctcgccgacgaggagctgccgctggcggacgccgtggctcctgagaccgccgtcgctgcacctgaggcccaggatggtggtggagaaggggaggtgacggcgacctcggatggcttcaccgtgcaggaccacgacgacgacgacgctggagctgccgcgggctgccttgctcaccaagactctatctcctccccctcccacatttttctcctccacaagaagctccatcagaagtgtgatggcgcaaactttacaagttatggtggctatggtaaattggacatgatgcggcagtggaggcaccggatctggtgcagtgtttcttgggagcactggatccggcgacgtgacgaaggggaccagaaggatggcagtgctgatggcgccggatccggcgtgacattgcttggtagccctagatccgacagtggcagcgaaggggacaagaggagtgacagtggaggaggcagatctggcgcagtagttctcatgacgttctag

SEQ ID NO: 93901 - DNA, 3273 bp, Oryza sativa
  Clone ID: PAT_MRT4530_92240C.1
atgggttctcatcatcgccccaccgcagggcaatgcagcctcgtgcagccaccgcgcctcatcacctgccttctcctactgcttcttcttctgcttctgtcgtcgccactgacgctcccgtgctcggcgtcgtcggcggtgatcactcacctcccgggcttccatggccgcctgccattctacctcgagactgggtacattggtgttgaggagaagactggcactgagctcttctactacttcgttgaatcagagagaaaccctgacacagaccctttggtactgtggctagtgggtgggccccgttgttcgggcttctgtggcgttgtctacgaagaagaagccgtcagaggtgatgggccgccacctgtgacggctttcatttctagcccgtcacagatggatcgtagatggatgtactatgcgcatcgttcgtctaccgagtatagagagggggtcactgaatttgtcacatttgcggataatgacagaaaaagtaggatgagcatgcacatgttgtgcccatgtagggactgtaagaatgaacagatgatcgaagacaaggatgaagtgcatgctcatttgataatgaatggattcatgaagaaatatacctgctggaccaagcatggagagcaagaggcgcctgatgtcgcagctgaagaagtgttggatcaggatgtagagaacaccgccgcagctcgagaaggcatgttcgtaccttctcctttaggtggagagaccatagatttggacactcaatgtctatctacaatgttgcatgacattgaagacgcagaggacaacgacagagattatgagaagtttagtaagttggtggaagattgccagatgccgttgtatgatggatgcaagtcgaagcacagcaagttgtcatgcgtgttggaactcatgaagcttaaggctagtaatggctggtcggacaagagttttacagaactccttgagctgttaaaggatctgttgccagaggggaacaatttacctcagacgacatatgaagcgaagcaagtattatgtccgttgggcctggaggaatacgctgacttggatgtctgccctatctgtggggcatcaagatacaaacgagcaaagagtgaaggtgaaggaagaccgagacaacctggcaacgatatcgatgtgttccttgaaccgataatcgatgacttcgaaaggctatggaatgagggcacacgaacatgggacgcatatgcacaagagtatttcaacctccatgcgatgctgttttgtaccatcaacgattatccggcccttggcaacctttctggccaaactgtgaaagggaaatgggcgtgttcggagtgtatggaggaaacaagaagcaaatggttgaagcattcacacaagacggtctacatgggtcacaggagatttctcccaaggtatcacccgtataggaatatgagaaagaatttcaatggacacagagatacagccggacccccgacagagctaacagggacagaggtgcacaacttagtgatgggaataaccaacgagtttggaaaaaagaggaaagttggaaagcgaaaagagaagagcacatcgaaggaaaaaacagaggagcatgtggaaaaacaaaagacaaaagagaggagcatgtggaaaaagaagtcaatattctggagactaccatactggaaggatcttgaagttcgccactgcatagatttgatgcatgtcgagaagaatgtatgcgagagtttaatgggattactacttaacccaggtactacaaaggatggtctcaacgcccgacgagatctggaagatatgggtgttcggtcggagctacatcccataaccacggaatccggcagggtttaccttcctccagcctgctacactctatcgaaagaagagaagattgatttgctaacatgtttgagtggtataaaggttccatctggttactcatcaagaatcagtaagctcgtttcactgcaagatcttaagttggttggaatgaagtcgcatgattgccacgttcttatcacacagctgttgcccgttgcaataaggaatattttgcctcctaaggtgcgacacacgatccagcggttgtgttccttcttccatgcaatcggccagaagatcattgatcccgagggactagatgaactacaggcagaacttgtgagaaccctatgtcatcttgagatgtactttcctccaactttctttgacataatggaacatcttccggtgcaccttgtgaggcaaacaaagtgctgtggtccagcattcatgacgcagatgtatccttgcgaaaggtacctggggatccttaagggttatgtacggaaccgttcacaccccgaggggagtatcatcgagagttacaccaccgaagaggccatcgaattttgtgtggactacatgtcagaaacatcttcaattggattaccacgatctcatcacgaagggaggcttgacggtgttggtactgttggaagaaagactattaggttggatcgtaaggtgtacgataaagctcatttcacggtactacagcatatgactgaggtggtgccgtacgttgacgaacaccttgcagttatccgacaagagaacccaggccgatcagagagttgggtcaggaataagcacatgtcttctttcaacgagtggctgaagaaccgaattgccaggttgcagaacttgcctagtgaaacacttcagtggttgtcacagggtcctgaatggagtgccaccacctggcaaggatatgacataaatggatacacctttcacacggtcaagcaagacagcaaatgcacagtgcagaacagtgggttacgcatcgaggctgctagtgacggtggtcgtcgtgatcaatactatggtagagttgagcaaatattggagctagattacttgaagttcaaagtcccgttgtttcgttgtcgatgggtcgatcttcgcaatgtaaaagttgacaatgaagctttcaccactgtcaacttggctaacaacgcgtacaaggatgaaccgttcgttctcgccaaacaagttgttcaagtgttctacatagttgacccgtgtaacaagaaactacatgttgttcgtgaagggaaaaggagaattgttggattggacaatattgcagacgaggatgattacaaccagcacgtccacggcataggtcaagaaatacctctagaagaggaggaggaagaagatgaagttcaatatgcacgtgtcgaccatgaggaaggattatttttgtaa

SEQ ID NO: 93902 - DNA, 734 bp, Oryza sativa
  Clone ID: PAT_MRT4530_92241C.1
ccggccgggctcctccccacttcccttccccgtggtctcctcctcctcctcctctccacccgcatccgtggctccggttgcgctgctcgggagccctcgcggctttctaggaggtcgctggagcggccgattagaggggccagcgccggcggcgtcggattcggcgcctcttccgactcccgcttcagttaaagagtgatggctgaaaccaagatccatgcaaacaagcaagcataagttgccatgacgaaatgcatcaaaacagacatcagaaatgagcaaacggcacaacgcaatactgccggtaactgtgttaaaacgtcatcctccaacaccgcagaagctcccgggcatgcatctgtcactattccgtccaatgttggcgagaacactatggctgacaataatggtgttagacaggaattgtcagacaaggaatccgacaccagaaggttacctctgctgctgcgggaatgctctctcatttcttgaaagggcgtgttcaatcaccaccaagaaggttactatattattctttttctatttctcctgttgggggttgattctggcatccactgcaacatggctcgctcgtaagcacttcgcccaggcagttgcccttcttgcacttgtttcacaggtttcttgtggctggttttgatcgcgttcacattttcataacaaaggctgaaggactctgcgatttgctcattcatttaggggtagaaatgggg

SEQ ID NO: 93903 - DNA, 3420 bp, Oryza sativa
  Clone ID: PAT_MRT4530_92242C.1
ataaatacccccaaactgccaactgctttccatcccgaccattgtactgttcacaaatcggttgggagggcaaggggggcgattttttgctaaaattcaaggtaaaaaacacattattctccattcattctcaacatatcgatcatcatttatttttcttcgtatgttgttgatttcagatggatcgtagatggatgtactatgcgcatcgttcgtctaccgagtatagagagggggtcactgaatttgtcacatttgcggataatgacagaaaaagtaggatgagcatgcacatgttgtgcccatgtagggactgtaagaatgaacagatgatcgaagacaaggatgaagtgcatgctcatttgataatgaatggattcatgaagaaatatacctgctggaccaagcatggagagcaagaggcgcctgatgtcgcagctgaagaagtgttggatcaggatgtagagaacaccgccgcagctcgagaaggcatgttcgtaccttctcctttaggtggagagaccatagatttggacactcaatgtctatctacaatgttgcatgacattgaagacgcagaggacaacgacagagattatgagaagtttagtaagttggtggaagattgccagatgccgttgtatgatggatgcaagtcgaagcacagcaagttgtcatgcgtgttggaactcatgaagcttaaggctagtaatggctggtcggacaagagttttacagaactccttgagctgttaaaggatctgttgccagaggggaacaatttacctcagacgacatatgaagcgaagcaagtattatgtccgttgggcctggaggtcagaagaattcatgcatgtccgaacgactgcattttgtattacaaggaatacgctgacttggatgtctgccctatctgtggggcatcaagatacaaacgagcaaagagtgaaggtgaaggaagtaagtcaaagaggggaggcccagcaaaggtggtgtggtatctcccaattgcggagcgcatgaagagaatgtttgcgaacaaggaacaagctaagcttgtgcgctggcatgccgaagaacggaaagtcgatactatgctgaggcacccagcagattcagtacagtggaggaaaatcgataggatttaccaggaattctcaaatgacccaagaaacatgcgtttcgcaatgtgtacggacggcattaatccttttggtgatttgagcagtcgtcacagtacatggccagttctgcttgttaactataaccttcctccctggttgtgtttcaaaagaaagtacattatgcttgccatgctcattcaaggaccgagacaacctggcaacgatatcgatgtgttccttgaaccgataatcgatgacttcgaaaggctatggaatgagggcacacgaacatgggacgcatatgcacaagagtatttcaacctccatgcgatgctgttttgtaccatcaaccattatccggcccttggcaacctttctggccaaactgtgaaagggaaatgggcgtgttcggagtgtatggaggaaacaagaagcaaatggttgaagcattcacacaagacggaatatgagaaagaatttcaatggacacagagatacagtcggacccccgacagagctaacagggacagaggtgcacaacttagtgatgggaataaccaacgagtttggaaaaaagaggaaagttggaaagcgaaaagagaagagcacatcgaaggaaaaaacagaggagcatgtggaaaaacaaaagacaaaagagaggagcatgtggaaaaagaagtcaatattctggagactaccatactggaaggatcttgaagttcgccactgcatagatttgatgcatgtcgagaagaatgtatgcgagagtttaatgggattactacttaacccaggtactacaaaggatggtctcaacgcccgacgagatctggaagatatgggtgttcggtcggagctacatcccataaccacggaatccggcagggtttaccttcctccagcctggtacactctctcgaaagaagagaagattgatttgctaacatgtttgagtggtataaaggttccatctggttactcatcaagaatcagtaggctcgtttcactgcaagatcttaagttggttggaatgaagtcgcatgattgccacgttcttatcacacagctgttgcccgttgcaataaggaatattttgcctcctaaggtgcgacacacgatccagcggttgtgttccttcttccatgcaatcggccagaagatcattgatcccgagggactagatgaactacaggcagaacttgtgagaaccctatgtcatcttgagatgtactttcctccaactttctttgacataatggaacatcttccggtgcaccttgtgaggcaaacaaagtgctgtggtccagcattcatgacgcagatgtatccttgcgaaaggtacctggggatccttaagggttatgtacggaaccgttcacaccccgaggggagtatcatcgagagttacaccaccgaagaggccatcgaattttgtgtggactacatgtcagaaacatcttcaattggattaccacgatctcatcacgaagggaggcttgacggtgttggtactgttggaagaaagactattaggttggatcgtaaggtgtacgataaagctcatttcacggtactacagcatatgactgaggtggtgccgtacgttgacgaacaccttgcagttatccgacaagagaacccaggccgatcagagagttgggtcaggaataagcacatgtcttctttcaacgagtggctgaagaaccgaattgccaggttgcagaacttgcctagtgaaacacttcagtggttgtcacagggtcctgaatggagtgccaccacctggcaaggatatgacataaatggatacacctttcacacggtcaagcaagacagcaaatgcacagtgcagaacagtgggttacgcatcgaggctgctagtgacggtggtcgtcgtgatcaatactatggtagagttgagcaaatattggagctagattacttgaagttcaaagtcccgttgtttcgttgtcgatgggtcgatcttcgcaatgtaaaagttgacaatgaaggtttcaccactgtcaacttggctaacaacgcgtacaaggatgaaccgttcgttctcgccaaacaagttgttcaagtgttctacatagttgacccgtgtaacaagaaactacatgttgttcgtgaagggaaaaggagaattgttggattggacaatattgcagacgaggatgattacaaccagcacgtccacggcataggtcaagaaatacctctagaagaggaggaggaagaagatgaagttcaatatgcacgtgtcgaccatgaggaaggattatttttgtaa

SEQ ID NO: 93904 - DNA, 645 bp, Oryza sativa
  Clone ID: PAT_MRT4530_92243C.1
atggggttcagcccatgggcagtaaaaaagggtctcctttgtgggagaacccacagcggtaggagctcggcgactggatcggcggccgccgccgccttgcgccgccttctctccccctccgcctccgcctccgcctcctccccgtcgcgatcctccgtcgctgtccccgtccctgtccgcgagcgccgccgctccgtccttcccatccagatcgcgccaccctatccgccggcgcgtcgtacgcctccaccaactgtcggtcctccgcggctccgcctcccggtcaagatccggcaccgcgccgccgtcctccgttgcctccgcctcctgtccgagatccgcagcaccgcgcagccccttctctgcacgtcggcttctgcaaccaagctgctcttctgtttgagattaactgaaagctggtggccatgtgttgatctgaattttaggatacaaggatctgatattctgcctttaagtgctgaatatacatttttttcaggccacttagatcgaacttctatgtcccctgaaacccttgaggcaagtatatgtttgaaagattggataattggatttgacgatgatgaaaaaggctatgcaacagaaggatctcgcatttgtgatttggaagactatgttgaatag

SEQ ID NO: 93905 - DNA, 1691 bp, Oryza sativa
  Clone ID: PAT_MRT4530_92244C.1
catgtcgaaggaaaaaacagaggagcatgtggaaaaacaaaagacaaaagagaggagcatgtggaaaaagaagtcaatattttggagactaccatactagaaggatcttaaagttcgccactgcatagatttgatgcatgtcgaaaagaatatatgtgagagtttaatgagattactgcttaacctaggtactacaaaggatggtctcaacgcccgacgagatctggaagaaatgggtgttcgctcggaactacatcccataaccacggaatttggcagggtttaccttcctccagcctgctacactctctcgaaagaagagaatattgatttgctaacatgtttgagtggtataaaggttccatctggttactcatcaagaatcagtaggctcgtttcactacaagatcttaagttggtaggaatgaagtcgcatgattgccacgttcttatcacatagctgttgcccgttgcaataaggaatattttgcctcctaagctgcgacacacgatccaacggttgtgttccttcttccatgcaatcggccaaaagatcattgatcccgagggactagatgaactacaggcagaacttgtgagaaccctatgtcatcttgagatgtactttcctccaactttctttgacataatggaacatcttcccgtgcaccttgtgaggcaaacaaagtgctatggtccagcattcatgacgcagatgtatccttgcgaaaggtacctggggatccttaagggttatgtatggaaccgttcacaccccgaggggagtatcatcgagagttacaccaccgaagaggtcatcgatttttgtgtggactacatgtcagaaacatcttcaattggattaccacgatctcatcacgaagggaggcttgatggtattggtactgttggaagaaagaaagactgttaggtcggatcagaaggtacgataaagctcatttcatggtactgcagcattatgactgaggtggtgccgtacgttgacgaacaccttgcagttctccgacaggagaacctaggccgatcagagagttgggtcagaaataagcacatgtcttctttcaatgagtggctgaagaaccggattgccaagttgccgaacttgtctagtcaaacacttcagtggttgtcacagggtcctgaatggagtgccaccacctggcaaggatatgacataaatggatacacctttcacacggtaaagcaagacagcaaatgcacagtgcaaaacagtgggttacgcatcgaggctcctagtgacggtggtaggcgtgatcaatactatggtagagttgagcaaattttggagctagattacttgaatgttcaaagtcctgttgtttcgttgtcaatgggtcaatcttcgcaatgtaaaagttgacaatgaaggtttcaccactgtcaacttggctaacaacgcgtacaaggatgaaccgttcgttctcgccaaacaagttgttcaagtgttctacatagttgacccatgtaacaagaaactacatgttgttcgtgaagggaaaaggagaattgttggattagacaatattgcagacgaggataattacaaccagcacgtccacggcataggtcaaaaaatacctctagaagaggaggaagaagaagatgacgtttaatatgcacgcgtcgaccatgaggaaggattatttttg

SEQ ID NO: 93906 - DNA, 3486 bp, Oryza sativa
  Clone ID: PAT_MRT4530_92245C.1
atggagggaaagaggactaccacttcgatggtgatcatgtggctggtcatcttgagcctcactgtcgactccgccaccgcgacacaacgagataacgtcaccggtgagccatccggccgcggaccgtcacaggtgtgttgggtctataaatacccccaaactgccaactgcttttcatcccgaccattgtactgttcacaaatcggttgggagggcaatgggggcgattttttgctaaaattcaagatggatcgtagatggatgtactatgcgcatcgttcgtctaccgagtatagagagggggtcactaaatttgtcacatttgcggataatgacagaaaaagtaggatgagcatgcacatgttgtgcccatgtagggactgtaagaatgaacagatgatcgaagacaaggatgaagtgcatgctcatttgataatgaatggattcatgaagaaatatacctgctggaccaagcatggagagcaagaggcgcctgatgtcacagctgaagaagtgttggatcaggatgtagagaacaccgccgcagctcgagaaggcatgttcgtaccttctcctttagggggagagaccatagatttggacactcaatgtctatctacaatgttgcatgacattgaagatgcagaggacaatgacagagattatgagaagtttagtaagttggtggaagattgccagatgccgttgtatgatggatgcaagtcgaagcacagcaagttgtcatgcgtgttggaactcatgaagcttaaggctagtaatggctggtcggacaagagttttacagaactccttgagctgttaaaggatctgttgccagaggggaacaatttacctcagacgacatatgaagcgaagcaagtattatgtccgttgggcctggaggaatacgctgacttggatgtctgccctatctgtggggcatcaagatacaaacgagcaaagagtgaaggtgaaggaagtaagtcaaagaggggaggcccaacaaaggtggtgtggtatctcccaattgcggagcgcatgaagagaatgtttgcgaacaaggaacaagctaagcttgtgcgctggcatgccgaagaacggaaagtcgatactatgctgaggcacccagcagattcagtacagtggaggacaatcgataggatttaccaggaattctcaaatgacccaagaaacatgcgtttcgcaatgtgtacggacggcattaatccttttggtgatttgagcagtcgtcacagtacatggccagttctgcttgttaactataaccttcctccctggttgtgtttcaaaagaaagtacattatgcttgccatgctcattcaaggaccgagacaacctggcaacgatatcgatgtgttccttgaaccgataatcgatgacttcgaaaggctatggaatgagggcacacgaacatgggacgcatatgcacaagagtatttcaacctccataagatgctgttttgtaccatcaacgattatccgtcccttggcaacctttctggccaaactgtgaaagggaaatgggcgtgttcggagtgtatggaggaaacaagaagaaaatggttgaagcattcacacaagacggtctacatgggtcacaggagatttctcccaaggtgtcacccgtataggaatatgagaaagaatttcaatggacacagagatacagccggacccccgacagagctaacagggacagaggtgcacaacttagtgatgggaataaccaacgagtttggaaaaaagaggaaagttggaaagcgaaaagagaagagcacatcgaaggaaaaaacagaggagcatgtggaaaaacaaaagacaaaagagaggagcatgtggaaaaaaaagtcaatattttggagactaccatactggaaggatcttgaagttcgccactgcatagatttgatgcatgtcgagaagaatgtatgcgagagtttaatgggaatactgcttaacccaggtactacaaaggatggtctcaacacccgacgagatctggaagatatgggtgttcggtcggagctacatcccataaccacggaatccggcagggtttaccttcctccagcctgctacactctctcgaaagaagagaagattgatttgctaacatgtttgagtggtataaaggttccatctggttactcatcaagaatcagtaggctcgtttcactgcaagatcttaagttggttggaatgaagtcgcatgattgccacgttcttatcacacagctgttgcccgttgcaataaggaatattttgcctcctaaggtgcgacacacgatccagcggttgtgttccttcttccatgcaatcgggcagaagatcattgatcccgagggactagatgaactacaggcagaacttgtgagaaccctatgtcatcttgagatgtactttcctccaactttctttgacataatggaacatcttccggtgcaccttgtgaggcaaacaaagtgctgtggtccagcattcatgacgcagatgtatccttgcgaaaggtacctggggatccttaagggttatgtacggaaccgttcacaccccgaggggagtatcatcgagagttacaccaccgaagaggccatcgaattttgtgtggactacatgtctgaaacatcttcaattggattaccacgatctcatcatgaagggaggcttgacggtgttggtactgttggaagaaagactattaggttggatcggaaggtgtacgataaagctcatttcacggtactacagcatatgactgaggtggtgccgtacgttgatgaacaccttgtagttatccgacaagagaacctaggccgatcagagagttgggtcaggaataagcacatgtcttctttcaacgagtggctgaagaaccgaattaccaggttgcagaacttgtctagtgaaacacttcagtggttgtcacagggtcctgaatggagtgccaccacctggcaaggatatgacataaatggatacacctttcacacagtaaagcaagacagcaaatgcacagtgcagaacagtgggttacgcatcgaggctgctagtgacggtggtcgtcgtgatcaatactatggtaaagttgagcaaatattggagctagattacttgaagttcaaagtcccgttgtttcattgtcgatgggtcgatctttgcaatgtaaaagttgacaatgaaggtttcaccactgtcaacttggctaacaacgcgtacaaggatgaaccgttcgttctcgccaaacaagttgttcaagtgttctacatagttgacccatgtaacaagaaactacatgttgttcgtgaagggaaaaggagaattgttggagtggagaacattgcagacgaggatgattacaaccagcacgtccacggcataggtcaagaaatacctctagaagaggaggaagaagaagatgaagttcaatatgcacgtgtcgaccatgaggaaggattatttttgtaa

SEQ ID NO: 93907 - DNA, 350 bp, Oryza sativa
  Clone ID: PAT_MRT4530_92246C.1
agacgcgaaggttattttccagttcacttgcaaacgtgcatgtcggccagaaagggttggttagtagagcttttgtatttgtagacccactctatcacgttctgtatttctagaccacgaaattaaccttgtcattcacgggactggattcaatcatggttgcccacgtgtttttttgtcctgttgtttttttgtcctgtagcttctaggtaactccctaggagaagtgggtaccccaaagccagaaccacaagaaggtacttgcgtcaaaagatgaaatcgtgttgcccaactgtacagtaataccattgaactttgtactgcgtgtccaaaaaaaaaaaaaaaaaaaa

SEQ ID NO: 93908 - DNA, 1563 bp, Oryza sativa
  Clone ID: PAT_MRT4530_92247C.1
atgaggaggtatagtccaccttatcgcagtccaccaaggaggggatatggtggcagaggaagaagtccccctaggaggggatatggaggacggaaggaacagggttctggcagtctcctggtccgcaacatccctttaagctgcagagcggaggatcttagagttccttttgaaaggtttggacctgttcgagatgtttacctgccaaaggattattataccggggaaccgcgagggtttgcattcgtggagtttgttgacccttatgatgcttctgaggcccaatatcatatgaatcgtcaggtggtttttggccgggagataactgttgttcttgctgctgagtcacggaaaaggccagaagagatgcgcagtagagccagagtcagagggtactctgaccatgaaggccgtcgttcatcccattacgggaggtctcgttcacgttcgcgttcccgctctccccgttatcgtggtcgtccacggtcaaggtcatactctcctgctccaagacgacgagatgactattccgcatccccacagagaaaagacacacatcgtgcaaaatctcctaggcgtcagccaaaagaacatgaagtagacaagaagcggagatcctattctcctgccaataaagatggggaccggcgtgatgctgataatggttatgaaaagaggtcgccgccagctgacagcgatggatcccctccgcaccggaggtcccccaggcaatcctcaggatcgcctccaggatcccgctccagttttgactacagcatcatcggtgattatccattcccgtatcactgtgaacagctgctactgtccttcacaatctcattctctgaagatgtaagtttgtttggagaacgggacattacgcgctgcctcctccatcgatgctgtgctgttccactgcctcaagcgtcaccgccacagtatgccccatcttggtctgctctgccaaaaggttctattggcaaggggatggccataagaaaaaataccggcttgctaagtgggacatcatctgtcgtcccaaagatcaaagggggctgggaattcatgacctcgagaaacggggttatttttgataacaagttagtgtcttctcctttacaggttattactctagttacccagtggctgcgtacctgggctatcctccacaaaccgggattgcgggatactattgcggtgaggccgggggtgagctcagttgaaatgtatcatcttggtgtatttgaccgagtcttaataaagcttccattatctaaaaaaaagatcggcaatggctgtaagcatcggcagattcgattcactgagaagttcttcctcagtgacattgttgtccacaagttagtattatattggcattgctctgggattattgaagcacaacaattagctgggagtgcaacaattccctgtaaccaaaagaataaagtgggcacagtacagttcaagaacaggttcttctccacgaaaataattcggcaaggcttatcacctagagttgaaaaatctgggattgcaagaggcattgcaagggagaacttttga

SEQ ID NO: 93909 - DNA, 127 bp, Oryza sativa
  Clone ID: PAT_MRT4530_92248C.1
aaacgaagcccgagctactaaacaaattattctgattataataatcaagacattgagggtgaaagacgagcacgaacttgattgatgctacgagcaaatattgcgagtaacaggggagaaaaagggt

SEQ ID NO: 93910 - DNA, 644 bp, Oryza sativa
  unsure (1)..(644): unsure at all n locations
  Clone ID: PAT_MRT4530_92249C.1
aacnatcaatgactcggtaaatggngnatngggtnccnggccccncttcgagttttttttttttccataaantcagngaaggttnnaanttcnccntttatccaccattatgtaaatctntcttcatggacaaatgcaaagcactaggtaatcggaccaccccacnnaatcnaccancntgatggatntnctnaccnntngaanntnactcggggtcatacgataacctnaccnntnacnaacaccacnggtcgcantggggatntcnacntagnnaatcncccggangctcgcnnncncncnctccangancccncnccngnanacgggnanngnnnccgcnngtgggtgacgggaatcagtggcgccaaanncnctnnncantgctccnacatcnttgtagacncccnacnancagannccatctgtcttcgacngacngncaacntgcctgcanntttcctgnctggantggggattccctagngccaaagaggtnnccanggcgtctaactcnggntttcggtccctccagnaaggttgntnccaatantngggtnnccagtcctagctgtacctccctcaaaggttacacaccttnnctttngtgtcccccgnacccncctgnnaacctgaggaagncc

SEQ ID NO: 93911 - DNA, 918 bp, Oryza sativa
  Clone ID: PAT_MRT4530_9224C.1
tgcagtggtggtagactggttgtgcattctcagcttaatttgcttgagctagtagctgttcgtgagctgtgcaccaatggcgtcgtccagggcgtcggcttcctgtgccctcttcctcgccctcaacctcctcctcttcgccatcaccaccgcctgcccgtcctgcggcagcggcggcggcggcggccatggccattacggtggcggcggcagcagcggcggaggcggcggctacggaggaggcagcggcggctacggaggaggcggcagcagcggcggcggatacggcggcggcggggggtcgtcgacgagcgggtggtacgggaagtgcccgacggacgcgctgaagctgggggtgtgcgcgaacgtgctggacctgataaaggcgaaggcgggggtgccggcgacggagccgtgctgcccgctgctgaacgggctggtggacctggaggcggcggtgtgcctgtgcacggccatcaaggccaacgtgctgggcatcaacctcaacctccccatccacctcagcctcatcctcaacttctgcggcaagggcgtccccaccggcttcatgtgctcttaactctgcagcagcagcaagatttttctgctgggtgcagtgcaagttgatgttcacgggcgaggtttactggcgcttgggcctcaccaaggccgaggtgatcatggcaaatatcattgttgactcttgggtaactcaaaggacaagcccttgatgtcctactagcattgagttgtaggtaccagtttgattgctttcctttgatgcgtatttgttcgctcgctgggtaattgtcaccagtttgtgtgtgttgtaatgtcttgttttagtttcactgtttcggattcaaatttaagatggaacctgaacaatccaggtttttgaaaaaaaaaaaaaaaaaa

SEQ ID NO: 93912 - DNA, 252 bp, Oryza sativa
  Clone ID: PAT_MRT4530_92250C.1
atgccgctccccgccgccgtcgtccctacagccgccgccgtcgcccccaccgccgccatcgtcctgagaagagaaaggccgggggagagagagaaggaaagagaggaggaggaagaagggaaggagagggatgatgacatcagtttgcatttcgcagttactgctttaagcacaatggagcagaatgtcggtctgatctgctacctttcaagcagggtttcagctgtagagaagaactccatatccatctga

SEQ ID NO: 93913 - DNA, 256 bp, Oryza sativa
  Clone ID: PAT_MRT4530_92251C.1
aagggtaaacatttgagtgtgctgaactgaatgatgtggaatgctgagacaaagtgaccaatgtttgtgttttgaagccccttggctgaaacgtgattgaggcaaacaacccgagaatggtgggcttaagcttatttgagtgattcaatgtacccaaaccaaagtttattaaggcaagaaaatatacgatgtgaccattatatatgggtacattactggtagatccagaatgttaccagaaaaaaaaaaaaaaaaa

SEQ ID NO: 93914 - DNA, 1623 bp, Oryza sativa
  Clone ID: PAT_MRT4530_92252C.1
ttaattgattatcctgtagatcacctctgctgcatagagccatagaccaccaagctggagcagaaagaactccaccaagtccatctcgtacggcacaggcggccgatccagtgaatggtccattcgcaggggcagcaagcagtccatggccttctccatcaccttcttgtcgaggtcgaggacgaacacagcgccggtgctactgtacatcatggccaccgatcccctgcgtcccaatccatgcgccatcgtgtaacttttggggtagttggacacctccgttggcatccaaatcacgtcgcggcgccacgccgccgcaccgtcgccatcgccatcgccgcgtcgctgctgcttccagactctgacgtgcatgatgaacacgcagacgatggtgagctcgccgtctccgccgacgcagagcagcggcgtcggcgtgccgccgtcgaggacggggagcttcgtcatggagacgcgcggcgtggccgtggctgtgccgcccacctccacgctgagctcttgtacaggtagtcgtctcgggtggcgctcgcgacgtggtcggtgcacagccagtgcgccgcgccgcggtggacgacggcggatgacgatgatccctcgcccaccagggagaagcggcggagatccaggaacacggcgggcgcggcccagctgctgcgcgtggcggagtacgagtggaggtacacggtcttgatgctcttgtgcttggtggtgacgagcagctgcgagaacatgaagcggcctgaagatggcggctgctgcttcccggcgaggtcgtcggagaagatgatggcgcagctggtgacggcgaaggaaccaaggttggaggggcccttcagatgcgggagaacgtggtgctcgctggtgatagggttgaagaggccgaggaggtggctggtcgcctctgaccagtcgttggagggggaaagccgcatcaggaggatgccgcggcgcgccgtcaggggctcgccgtcgtagctggaggggatgggggcgaagcggcggcgccggcaggaagccgaatgtcgaggccgagttgcgttgccggtggaagaagaagccgaggaggtcgccggcgcgctggccgccccagaggtcgcggaggaaggcgcgatcggtgaagcggcggcatgttgcggccagcatgaagaggctcttgacgttgcccacgcgggagaggacctggaggaggacgtcctccggcaatgccgccatgatgtcgttgtccgccatggtctcggaatattactgcttgagatgtttacaggaaagagtccaacggatgacgtgttcagagattcattagatctgaataagtttaccaaggatgctcttccagacataacttcggagatagcagactcaacaatctggctgcatgtagaaccacgggataacattatacagagcagaatccaggagtgtctcgtttctgtcttcatgttaggcatatcctgcacaaagcaacagcctcaagagcgagcatcaataagagatgtagcagtagagatgcatgcactaagagatgtatacctcatgtttgccaattagcttgcataggtattactagaacagaaggaaaagcctccactgagacaccgaaaacag

SEQ ID NO: 93915 - DNA, 1485 bp, Oryza sativa
  Clone ID: PAT_MRT4530_92253C.1
atgtcgtgggtcgccgccaccgtagctctcctgctgaccaccgcggtcatactgaccgcgttgcagaagagaaagatcagcagcccggccgcggcggcgccgccggttgtgcggggagccggtctcgtacggttcgcgcgcgccatggcgagggacgggccgctggaggcgatccgcgagcagcaggcgaagctggggagcgtgttcacggcgatcgccccgtttggcctcttcaaggtgaccttcctgatcgggccggaggtgtcgagccacttctacctggcgccggagtcggagatggggcagggtagcatctacaggttcaccgtgcctttgtttgggcccgaggttggctacgccgtcgacccggacactcgtgctgagcagatgcgcctcttctgggacgtcctcaagccacggagcatcgaggccagggtaggcgccatggctgaggaggtccagaactacttctcgagatggggagagcaagggacggttgatctgaagaaagagttggagcaggtactgatgttgatcgcgagtcggtgcctgctgggaagggaggtgcgggagagcatggtggacgaagtatacgagctcttccgtgatcttgacaacggcttgcacctcatcagcaccatgctcccctacctcccaaccccggcacaccgccgtcgtgacagggcgcgccaaaggctcggggagatattcaccgaggtgattaggtcacgcaggaactctggcactgccgacaacggcgacgacgtgctgcaacgcctcattgacggcaggtacaaggacgagcgtgacttgacggatgtggaggtcgtcggtctactcgtggcgcttgtgttcgcggggaaacactcgagctccagcgtgagcacctggaccggcatcaacctgctctcccacccaaaccaccttgtcgccgtcatcgccgagcaggaccggctgatggcgtcgcgcgctagaaccgacgatgaccatgatcgcgtcaactatgataccgtgcaggagatgaccactctgcaccgctgcatcaaggaggcgctccgactgcacccaccggcagtggcaatgttccgtcaagcccgcaagcacttcaccgtgcagacaaaggaaggtaaagagtacacgatcccaggagggcacacggtgatgagcacgatcttggtgaaccaccacatgcccaatgtctacaaggaccctcatgtgtttgacccttcacggtttgcacgcggtaggggggaagacaaggccgctggccccttctccttcctggcctttggcgccgggaggcattcatgcgcaggtgagtccttcgcgtacacacagataaaggtgatatggagccatttgctgaggaactttgagctcaagatggtatctcctttccctgagacaagctggagaatggtgacgccagagccaaaggggacagtgatgattagctacaggagacggaacctaacttgtaaatag

SEQ ID NO: 93916 - DNA, 168 bp, Oryza sativa
  Clone ID: PAT_MRT4530_92254C.1
gatgatggactgcagaggatcacatggaagcggacaaaccgcaaaaagcgcgacatacccctcgacagcgaggcggcccagtcttcgaagatgctcaaaggggatgaattggctggctcagtcttcaaatatgcttataagggggtgagtgtgaagatgctcatagag

SEQ ID NO: 93917 - DNA, 357 bp, Oryza sativa
  Clone ID: PAT_MRT4530_92255C.1
tgagtgctgccgcgtcgtagctggatcttgagggcgccttttttttttttttttttttttgggtggtttttttttttaacttaaaagcaactttttattactgaagaaaattgccaaatcagttttttgtgttcaccaattgtccggagaacctgaacactgccgattgtgcttagttagtcctctaaaatatttgggtaggggaaacaggggttaactatgaaatcctaaattttcagaaaaactaaaacacctattgggacctgggcggacctgggtgaccggaattcggaccggtcctgaggggtccagttttctataggagtgattaagttggcgaatatgggataggtgttc

SEQ ID NO: 93918 - DNA, 687 bp, Oryza sativa
  Clone ID: PAT_MRT4530_92256C.1
atggcgaaggcggcggagaagctggtggtggaggtggtggcggcgcacaacctcatgcccaaggacgggcaggggtcctcgtcggcgtacgtggaggtggagttcgagcaccagaggcggcggacgcgtgccaggcccaaggagctcaaccccgtctggaacgagcgcctcgtcttcgccgtcgccgaccccgacgatctcccctaccgcgccatcgacgtcggcgtctacaacgaccgcgccgcgtccgggggggtcgccggcggcggcggggcggcgccgcacggccgcaacttcctcggcaaggtccgcgtcccggccgccggcgtgccggcccccggggaggaggtggtgccgcagctcttcacgcttgagaagcgcagcctgttctcccacatccgcggcgagatcaccttgaagatttatcgcaccaactccggggaggttgtcgtcaagtccaagccggagaagccggtgaaggcggtggtgtcgggcccggaggtggtggccgcgccgccggtcaccgggcccaagaagcagcagcagcagcagccggtggtggccgtgcagccgtcgcctccgcagccggaggcgcccatggacttcctgccgtccccggtcccgttgctcatgaagcctggcatgctcgttgtcccttattccgtttcggatcggtttttcgttccc

SEQ ID NO: 93919 - DNA, 936 bp, Oryza sativa
  Clone ID: PAT_MRT4530_92257C.1
atggcagcaatggtggtgcatggcgtgcaaagtggagattccaaaccttcctctccaccaacaagtcctcctccggcgcaggcacgccacgccacgccacggcgtggacaaggccgagcacataaggcggccgccgccgcagccgcagccgcagccgcagccgcagcaaaagcttcgctgcatctcacaatgttaagcgcggcgaacggcggcggcgtccaccatgatcaccggggtgattacccccccgaccagcggtacggcaacggcggcgaggaggccagacaacagcagccttcgtggcagccgccgcgggaccaggtgacgcaccacccgcgggggcggagggcgcaccggtcgggcccgctggagtggacggcggcggtggtgttcacggtgctcgccgtggtggtgctcgtcgcggcggtggccgtgctggtggtggtgctgctgctgcagccgcgggcgccgtacctcgccatccggtcggcgcggctcgacgacctcgtctacgaccagcaaggggcgctggaggcggcgctgtcgctgggcgtcgccgccgagaacggcaacgcgaggtcgggcgccaccttctccgacttcgagctccgcctcgtgttccaccgcgtggtcatcgccatccttcgcgccgacccgttcgacgtcccgcccaaggggtcgctgccgctgggctacgtggtgcgctcgtcggggatcccgctggacagctccggcatggccgccatggaggcggcgctcgccgacggcgtcgtgccgttcaccgtgtccggccaggcgagcacgcggtggaaggtgggtggcctcgtcccgttcaagtactggacgcgcctacgctgcgacctccgattcttctggcccaatggcaccgccgtcgacctcagctgcagctccaagcccaaatccaagagcagctag

SEQ ID NO: 93920 - DNA, 494 bp, Oryza sativa
  Clone ID: PAT_MRT4530_92258C.1
ttggttgttaaacaaccatgggtgacatacttacattttagatttgaccagaatggtgcaggtatcgaacaaataggctgtacaacaatgctgcgaagtccatcacctgagcatgcatgtatgacgggccgggaaaacttaaacaggaccacaacatatgattgcaacaaatctgaccaagacctaagtgacaggacactggagaagcctctacttatttttttcaagtccccttgaaatgctagcaaggcccatccaccttgaaacacaggattattacagggcctgatactggcaggaacatttgccctgctgttgctagcatatgatcaaggaaagctccagccccaacctgggttggggtatgggctaaggagtcaggcactggtattgtttagacaagggatgtcagaaggagtttcgagactatttgattcacacctttgcttgttttcagcatgtaatctgatccagaagcatcgtacataccacac

SEQ ID NO: 93921 - DNA, 4044 bp, Oryza sativa
  Clone ID: PAT_MRT4530_92259C.1
atgaccatcacctttgacgggtcatacgggatgccgtcatcagtgaggcatccggccgcggcccgtcacgggtatcccctcacctgtgacgggctgaaaggcaaagccgtcacaggtgagacagtgatgggttttccaacccgtcactggtatcccctcacctgtgacgggccgcggcattataagccgtcacagatggattgtagttggatgtaccatgttcatcgttcgtctacagagtatagagagggggtcactgaatttgtcacatttgcagagaatgacagaaaaagtaggatgagcatgtacatattgtgtccatgtagggactataagaatgaaaagatgaaccttgatagttcagaagcgcattctcatttgataacgaatggattcatgaagaaatatacctgctggaccaagcatggagagcaagaggcgcctgatgtcgcagctgaagaagtgttggatcaggatgtagagaacaccgccgcagctcgagaaggcatgttcgtaccttctcctttaggtggagagaccatagatttagacactcaatgtctatctacaatgttgcatgacattgaagacgcagaggacaacgacagagattatgagaagtttagtaagttggtggaagattgccagatgccgttgtatgatggatgcaagtcgaagcacagcaagttgtcatgcgtgttggaactcatgaagcttaaggctagtaatggctggtcggacaagagttttacagaactccttgagctgttaaaggatctgttgccagaggggaacaatttacctcagacgacatatgaagcgaagcaagtattatgtccgttgggcctggaggatcttgaagttcgccactgcatagatttgatgcatgtcgagaagaatgtatgcgagagtttaatgggattactgcttaacccaggtactacaaaggatggtctcaacgcccgacgagatctggaagatatgggtgttcggtcggagctacatcccataaccacggaatccggcagggtttaccttcctccagcctgctacactctctcgaaagaagagaagattgatttgctaacatgtttgagtggtataaaggttccatctggttactcatcaagaatcagtaggcttgtttcactgcaagatcttaagttggttggaatgaagtcgcatgattgccacgttcttatcacagagctgttgcccgttgcaataaggaatattttgcctcctaaggtgcgacacacgatccagcggttgtgttctttcttccatgcaatcggccagaagatcattgaccccgagggactagatgaactacaggcagaacttgtgagaaccctatgtcatcttgagatgtactttcctccaactttctttgacataatggaacatcttccggtgcaccttgtgaggcaaacaaagtgctgtggtccagcattcatgacgcagatgtatccttgcgaaaggtacctggggatccttaagggttatgtacggaaccgttcacaccctgaggggagtatcatcgagagttacaccaccgaagaggccatcgaattttgtgtggactacatgtcagaaacatcttcaattggattaccacgatctcatcacgaagggaggcttgacggtgttggtactgtaggaagaaagactattaggttggatcggaaggtgtacgataaagctcatttcacggtactacagcatatgactgaggtggtgccgtacgttgacgaacaccttgcagttatccgacatgagaacccaggccgatcagagagttgggtcaggaataagcacatgtcttctttcaacgagtggctgaagaaccgaattgccaggttgcagaacttgtctagtgaaacacttcagtgcttgtcacagggtcctgaatggagtgccaccacctggcaaggatatgacataaatggatacacctttcacacggtaaagcaagacagcaaatgcacagtgcagaacagtgggttacgcatcgaggctactagtgacggtggtcgtcgtgatcaatactatggtaaagttgagcaaatattggagctagattacttgaagttcaaaatcccgttgtttcgttgtcgatgggtcgatcttcgcaatgtaaaagttgacaatgaaggtttcaccactgtcaacttggctaacaacgcgtacaaggatgaaccgttcgttctcgccaaacaagttgttcaagtgttctacatagttgacccgtgtaacaagaaactacatgttgttcgtgaagggaaaaggagaattgttggattggacaacattgcagacgaggatgattacaaccagcacgtccacggcataggtcaagaaatacctctagaagaggaggaagaagaagatgaagttcaatatgcacggccgtcacaggtgacctcacctgtgacggcccagagtgttgggcccgtcacaggtggtattacctgtgacggctccacggttggcgcccgtcacaggctcccgtcctcccctttcgactgtggcttgcaggcccgtgccccccccccaatcgattctcgtccgcgcgtcgtcttgcggcagcggtcggttcaaggggagatctctgtccgcggcgccgatctggagtccggcgaggactcctccgactctgtcacctccgacgctggcagcgccaaggctgctcccgacgacgtgcttcatatcgcgcatgccctctgcaaagtttgcgccaagtctcctagagccgtcatcgactttgttcgaagagtgagccctgccaccgtcggccgttcgattgattgggacgtcgtccgcgaggaagagtcatgtaagatgggcgatggccgtagccggtggaccgatatggaggttcgtgtgtttcttgagagctgcttggaggagatggcagcgttcaccatcacctccaactcccccaagccgcaggcatggcagaacctaatacacaagatgtacaccaagtgcaagaagaaggtgaacaaggctcaattggagtacatttgggggcagtgtaagaagcggaatgatcctctgaagcacattgaccttcaccacgcggtattcagtgggcacacagttgtcggaaaccactccgccgtcgcaggggcagccccacaggcaccgcaaggagcagttcagtggcagaccatcgacatggcgcagctcgctgctgcttatagaccaccacctccaactccacccccaacggcagcagaccggggcaagggaaagaggccagcagcaaacactactgcctcagggagttcttccaagaagtcacgaagcgactccgctggactggctttggagaggattgcggacatccgagagcagagctaccagagtcgtgttgctcagatggaagcagagaagtctatgggccttgatgcgtgcatggagttggtggaaaatgatggccatgaaattggaggaagtgtgtggtatgctgcttgtgcgctattccgtgacccattcacctgcaaatgctttgttcgaatcaaggacgccgctaggcgcttggaatttatacgcactggtggtactggacagtcatctggtggcacctgggccgtcacaggtgacctcacggttggcgcccgtcacagatccggcacccactctcactccactctcatctctcgaccgccgcctcgcccctatcgacctctccgctaccctctacgccctcctctccaccgccgcctcgacctctccaccgccgccctcgccgccgccaaatccgccgacctctctgccgctcaccctctccgtcgaccttcccgacgccggcctgcaccaccaccgccgcagtccatctccaccgccatctccaccgtcgcctcgacctctccgccgccctcctctccaccgccgcctcgacctctccgccgccctcctctccaccgccgcctcgacctctccgccgccatctccgccgccctctccaccctctacaccgccctctgcactgctgccgcctcactcactctctcgaccgccgccgggacctcctcttag

SEQ ID NO: 93922 - DNA, 315 bp, Oryza sativa
  Clone ID: PAT_MRT4530_9225C.1
aatttataaagtactaatccagagttgttataggagtaattcaaacgtggttctccacgagcgggattatcttcttcctcggcgagtgcctcgttagctggcagtcggtcaagcagcaggtggtggccctgtccagctgcgaggccgagtacatggcggcctccgccgcttcgacccaggcgctctggcttgctcgactgcttagtgatctcctcggcagagacactggagcggtggagcttagggtagatagcaagtccgccctggccatggcaaagaacatcgtttttcacgaacggagcaaccacatccggg

SEQ ID NO: 93923 - DNA, 4813 bp, Oryza sativa
  Clone ID: PAT_MRT4530_92260C.1
ttactttcctagccgggttcctaggaaccccctcgggacaacatagcttcgtccctgcccgttggacgacagcgctagcgactcagtgaagagtccgaccaagatctccaagaactctggtttgtctgaactgaacctccacctatggcagccgattggcctgggttcttctccttctaccgtctccccattcacggcgcgcatctcccgctccatgcgttcgacgtcgtggtagccgacgcggcaggcgccgaggtcgaccatggcgcgcctgctgtacccgcacagccaccgcgcgtaccggaacgccatggcgacgcaggcgccgcagtcggagtacgccggctccgacgagtcgcagcagaaggccgacgcggagatctggtccggccgcacgccagcgaggatgccgacgcagctggagcgatttgaggtggaggatccgttcgccaccatggctggcagcgcggcggcgacatgccgcaggtgtgttggctctataaatacccccaaactgccaactgctttccatcccgaccattgtactgctcacacatcggttgggagggcaaggggggcgatttttttgctaaaattcaagatggatcgtagatggatgtactatgcgcatcgttcgtctaccgagtatagagagggggtcactgaatttgtcacatttgcggataatgacagaaaaagtaggatgagcatgcacatgttgtgcccatgtagggactgtaagaatgaacagatgatcgaagacaaggatgaagtgcatgctcatttgataatgaatggattcatgaagaaatatacctgctggaccaagcatggagagcaagaggcgcctgatgtcgcagctgaagaagtgttggatcaggatgtagagaacaccgccgcagctcgagaaggcatgttcgtaccttctcctttaggtggagagaccatagatttggacactcaatgtctatctacaatgttgcatgacattgaagacgcagaggacaacgacagagattatgagaagtttagtaagttggtggaagattgccagatgccgttgtatgatggatgcaagtcgaagcacagcaagttgtcatgcgtgttggaactcatgaagcttaaggctagtaatggctggtcggacaagagttttacagaactccttgagctgttaaaggatctgttgccagaggggaacaatttacctcagacgacatatgaagcgaagcaagtattatgtccgttgggcctggaggtcagaagaattcatgcatgtccgaacgactgcattttgtattacaaggaatacgctgacttggatgtctgccctatctgtggggcatcaagatacaaacgagcaaagagtgaaggtgaaggaagtaagtcaaagaggggaggcccagcaaaggtggtgtggtatctcccaattgcggagcgcatgaagagaatgtttgcgaacaaggaacaagctaagcttgtgcgctggcatgccgaagaacggaaagtcgatactatgctgaggcacccagcagattcagtacagtggaggacaatcgataggatttaccaggaattctcaaatgacccaagaaacatgcgtttcgcaatgtgtacggacggcattaatccttttggtgatttgagcagtcgtcacagtacatggccagttctgcttgttaactataaccttcctccctggttgtgtttcaaaagaaagtacattatgcttgccatgctcattcaaggaccgagacaacctggcaacgatatcgatgtgttccttgaaccgataatcgatgacttcgaaaggctatggaatgagggcacacgaacatgggacgcatatgcacaagagtatttcaacctccatgcgatgctgttttgtaccatcaacgattatccggcccttggcaacctttctggccaaactgtgaaagggaaatgggcgtgttcggagtgtatggaggaaacaagaagcaaatggttgaagcattcacacaagacggtctacatgggtcacaggagatttctcccaaggtatcacccgtataggaatatgagaaagaatttcaatggacacagagatacagccggacccccgacagagctaacagggacagaggtgcacaacttagtgatgggaataaccaacgagtttggaaaaaagaggaaagttggaaagcgaaaagagaagagcacatcgaaggaaaaaacagaggagcatgtggaaaaacaaaagacaaaagagaggagcatgtggaaaaagaagtcaatattttggagactaccatactggaaggatcttgaagttcgccactgcatagatttgatgcatgtcgagaagaatgtatgcgagagtttaatgggattactgcttaacccaggtactacaaaggatggtctcaacgcccgacgagatctggaagatatgggtgttcggtcggagctacatcccataaccacggaatccggcagggtttaccttcctccagcctgctacactctctcgaaagaagagaagattgatttgctaacatgtttgagtggtataaaggttccatctggttactcatcaagaatcagtaggctcgtttcactgcaagatcttaagttggttggaatgaagtcgcatgattgccacgttcttatcacacagctgttgcccgttgcaataaggaatattttgcctcctaaggtgcgacacacgatccagcggttgtgttccttcttccatgcaatcggccagaagatcattgatcccgagggactagatgaactacaggcagaacttgtgagaaccctatgtcatcttgagatgtactttcctccaactttctttgacataatggaacatcttccggtgcaccttgtgaggcaaacaaagtgctgtggtccagcattcatgacgcagatgtatccttgcgaaaggtacctggggatccttaagggttatgtacggaaccgttcacaccccgaggggagtatcatcgagagttacaccaccgaagaggccatcgaattttgtgtggactacatgtcagaaacatcttcaattggattaccacgatctcatcacgaagggaggcttgacggtgttggtactgttggaagaaagactattaggttggatcggaaggtgtacgataaagctcatttcacggtactacagcatatgactgaggtggtgccgtacgttgacgaacaccttgcagttatccgacaagagaacccaggccgatcagagagttgggtcaggaataagcacatgtcttctttcaacgagtggctgaagaaccgaattgccaggttgcagaacttgtctagtgaaacacttcagtggttgtcacagggtcctgaatggagtgccaccacctggcaaggatatgacataaatggatacacctttcacacggtaaagcaagacagcaaatgcacagtgcagaacagtgggttacgcatcgaggctgctagtgacggtggtcgtcgtgatcaatactatggtagagttgagcaaatattggagctagattacttgaagttcaaagtcccgttgtttcgttgtcgatgggtcgatcttcgcaatgtaaaagttgacaatgaaggtttcaccactgtcaacttggctaacaacgcgtacaaggatgaaccgttcgttctcgccaaacaagttgttcaagtgttctacatagttgacccgtgtaacaagaaactacatgttgttcgtgaagggaaaaggagaattgttggattggacaatattgcagacgaggatgattacaaccagcacgtccatggcataggtcaagaaatacctctagaagaggaggaagaagaagatgaagttcaatatgcacgcccgtgccccccccaatcgattctcgtccgcgcgtcgtcttgcggcagcggtcggttcaaggtgctcaaaatcggggggaagtggaagagctccacgcctgtcgagctgtctgcgtcgtcctcgaggggagtaaaagctggccggcgtgctcgctgtgaagcagcaagcagtctggctgcctgtgtgctcgtcctctctgcctctcgggtcagacagtgctggcctgaagagtctcatcaaggcatccaagctggcggagttgaggagtctctatttcaggccgagcgtgtgcgtggtccgatggagacgacagcgaagaagcggaagcgagagcgggatctattgtcgatccaagaggaggggacgattgttcaatcccctcaaacaggggagatctctgtccgcggcgccgatctggagtccggcgaggactcctccgactctgtcacctccgacgctggcagcgccaaggctgctcccgacgacgtgcttcatatcgcgcatgccctctgcaaagtttgcgccaagtctcctagagccgtcatcgactttgttcgaagagtgagccctgccaccgtcggccgttcgattgattgggacgtcgtccgcgaggaagagtcatgtaagatgggcgatggccgtagccggtggaccgatatggaggttcgtgtgtttcttgagagctgcttggaggagatggcagcgttcaccatcacctccaactcccccaagccgcaggcatggcagaacctaatacacaagatgtacaccaagtgcaagaagaaggtgaacaaggctcaattggagtacatttgggggcagtgtaagaagcggtacaacaggtgggtgtggctagaatcgcatgcaagcgggctgggtcgtgatccccatacatcagccattgttgccgatgatgagtggtgggaaagcaagaatgcgttttgtgaggtgtaa

SEQ ID NO: 93924 - DNA, 2632 bp, Oryza sativa
  Clone ID: PAT_MRT4530_92261C.1
atggatcgtagatggatgaactatgcgcatcgttcgtctaccgagtatagagagggggtcactgaatttgtcacatttgcggataatgacagaaaaagtaggatgagcaagcacatgttgtgcccatgtagggactgtaagaatgaacagatgatcgaagacaaggatgaagtgcatgctcatttgataatgaatggattcatgaagaaatatacctgctggaccaagcatggagagcaagaggcgcctgatgtcgcagctgaagaagtgttggatcaggatgtagagaacaccgccgcagctcgagaaggcatgttcgtaccttctcctttaggtggagagaccatagatttggacactcaatgtctatctacaatgttgcatgacattgaagacgcagaggacaacgacagagattatgagaagtttagtaagttggtggaagattgccagatgccgttgtatgatggatgcaagtcgaagcacagcaagttgtcatgcgtgttggaactgatgaagcttaaggctagtaatggctggtcggacaagagttttacagaactccttgagctgttaaaggatctgttgccagaggggaacaatttacctcagacgacatatgaagcgaagcaagtattatgtccgttaggcctggaggtcagaagaattcatgcatgtccgaacgactgcattttgtattacaaggaatacgctgacttggatgtctgccctatctgtgggggatcaagatacaaacgagcaaagagtgaaggtgaaggaagtaagtcaaagaggggaggcccagcaaaggtggtgtggtatctcccaactgcggagcgcatgaagagaatgtttgcgaacaaggaacaagctaagcttgtgcgctggcatgccgaagaacggaaagtcgatactatgctgaggcacccagcagattcagtgcagtggaggacaatcgataggatttaccaggaattctcaaatgacccaagaaacatgcgtttcgcaatgtgtacggacggcattaatccttttggtgatttgagcagtcgtcacagtacatggccagttctgcttgttaactataaccttcctcctggttgtgtttcaaaagaaagtacattatgcttgccatgctcattcaaggaccgagacaaccgggcaacagatatcgatgtgttccttgaaccgataatcgatgacttcgaaaggctatggaatgagggcacacgaacatgggacgcatatgcacaagagtatttcaacctccatgcgatgctgttttgtaccatcaacgagtatccggcccttggcaacctttctggccaaactgtgaaagggaaatgggcgtgttcggagtgtatggaggaaacaagaagcaaatggttgaagcattcacacaagacggtctacatgggtcacaggagatttctcccaagtgtgcgacacacgatccagcggttgtgttccttcttccatgcaatcggccagaagatcattgatcccgagggactagatgaactacaggcagaacttgtgagaaccctatatcatcttgagatgtactttcctccaactttctttgacataatggaacatcttccggtgcaccttgtgaggcaaataaagtgctgtggtccagcattcatgacgcagatgtatccttgcgaaaggtacctggggatccttaagggttatgtacggaaccgttcacaccccgaggggagtatcatcgagagttacaccaccgaagaggccatcgaattttgtgtggactacatgtcagaaacatcttcaattggattaccacgatctcatcacgaagggaggcttgacggtgttggtactgttggaagaaagactattaggttgggtcggaaggtgtacgataaagctcatttcacggtactacagcatatgactgaggtggtgccgtacgttgacgaacaccttgcagttatccgacaagagaacccaggccgatcagagagttgggtcaggaataagcacatgtcttctttcaacgagtggctgaagaaccgaattgccaggttgcagaacttgtctagtgaaacacttcagtggttgtcacagggtcctgaatggagtgccaccacctggcaaggatataacataaatggatacacctttcacacggtaaagcaagacagcaaatgcacagtgcagaacagtgggttacgcatcgagactgctagtgacggtggtcgtcgtgatcaatactatggtagagttgagcaaatattggagctagattacttgaagttcaaagtcccgttgtttcgttgtcgatgggtcgatcttcgcaatgtaaaagttgacaatgaaggtttcaccactgtcaacttggctaacaacgcgtacaaggatgaaccgttcgttctcgccaaacaagttgttcaagtgttctacatagttgacccgtgtaacaagaaactacatgtagttcgtgaagggaaaaggagaattgttggattggacaatattgcagacgaggatgattacaaccagacacgtccacggcataggtcaagaaatacctctagaagaggaggaggaagaagatgaagttcaatatgcacgtgtcgaccatgaggaaggattatttttgtaa

SEQ ID NO: 93925 - DNA, 324 bp, Oryza sativa
  Clone ID: PAT_MRT4530_92262C.1
ggggaaaaaaaaaacctttaaattacaaaaattttggaccgcaaaaaaaaaatttttggatgacactttggaaggggaaaaacccgggggggttttccttggggaaaaattccacctaaaaaaatttaaaggggaaggtttggggcaaaaaccaggccaaaaaaaaggttaaatcctaaaacaacatttgggggaaatatccaaatggggatccaaaaaaaaacccattttcccaaaaggaatgggggggtttggcaaaaacaaccggattaatttttaagggggccgtgccaaacccttaaaataaccctgaacggggctttt

SEQ ID NO: 93926 - DNA, 1128 bp, Oryza sativa
  Clone ID: PAT_MRT4530_92263C.1
atgaatgttaacgtagaacatgactttcacatggttggaggggaaggagaaattagctacgccaagaattccagggttcaagcgaaagctatgattgaggctaagtttgtccttgataaggcaatccgagaactgtacgcaacccttctagctaatatcatggttgttgccgaccttggttgctcttcaggacagaatacattacattttgtctctgaggtgataaacatctttacgaagcaccaaaacaatttgggacaaagtgatacggtggatcttcagttcttcttaaatgacctaccgggtaatgacttcaaccacctctttcggatattgaacacattcacattcaagggggcatcaaatcacaaaggagatatactacctgcataccatatctatggggcaccaggatcttattacaccaggctttttcctcctcaagctgttcacctatttcactcctcgttgtcccttcattggcgctcacaggtgccggagcaacttaatgggaagcaaaaatcatatctaaatgaagaaaacatctacatcaccaagactaccccactacacgtggtgaagctattccaagagcagttcatcaaggacgtctctctcttcctcaagttacgccacgaggaactagtggatggggggcggatggtactaacaatttatggaagaaagagtgaggacccatatagtggagatgtaaatgatatttttggtttgcttggaaaatcactacaatctcttgttgctgagggtctcgtggagaaggaaaagcttgactccttcaatctacctgtatatggtccgtcggttggtgagttggaggaaattgtgaatcgcgtcaatttgtttgacatggaccatatgcatctgtttgagtgcaactgggatccctatgatgactcacaaggtgacattgtgcacgacagtgccttgagtggaatcaatgtcgcaaactgtgttagagccgtaaccgagcccctaattgcaagccattttggagagggcatattaagtgcactgttcacagactatgctcaccgtgttgccagccaccttgagaaggagaagacaaagtttgcttggatcgtcatatccttaaagaaaagatgctag

SEQ ID NO: 93927 - DNA, 690 bp, Oryza sativa
  Clone ID: PAT_MRT4530_92264C.1
tcagacatcagttgatcctctgttgatccacttagccaccactcttccagacggccccctctcgctctccctccatgacccatccctccctggctcggctccctcgcgccgctccccatttccaaaccctaggcggcggcgcggcgaggcggcaactggcggcgagaactggaccgcgctaccacggagggggaggctattgccgcggcgggcagcgggtggcgcccgccactccgccaagctcaggcagtcaggccggttgggtggccggcagccgcgaggggtagaagcggccaacggctcaacgcttagacgggaatacccaactttaaaatcctggctccgccactgctcatccctcgccccgccccgcgccgccttcttttcctcccagccccaagctcttctacgcggtccgtttacttgcttgggatcctcccaggctcccaggccatgtctcatctgtccgactgtccgcgccctaatcgccttggtagctcggaaaaaaaataagttcagataccatccctcaactttacatcgaatcttattgtccctagttgaatcacttaaccaactgtcccgtcgaggctggcgtggccaaacaacactactacaccagttacaccatgtcaacacgtgcattataacagccaagatcacttttagttgacgtgcacgtgacgccat

SEQ ID NO: 93928 - DNA, 562 bp, Oryza sativa
  Clone ID: PAT_MRT4530_92265C.1
acagcaaaaacgtggtcttttaaggtctcaaaaattactttttatcaaacggggttaaacattttttgggactacaagggcccggggggcccagttaaataacagatgttgccttttgaaattacaacagtggtttttgcccctttacccctaaaaaaaggcttttttgttcatgacatcccctttgtttgaaaaagaatccttccccaccctaaactagcccggaaatgctaaagttgggattggcaaattacaattcccccgggggaggctttacaaacttttggtggaaaaaacggtaacttccttgtccggggcataaagggcattgtaacttcccaaacggggaggtttttgacaaaaagatgggggcttggtttttattggggcaggaccccccattattggtccaagccctcctgggttggcatgagggggtccctttggttaaaaggggggggggggcccttgctttttaagaatatgcatgggtttttttgggggggcgggaacaaatggccccaagggacccccccccggaatagggtttaaaattgggggg

SEQ ID NO: 93929 - DNA, 429 bp, Oryza sativa
  Clone ID: PAT_MRT4530_92266C.1
atgcccacacgggaaaatgcattttctcgtacaggatacaacccggcgccgaagtactttgtccccatcggccaacaaagcctaatttcagtagatatcgagctaattagcaataaggtcaaacagcaacgtggtcgtgacgttgtcgacatgacgctcgccgtggacgcaggcttcgccgccgccggcggctccatgcccgacgtgagcaggagtgttgtcggcatagctctggtcttcgtggcggccgtagcgatcgtggcgttcgtcgtgtttaactgcgccgatggcaagggcagctccggtggacggaagcggcccagctatggaggaggtggcgggtgtggaggcggtggaggtggctgtggcggcggcggcgggtgtggcggcggcggaggtggctgtggcggcggcggaggtggctgttaa

SEQ ID NO: 93930 - DNA, 189 bp, Oryza sativa
  Clone ID: PAT_MRT4530_92267C.1
atgaggccggattcggacgagaaggggctggatctagcaagggatgccagatctggtggcgtcgcgccgtcgttgccccgatctcaggcgaaggtgtggtttcggaggccctgctcatcccaatcactcgtgcgcgaaggtgtggtttcggaggccctgctcgtcccaatcactcgtgcgctcaagtga

SEQ ID NO: 93931 - DNA, 252 bp, Oryza sativa
  Clone ID: PAT_MRT4530_92268C.1
atggggcacttgagctctcgccccatcttctccaggctccccgtgtccgccattgccgatccctcgatttctccctctcgggcgtggagtccttgcaagatttcagatttgggaggaatgattgcgaggagaaggaggagggatttgggggaagattttatcttggcgggagttttccctccagagttttcgttcaagttcaatctgggcggtagcttgtttgggaaggaggctgaccgctggagggagtag

SEQ ID NO: 93932 - DNA, 720 bp, Oryza sativa
  unsure (1)..(720): unsure at all n locations
  Clone ID: PAT_MRT4530_92269C.1
ccagaaattaccttatatatattttaaaccccgttaattaaaaattaaaggattatataacccggtcccgtaaatatcttagggcaaaatatacaaatcccaaataggtgtacagtacccaaaattacaaaaattatcccattataattaaccgtggggattaaaaccataaacaacccatttccaaggggtgcacggattactttttttgcttgcccccttttgaatcaacaaaatccttttgcaaaaattacctaattaattaatcggcgtgccctctggcttcgtcaatattgtttattgtttggctaaaattccccggggggggcggcggcaaagtcctcacaacctggggaangggcgggcaaagcggtcgcntcggtttaaatttggcccnggtaattcgcaaacaagttcccccctaacccctggtnacccaaanccccccatcaccgaacntttctccccngcccccccnccccgccaaggnaaaaccncggcncccaaaaaaaacccgnggccnaaggcaacccctnaaaattngnncccggggaaaccccttcaagtaccggancccccccccccntaccccccccnggccaangcccggaatttcccccccccccggtcancaaatcccccccgaatccgcccccccccccggaaacccaaanatggnaattacccccctcccccccnaatgannattccgaaatgagn

SEQ ID NO: 93933 - DNA, 1230 bp, Oryza sativa
  Clone ID: PAT_MRT4530_9226C.1
atgggttgcttcctctcctgcttccgcggcgcgggatccgatcccgccggtagcctccgcgatccgctcgtgcgggagagccggatcggggaggcgttcctggacgacgagacgaaggttgaagcgagcgggacgctggatggggatcgcggaaatggcggaagcgtcgacgaggagctctggcgagaggcaaattatctgaaatcatgtggtgcgataggagaaaccccaccagaaatgctgaaagggtcaaaccaaatcactgaagaagaaactaatggggagcttaaaggagcagcggtgtctgaagaaaacttatctgaagggttcaactgtgatgagcatagtgctttgaaacatgaacaaagcgattcacctcacccaacccctctggttctcagaggtgatatgcaaactcctggtacactgaatactgcatataaggagtctttaaggtctgggaagcgtgcaaggaccaacaagcaattcatatatcctgtcctcagacctatcgagaacaaattacaatggatggaactaagagacgactcttcacctatcctgtcattcaatcctccaaagagaagatacttgagcacagattgtagcgcgaaacctcaagagtccatcacaaattcaatggctacgcaaacagcgcgaataactcctgcttccttctcatttcatgacattactgcagggcaagatcaaggagtgatatctccggaggaacataagagtgagaatgacagcagaaagctgttagatgatgcagatcaattgaaatacaacgcagacagtgagaggaagggtgttgcaagcctttcttgctggcttaagcctccatcttcagctggtgggagtcaaagtgacacggagggcaaggtggtaaagcaaagatgctacgagaatagtgttttcacagacctgcctatctttacagcttctggtctgaactgggacaatgacaagcctactcctgtgttgccaaaggtgtgggatggtaacggtatcccaaacacaactaccaaatacaaggaggaccagaaagtcagttggcacgcaacgccttttgaggaaaggctgatgaaagttctgtccgatgagaaaccgcatcatcaaaggtctcctgcttatgctctaatcatactctgcaacctactgttacttgaaattactactaatattgacatcatgatccttgcaccaggaaaatcagcggaaagctga

SEQ ID NO: 93934 - DNA, 332 bp, Oryza sativa
  unsure (1)..(332): unsure at all n locations
  Clone ID: PAT_MRT4530_92270C.1
ggaaaaacaagcccgggttcattcactcccaaaacatttgaaaaacggggcttctaccattacatttatccggggggagggggggaagaaccaaaaaaaaaaaagggaataaagggccctgaacggcttttattcttcttaaaaagcccgccgggggcccggcgccgatcccccatcacatattacgcacctccttaaaaaaactggcccgctggggggcaaagcatccttgttcccgggaacaatggcgcttttgctagggggtccaaagggtggtcccgccnccctttttttttggtggggattggggggtgtgccccgggggggctttt

SEQ ID NO: 93935 - DNA, 333 bp, Oryza sativa
  Clone ID: PAT_MRT4530_92271C.1
atggttgcacacgccaccatcaacaatggccgttgcgacgccgcgccggcggcggcggcgaagtcgaggccggcggtgatgccgccgccggcgagtaatcatggggcggcctgcaagaactccggtagcaacaaggagaggaggaggatgaggcggtgcgtggaggtgaggaggaagatggaggcgctgaggagactcgtgccgggcggcggcggcggcgaggattccggcgaggagctcctgttccgcgccgccgactacatcgcgcggctgcaggtgcaggtgaaggtgatgcagctcatggtggacgtgctggagcaaacgaaagattga

SEQ ID NO: 93936 - DNA, 570 bp, Oryza sativa
  Clone ID: PAT_MRT4530_92272C.1
atgacggaggccgcagcgggacggggtggtgggaggccgggattcgggatgtggtggagactggccaggtggtcgacgttgatccggcggcataggactcggtggcggctcgtcctccaccgacacccagtcaccgttgggatcagtggagggcgagccggcggcggggatcggtggcagatcggatcaccacggaaggcgtcggcggcgacctggccacgagaggactttgtgcggcagggatcggtggagcagaacagcgtggaaggcgtcggcggcgacgtgaatccgggcggaggacaagcgatggggatcggtggagggcgagccggcggcgatggcagatcggtgaggcagaggacggcgccgcggctgatagggaggggagcgctgatggcggagcggtttccggcgtcgcgcgtgcgggagcggaatctgggagaggcgcggtgggagagcgagagagagggagacgggccgtgcggtgccgagggagggggcatacggcgattgagggaggtgggaggtgggatcgatccgcatcgttgggatttcaccgagatgatctga

SEQ ID NO: 93937 - DNA, 2625 bp, Oryza sativa
  Clone ID: PAT_MRT4530_92273C.1
atgtcgagctccgccgatccctcgagcgcgccaaccgctgagtatgttgagcatctctctcatcaagttgcagttcccaacataaccgatgagcattagtttttccttggcccaatcggcaatctagaccccactgagttcataaatggtgaaaccaatcggacaccctttagatttgccaaccccgacttaaccctttggaagaacacctttaaatcttggccatcagctgaaaaaagttgggcagcctggtatataagagtatcggctagcaagctaacccacggggacaaaatcagcatatcccaagctttggccttgactatggcagatatggctaaggatgaacttatgataacagccacaacctacttctggtcttctactatgaacaccttccttttctcccaaggaccaatgacccccactctcttagatgttacaatgataaccagtttggatattacctcatcggctaacccaattagtttgaacacaacatacactaatgagttcaaaatccggagcataggtggttggtcaggttttttcgccaaaaacatgggcactggatcagtaggtccaagggaacatgcaaccctcctcatgatgtggcttgagaaattcttattctgcggctcaagttgtggtcctactgctaactgacaacacatagctgagaatttggtggagaaaaagcaattccctcttggaaaatacctcctgggctatttatatcagactctgaacactgcaataactaaaatagcctcaggacttccaatcggcacaggaggtccctggtggctcctttagatttggctcaacttacataccatgaaggttgctaattggctgcctttacaagatgctaaattcccaaggttcgagccaactattgatgatgatggagaagagatcaccacacgccggtgtatgtcctttagagaagcaacatatatcagcaccgcatccaagctgtcggctgaacctttcagagaatggttccataacttctatgatagatttccaaggaatgccagaatctggtttgcatatgaaggatttggcacctttgaatggccaaatgattttcgctttgatgagatcaactctgaagaatatgagaaatctagagaggtattctcaacagccatcagcacttgcataattcctgtcagcattcatcgaggcaaaaatatccagatatcatatgaattctaccatccgacaagtgccgcaaggcaactaggcatgggccaactgcagattagtttgttctttgccgataagatctagagtaggggagaaataacatcggcactcatgacggatcggctgctgaacattccatgaccacctttaggcaggatgttgaccgatggtggatagagtggaagaaatatttattacatcaatcaccttcaatgtacctgacagatctgtttcctgaagctgtccctcaaacaacagaatcttctccccccatcgcagtgaaagtggcatagatatccaatatgctccaggactccttcctaataggggtggtctaactcctccagtcatcagctatcatgccccaagacctcaacgctgctacacggtctgccttgtgtgccgatagcccctattgctggcaagaagaaaaggacaaaatcggctgcaagaaagaaacctaataaacaaaaagttgctgccgatgaccagccgaccatagatccagatgtagaggaattcctggaagatgaagtagcagaagtcgtggactatgctgccgacatcgttagcgaaataagggaacaaacacctccaaccgatcctccagctcctcaaagaacaccatcacctccagtacgccctacttacaaaccaagggtatgcatttgttgtcacgcccgaaaattcacttcttctaaaaaaccacaagtgacgactccaccatctccaactcctatttccgaagcaagtgagcacacccaattggccgcaggaagtcatcacatggaggaagaagaagaagtaatggcaccagctcctgctgtcttagccgatatgttttcctttgacatccggcaattcatggacaaagaagaagcaaccacgagcacagccttggtacctctagctgacgatgtgaaagcaaccctgctagacaagttagacgatgccattaccccagcgacataccttgagcaacatcggcttaaactcgaaaaagccaaatagaggattgctgatcgtcatgagagaagggaccttgaagcaaccatccaagttagcagggcttctatcaatgaagagaaggctaaacttgatgaattagaagctagcccaagttcaactcaagctagcattaatcggctgaacgcccggaggatagcaattttggctgaggtggaacaatgcagtgcacagatcgcccttgaggaacaaaagcttgctgacttgccaaaagccattgaggatcaaaagtcaaaattgaaggcatccgtcaagcatctaaccgatctgaccaaatctttgaagatgatcccaagaactgatgcagccgatgcccaaataatagatgaagtagatcagattaggcaaagggcaatatcggccatcccaaaatatgtgtctaga

SEQ ID NO: 93938 - DNA, 193 bp, Oryza sativa
  Clone ID: PAT_MRT4530_92274C.1
aaacggccattattccattaaccaatttaataaggtccaggggttaattaacttgaaaataaccaaaggtccataacgcgcaatcttccaaatttttgaaacttggaattttcaaatgttttttttggaagttacaacctttttttcaattccgggcagatattccttcgtccggcaaagggtgagggggggg

SEQ ID NO: 93939 - DNA, 1305 bp, Oryza sativa
  Clone ID: PAT_MRT4530_92275C.1
atggctaaggatgaacttatgataacagccacaacctacttctggtcttctactatgaacaccttccttttctcccaaggaccaatgacccccactctcttagatgttacaatgataaccagtttggatattacctcatcggctaacccaattagtttgaacacaacatacactaatgagttcaaaatccggagcataggtggttggtcagatgctaaattcccaaggttcgagccaactattgatgatgatggagaagagatcaccacacgccggtgtatgtcctttagagaagcaacatatatcagcaccgcatccaagctgtcggctgaacctttcagagaatggttccataacttctatgatagatttccaaggaatgccagaatctggtttgcatatgaaggatttggcacctttgaatggccaaatgattttcgctttgatgagatcaactctgaagaatatgagaaatctagagagcggcccatagatccagatgtagaggaattcctggaagatgaagtagcagaagtcgtggactatgctgccgacatcgttagcgaaataagggaacaaacacctccaaccgatcctccagctcctcaaagaacaccatcacctccagtacgccctacttacaaaccaagggctcgggacatcacggtcaccggcgatctaggtcacggcggtgagaatggagggcaccaacgcgacgagcatgacgcggggaactcactgaggggcggcacgacgacgaacaacgacaggagacggccgacaacgagattgaagcggcgacgggctcggcttgacggcgtcggtggcgcttcggcgacgagcggcaacaacggaggggtggacgggcttctcctcggtgctgcgatgccgagggaggtggcggcacaggctcgtcattctccaactcctatttccgaagcaagtgagcacacccaattggccgcaggaagtcatcacatggaggaagaagaagaagtaatggcaccagctcctgctatccccgtcttagccgatatgttttcctttgacatccggcaattcatggacaaagaagaagcaaccacgagcacagccttggtacctctagctgacgatgtgaaagcaaccctgctagacatttcaaaacgactagaaggctctttggaaactctggtaaccagctgtgggtctattagagatagattccacgaattccatgataaaatcccagacaagttagacgatgccattaccccagcgacataccttgagcaacatcggcttaaactcgaaaaagccaaatag

SEQ ID NO: 93940 - DNA, 2448 bp, Oryza sativa
  unsure (1)..(2448): unsure at all n locations
  Clone ID: PAT_MRT4530_92276C.1
gccgccgtctccgcctccgctattatgagttccactcctgcaccaccgtaacctctactctactagccccacctcctactcctcctcttcgccgccgccgcctccgcctccgccgccgcagatctcgccgcggtagcgggaatggtgagcgcgtcaagcctgctgctcccgtcgtccgtgcgggacttcgcctgctgcatcggcgacggagccgtccgcgtcgccgacgtcgcggcgtgcaccgcgccgtcctccacccgcgtgtccacctgctcctcctgctcctccaccaccgactcctcctgctccccgacgctctccgtcaccgtctcctaccgcgccaccctgctcgcggcccccgcgccgccgctgcagctccgcctcacgtggggacactccccgctcggncccacgctgtcgttcgcgccgtcgcccaccggccgcgccatccagatgagacaaggaggggcgcaagctcttcatggggggccaacacagggcgctcgaggcgcagccggcgaacgccccgcagccaccgggggacggtcgcctcgagggccggggcctcctcgggctcctcccccactccatcgacgagagcgtcaacggcctgcccgcccacccccgcgtgcacgccgacaccgggtggcgcggccgccatgacggcctccggccgcagccaggccgccggcaggtcgatctctactccttccagggcagtgttgaagaatgcagggaaggagaggtaccgacttatctaccggcagtcgcaccagaccgcgccccacttcagcacgcatgggcgctacccagtgggggagctctgggaccgcgcacagaactgctgcgggaggttcctggcacatgacggcaagtcggtgcttgttgttgcacataatacagtgaacccggctcttcttgactcttcgttgggatttggcacagtgcactttcgcattctacttcacagcaattgtggtgctagtgtgctggatttcgcccctcaggctggtggcgggcctccagctgtatgccttaaccgcttaaatcagacgacaaattctccctttgcctcaggaagtacttgatggagaaagacaagcaccagcatcaccctagcatctcaaggagctacacagaacagtgcagagattggtgtcagtggaatggggtatgcaccgcttaacatgcttgggattatacagtctcagaagactgcagaactacttttagatcaaaaggtaaatggtattctctgtagcccacaacttgcagcatttgatacttcccgctccctcccctcgggctccagctccggcgacgagaacgggggtggtggtgatgagtccggtactaccacgccgcccccgcccccgccgccaccatgctcgtcgacacccccgacgccatcgcgcccccccgaacctccaccgccgccgacgccttgcagcatggaatacaaatctctggaggggctatggaaccagtcgaaagctgcatggccagccttgctaaatgagttgcaagatgatacttcagaaagaattctggtggtcgtaggacatccgggtataaatctagcattgatttgcaggtgtctggatttaacgatggactacatgtcatcttttcatctagacgatggcagcatcagtgtgatcgatttcccagatggaccaaaaggaagaggtgtagtcagatgcacaaattacacagcccatctaggaagatggtcaatacctattaccaggaccatggaaactgatgaagagttctaacttcctgcaaggtaatgttctggtgtaacatccttcaggaaagctaagtatgtcaatttcttatactgatgtacatactggcatcttgattaatatctgtagatctgatatgtaaatagcatccttctttcaaacaaaaggaatatgtaaataacctttttttctgaagctaaacagtaaaagtatcatactgtttatatgtaaaaaacaaattaaaacccaacccaccaccgcagcctccgccgcctgcaccatcctcgccgccgccaccgccgccgcttccggccaccggagaggaaacctccgcgtcgagcctggaagagcccgcgtgatccagcccggccgccgccgtcgccaccgcctccgggcgcaccgccaccgccgcgtgccatgatcggacggcgtccgccaccgccgccggcgccacctggacctccgccgccgtgcccttcgccacctccggcctgttcgccgccgactgcgccgtgtcgcgcttcggacatggcggccgcgccgccgccgtcgccatggccgcgtagctcgctgcactgcgtataccgacttaaatcatcatgccctacaacttcaatgcttcaacttatacaccaaagaaacatcagcagcattacttatgtaatgcagccaactgatcaaacaagactaaacttaa

SEQ ID NO: 93941 - DNA, 1611 bp, Oryza sativa
  Clone ID: PAT_MRT4530_92277C.1
atggcgacgcccggcctcgacgacgactcgctgcagcagctgcgcagccgcgcgacgcagctgctgctcaaggagaactggacggagtacatcgccgtgtgctccctcatcatcgaggcgttcgacgccgccgccgcctgcaaagaccgccgcgtcctctgctccaccctcgcccaccgcgccgacgcccgcgcccgcctcggcgacgcccccggcgcgctcgccgactgcgacgccgcgctggcggccgacccggcgcaccccggggcgttgctgtccaagggcgccgtcctgcgcggcctcggccggtactcgcgcgccgccgagtgcttccgcgcggcgctcgccgtgagcggcaccgacgaggtccgggagatggtcgagcagtgtaagcgcctggacgcgcaggcgaggagcggcgcggtggatctgtcggagtgggtgctcgccgggttctccgggaagtgcccagacctcgcggagcacgtcggggcggtggaggtgcgccggtccgcgcacggcggccgaggggtgttcgcggtgaagaacatcgaggcgggagctaacctggtgatctccaaggcggtggcgatcggaaggggagtaattccggacgccgccgatagcggcgagaagatggtggtgtggaaggacctcgtcgacaaggtgctcgacgccgccgagaagtgcccgaggacggcatctctcatctacactctctccaccggcgaggagccagaagacgagctccccatcccggacatggcacatttcaagcaagaaacggaggagctcgatgacggcacggccatggcgccgaaggcatctcttgatgtggacaagatcttgaaagtgctcgacgtcaattgcttgaccgaggacgcagcgccatccgccaatctgctcggcagcaatggcgtcgtcaactgcggcgtcgggctgtggatcttgccggcgttcatcaaccactcgtgccaccccaacgcccggcgcacccacgtcggcgaccacgccattgtccacgcgtcaagggacatcaaagccggggaggagatcacattcgcctacttcgacgtgctcaccccggcgagcaagcgcagggaggcagcgagagcgtggggcctcgaatgccaatgcgatcggtgcaggttcgaagccagcgacgccattgttgggcaagaactcacaaaacttgagaacgaattggtcaatggccgaggaggagacatgggagcactggtggtgaggctggaggagaggatgagaaagtccatggtgaaggagaggaggaaggcgttcttgcgcgcgtcgttctggagcgcgtactccgcgctgttcgactccgacaagctggtgaggaagtgggggaggcgcgtccccggtgaggccgccgtcgcagagagcgtcgccggcgcaatcggcgggaacgagagcgtgctgagggcaatgctgaggggtgccgacaatggcaacggctgcggcaatcggctcgaggtggaagacaaggtggtgaggattgggagggctacctatggcagggtagtgaagaggcaggcaatgagagctctcttcagacttacattggatgctgacagtaacaaaagcctgtag

SEQ ID NO: 93942 - DNA, 1100 bp, Oryza sativa
  Clone ID: PAT_MRT4530_92278C.1
cggacgcgtgggccgagatcatctgggccgaccgcgacgacgacctcatcccggactctgacctccgcgagatcgatctctactccttccagggattgttgaagaatgaagggaaggagaggtatggagttatctaccggcagtggcagaagaacgcggccaacttcagcattgatgggcactacccagtgcgggagctctgggaccgcgcacagaactgctgggagaggatcctggcacatgagggcaagtcggtgcttgttgttgcacataatgcagtgaaccaggctcttgttgcctcttcgttgggacttggcacagagtactttcggattctacttcagagcaattgtggtgctagtgtgctggatttcacccctcaggctggtggagggcctccagctgtatgccttaaccgcttaaatcagacgccaaattctcctgttgcctcaggaagttctgcagggagaaagacaagcaagaggattatcctagcatgtcaaggagctacacagaacagtgcagagattggtgtcagtggaatggggtatgcaccgcttaacatgcttgggattatacagtctcagaagactgcagaactacttttagatcaaaaggtaaatggtattctctgtagcccacaagttgcagcatttgatactgctactactatatgcgaggttcaagaggctgcagattgcttaggtgctgactgtgtgcctcgttatgtggaaatgaagaaactgctagaactagaaattgatgatgccttccaaacaaagcaaaagagctttggagaaatagctcagtctgggtggctgggcagcatggaatacaaaactctggaggggctatggaaccagtcgaaagctgcatggcaagccttgctaaatgagttgcaagatgatacttcagaaagaattctggtggtcgtaggacatccgggtataaatctagcattgatttgcaggtgtctggatttaacgatggactacatgtcatcttttcatctagacgatggcagcatcagtgtgatcgaatttccagatggaccaaaaagaagaggtgttgtcagatgcacaaattacacagcccatcta

SEQ ID NO: 93943 - DNA, 455 bp, Oryza sativa
  Clone ID: PAT_MRT4530_92279C.1
ccgccctttttttttttttttttggtccggaatggtgtgtctcacataccttgcctacatcactttaatgataaagcaaaagtgacagggaagaatggaaataaagaaaagaaaaaacttatggggagaaagaaaaaaaatgtatgcatgtatgtatatgtgagagcaagagagaaaaagaatgagagaggctgcagggagagggggaggaaagcaagggaaagttcacaaaataaaggagtgaagcaaaaggaagagaggaggaaaacaaaacaaagcccagattcctctccaaacaggccctatgctttttcttcttcttcttcttcttctccatctctcctctcctgtttctttcttctctccttggtggtgcagctgtcctctttcttttcttaaagagaaaattaagccactggcccctttaagattgacctgagattttcaggacacaa

SEQ ID NO: 93944 - DNA, 1397 bp, Oryza sativa
  Clone ID: PAT_MRT4530_9227C.1
gggtaggagccaccgaggctgacgaggccgcgcagacggcgactgaggaggattctgaaactggagaaactggtgcagatgatgccgctgcagccacagaagaaactccctctgttattgtcacagcattgcaatcatacaaggaagctttgattaatgatgatgaaacaaaagtcgctgagatagaggactttttattctctattgaggaggagaaaaattctcttttgagcaaaatcagtaccttaggtgcagaattgacaactgagcgagaccgtatcttgaggataagtgctgactttgataactacaggaaaagggtagaaagagagaagctttcgatgatgacaaatgtgcaaggggaagttatagagagcttgctgcctgtcctctgtcacagcattgcaatcatacaaggaagctttgattaatgatgatgaaacaaaagtcgctgagatagaggactttttattctctattgaggaggagaaaaattctcttttgagcaaaatcagtaccttaggtgcagaattgacaactgagcgagaccgtatcttgaggataagtgctgactttgataactacaggaaaagggtagaaagagagaagctttcgttgatgacaaatgtgcaaggggaagttatagagagcttgctgcctgtcctcgacaactttgaaagagcaaaaacacaaataaaggtggaaactgagcaagaaacaaaaataaacgacagctatcagagcatttataagcaatttattgatattctgaactcactaggagttgaagatgtggagactgttggcaaaccatttgatcctatgcttcatgaggctattatgagagaagaatcagtggagtatgaagaaggggtcatccttcaggaatttcgtaagggttttaaacttggggagagattattgcgccctgctatggtcaaggtgtctgcaggaccaggccctgaaaaacccgtgtatgacgatcctgcgatggttgaagatagtgtagcacctcaaaaggtcaaggaggctgaagatgatggttttgatgatgataatgctgagtgatggggctttattttttatttcacaggaaaagtcccagaaattttgatgtttttctggaatgtgtcaagcaggtaataggatagagttagaaatttgactcaaaatttcccccttcctgctgttgacgctgagtgttgatattgcctcaaaatttctgtttcctccgcgtgtggtcaattgttatggttaggaaattttctccgttcatcgagcagttgcaatgataagcagaggtaaattggtttttgatcggttgggagtattggagatcatgtaaaacaacagtagtagagaattcgatcagctcttttgttttttcttgtttccaa

SEQ ID NO: 93945 - DNA, 1017 bp, Oryza sativa
  Clone ID: PAT_MRT4530_92280C.1
atgactgcattagcttgcctcgccgggaaagcaatttcttggagcagtggtgtcaaagcagcggctgggtgtggtctcggcttgcttccgcagtggcgcggcgtgttccggagcgtgagaatggagagtgggagctctcagggtggccgtggtgccctcatagtcctggaagggctggataggagtgggaaatcttcgcagtgtgctcggctgctgtcctttctgcaaggtaaaggttgccaggccgaagggtggcggtttcctgatagaggtactagtgttgggcagatgatatccgcgtaccttgcgaacgagtcggaacttgacgataggacaatccatttgctcttcagtgcgaatcgctgggagaaaagagctttgatggaaagaaagctacttggtggaactactctcattgttgatcgttattcttattctggagtggcattttcagctgccaagggacttgacattgagtggtgcaaggctcctgaaaatggacttatagccccagatcttgtagtatatttggatgtacaaccagagaaagcagctgaaagaggaggctatgggggtgagagatatgaaaaaattgaattccaaaagaaagttggtgagcattaccattcacttcgtgattcaacatggaaggttgttgatggctcccttcccatggaagttgtggaagaacagctgaaggaactagccatgagttgcattctggaatgccaaagcaagcaacttgccagtctggcctggtagtgtatcgatagcaccatcccttggtgccaatgccacatcattatcgatggcctgctagagttatgcttgaaggagagcttgctgatttctgtattctatgtgcacttctatagagtgatgttttgcgagaacttgttcgctgatgttctgatagccttttcgtaatgtgaattatgtgaggttctgctgttcttgtaagcttctcatatactctgtttgccaaatttgagttcataaaatggttttgcagtaact

SEQ ID NO: 93946 - DNA, 635 bp, Oryza sativa
  unsure (1)..(635): unsure at all n locations
  Clone ID: PAT_MRT4530_92281C.1
actgactcccgacatcccccccgcgcggctacgacgcacgcaccgacgcacgcacgacgacgacgcaccgacgacgacgctacgcacgcacgacgacgacgacgacgacgcacgcacgcacgcacgacgacgagcagcaccacgaccacgaccacgacccgacgctcacgtccccccccacgccatcgcacgtctggaagaatggcggcaagcgccgtgtcgaagtcgaaccccctcgtccgggtaatcgcaatctccgggaccatgtcatgactctggtactttgttggtcggtccgcacactaaccacgacacgcacgggctacgtggaacaaccgtatgcttgggcattgaatcgacatggatattgccgcggttcaaaaaaaaattttttttacaaccgacaaacgcgcgggccggccaccgcgggtggacctacagcttgaggtgccttaactgagggtaaatgccccctggctaatcatggtatagccgtcccggtgtaaattgttatccgctcacaatgggaacacattcgaccccgaacctaaattgtaaaccctggggtncctaatgacttaacctacccacattaatggcgtttgcccctaatggcccgctttccaatccgaaaa

SEQ ID NO: 93947 - DNA, 489 bp, Oryza sativa
  Clone ID: PAT_MRT4530_92282C.1
agggggccaaacggcccctggtaaaaaaacggggggggagggtttttggggggggggggaaaagggccaaaaaccctttttttaaaaaatcccccccaaaactttatcagcacaaccattaaaaaaaaagagggggcccccggggaaaaaccccccaaattgccccaaaaccacaaggggggggccaaattatccaaaaggcacaaggaaaccccccccccctgggggaggcaaattaccttagggaacttaaacccctgggagccccctttaaactttagtttccccggttaaaaaccccagggaaccggccaggaaaaaaaaaaccccccccattgggggcgaaaaaattaaaaaccccaacccccaaaacgacgggaaaaagcccccctttggggggcccccaaccaaaaaaaagggggggggccccccaccggggaaaaggaaaacaaacaattcccggaaaaaaaaaacccccccccggtaaaa

SEQ ID NO: 93948 - DNA, 338 bp, Oryza sativa
  unsure (1)..(338): unsure at all n locations
  Clone ID: PAT_MRT4530_92283C.1
gctcaatctttactgtgtacgaagaggcaactaacccaaccacaggaatgcacgtggggtggcggtcaagcacggggtggagcagcctctacacatatggggagagcacaggaggtggggacagccaccccgtgtggaacccggcccacgcggagcacctcccttgccggttcagcacaacggaggagaaaggccccaccccgcactccgggggtgcgcctcatttgggagggcccccgcccactcgtcaggggaggggtggagagccccccataccccgatgtagggggcgccccatgctcgggganctggtcaggaaaggccctccccacgcttag

SEQ ID NO: 93949 - DNA, 635 bp, Oryza sativa
  unsure (1)..(635): unsure at all n locations
  Clone ID: PAT_MRT4530_92284C.1
ggccgccccttttttttttttttttttgcgaagtggtatctttattatcatctctcccgcaggaggtcgtctataagctcatacaaagtccaatggctagtctagctagctttgactcaataaaatgccaaccagggcataaatcataaaacacaattgactgatgcagagatgatctacatcatcaagccaccgaagagaccagccatagccataccggcagtcataagaccccagcggatctctcctctagcctcaagaccagcgtttgcgcctgcggactctgttgaagaagcgccggtctcagtgctggtgccagtgggctcggaagtaccggaggcggccattgtgccggtagcagtagcgatctcaccaccaccggtagatcggggagcaacgctgtcttcggagtcctcggcagccttggcgaagttggagaagcttcgctgtccgctagtaggagcgttgatagcaccaaccataccattttggcagtgaccttgaacagcacagtagtaccaaatggggtcctcggaggtgacgttgatggtgaagaccttgtcactcataccctgcgtgacatcccaggtgccgctgaagaggcggtgctgntgatgggctcgcaaggcttggcg

SEQ ID NO: 93950 - DNA, 698 bp, Oryza sativa
  Clone ID: PAT_MRT4530_92285C.1
gtgttgaactcaaagcaaacaatcactgggaatgtgcccaaatactcgacaattgccgagtacacagcggatgcaaaggtaagtcaagatacataaataactcacattgcatctgtacctttattatagatagattcatcaaccctccctccagcaagcttgtataatgcaacaaagcaacccccaaaggttttgatcacaaaactatatatgcccatcaacagtacgactccttaaaatcccatcaagataacaaattattgggcctataatactcatccgggcccactgcaatccaggtcactggtggacactggggttcacaccttctacttggtggcttctgcctactccttaggttgtccaactcttgtatctgcagtaggagtgggatgtttggagatggcagttgcgagatagcatctcatggagaagagggtgttcttttttccgtcaagcttggccgctccttgaatctccttcttcctgacatcaagggcgatcatcactcctcccatatcacaatccctgttggcagaattgcacaagaggtaaacaacatcatcgtcgtcgatgctcaaggcggggtaagacatagccaggcatcctagggacaagctggaccctttggcttcctcatcatcgctggtgctgagcatgagtgtggagattatgggtaccccatacccacacggcat

SEQ ID NO: 93951 - DNA, 1436 bp, Oryza sativa
  unsure (1)..(1436): unsure at all n locations
  Clone ID: PAT_MRT4530_92286C.1
atgggttcgagccgagctgaagctgaagcagaaggagaggagagaggaggtggtgtactggtgggatttggatttggatttggattggcggcgatgctgcggaggatggtggtgtcggacacggacgccggcggcggcggcggggaggcggggagggttcgaggtggtggcggcggcggcgcggcgctgttcgccgtgccgaggttgtttgttgggctaggccgcgaagncgcggggcaggggggatgggcgacctcgcgctgtcgaggcccgactgcaatgtctgttcgaccttcgtctagccctaaggtggcagctcaagccccaatgccaagcagccgcatccttcgaatctcggcggcggcaagatccctgggccgggctctctgccggcgtcgatcggcggcgtccggcggttcatcggctcggtctcggcgagcgagatcgagcagtcggaggactacacctgcatcatcgctcgcggccctaatcccaagacgacccacatattgggactgcatcttggagccccagacgatggacgcctccgcctccgccgccgccatggatgtgacggaagcacccaccgagtcctactgggtggtgaagtgcgacgccggcgccgccccggcctccggcggcggcggcggcggcggcggcggcaacttcttgagctcctgcttcacttgcaagaagaagctggagggaaatgacatttacatttaccgtggtgagacatttttctgcggagcgaactctgatctggaattacttaaatcatcgaacaaattgctgcattgttcatcataagtctcctccccgcgctcatcctgctcctccctccacgaggacatcttcatggccggcatgttcgtcgcgacatgacctgacccttcccgtggcctggaccgaccgattgaacctgtcctcccctccgcaagttgtccaaattttttcccccctggtcttctaccaggggatagatcaagatgatcgaatcaccagctcacattgctatctatcatcagtctgttgtttttgattcagcaaactgaagaagaagaagaagccaatgttcttggtgggtcattatcactggagacgatgagcttttttcttttactggacctggaaacttgcagagatctgggctttttagagaaaagagaggtcgcctgcctgcctttagtgattttagtcgtgtacttttgatcctaaggctgctggccagtgcccacatccattttttttcttcctgttctttcttcttcatttcttgctctttggcagcagtgacaatgtctgcaatattgctacactacttctgctgtgagataatgacattgagctgctttacgtcaaaaaaaaaaaaaaaaaaaaaaaaaaaaaaaaaactcgagactagttctcttcctcgtgccgattcctgcagcccg

SEQ ID NO: 93952 - DNA, 1035 bp, Oryza sativa
  Clone ID: PAT_MRT4530_92287C.1
atggccatctccgccgccgcggcagcggcagcggcgctctcgttccccagagcgctcccctctccactccaacctcgccgccaccgccaccgccggcgcagcgcggagccacccgcctgcgcgcactccgagcgcggggtcaccttcgacccgggctccgcattctaccgcagcgacagcgccgcgggccgcgacctcgccgtcctcgcggccaccctccaccgccgcgccgccggcccctccgccccgttcctctgcctcgacgccatgtgcggctgcggcgtccgcgcgctccgctacctggcgcaggtcggcgccgacttcgtctgggccaacgacgcctccgaggcgctccgccccgtcatcgtcggcaacctctcccgcttcgagcgggcgccggacaggaggtgggcggtgtcgcacctcgacgccacccggctgctctcggagcgctacctccgccgcgagtacttcgacgtcatcgacgtggactcgttcggcggcgacgccgcgtacatcagggcggcgttgctggcgctcagaattgggggcctactgtatctgacatctacggattggcggtccgcgagagggtatggctcaagaagctctttgtcatcatatggagcatatatacgtccagtgccatatccgaatgaggatcccgattcgatcactggtgtaggaccactttggacaggtcctctccatgataccaccttcctaactgaaatgttaagcttggcaacagaatggggatgggcaaacacaattgagaatggtgtctcattagaaaaacttcttgacacaatgattgaggaaagcgactcaaggttgccccctggatatatcagacttgatgagattgctagccgtgcaaaagtaaactctccaccacttggcaccctcataaactcgctgcgaaaggaagggtatgctgcttgtagatcacatataggcgccaatgcaatcaagaccaactgtcccattgagtgttgcttagacgtcgcgcaggagatccggaatttgcgataa

SEQ ID NO: 93953 - DNA, 166 bp, Oryza sativa
  Clone ID: PAT_MRT4530_92288C.1
agtggatccccgggctgcaggctcgtgtctgcgctcgccgacgcgctgctcgactccgtcccgatggtctgccatcacgggccaggtcccccgccgcatgatctggcacctgacgccttccaggagacgcccatagtcgaggtcaccctgctccatcaccaatgca

SEQ ID NO: 93954 - DNA, 498 bp, Oryza sativa
  Clone ID: PAT_MRT4530_92289C.1
gccgccgcgtgctggcctatctcaaccaggacatgtcgggctactcgcccggcggcaagctgactatctatcccgactatgtcgacacgggcctcacggcctacgtcagacgcatcgcccaggcctcggccggcgtcgcgccctcgagctccagctgcggctacggctgctctgaccacgccagcgccaggtcaaacggcttccctgctgcgtacgtcggcgacgagcccattggtacctcggcaacttggatccactcctccaacgactccattgacaggatccagtggcccaccatcctccgccacgccaagtttgtcatcaactacttggtcgaggcttcgtacctgtaatgggttgatgtctccgggcgaacaggacgttataacatcaccactttgtagtgttaatgaatttgtattatgtaaataggtatcttggctttctgaatgcccaagaatacacagtattgtcgggatgaaaaaaaaaaaaaaaaaa

SEQ ID NO: 93955 - DNA, 1557 bp, Oryza sativa
  Clone ID: PAT_MRT4530_9228C.1
atggccatcgagtcatggctcaccaaggtccgctccgccatcatctcttccaaacccagcccctcgtcgtcgtcgtcgtcgtcttggaggtcgaagacggtcggtatcctggccttggaggtggccaccctcatgtccaaacttgtccacctctggcgatccctcgccgacgccgccctcgcccgcctccgccaccacctcatcaaccttgacggcgtccgcaagctcgtctcccaccacgacgccgccctcctcgccctcgcctgcgctgagctcaccgacgccctacgtgtcgccgcccactccgtcgccgcgctcgccacccgctgcgcggatcccttcctccgcgacttcgccgacgccttcgcggacttcgccgacactggccgcgaccctcaccggtgggtgtccacatggaaggacatggacaccagggcgcacaagatggacaagcaagtcgccgccacctccgccctccggactgccatggaggacctggccgacgccgagcacggactccggaagctcctccagaccagcagcagtcgtcgcctctccgccaccaacatctcgctggcggcggagcagcagcagctcattttcgccaagaagcaggaggtgaagcacctcaagcaaacctccctctggtcctccaccttcgacgccgtcgtctcctcgctcgcgcgggccgcgttcaccatcctcgcgcgcatcaagctcgtcttcggcgccgcccacgatcaccgcccgacgacgacaccgctgcaccggagcctcaccctctcctccgccgtccacccgtcctccgtcgacgtgcaagtgcaaccgccggtgtcgcgcaagtccatgtccatggatatgggcatgggggaggcgctgtacttggagaggcagaggcagagcgggctgttggagcgcagcgcggcggcgctggtgccgccgccggggacgctgggcgcggccgcgttggcgccgcgctacgcctgggtgataatctcgatcgagaggatggcgcggtcgccgcggctggtgggggcggaggagcgggacgagctgtacggcatgctgacggcgagcgtgcgcgcgcagcttcgagcgaggctgagtgggacggtggcggcggcggagccggggctggcggggcagtggcgggcggcggtgggagggatcctggagtggctggccccgatggcgcacgcgacggtgcggtggcaggcggagcgaagcttggagcagcagaggaagacgacgagggagatggagactcagacgctggtggtgcagacgctgcaaatggcggagcgcgggaaggtggaggcggcggtggcggagctgctggtgggcctcaactacctctgccgctttcacaaggagatcaccacctgccgtaccccccagcgtccctgcggcggcggcgccctcccctccgccggatccagcgggaggcggctgcggttcggcagcggcagcggcaccctccccttccggtttgttttccctatccgattcaatttgtatgatggaattccggatgggattttgggggcggacaattga

SEQ ID NO: 93956 - DNA, 1016 bp, Oryza sativa
  Clone ID: PAT_MRT4530_92290C.1
atggagttcaacaaggtggtctccagctacagggccgcctcgcccgcgcccgtggggatggcccgcgggggaggagggccggccagccgcgtggagttcgtcccgtcgtcgcggcgggcgcggctcgcggccaccaacaactccgtcacccccgtgaccaaggaggagaaacagaggatagatcaaagtgaaatactgaccttggacaacattagaacctccttggttaggcaagaagacagcatcatattcagcctcttagagagagcacagttttgctacaatgctgatatatatgataaaaatgctttccatgtggatggatttgatggctctttggttgaattcatggttagagaaaccgaaaaactacatcaacaggttgggagatacaagagccctgatgagcacccattctttccggaggatctgcctgaaccactgttgccacctctccagtatccaaaggttttgcatcctattgctgattctattaatatcaacaaggagatttggaaaatgtattttgatgagcttcttccaagattagtgaaagaaggaagtgatggtaattatggatccagtgctctttgtgacacgatctgcttgcaggcgctctccaaaagaattcactatggtaagtttgtggcagaggctaagtttcaagagtctcctgaagcttacatgcctgcgataatagcacaggactgcgatcaactaatgcacctcctcacctatgaaacggtggagcgtgctattgaacatagggtggaagctaaggctaagatctttggacaggaggtggatttaggcgctgaagacaacggcgctccaccaatgtacaagataaggcccagtttggtggctgaactgtacagctacaggatcatgccgctaaccaaggaggttcaagtagcctacttgctgaggagattggattgattgtttacgattgtaaactgccagcttcggttttctggcatcaaagaataaattaggggaaagaccaccatagg

SEQ ID NO: 93957 - DNA, 614 bp, Oryza sativa
  unsure (1)..(614): unsure at all n locations
  Clone ID: PAT_MRT4530_92291C.1
gatgttagaaagaatagagtcatgttgattggaatataagacaacaattaactgacctttttgccttgtttgattacatattaacagccatttctgaatgtgatcgtgtaagtagacagtaaagccctgcactgtaattatgatcattgcagggtgagaattgaactaactgcgctggtaagaatctccagagttgaaagttgaaaaataagaataaaaagggacatcacagctgggtgcttagtggtaacacatgacacacagagagaagaacacagttcattccatgcagtaacaattatataaaccgcatggcagaggctgtttcttgtcaggataaacagaaaggattggatcttaaaaaccccagcagaggctgtcacatgcccctggttagatctaatctcacctttccactgtcaagttcatagttaattactactgcctcttgtactttgtgttaatggtgaggaagccgccatctagctagcagctggattatactagtaaaagtacaggaaattntgcaggctcgcagatctagatctaccttcttctccaaattcccatcggtaaatgggcaagttcggattgaccaatgctgaactactaat

SEQ ID NO: 93958 - DNA, 288 bp, Oryza sativa
  Clone ID: PAT_MRT4530_92292C.1
atgtccctcaatcctctcttcataactaggatcgacttctccgacgtggcgtggacccggcggcaccgaggacaaggcggtgagcggagctacatcgacagcctctcgggccttgatgcctataagagcctctcaatcattgacgacctcaagcctaagaacatcggcgccttcgctgaccttgtcgctggcctgggcttcctctcccgctgcatcttcggtcgctgtaatgccaccagttcatccaccaccacctctctcctcgatggcttcctcttcctccgctag

SEQ ID NO: 93959 - DNA, 1029 bp, Oryza sativa
  Clone ID: PAT_MRT4530_92293C.1
atggaggtggagagccggtacgtcgccgtgaggcaccacgtggaggggctcccgtcggaggacgacttcgaggtgaaggcggcgagggtgaggtggtggccggagtccggcgaggtgctggtccggaacctctacctgtccgtggacccttaccagctcaaccgcatgaagcgccgcagcgcgtcgcacctcgccgtcgacggcatcgtccccggcgagaggatcgacgcgtacggcgccggcgaggtggtggcgtcggcgtgcgaggagtacaaggagggcgacgtggtcgccggcgtgctggggtgggaggactacaccctgttccggccgtcccccggcgtgctcatgtccaagctcgccgcctccgacgacctccccttgtcacaccacctcagcgcactagggacgagcgggatgacggcgtacgcggggctgtacgaggtgggcaggccggaggcgggggagaaggtgttcgtgtcggcggcgtcgggctccgtcggcagcctcgtcggccagttcgccaagctcgccggctgctacgtcgtcggctgcgccggcaccaacgccaaggttgacctgctgaaaaataagcttggattcgatgacgctttcaactataaggatgagcctgacatgaaatcagcactgaagagatactttcccgacggtattgacatctactttgacaatgtcggtggcgagacactagaggcggcgctggcgaacatgaacacctacggccgcgtcgccctttgcggcgtcatctccgagtacaccgacgccggccaccgcgccgtgccggacctgctggaggtgatctacaagcgcatcaccatcagaggcttcttcgcctgggatttcctgacgaggttcgccgagttcaccggcgtcatcagtgactggatccgtcagggaaaggtccaggtgatcgaggacatctccgacggcctggagagcgtgccgtcggctttcgcggcgctgttcagcggcgacaacatcggcaagaagatggttaagctggcatag

SEQ ID NO: 93960 - DNA, 496 bp, Oryza sativa
  Clone ID: PAT_MRT4530_92294C.1
cccacgcgtccgcgaaacagttattaaaaaagctgcagaggcacatatgaatagaatggaaaaggatccaggcggtccacatgagcataccacaatgggagaaactactcctaaaggtgaatcatctacaacaccatccaaagtgaagggcggaccacaagaagaaggtaatggcagccagatcaacaccaatccaaccaaaagaccgaaggctttggaaagattaacaagtagtgctggtctgttgaggtgattagattctagagccttgaaaataaaagatatataattgttagatgttttagaaaaaagctgtaaatagaagcataagtactatatataatctttggtaaaagtgagaaccgtactatatagataactatctaaataactaactttatggaagttgtcacatgaatctataaataaagctctacaagtatatataaagacctatgtattgtcaccataaagctaaaaaaaaaaaaaaaaaaaa

SEQ ID NO: 93961 - DNA, 813 bp, Oryza sativa
  Clone ID: PAT_MRT4530_92295C.1
atcatttcacaaacatactgtacgtattgctgcatttactatatctgactttgaaaatgttcaagtggcatttggttctgtgatcaatgtactttgtcctcaatgaattttcctttgtcatgagcacctgacttgtctttctgttgaataccggcacagcgcgtattgacaattcaccgattcaggctgtgttatgaagacggagcaccggattatacaagtagtcaggcactgttattctgtgaagctgactttcactgatccatccaccgacgcatcatcagaattgataaggaggagcatctgttctgttctgtagtttaacaggcccacccagatctgattcatttgattacctttcgttttcagatgaaaccatctggcacctgcgatccaaagaggccttgaaagctggtccatgtttatcttcagaaaccagaataacaagtccatggcttattgacatatcaatcgtttggtcagttagaagttattattgaaaaaagagaggaaaagttagtagttcatcatacgtacatggttgggtgataggcaatttggcatgtgaagagttatttggcagaggcagccaaagttgaagcagtatcctgtaaccaagttggtatacgcgtacgcctacgactacgagagcgatactgtcgtgtcacgtgtggcagccaagacacggtcatggactcatggtcaccatcactatcaacccacttgaacattcagatcaagcagctagtgagtatttttttttttggtaaatcaaggtcggctcattcattcaaataaagattcagagtttcc

SEQ ID NO: 93962 - DNA, 672 bp, Oryza sativa
  Clone ID: PAT_MRT4530_92296C.1
atgggcgggtcccactggtcagtgtctcgggagagaggggaaggggcggcggcacgtgggccccactcggcagcggctcaaggggagggaacggttggcaagcgggccccacagccccggctcctcggcccggcccactggccaggcccggcatcaagccggccgaccggccatggcaaagcggcggcgcgcgcatgcgaccgccggagacggcaaacggcggcgcggacggcgggcgacggggaaaaaagggaaggaaaggaaggggaggggagacctcaccggaggggcggcaacggccggcggcggaaaacgagggaggcggcgaagaccggcgatgccgaggcgcgggcgggcgccggcgtcgccgggaggcgccccgatttcgccggcgacgtgggggaggagagagagaaggtgggggcgattcaaaatcgaatcccgcccctctcgtgcgcgagcgcggccggaagacgcggggagagggggcggcgacgtggcgtgggcacgggcgacgcggcgtgggcgcggggaaagcggaggagtgggtgcggcggcggcggtttcggcggggtggtgaccggcgcgggcggcgggaggttaggggaggacccgacaggtgggccccacctgtcggtgaccccgggagaggagggaggcggggcggcctga

SEQ ID NO: 93963 - DNA, 525 bp, Oryza sativa
  Clone ID: PAT_MRT4530_92297C.1
atgcgggtgtgggggcaaatcgtggacaaaagagcaaaatccggcgccgccgacgtggactccgacacggccgtcgatctccgactccgacgccatatcggaacagaacctaacctctcgacacaaatagcgagaaaccccaacccgttcttcttctccccatctcgatcgatcgcgaccaccccaacgtccggaatccacgcacgatctaatcaacttctcgcaagaatcaggctattatcaacatgcatgtttgtaatctgtaataacaaaatgcagatcatcgtgaagactctgaccggcatcaccatcaccctcgaggtgagaccatccgacacgatcgacgacgtgaaggcgaagatccaggacaaggtaggcatccgctccgaccagcagcacctcgtcgacgtctccgccggcagcaagcagctcgacgacggcggcagcaccctcgccgactacgacatccacgacgagtccacgcttcacctcgtgcaagtccttctcggcgactgtcgaaactag

SEQ ID NO: 93964 - DNA, 387 bp, Oryza sativa
  Clone ID: PAT_MRT4530_92298C.1
atggacggatccgtgccccgtaggcagatccgagcagatccggcagccggtggtcaggagacgggggaggcaccggtggccagcggtcgggaggcgtcggctggagatgttcccgccgccgccacccgtgacgacctaagacgcgtaggcgcactgtggcggccgaagttctcgacggccgtctccgaggccgctgccatcggcctcctgctcgtgttcatctgtcaccttcgtggggttgagtgcgcaggggcatcgacagcaagtagtgagcacgacggccgcacccacctcgatccccatcccggcgcgacgacgactgcttctcctcggcagtggctattggcgggaaggaagggcctcggcgtcggtggctcctctccgtag

SEQ ID NO: 93965 - DNA, 765 bp, Oryza sativa
  Clone ID: PAT_MRT4530_92299C.1
atggccaccaccacctcctcctcctcctcctcgtctccccctccgccgccgcaggacctcgccggcggcgagcagcggcagcaccacccgctcctcgcggccgccgccgccgcctccctcctcgccttcctctatctcccgcggccgctcctcccgctcctcctctcccccgcctccctctcctccctcctcgtcctcctctccctcctccgcctcggctccccgccgcctccccccgcggaggccacccctcctcctcctcctcctcctcctccgcccgagcgagccgtcccggaggccgccgatactcctcctcccccaccgccgccgacggcgccgacgccgacgccgcccgagctcccgagcgtgttcgtggagacggagttcgcgtcgtcgtgggcggcgaaagggcgcgcgctggaggtgatccacgaggagttcgaggcggagtgggggccggaggagatgggcctcacgtggacctccgactccgactcggacagctacagcggcagcgacgacgacgtcgacgactaccgcgacggcgacgggatgatcgagatcgagctggaggaggacaacctcatcgagatcgacatctccaagtgccgctttctgtcgttctgcggtgaacttgaagtttctgctttctgtcatttctgtggtgaattcgaacgcctcgccgcatccgtgctcgtcgtcggcgccagcctcgccgcacctcctgccagctgctccgcttcggcatccgcgtgctcatcctag

SEQ ID NO: 93966 - DNA, 117 bp, Oryza sativa
  Clone ID: PAT_MRT4530_9229C.1
atgaagcatgcagccgatggagccgacttcatcaacgagttctttcaagttaagcagggctgcatcatcttgatctccggcttgcctgctcatcattggagtgaagcaaacctctga

SEQ ID NO: 93967 - DNA, 609 bp, Oryza sativa
  Clone ID: PAT_MRT4530_922C.1
atggcggcgacgacaggaaagggagaagagaagaaaaccctaaccctagctttgcaagaggagggaagaaggggaaaggcagcgtgctcactggagacaaggtggcggccggaggagagagccgtgtcgtcgccgtcgccgtcgccgtcgcctccgggtcgcgccgcgcgctgccccctccgtcacgtcttcgttgcgccgccgcctccactcgaggaaattttccacgctccaggagtagatgattttttcccgggcctagagaagagggaaaccccgtgggccgccgtcgtcggcggtgcctcgccggagctccgccggaggttgccgccgcctccccggccgccggtcaccgagccgaacctcgccgccgcggcacatcgctgcgacgctgcctgggatcgagcaggagcgagaggaggaagaagaaaccgtgccgagccactgccaagccggccccacctccctttcctccctcaagccgctgacaagcagggcccgtgcctctctccctccatcaagtcgctgacagagcccgagtacgaggaagctctggacatcgctttcgagggagaagaccccaaccctgtgcaaggcaagcctctttga

SEQ ID NO: 93968 - DNA, 156 bp, Oryza sativa
  Clone ID: PAT_MRT4530_92300C.1
atgggtggtgtaggcgataccgcagcagctggagcccagggtcagcagcgggtggtgggccggctttacaatacattaataatacaatggttgcccgagtggcatccaaatagaccaagtatggtcatctacaaggccaaatatccaaagaagtag

SEQ ID NO: 93969 - DNA, 447 bp, Oryza sativa
  Clone ID: PAT_MRT4530_92301C.1
ttctttccgcaggaggccgcatccgcttcgggatcgggatgcggaggagaggggaaggatgggagagaggcaggcgacccggccgcgcagcttcccttgcttcctctctctttctttgtgcgacatcccagcttttgctgttccttgagaagaacagcttgggacattcttgtgttgtggtttgatttctagggcaagaaagcatgaggctatggcttctcatacctcttgttctctgtttacctacattgattccatccgaggattacttggatgtgaccattgttgctcggggtgctgcgacgatcgcttttaccagcaacgtgttcatttgcgctacccttgattggtggccttcacagaagtgcacttctgaccagcgtccatgggggcatgcttgtattttaaatcagtacttgactaatcctctgctagctaaagctattc

SEQ ID NO: 93970 - DNA, 5293 bp, Oryza sativa
  Clone ID: PAT_MRT4530_92302C.1
atgtcacagtttcaccctactcagcatggaggtgatagtgattttcaggtgtggcaacaacagatgatgtacaagcaattgcaagagtttcagagacagcagcaggtacaacagcttgatcatggagccaggatgcaaccctcttttggtcagtttcaagctcctgcaaaaccacttccaactgatcaactctcggcaatgacgaatgaaatgccaaacaatgaatctacagcttatgcatggtcacatcaactacatggtagtagtgacccagggttggcaagcaattctcaaatgttgaatcctagcagtaacacaaattgggagcaatatggtggtgctcctggtgtagccaattttgtaaacggttcaatgttttcaaacactccgattcagcccatgagaccgatgggattagctgcacaccaaatgaacccatctttatatccaataaatactaccagcagagatggatctggaaatcagcactctcagttcttagggatcccaactgatccacggaatgcaatggcaagggcagcagcacatcagtccgaaaaggcatcgatgcaatttagctctttaatgagtgaacaaggtccatccagctctatgcaaaatttccttgggaaggtaggtgataatattaaggtgggcacccctgttccagtaaatcatctacaacatggtgttcaacaccaagattttcatggtaggccaaaccaagttgattttcaagcaggcctgcgtgaaaaatcaacaatgcaggtagagtcaggaaatggtggtgctagccttgatcctaccgaggagaagttcctatttggcaatgacgaggatagcaactggggagctctgttgaggggtggcaacgatcatggcagttctatggataatgacaactttggtggagctctgccatctctccagagtgggagctggagcgcccttatgcaggaagcactacagtctacaaccagtgacaacagtcccaaggaagaatggagcggcttgagcttccagaaacaagaacaaattatagccaacaattcaaccttgcaaagtcatgaccagaataaattttcagcattgagtggtgccaatctagaaaatcaacggccttcatcagcttctagctacggtgatggaacaatgcataatccaaattttgctggttttcagcatgctgcaagaactccttatgagcaaagggacagaatgcaacatgattcttctaatgccactggtaccaatcatcaatcaactgcaggagtcaataatggatattttcagcagagcatgaaacaaaagcaatctgatgattacagtagacaagaacaaatgaacgcatcaaatggcatttgggcacaccagaaacctgaaatgccaagaaataattcacactcatctggtggacatgctacaccaccaagtgcacatggattttggatgtcccaacaaaacagtattgatcataatatcagcagagagtctggtagcacccaaaatgactggaaaagcaaggccccccttgtacaggacatcaacagtaccccaaacgtctttaataatgatgggagcttttggaagtctagtggaggcaatgcaaattcagtccacaggcctcaacagatgaagcctgatataagcaccatgcaaatgccaaatgacagttcggacggtaaaagcactagtgcgatgggctcaaacatgccaactttaaatcaggatcagtatcaatccattattggtcgaactggtgaacatgttgggcaaaaccataatatgggacgtaagggtccagagattacaggatcactaggaagaggtgcagagcaaaagtcaaatgaccacaaccaggattacctaaatgtgctccctactgaaaggcaagggcatggttcaaatcatggacaacatgtgagcagtgattttgctaccaggaggcatcctttctttgctggaaaagaatcccaaaatttgggtcaatctggtcagcaagcaatgggatcatacatgttgcagaatcatgccatggataactcaggaatgaacattaggcattcttcaggcaatccagtgcctaatcagtttccatctcagtcgcatcagttgcataataacctgaaacctcgattcattcctagctcccaggcttcgagtaatatggcttcagtaaatgagaaaatgctgatgagagaggagcaatttaaatctcgacatgttccaaatagctccagttcaccaccctttggaggatctgatgctggcctgcctcaaaatcgagcagttcaaaacagtcaacatatgcttcaacttctgcataaggtggacaattcaacagatagcaatgctgctgctgatatgccaaacagttctcctgataatactggtactgttcagcaacagcttaatcaatcttctctgcaaggttttggattaagactcgcaccaccatcacaacgacaattgactccaggccatgtatggtctactcgtgctgatgttgatggcaagcaacctgagcactcaacaaagggagaagatcaaacacaaccttccgctgctagccagtctttgccacctgggcatccaagttcacaaccgacaccgtttaactcttcagaaatagatagtactggacagcaaactgggcaatttcaccagtttggttcaggccaacaataccctgtctctgagtcaagatctggttctgtagcgatgcctcagcaaggcagttctgcaacagtgttcaagaatgtatggacaaacatatcagcacagcgtctagccggtgtgcaacctaacaaaattacacccaatattctccagtctatgatgtttcccaatagcgctgcagataccaacttatggggctcccaaaaggcagatgatcaaggacagagagcatcaactccatctgatgttgccacaagttctaccaattcacaaaatcaagaaacaaagcaaggtggggacagtgatgcagggttagcctcttctgagatggtaaatcttgattcaacaggagctactatgtcgagagaatccatacagaagcattcgtcagacgggaattttgccatgcatgtttcatccttggcacggttgcaccagcagggaatcatgaaccctaaacaaggggagaaccctgcagcgaactttcaggctatgaagacttctcagaacactgctattgggttacatggaagcccgacaccgtcaaacattcagcagcagaattactctttactccatcaaatgcaagccatgagacacgtggatgttgatccggcaaatatagctggaaagaagcttaaatcacctgaaacaggttctgatgcttcacaggttgactggaaatctggtcagaggtttgcgcatggaaccaataactcggtcagatcgtctgtagataacattggcaatgcaaatgtcccagggccattccctgctgacatgaagatgctaagctttgctccaaggaacaatgaagatagaggtccaagcataccttctcaattcccttcaagagaacctccctctcagggtatggcagttgcagcacaaactgagcagcaaactcaagttcagccagcaaatgcatcatcagatttaattgaaagaagtgagaggcccaggataaaccctcaaatggcaccttcttggtttgagcgctatggaaaccacagaaatggtcagaatctttccatgttcaatttgcagaagacacctgttccgccatataatgtccaaaaaccttcttggaacatggacaataattctgctgagcaaagaatcgattctggccaatctgttaagcctgggcattacatttcatcgaaaaagatggaagtttcagtcccttccagtataatgcaaaggaggccaaagaagcgcaaatctgcagaatctgatcttgtttcttggcataaactcattgagcaccccaaaactttgagaaacatgagcacaactgagatggactgggcttgggcagctaataggttaatggagaaggcagaggatgatgcagaaaatctagaagatgtccctgtaaattatttatggcgcaaaaggttaagattgaccacacggttaatccagcaaattcttcctgctataccagcaaaggtcctcaaagcacaagctgcatcagcttatgaaggtgtaacctataacatcgctatgttcacactaggagatgcatgcaacatggcatcatataactctcgcactcttaccgatcatgaaaataactcatctgaacaaacaaatgccaagaaaatggaagacagattgtcaaaggttgtggaagtatttactggaagaatcaagaagatggaaaatgactttgtgagcttgaacaagaggtcttctatgctagatgtgcaacttgaatgccaagatttggaaagaatttctattgtaaatcgtctgggaagattccatggccggaaccatgcggcgggagtcgaggcctcatcggcttcagaaatgattcctcgcagaatttttcccgaaagacatgtcatgtcttttgcagtgcctggaaatcttcctgaaggggtgtactgtttgtcactctagtgcattgattcctcccatcgttttttacaaactactcaccctgtgatttccagtgctccttgttctcatgcaaagcatggcctttcatacagagcaaccaaatccaggggtagtcgaaaaaaaatcgaaaccatcacataataccatggtgatggagaagccaaggggtgcgtccagccgatcaactcagtgctggctgccgttgttcctcccttgtatcaagtataggtcctgtatattgtggaaagcaagttgaaactacggatctcgcatcatttttctgatgaaggaagagtattagcttcatactttgttagagagcccagtgctttgctagcttagtacatctggcgaactatgtagctatttgtcatctttttatccatgatgatgaagtgttggctggttagaggggggaataataacgggaaccttcctctgggttcttttgttcgtttaggatgggatgcaaattggctagtgtgtccagtctaactgaccagtgttagtcagcagttaattactagagttatgtagttccgaaagcattcatggaacaagtggcgggtaagggagcttggaaacttgttgtaatttgaatccccgtgatgtcgaaatctcaatgggttcttgtaaatttaaaatgaaaatataactgaggtaagaatgctcttgtgcttcatgtaaaaaaaaaaaaaaaaaa

SEQ ID NO: 93971 - DNA, 4461 bp, Oryza sativa
  Clone ID: PAT_MRT4530_92303C.1
atgtcacagtttcaccctactcagcatggaggtgatagtgattttcaggtgtggcaacaacagatgatgtacaagcaattgcaagagtttcagagacagcagcaggtacaacagcttgatcatggagccaggatgcaaccctcttttggtcagtttcaagctcctgcaaaaccacttccaactgatcaactctcggcaatgacgaatgaaatgccaaacaatgaatctacagcttatgcatggtcacatcaactacatggtagtagtgacccagggttggcaagcaattctcaaatgttgaatcctagcagtaacacaaattgggagcaatatggtggtgctcctggtgtagccaattttgtaaacggttcaatgttttcaaacactccgattcagcccatgagaccgatgggattagctgcacaccaaatgaacccatctttatatccaataaatactaccagcagagatggatctggaaatcagcactctcagttcttagggatcccaactgatccacggaatgcaatggcaagggcagcagcacatcagtccgaaaaggcatcgatgcaatttagctctttaatgagtgaacaaggtccatccagctctatgcaaaatttccttgggaaggtaggtgataatattaaggtgggcacccctgttccagtaaatcatctacaacatggtgttcaacaccaagattttcatggtaggccaaaccaagttgattttcaagcaggcctgcgtgaaaaatcaacaatgcaggtagagtcaggaaatggtggtgctagccttgatcctaccgaggagaagttcctatttggcaatgacgaggatagcaactggggagctctgttgaggggtggcaacgatcatggcagttctatggataatgacaactttggtggagctctgccatctctccagagtgggagctggagcgcccttatgcaggaagcactacagtctacaaccagtgacaacagtcccaaggaagaatggagcggcttgagcttccagaaacaagaacaaattatagccaacaattcaaccttgcaaagtcatgaccagaataaattttcagcattgagtggtgccaatctagaaaatcaacggccttcatcagctcctagctacggagtcaataatggatattttcagcagagcatgaaacaaaagcaatctgatgattacagtagacaagaacaaatgaacgcatcaaatggcatttgggcacaccagaaacctgaaatgccaagaaataattcacactcatctggtggacatgctacaccaccaagtgcacatggattttggatgtcccaacaaaacagtattgatcataatatcagcagagagtctggtagcacccaaaatgactggaaaagcaaggccccccttgtacaggacatcaacagtaccccaaacgtctttaataatgatgggagcttttggaagtctagtggaggcaatgcaaattcagtccacaggcctcaacagatgaagcctgatataagcaccatgcaaatgccaaatgacagttcggacggtaaaagcactagtgcgatgggctcaaacatgccaactttaaatcaggatcagtatcaatccattattggtcgaactggtgaacatgttgggcaaaaccataatatgggacgtaagggtccagagattacaggatcactaggaagaggtgcagagcaaaagtcaaatgaccacaaccaggattacctaaatgtgctccctactgaaaggcaagggcatggttcaaatcatggacaacatgtgagcagtgattttgctaccaggaggcatcctttctttgctggaaaagaatcccaaaatttgggtcaatctggtcagcaagcaatgggatcatacatgttgcagaatcatgccatggataactcaggaatgaacattaggcattcttcaggcaatccagtgcctaatcagtttccatctcagtcgcatcagttgcataataacctgaaacctcgattcattcctagctcccaggcttcgagtaatatggcttcagtaaatgagaaaatgctgatgagagaggagcaatttaaatctcgacatgttccaaatagctccagttcaccaccctttggaggatctgatgctggcctgcctcaaaatcgagcagttcaaaacagtcaacatatgcttcaacttctgcataaggtggacaattcaacagatagcaatgctgctgctgatatgccaaacagttctcctgataatactggtactgttcagcaacagcttaatcaatcttctctgcaaggttttggattaagactcgcaccaccatcacaacgacaattgactccaggccatgtatggtctactcgtgctgatgttgatggcaagcaacctgagcactcaacaaagggagaagatcaaacacaaccttccgctgctagccagtctttgccacctgggcatccaagttcacaaccgacaccgtttaactcttcagaaatagatagtactggacagcaaactgggcaatttcaccagtttggttcaggccaacaataccctgtctctgagtcaagatctggttctgtagcgatgcctcagcaaggcagttctgcaacagtgttcaagaatgtatggacaaacatatcagcacagcgtctagccggtgtgcaacctaacaaaattacacccaatattctccagtctatgatgtttcccaatagcgctgcagataccaacttatggggctcccaaaaggcagatgatcaaggacagagagcatcaactccatctgatgttgccacaagttctaccaattcacaaaatcaagaaacaaagcaaggtggggacagtgatgcagggttagcctcttctgagatggtaaatcttgattcaacaggagctactatgtcgagagaatccatacagaagcattcgtcagacgggaattttgccatgcatgtttcatccttggcacggttgcaccagcagggaatcatgaaccctaaacaaggggagaaccctgcagcgaactttcaggctatgaagacttctcagaacactgctattgggttacatggaagcccgacaccgtcaaacattcagcagcagaattactctttactccatcaaatgcaagccatgagacacgtggatgttgatcccgcaaatatagctggaaagaagcttaaatcacctgaaacaggttctgatgcttcacaggttgactggaaatctggtcagaggtttgcgcatggaaccaataactcggtcagatcgtctgtagataacattggcaatgcaaatgtcccagggccattccctgctgacatgaagatgctaagctttgctccaaggaacaatgaagatagaggtccaagcataccttctcaattcccttcaagagaacctccctctcagggtatggcagttgcagcacaaactgagcagcaaactcaagttcagccagcaaatgcatcatcagatttaattgaaagaagtgagaggcccaggataaaccctcaaatggcaccttcttggtttgagcgctatggaaaccacagaaatggtcagaatctttccatgttcaatttgcagaagacacctgttccgccatataatgtccaaaaaccttcttggaacatggacaataattctgctgagcaaagaatcgattctggccaatctgttaagcctgggcattacatttcatcgaaaaagatggaagtttcagtcccttccagtataatgcaaaggaggccaaagaagcgcaaatctgcagaatctgatcttgtttcttggcataaactcattgagcaccccaaaactttgagaaacatgagcacaactgagatggactgggcttgggcagctaataggttaatggagaaggcagaggatgatgcagaaaatctagaagatgtccctgtaaattatttatggcgcaaaaggttaagattgaccacacggttaatccagcaaattcttcctgctataccagcaaaggtcctcaaagcacaagctgcatcagcttatgaaggtgtaacctataacatcgctatgttcacactaggagatgcatgcaacatggcatcatataactctcgcactcttaccgatcatgaaaataactcatctgaacaaacaaatgccaagaaaatggaagacagattgtcaaaggttgtggaagtatttactggaagaatcaagaagatggaaaatgactttgtgagcttgaacaagaggtcttctatgctagatgtgcaacttgaatgccaagatttggaaagaatttctattgtaaatcgtctgggaagattccatggccggaaccatgcggcgggagtcgaggcctcatcggcttcagaaatgattcctcgcagaatttttcccgaaagacatgtcatgtcttttgcagtgcctggaaatcttcctgaaggggtgtactgtttgtcactctag

SEQ ID NO: 93972 - DNA, 618 bp, Oryza sativa
  Clone ID: PAT_MRT4530_92304C.1
atggcgtcgtcgtcgtcgtcgtcgtttgccatggacgacggagaagcttacctccgcgacatgacggcgatcaccgagttgctcgacggcgacatgacggcgatcaccgagtcgctcgacggcgacatgacggcgatcgccgagttgctagaccaggcccgttcctacagcttcgcggaccttcagtcacatgatccgccggcggcggcggcggcggccgtcaacgacgacgacgacaatgtatccgggctgatgatggcgatgatgaagacggtggatgcgccggccggcggcggcgacggcggcgactgcccgatatgcctgaacaacggcggcggcgaggagtggaaggagacggcgtgcgggcaccggttccacgcgcggtgcgtggcgaggtgggcgcgggtggggaggaaggggatgagctgcccgatgtgccggcgagacatgatgtcgccggcggtggacttgctggtgagggatatccgggccttgtacggcgacgaggagcttagtgatgtgcgcgagctgctcgaggacggtctccggcagctcgagattagcagctcgatcgccggcggtgcggaagaagcagcatatagagcttcccaggcttaa

SEQ ID NO: 93973 - DNA, 606 bp, Oryza sativa
  Clone ID: PAT_MRT4530_92305C.1
atggatggggaggaggacagcgagtggatgatgatggacgttggagggaagggcgggaagggcggcggcggcggcggcgcggcggacaggaagaagcggttcagcgaggagcagatcaagtcgctggagtccatgttcgcgacgcagaccaagctggagccgaggcagaagctgcagctcgccagggagctcggcctgcagcctcgccagctggagaagctggcggagatgctgcaggagccacgggggaagtacggcgataatgccggggacgacgcgcggtcgggcggcgtcgccggcatgaagaaggaggagttcgtcggcgcgggcggcgccgccacgctctactcgtcggccgagggtggcgggacgacgacgacgacgacggccaagttgatgccccacttcggcagcgacgacgtcgacgcggggctcttcctccggccgtcgtcgcagcatcatccgccgccgccgcacgccggtgccggcttcacgtcctccgagccggccgccgaccaccagtccttcaacttccactcgagctggccgtcgtccacggagcagacctgcagcagcacgccatggtgggaattcgagagcgagtga

SEQ ID NO: 93974 - DNA, 528 bp, Oryza sativa
  Clone ID: PAT_MRT4530_92306C.1
gggaaaaaaaaagggggaaagcttaattgggataaaaattggggggttaaggggaaaaaaaaaccccaaaaatgggaggggcggggaaaccccaaaggggtacccgggaaaacttggacccttttaaaaataaaaaaaaagggacggcccggttgttaaaaaaaaaatgggacaaaggttggttagggaaccgaaaatggggaaccaacaaaaaaaagaatccctgggttttggagggccccatgcttttgaaaaagaaaaaaacccctgggggtaaaaaattctttttttttcaaaaattcatgccttgaggggaatgctttttattaggaaaaaaaaccattttttacttaataaagtactaaaacccgggggccccaaaaattttcaagggaatttttcacttggggttaaaaattttgggccaaaaaggggcggtaaaagggggaactggttgggaaaaaaaaaaatccccggagggggtgacaaagggaaaaaattttaagccccccaagaaaaccccaaaaa

SEQ ID NO: 93975 - DNA, 288 bp, Oryza sativa
  Clone ID: PAT_MRT4530_92307C.1
atggacatctctaggacaaatgaagtctacacgagctgcggcccggtagtcgagatgtcatggcacagggccggtgtcctgctgctaggggctcagtcctgcctacctgtcccgggggtcccggccgtaggtggggttgggtcgggcggtgagagcggtgagactgttccatctctgcatcacgggaagctgtgcgatgcgagcggttgctgcggcggggttgctcaacttctgcgttgcgggaagcagtacggtgcgaacggttgctatggtgagactgctcattag

SEQ ID NO: 93976 - DNA, 228 bp, Oryza sativa
  Clone ID: PAT_MRT4530_92308C.1
atggatctggggagatggatgtggtggctccggcggtgggtatggaagcgaggaggtggcattagggatgtggatgaggagccctatgaggaggagagcatctcgtcactgaagctccatgaggcgatcttcggaccttgggaggagattgcagcggtgcttggcatgggagcaagatggtccattggcggggctcggtatggggaggtcgggaggaggacgacctag

SEQ ID NO: 93977 - DNA, 228 bp, Oryza sativa
  Clone ID: PAT_MRT4530_92309C.1
atggagaggatggacgacggcctccgtgaagaggatggagtggcatacgagcagcacgtcgggtgggtgtcgtggtcagaggcgacggggccggagatctccaccacggacgcggcggcgacggtctgcagtcgtcttcttgggctggaggtcgtgaacgaggaaggatgcagccgccagtaccatatagggaggggcctctcgattatgagccgccagtgcggctag

SEQ ID NO: 93978 - DNA, 1267 bp, Oryza sativa
  unsure (1)..(1267): unsure at all n locations
  Clone ID: PAT_MRT4530_9230C.1
ttctctccccncattataaatagggaagtcatctccttgaagctagctggcctaagccaactcaatcaaacctccctagcttggcagaatagttaatgttaatcacctgattaaaattagattagtcccctcctacccagctaactactgcttctatttcacggagaaaaatgtcttcctaggctttctctttcagctcgatcgatccacagctcagctagctctctctctctctagcgacaagcaagcatggagcagctgttcgtcgacgacccagccttcgcgagcagcatgtcgtcgcttgaggcggacatcttctccggcgccggccagctgccgtcctcgccgtggctggacctagacctcgacgacgatgtccaagacctctccatggcgccgacgacggcgaacgcggtgtcctccggctacggctccggcggatccggctcccacaggaagctcagccacaacgcctacgagcgcgaccgccggaagcagctcaacgagctctactcctccctccgcgctctcctccccgacgccgatcacactaagaagctgagcatcccgacgacggtgtctcgcgtgctcaagtacatacccgagctgcagaagcaggtggagaatctggagaggaagaagaaggagctgacgacgacgagcaccaccaactgcaaaccaggagtgttggggagccagctgatgagcgagggcatggctcccatcgtttcggctacctgcatcaatgacatggagatcatggttcaggtcagcttgttgagcaatgtggcgggttcagttcttcctctctccaagtgtatcaaagtactggagaacgaaggtcttcacttcatcagttcatcgacttcctccggatttgggaacaggacattctacagtatccatcttcagagaagtgaaggaacgatcaacgaggagtgcccagcattttgtgaaaggttggagaaagtcgtcaggaacaaagcaaagctttaagcactagtaccgcgcgcgcgtgcctatgataatcctgaattaatcaagggccaaaatctaggtaaaaatgaccatgcgcagttgttaaatatagcatttggttagctgataataatgatatataagtagtgtgctcgatttatattaactaatttctatgacatatatactatgttgctcgatgtagcttttgtacatatttcatgcatgactctcagtgtattaattaattatattatgagatttgcaaaaaaaaaaaaaaaaaaaaaaa

SEQ ID NO: 93979 - DNA, 712 bp, Oryza sativa
  Clone ID: PAT_MRT4530_92310C.1
gaacgaatttcatatcaagttgtttgtgtaaaatcaaagtgtttatgattcttattctgtgatgaacaattggcatctgtaattattggttttgatatttggagattattggcgaagtggttttggagatgattggatttgcaggtgttaaataggtgctgctagagatttgggtccggtcagaccggacatgggttgttggctagagttcaatgcacgtggttggtgaagattccatgccatatgatggagatattgtgtgcgtacgagatgcggagtcgaatttggaaggagtccaaatttggtatgtttggagtttgtaaaatttgtttcttgtacgggaagatttcctaggtagattaggacttcctgtatgagtttggttcatggctttagactatctacctcatgtataaatagagagggagcgtctaaccggcgagacaccagcggtcagaccggtggatcacgggtggtcagaccggcggcggtttcaggcgacggcagttgatctcggcagtttgaccggaggatcaagcccggtcagaccgacggcttccaggcggtcagaccagcgcgtctacttcggtcggactgtgtttcgtcgaaatttaggattgaatacgtccttacacatctcaaagagactcatctaaaccaggtcgaatgatacaagccagacttgacttgaccctttgtaggaaaccaaacg

SEQ ID NO: 93980 - DNA, 564 bp, Oryza sativa
  Clone ID: PAT_MRT4530_92311C.1
atgggcggagccgggcggagccgggcggaggatggtgagcttgatgtcccgcctgcagaatccggactcggccaagacgtggctgacgacggagtcatcgagggcggccacgagggagttggagacggggggctcgtcggcgcacgcggccaccggtgctcttcctccgatccaaccacctctccagctggcgcacgcgagaggatagcccgactggcaccgctgcctggccaccgcacgccggtgcctctcccctatgttggtgctgctgcccagttgagctcctcctccgctcggctgcgccccgacacatcggcactgctgtcagccgcccgccatcgaactggccagacccgcacctctgtggtcacgccatgccgtcgaccgccctggccgccagtgtcactgcaccacgtcgcgccgacctcgccccactgcacctctgaggccgctgagccattctcagcgaagtcaatgggaagggagaaagaaggaaagataaaagggcaatccgggcatttagaaaaatgtctcacgtcttttgacccagaaataataaaataa

SEQ ID NO: 93981 - DNA, 1112 bp, Oryza sativa
  Clone ID: PAT_MRT4530_92312C.1
atgtcgagcaccggcgagcagtcgcaggcgaaggcggaggccgaggaggcggtggagctcgtgctgttccaggtcgctgagtgctacgtctccctgattccctccagcaccgcagccaccccccccacggatgaaatctggaacctctactcatgcgctcaggcgcggacgttcccttttctaagaaaaagccccacctgcagcaggaaactgcatgccaccccctccccctacctttactttccccggctcctcacccaccacgcgccagaacccgtgggtcctgttccacgtcggagcacagaacgaaccaatcacaagcaaacgcgggagccggtgaagcgctgtgagaacgcgctagtcgtggatcgcagagtcatacatgtagctgattccttcctggaactcagccaccccctacagggctcaagactcgacattgacttaccggggcacttggatcggatcttctggggggtcaagaaacgggcggaggaactgagatatctggatgatagctatataatcgatctaatagctgaggcatgcctggcacaaaaagaatccggcgcaaagataaaatctgcattttttgagcaaggcctcaacaagctctcatttaacgaaaaagccaactccaaggaggccccagtttccctcaagctccctccacctccgccatcaccggtctctcctacagattctggcatcgcggcttctccgttcaaagcggagtttccttcccaagaccaaccagctgctgatactggagctgataccactcctttcaaagcagaatttccttcttctcatgaacaaccagccgcggataacgtcgcttcttccccaccaccgaaagcagaagctgctcctcaggagcaaccaactgcagcagagaaggcccctcaagagagcgtggacgacgacttcggagactttcaggcagctgggtgaatcatgtatcttgtacataccacatgttactcaaattgctcctttgattttccatgttccatcagttgtgacttctgccggcacatgagttgctgtacagtacagagagctagtaactatcttgttataatttataaaagaacagatggatacccaat

SEQ ID NO: 93982 - DNA, 138 bp, Oryza sativa
  Clone ID: PAT_MRT4530_92313C.1
gggcaagtctgaaaatgattgattttttattcaaggggtcttatttctaggggttgcccacgattgtttgcaaccccttttttcttgagtccctgtgccccacgtttggtcaacacccccccccggaagagagttgga

SEQ ID NO: 93983 - DNA, 4164 bp, Oryza sativa
  Clone ID: PAT_MRT4530_92314C.1
atggcagaccttgtgcttgggttggccaaaacgacggtggaggggacggtaaccatggccaggtcggccatggaggaagaggagaagctgcacaagaccgtgcagcgcgatctgttggttatctcggacgagtttgagatgatgcactccttccttaatgatgccaagggccgcgtcacggacaacgtgacgaggaccttggtgaggcaggtccgcaacacggccctagacgtggaggattgcatcgagaccattgtttacctcgacagcaagccgcactggtggcgccgcatgattctgccttggtgcatgccgtctgcggcaccagggaaggacctggacgctgccgttgctaatatagagcagctcaaggctagggtcgaggccatgggtcaccggaacttgcgttacaaccgtattggtgactccggtcataagcctgaggagcaggcgcatcaacaagctgttgccaatgcaatggcaccgacagatgcagcaaagcagagccgtcaagtggatcttgtcatgttgatcaacaggaaggggggccaagcacgccatatgctagcacctttccctcgttcctattttatggctccatccctaacagcaggcgggggcggcggcgacgaggacgatgatgatgacgacgacaacaacaacaacgaggacgatgatgataatggtgattgttatcatgattgttgtgaagagcagttgaaggtggagaaagaagtactccaagtcatctcagtgtggggaacaggaagcgatctggagatgatgtccatcaagaaggcctacgacgacacagaaaccatgaaaagtttcaactgccgagcctgggtgaaaatggtgcatcctttccatcccattgagttcatccggagcttgctggctcagttccacaaaaatgtttgtccagaacaagacaacactgtaaaaatcctggacttgatggtggcgacagacgacgtactcattgaggagttcaagcagcaattaagtcagaagttcctagtggtcttggaggacgttaccaccatggttgactgggaggccgtaaggggctacctacctgacaagaaaaatggcagctgcatcgtcgtgcacacgcgacaccatggaattgcatgctcctgcgtcgggcatccataccgagtatcggagctggaaaagttctcggccgattattcagtccgtgtcgttttcaaggaggttcccgccggatcaggggagggtaccgtgaacgaggaaactgcacatgaacgggagaaaagtggtccatcatgttttggccgtgatacagatctaagctggttgcattcgctcacgcgtctaggcggtgtggtctcagtgtgggggatgtctggtgttggcaaatcatttctcatccgccaattcttcaataattacatgcgccaatcctcaaaaaatacagtgactagaaatccttattatgacaagaagaagtttggttgggtggatgtaccccgtccccgtccattcgatttaagggacttatcgaagagcttgcattcggaattgaatcctgctttcaaagacgaggtgatgtccacgatcaaagatccgattcaacagtgccgtgaatatctgcagagagaagaaaactggccctacctcattgttatcgacggtttgcaatccaaagaagaatgggactccataagacgtaacatggatttcaaatttaataccagttccggcaaatcaaacaggtctggggaaaaagtgggcaacgttgtcataataattacaaatgaagagagtgttgccaattactgtgcaacaaagaacaataacgtgtggaacgtcaaaggtctagaagttaccggagccattaaactcttcgatcagaggtggggtaatttagatgaagatttcaagggttactttagtttattcttcataagggaagatgtggatttggaggttggcgatgatgaagtcggtcaggaaggtggagatggcgtgaatgccaccgaccttggaggcaacgaggatgacatagcgcgggagctcggcggggaagaaggccttgacgtcgaactgccggttgaggccgagctcggagcgggtgcggacgaccatgttggtgtagccgaggaaaaggaggcgtcggaggatggtggagccgacgaggccgcagtggctggccacgaagaccttggcacccttgttggcgaggaaggaggtgtgtggacccgcaaaaaggaggagcagggaaggaaggtagcagctaatcagcggcagcgcttgtggccctgggactgggagtcggaggagaataagatgttggaaataaagcatcggaatgatgaaacaaggcatatcttattgcagaaatgcggtgggcttcccaaggttatttgtgctgtagctgagtcattgagcatggttggcgacataaaagaagaggataaccttgtgtcgaagttagcggcaacacgaagtctagatgacgtgttttcctggttgctttcctactttcgttcttgtccggattccctgaagccatgtatcttgtacctgtcaatcttccctgtgaaccacaccatccggcggaggcgtttggtgaggcggtggatagcggagggatactttagagacaacaaagaaagcaccgcagaggagaatggggaggggtccttttccaagctcatcgatctaagcatgatccaggcgccaagaacaagagttgatggcaggaggaggatgcccttgtgccaagtcaatggtttcgtccgtgaatacatcgtctcacagttagtggaagagaatcttgtctttgaactggagggccattgcagaaagaacatacagcgcacaggacggcaccttgccatagacaatagttgggacagagacagaaatgtgtttgagagcatcgacctttcattgctacggtctttgactgtgtttggtaagtgggaaacattcatcatctctgacaacatgaagttgctccgggtgttggatctggaggacgtgtcttcaggtgttacaaatgttgatgtcgagaagatggtgaagctgctgccccgcctcaagttcctctccctgagaaggtgcaaacaaatcactcgcctgccggattccttgggagatctaaagcagctccaaactctggatatcaggcatacatctgtaatcaagctaccaaagagcatcatcaagctagagaagctgcagtacgttcgtgctggtaccgcaaagcatcagcaagctagtgaagcagcagagaacccttctatggcagcagcacctgcgatgatgagcagaccatgtattgctactccaggatcccgcttctcaaagttgggcttgggcttacactgcaggcatggctctcatagtggcgtcaaggtacctagagggattgggaagctttccagcttgcacacgctgggtgttgttaacatccaagcgtgcggcgaggatggcattctggaggatctcaagaaccttacccaactgcacaagcttggagtgtctggcattaaccgtaagaacagcgagaagttattttcagtcatcttacgtctcgcccatctggaatccttgtcactgaaaatgcaggccaaccaagacaatgaagctgctggttgcatggccgacatctcgtcgcccctggagaagctacagagccttaaattgtacgggttagttgacaggttgccgtcatggatcatgcagatgtgcttgcagcttcctcgacttgagaaattggatttacagatgaaaacgttgcctcagcaggagctggattttattcttactctaaaatatctaagaagtctacgtcttcggttggcggagtttcaagatggtgaactccgttttggttggactattgctcagaggtctactagttggattatcgacatcctcgagattgtgtgcaactccagcttacaggctgtaaagtttggctccaaaatacacgttaaaatcctgaagattcgctgctatagtgtgtcttcatcactacaattctctggtctagagagcatggaaactctcaaggaagtctggcttagcggatcttacgaactaggcttcaagcaacagttggaaacagagcttaaaggcaacgaaaacgaacctattctggagctggagaaaccatcatcgtcaacctaa

SEQ ID NO: 93984 - DNA, 174 bp, Oryza sativa
  Clone ID: PAT_MRT4530_92315C.1
atggcgccgctgctacaatcgcgcgacgagaaggagatggagtcgcgggaccacccggaccacccattagagccgccggtgggtgccgccatggtgactttgacaagatggtcgagcgatggcgccggatatggagaagaacgacgagaggggaggggccgagatgctgcataa

SEQ ID NO: 93985 - DNA, 275 bp, Oryza sativa
  Clone ID: PAT_MRT4530_92316C.1
cgacaatgaggcctagagtttttcttcttatcattaagaggttccctggttcgaaagaaagggacaatactatacgttgatgatagacagcccattatatggcgcacacatactacaggcgagtcgatcactcttgtagtgatcaaagaactccttatatttttactagctaagtacggggtaagcactttaattagtaccgggacgagacgaccccaacgatgattataattagattcattagaggccgaccagggggaagatctaccagaaag

SEQ ID NO: 93986 - DNA, 689 bp, Oryza sativa
  Clone ID: PAT_MRT4530_92317C.1
gcacgaggccaccatccattcccccatcgccaacatccctctcgtcctccgtccatcgagccgcccccagccacctcttcgcccttccccgcctcgctcccccagccagggaaggacggtggcgcgcggatccgccgcctcccgtcctcgggagcgacggcggcgcatgaatccagaggcctccgtccttgggagcggcctggcgtcagcgggagcgccggcagcacgcggatccgcccgcctccgccctccggagcggcggcggcgggcttaggcaggcgggagcaagcggctacgatggcggcggctgcggcgatgacgacgacggtggctgcaacgatcttccatgccgggtgttgaaagcgaccgcggcggcaggctccatccaagaagtggccgcggcgacggctccgtcgaagaagcggcggctgcttcttcgtccacggcggaagggggaaggcccaagaaacggcggcggatttttcgttcacgaccacaccgagtcaagaagacgccgggggaggccaagaagcagcaggtggagacggggggtggctgcggagcgccaccgcgacgaggccacgaaggcgagccggtgacccaagaaggcggcagcagcgtacgggtgcccggattcgcggacggaaaagccttattaactcatacccttaaaggaattaggcgcctta

SEQ ID NO: 93987 - DNA, 390 bp, Oryza sativa
  Clone ID: PAT_MRT4530_92318C.1
ttggtttttttgttttttgttgtgtttttttttttttttttttgttatttcatttttgtttcgacactgtttttctgtcagtcgtcacttgtttccctaagcctgggggaaaaggcggcacaaaaactcggggatgggggaaggccaaggcccgggcggccaaaccgggcatacacaacccacagaggggcgggtaccaaataccgggggggggcagctaaaaagaccccgtggggcctcgaaaggcacacaaaggggctcctcaaaaggcacgggggatgcccgaaaacgaggacctccatggtgaaaaaagggggagggggccccccgaacaaaggtgggagaaaaccccttaaacccgggggaccccatgaccaaaagggggggggc

SEQ ID NO: 93988 - DNA, 342 bp, Oryza sativa
  Clone ID: PAT_MRT4530_92319C.1
atggcggcgccggcggcgaaggagaggagaagggcccaggcgtcaattcattcatgggcttcattccaggccgtgtttgtgatcgggagcaaggctcacgtgtgcatcgacagatcacagcgtgaagccgtggagaaaacaccaagcccagcgtgcagctgctttgaccgggcgtacgtgcatccgatcgatcgatcgatcgatccgagcagatgccgctgcggctgcgccctgtcgcgggggctccgcggcgcaacccgcgggcgctgccgccaccggcaaggggacatcgtgccgagaatctcaggcgcaggggagaggcagcacggcagcagccagtag

SEQ ID NO: 93989 - DNA, 3237 bp, Oryza sativa
  Clone ID: PAT_MRT4530_9231C.1
atggagatgaatcggccatgccaggtcgatgggagatggtggtcattcgcgacacgcgccgtggttcttcgtgtagggatgatgggccgcgcggaccgctactctggagatgggctccgcagtcttactgggccgattggaggatcgaggcggcgggaggacgtcgtcgggtggttgctggcgctgttcccggacctgccgctgccgcctccgccggaggccaccgacgaggacctccgcgccgcgctcgccacggggaggctgctctgcgcgctgctccggaggctctgcccgggggccctcctcgacgacgcctccaccgacaacgtcggcaggttccgcgccgccgtcgagcggatgggcgtcgccaagttcagcgcctccgacctcgagaggggccaaatgacggctgttgtgaactgcatccttgccctcaaggatcggttcggatcgcgcggcggcgatgaccaccggaaccctggtttcctgaccagatgcgacagcgaagggggccggaagcgcgtcgaatccaagctgcaaaggatgctcactagcccaattatgtcaggtatacctggagtggacaaactgacaattgcaactgattttgtgatggtatttcagctcaagcaaggaggatatgctgatcagctcggtggcaaatattcagacttgctgaaatccactagcttggataatgcacctacgcagtcacttctgggtgttttcaacagcatccttgatgagagcattgagaggaagaatggacaaataccttatcgcattgcttgcttgctgaggaaggtcatactagagattgagaggcgcatttccacccaggctgggcatatacggaacatggagaaagacaagtttggagataaagggcaactagcagtggaagatatggaaaggttaatgaagtaccaggatgatgttgttagattgatgaaagaaaatgaggatttggtgaggttgctgagagagaaggaagatatggttaggttgctaaaggagaaagaagatatggttagattgctgaaggagaaagaaggcatgattaacttgaaaacagtcaaagctgaagaaacacaacgaatagaagatgaagataaatataggataattaaggagaaggatgatgctttagatagattggtgaaggaaaaggaagaaatgattcggttgttgaaggagaaggatgatgtagttagactaatgaaggagaaggaagatttgcttaacttggaaaaaggtgaagttgagggtacaactaaaatgacagatgacaataaagacaggttgattaaggagaagaatgatgttgtgcttaggttgacagaggagaaggaagagatggttaggttactaaaggagaaggaagatataattagacttatgaaggagaaggaagatatggtttacttggaaaaaggggaggttgaggatagaaagcaaatgacagatgacattaaagacaaattgattaaggagaaagatgatatagtgtttaggttgacaaaggagaaggaagagataattaagttgcttgaagaaaaggaagatataattatacttatgaaggagaaggaagatatggttaacttgggaaaaggtgaggatgaggacagaaagcaaatggcagatgacaataaagacaggctgattaaggagaaagatgatatagtagttaggttaacaaaggagaaggaagagataattaaggagaaagatgatatagtagttaggttaacaaaggagaaggaagagataattaagttgcttgaagaaaaggaagatataattagtttgatgaagcagaaggaagacatgttcatgtctatcaaggagaaggaaaataaggctgaattgaagaaaatcgcggatgaagatgcagcaaggtcaattaaggataaggctgagataatgaggttgatgaaggagaaagaagatggtaacaataccattttgaaacttaagaaggaatcggaaacattaagatcatcatacgaggagagctgcaggttgttagaatctaagaaggaagatgtggccaggcttctcacagacaaggaaaacaatgacagtataatttcagaactcaagaaagagcttgaagaaacaaagagattgcatgaggcacacaatgctgtcttcaaggacatacagccactaattagatcagttcttgatggctacaatgtctgcattttcgcatatgggcaaactggatcaggaaaaacatacactatgatgggacctgaaaaggcaactgagaaggaatggggagtcaattatagggcattaaatgaccttttcaatatttctcatgaccgtagagacacaatcacttacgaacttggtgttcagatgattgagatctacaatgagcaaatccgtgatctccttggcagtgggatccagaacaccatccaacccaatggacttgctgttcctgatgcaacaatgtgtcctgtcacctcaacttctcatgtaatcgagctaatgcaaacagggcatgacaatagagccatgagtgcaacagctttgaatgagaggagtagcaggtctcacagcgttgtgaccattcatgtccgaggccaagatctgaagactggaaacactttgcgtggcgctctacatcttgtggaccttgctggaagtgagagggtggaccgctctgcagttacaggggacaggctcaaagaagcacagcacatcaacaagtctttggctgctcttggggatgtcaacccagatgtttcatcttacacagagactttaagtactctgaaatttgcggaacgagtgtctggggtggaacttggtgttgctaggagcaataaggaggggaaggagggaaaagatgtcaaagaattaatggatcagctttcacttctgaaagataccatttcaaagaaggatgaggaaatcgacaggcttcaattactcaatagtagcaccagattgaagccaacgagacaagctgattccgtattgaagcattcgtcctcttccccgggcattacatccctagggaagggcacaagtgttggcagtggggcagcttctgatcttgataacttctccgacaccagtgacaggcaatctgaagctgggtccatgctctccgttgatcctgagatttctggccttgcggatgtcgactcggatggaaggttaagcgatgcttcggatggtatttccatgggtgcagaagctgatagttcagactag

SEQ ID NO: 93990 - DNA, 1673 bp, Oryza sativa
  Clone ID: PAT_MRT4530_92320C.1
agaggaaaggccacgcgaggccctgcattttatagaaagcatgaagtatttgcaaactgatccttatatagcgctggggtcgccagcttgacatataggcacagaaaacaaaagcagaagggtgaaagggatcaaccctcacaacatcacaacctttcagaacaaactgactgagcagcagcaaaacacactaacaggaaggagaaaaaaaaaccagatcctaaagagccttctaccccaaaggtgctcagggcatccgctgtgcattccctggaaatcggcctttagttgtgttgtgttccaggggtagggtacctttcttcccagcttcagcactatgcgtaccagaagtcccctagccgagtcaagaagaatgaatgccagttgatctcaaaggacacagccgtcatgtagttgaaccagcgtttccaatcgtccacactggtaatcgacccagatgggaggtcgagcacatatgcgctgttagggtccgaaaggtagagggtgagcatggtgccactctcctcccctatgcacacagtggaaagcgactccgttccaaacaaccccatcttcacgccaacacaaatcgattgggtgcaattccagagcaaacgaccactctcctgtgtttctagcttggtccaaatatgaagtttgttgtcacaaagataaagaagcgaaagcctctcgtcgacgcttacgtacaaccaagattggtggaagacagtggggggaggatcaattgggatattggttgcgccgatgttgtctgtgtcaatgctcacatcaagggtgtagaggctttcttctccccaactgaagagccagtgtgcgccgccatggctgacagctgcaactctgtttccagagggaccccagacatagccccggatttgttcagagcaatttctgggcgtgctccaggatatctcaaaaatgaccgccgccgcggcggcactggcagcggctgaggagaatctgtggaggtatacctgatggttgccatggtggatgctgaggaggagcacctggaagaaggtgttgtagccacctgatgggttgcggctgacgcggtggtcggcggctgtgaggatggcgtagcctctggcgccgtctttctcgaagcaatccatgggtagagggggcaggacgtcgtggctgccggtgagcaggttgcagacgcagaggtggagcgcgttctgcggcgccggcgagggcgaggggaggacgcgcacgaggaggagcccgccgcgcgccgccaacggcttggcctggtcgaagaggccggcgccggcggcgttgcggacgaagtcggtgaggaacagccgccgccgccgcccggtgctaacgggtgggtcacctgtgcccctgctcggcgctgcgacgagcggcggcgcgcgggtcgggaagagcttggtgagcttccgcctcgcgttggcctggatctggtggcgctgcgcgaagaagccgaggagggagggcacccgggtgcccggcggccagcggcggcggagtaaggcctggtcggcgatgaggcggagccaccgcttgcacgctgcggcgcagcggaagagggacgtcgggtccggcacccgcgcgaggatctcgatgacgacgtcctccggaataaccggcaccgcggcggcggcggcggcgcccatttccgccat

SEQ ID NO: 93991 - DNA, 415 bp, Oryza sativa
  Clone ID: PAT_MRT4530_92321C.1
aacaaaagaagatattaagggttcttacaaccttatctcattacatgatgcacatagagcatttgaaacggggagaggaaaaacagacttggtcagtatgaggtttgaccagctaatgcaccgcgatgcactctatctaggaaccacacgagaggatatactttctattgagaaaactccccggcaactacagatcgatcggccctcggaccggctccagttatcgttatcagaagcagcattacactgacgctacacgagccttggtttttccctggttgaacattttacctactgcaccactactacccgttcgacggcatgcctgagaggacgtacatgtaactctccacgcatcggcagtctcttcttctatgacgtgcttctactttgagcaggccgacgccaactgcac

SEQ ID NO: 93992 - DNA, 867 bp, Oryza sativa
  Clone ID: PAT_MRT4530_92322C.1
atgccgtgccccgccgccagcctctcccctccggccagatctaggaggaagggagggaggggagccgccaccggcctcccccctcccccctccccctctagccagatctggaggggagggagggaaggaggggagcggccgccggccgccctgcgcctgacgatgcgcccggccgccggcctcccccatcccccctccggccagatctggagaggagggagggagggaagctgccgccggccaccccgcgccgggccgccgtgtgctgccgtgtgcctctgcctcgccatcaaggccagcgtgctcggcgatggcgtcaagctcgaggatgtcgctgtcgacctcccgctcctcgtcaactactgcggccgcaacgtgccagagggtttcaaggtcagagctcgccgctcaccgtcgacgaccagtgccaaatttcgccgtcagccggcgacgcgcgacggaggagctagggcagatccgaggcattcgtcacggctgccgtggtcagatggcctcctgcccaagctactcggcgtcatcttcaagcaactgaactgcctcgtcgaccgcattggcttcacggccgtctaccgcccatggcgcactgccgcggccttcgtcaacgccctgcactgcgggctcccgtggctgctcctcccgtcccacgacacatcgtcctacttcagcctctactccgactctccggcttcacccgccacctcagcctcctggaaggcgtctgggacacgtgcttgtgcggcgctcatgacggcggctgggtcaccgtcgccgtcgacccgtgcgccgtggcgaggattcgcggccggccgtcaacgtcttcaccggcgtgagggttatacacaatga

SEQ ID NO: 93993 - DNA, 491 bp, Oryza sativa
  Clone ID: PAT_MRT4530_92323C.1
tttctgatatcattgattgctatcctcctcctcctccttcctcccctaaatctctagagagttccacatttggtttccaccctgtttctttggtaaccctgaagaccagaggaggaaacccggtctatccttccctaattatccccgttgggcagcgttaattcgaagcacgaatcacagctatgcttttagaggattgaaaccttatatggattatctacacagaaccctcttcacattttgagattgtagccattagtatctattggagtagtttcgccgtagcatgccggacttgtcagtgagctgacctgaaccaagaagtactctgaaaagcccattgttcaggatcagtttcaattgaggtatgcaggtcacgggaatcaatattgaatttagtagtttgattgtgggggtaattttgctttgctatccccactttattctcaactgtactccctgattgggagtaaaaaaaaaaaaaaaaaaaa

SEQ ID NO: 93994 - DNA, 224 bp, Oryza sativa
  Clone ID: PAT_MRT4530_92324C.1
atggctaacggctacacacacccatggcccaatgcctgccgcaagagcagcccagccaacgaaccagcactttgggtgacgagtggctttgggcagagggtgacgagtggctttgggcaggatttggcgcaaggcggcgtcgaccaaggtgatggcacggcgtggctagagcggcagctagaggtggagagagaggtagagcgtggcgacggctctagggcaag

SEQ ID NO: 93995 - DNA, 208 bp, Oryza sativa
  unsure (1)..(208): unsure at all n locations
  Clone ID: PAT_MRT4530_92325C.1
gtcaggagtagtgctccaacggtcacattatcctcgctgactccgccgcgcgccgcgtgctcgccttcctccccctcgcgccaccatcgccgccgccgatncctcgnacncggatagcgagggggtctccgncgtggncgnctgcgcgcaccgcggcnattctgncggnctccctcnccggagtcaaccttggggatagcctgaaata

SEQ ID NO: 93996 - DNA, 485 bp, Oryza sativa
  Clone ID: PAT_MRT4530_92326C.1
aaaaaaaaaaaaaaaaaaaaaaaaaaaaaaaaaaaaaaaaaaaaaaaaaaaaaaaaaaaaaaaaaaaaaaaaaaaaaaaaaaaagggggaccagatataaaaaaaaaaaaaattaaaaaaaggagcaagaaaaagggggggggcgctttttaggggacccaattttaattcccctggccggcaaataaaaactttggggttggggaccccttgttgtttttcccgggcgggggttttaaaaacccgggcgtggaaaaacctggggtttccccaaataagccccgttggagaaaatccccctttttccgggggggttaaaagaaaaaggggccgcccccatggccctttcccaaaaatggcccaccctggggggttatggggccccccctctttccgccctttatacccccgggcggggggggtttccccctatggcctcccttttttttgccggccccctagtgccccccccttttttttttttt

SEQ ID NO: 93997 - DNA, 543 bp, Oryza sativa
  Clone ID: PAT_MRT4530_92327C.1
atggcggccgagttccggcggcgcggggacgacccagatgatgtgtatgggaccgtggcacgcgtgctctcctacatccactacaccctccccagcccgcccgtctccgctaccacacgcctctgcgcacttaccccgcacgacgtcgtcgaccgcatcagcaccctccctgacgagctcctcagcaaggtcgtctcccacctccccgtcaaggatgtcgcgcgcactaccgctggagcccggtatggtgctctatgccgctcgcggcggatgagctccccaccacgccggactgccgccgggtcccctccgatccaccgcccactccgtcgcaggcccgctccatggcctgcatggccggtcccgccttcctcactgacctccggaccagttgacggttgcccaatagcctggtgctctctgccggaaccacctcatcacctcctcgggccatcttcatctacctcctacgccctgtcccggtgcaagcagaagcggcggcaccgcggctgtggcatcggacgacttcgacatcaaccttga

SEQ ID NO: 93998 - DNA, 330 bp, Oryza sativa
  Clone ID: PAT_MRT4530_92328C.1
atggccgtcgacgcgatgttcggcagcgtcgccgtcgcgctgctggcggtggtggtggctgctgcggcgctgcggcggtggaggcggcggcggcggcggggaggcgggaggccgctgccggggcccgtggcgctgccggtggtggggcacctgcacctgttccggaggccgctgcaccgcaccctggcgcgcctcgcggcgcgccacggcgccgccgtgatgggcctgcgcttcgggtcccgccgcgtcgccgtcgtgtcgtcggcgcccgccgccgaggagtgcctcggcccgcacgacctcgcgttcgccaaccggcgggggccataa

SEQ ID NO: 93999 - DNA, 126 bp, Oryza sativa
  Clone ID: PAT_MRT4530_92329C.1
attgaaacaaaacgtgcacttatggggggtcatttcaaagggggatgttcactctctaaatcttatcaatgaggtttggcttacagctattaataaaccataacgggtacgaaataccggcatcaa

SEQ ID NO: 94000 - DNA, 367 bp, Oryza sativa
  Clone ID: PAT_MRT4530_9232C.1
aaggagcccataaatccaaaaatccggaggtttttttaaaaggactcttttcaacatccataaaaaacaaacaaaatttgtttcccacccccactttaaaccctaacaagtcaactgacaccccttaactaaaccaaaaatccccgggactgcataaaaaaaacatcagtgtcaaacaaaaagaacccctcaaaacttgacctcctttaccccataaaaaaaataaaggaagggtgggtcgggggctccccccttttagtaggcaaacaccaaaccccctttattatgcttgctttcaccaacaaaaaactaaagggccttgaactttccaaacaaatacttgggggcccccccaatgttcttttta

SEQ ID NO: 94001 - DNA, 300 bp, Oryza sativa
  Clone ID: PAT_MRT4530_92330C.1
atgaacgactaccgacactggtacatgggtaccggggtcgacaaccacacgacgggcatggggcgacaccgaaaggacgaggacggggcagcgagaggacggatccttaccaccacgcgacgaggcgtgggaacgacaacgacgaacgggcgcggcggagacggctcggggacgatggaggcgaccggcgagggaacgacgtcggcggtgatccttggacgaaggcgagacacggccggcgcaacacttgacgacgcggagccgaggacgaagatgacgacggggctgcagcaaccttga

SEQ ID NO: 94002 - DNA, 630 bp, Oryza sativa
  unsure (1)..(630): unsure at all n locations
  Clone ID: PAT_MRT4530_92331C.1
cggacgtgtcagcgggatgtacgcggtgcagacgctccggtgggcggacaaggagaaggccgaggcggcgctcgtcgaggtgctcgtcgcgctcagctgcgtctgctggtacgaggagcggcggcgcggctccgtccgcctcctctgaatccatccattgaaccgttcaaccatccaacacgcgggaaacttttgcccaaagattctacctttggcttttctccttcttccttcttcctcttcctcttcctcgcttcatttgtcaatgctttgattgaaagagttgattttttttgttttctttttgggagggagggggttggtagatccaggttagaaccggtgaactattcaacgggttagagtagtagcagtaacagtaatagtttgaaaggttggagggagaaaggaaaagtaaaaaacgatggnaggagagtttgattggttggtgtgtgtgtggcgacagtcagtggtctgaggctgacatgccgggcccgcgtgtcggccttcacactgggtgacggagtccggtggtgtaagacgtgttacaggaaatttgtacaatatacacgattgattctttgaaaaaaaaaaaaaaaaaaaaaaaaaaaaaaaaaaaaaaaaaaaaaa

SEQ ID NO: 94003 - DNA, 171 bp, Oryza sativa
  Clone ID: PAT_MRT4530_92332C.1
atggcgtgtggctgcgcgcctgcgcccccggggccactccggcgtttcgcgtgggcaactgggcaaccgcaccgttcgacgggccgaggggcgacgaggactcggaggcgggagcgctgcgtgcgcgtgccgcagcgcatcctcaccgactacggtggaaaggtggtctag

SEQ ID NO: 94004 - DNA, 315 bp, Oryza sativa
  unsure (1)..(315): unsure at all n locations
  Clone ID: PAT_MRT4530_92333C.1
ccccttggctgcaggattcggcacgaancataaaaccccgctccactctcanggcaggnnatcngcagcgaatggaccaacccaccgggcgggnaatggggttcacctcctgcttcctccaccaatccanggggncgcgtntccncgcgcgtntcctcccnggtccccgggggaaacagnaancacctcctcctctnccgctcccaaaaaanaagganaaanacccaaattctnccnccgcgcggggctcgcgctgctggggcggaaacnanagccgcngtgggggtntaaagtngtgcccccccccccccggct

SEQ ID NO: 94005 - DNA, 3728 bp, Oryza sativa
  Clone ID: PAT_MRT4530_92334C.1
atgtcgaagcccgcggaccagcccccgccgtcggacatggaggtcgacgccgcggccgaggagaagccgctcgtcaggttctccatcaacgtgctggagctcatgagggaggcgcagatgcagcacggcctccgccacggcgactacacgcggtacagtgaattggggattcttcacagtacagttgatctagccctaaagggcaagtgcaatgtatacaggagatgtgaaaagtctaaaatgtccataatattcttaacacccccattcaaatgcaatgatgcagtaacattgcatttgaaaggctgtggacgggttggagcagatgacgacgatgagaggcagcacacatgtggcggccgcgactggcggcaggcacgcaacaaccatgacgaatgggtggtgactgcgacggatgacgatgttcatgacctgcaggagatactgtaccgcacgtctcagaaggttatacaagtctctcaagtttctgcatggccgtggctattcccatcacccagcaaaagtatttattattatcgccatatatgtagatttagaaaagctgtcaaatgggcaacgcttttttcacatttatgttctctaaaaggagattccaggacgtctttggaagctgaggcatatgcttcatacatgaaaggtaccttgctgtttgagcaagagaagaacatagaggcagcaatgacaaatttcaagaacaccagggctgtatatgaggagcttgggaaatatgggagtatagaaaatcaacttttatgccgtcagcgcattgaggaagtggaacctatgattggattttgctctcgcaaactaggcggatcagctttgcaagcacatgaactactagatctggaaaaggaggggcctgcttatgatcttttcaaggctaagattgaggtgagggggcagatgggggctgtattatctgagacaagatcgcagcaggcagcttccatgaccgagtttagctggcttggtcgcagatttccaattactaatgcaaagacccgtgtctccattttgaaagctcaacagctggagaaagacttgaatggtgcaaacacagaatcagttccagcggacaaaaaacttggcatttttgacaaaatattttctgcataccatgacgctcggagctgcatccgcaatgacttggcttctgctggcaatgctgagaatataagagatgaattgaatggtcttgacaaggctgttagtgctgtcttgggattcagaaccattgagcgaaaccaattactcgttagtattgctaaaagcaagtttaccaagcaccgggatgagaagaatgagaaaatcacaaaaccagaagaacttgttcggttgtatgatctgcttattcaaaatacaacagatctgactgatttaattagctcaggaagggataaaaacaaggaagagaacacttttattcaggagtatgagctgaaaagtttggctttccgagctgagagatgtttctatttggcaaagtcatacagttcagccggtaaaagggctgaatcttacgcgctgttttgtcatgcccgttcaatcactgattctgcactgcaacagctgactaacagtcctgacaagtgggtatggaatagtggacgtaatagtggtggcaacggccacaataggtcaatatcatttgtagctgccatgatagcgggcactatttattggcaaaggaaagccttagtccaagatcttaaggctctttctgacagctgtagatccaatagcttcatagaacatgcgacaggtattatggaggaagagaatgttcctgaaagactttcgaaaggtgtctcaacattgtcacttggtgaacgaaagcaggctttccttcttgatatgctagaaagctatgaatcagcactcggtgaatcaaataccaaaacaccatgtcgcattgcacgattcccacctccattccaatcagttccgtgtaatcctattgttcttgatatggcctacaatgcgatcgagttcccaaacattgagaacagaatgaagaaggagaagaagggtcttctcagcagattctggggctgaaaagaagggagggcgtagttcgacaggattatcttcctcttggattttgatacattagtttggtggtttgaattggtcttttcttttgccatgaactggaacatggcactctcgattggtggaatggttttgttgggcatccctttccccttaagaatgtcatactttttttttgttaggcaaaaaaatttgcgttttcaaagtacatcagttttgaatgtcacactaactcggttacatactgtatgaagagatgattagatcgcagttcagtatttaaattgtcaagccgccaccgccggctccgcccgctcctcctccccgccgcttccctccgcgccttcgctcctcttctctcccactgcatcgtctccggcctcgcgcgcaaccccttcgtcgcctcgcgcctcctcgtcgcctcctcgcgcctctccctccggttctccctcctgctcctctcccacctccccgcctcctccctctcgcccttctccttcaactccctcatccgcgcctcgcctccccgtctcgccctccagctgttcgaccaaatgcgccaccgaggcgttaccacggatcgttacacgctcccgttcttgatccatgcctgttcttccggtgatcgtcctctctgcgaatccctgcacgggcaaagcctccgccttggttacagttccgtgctcttcacgcagacggcgctgatgaacgcctactttgcttgccggtttgaggttgccgctcgcagggtgtttgatgaaatgcaggcgaaggatgtggttgcatggacgggcatggtgtcgggatacgtggactctgggatgttccttcgaggtgtcgaggtatttcaggagatgagaagctgcgaggaggctgttaggcctaatgtggcaacggttgtgtcggttgcttctgcgtgtgctggactgggctccctggagtatgccaaagggttgcatgcatatgtggagaaggtggggttggaaggagagttgattgtgaagaattcgttgatcgatatgtatggaaagtgtggcagcattgagttagctcgtggcttgtttggtttgatgcctcagaaggacctgcattcatggacggccatgatttcagggttggcttctcatggccatggcaaagaggcagttgctttattctttagcatgaaagaggcgggagtattgccagattcgactacctttgttgtggttctttctgcctgtagccatgctggattggtggatgagggaatatctatcttcaattccatggagaatgagtacaaggtcacccctgatatcaagcattacggttgcatggtagatcttttcagcagggcagggcttattgcacgtggttatcagtttattgaaagcatgccttttgagccaaacttggcaattctcggggcattattgagtgcttgcagtatcaacaatgaattggatattggggaactagtgatcaagaggattgagtctgttcgctcagataaaggaggtgctggtgtgcttctgtccaacatttatgctaaccaaaacctgtggcatgaagttgattctcttagaaggaagataagagatgacactatttgcagaaagccacctggccagagtgtgattacatcagatgtttctttcatggcttcttga

SEQ ID NO: 94006 - DNA, 1912 bp, Oryza sativa
  Clone ID: PAT_MRT4530_92335C.1
gccatgcgtttggtggatctgaaaaaaaaaatcctgattcctccccaaatctcacgaattctcatcttcgcccacctctcctcttgatctcttctaccaagaattctctgcaggggaagaagaagcagcggcaaattgtcatggcgaccaaggttgtcgacaagctgacggtggcggcctcccctccggcggacggcggcgtgctcccgctgaccttcttcgacgtgccgtggatcttcaccggcccggtggagcgcgtcttcctctacacctacccgcacgccgtcgaacacctcgccgcccacctcctcccctccctcgcctcctcgctctccgccgcgctgcaccgcttctacccgcttcttggccgcgtccggccgtgttctagcggcggcggaggcggagggtacgagttctgctccacgggtggggatgccgaccgcgtcgagctcaccgtcgccgagagcggcgacgacttcgaggagctcgccggcggcggcccgatggatgttgggaggctgtactctctggtgccgcggctcccgcgcccggaggaggggagctccgagctcgcggcggtgcaggtgacggttttccccgggaaggggctcgccgtcggcgtgtccatccaccatgtggcctgcgacgattccagcttcatgcacttcgtcaagacctgggcggccaattgccgggtggcttccggtggggacgtcgatgctgtgccgccgccgccgccgccgttcttggaccgtggcgtggtcgccgatcccaacggccttgcagccaagacgctcgatcaaatgcggcagctggcgaacagcgggccacccccgccaccgccgtccgggccgccgccgaagctgttcatggcgtcgttcacgctcacccgcgacagcatcgacaagctcaagcagcgcgtcacggcgagcggcggcggcggcgtccactgctcggccttcaccgtggcgtgcgcgtacgcgtggacctgcctagcgcgagtcgacgccacctccgccgccagggagcgcgcgcacctgctgttctcggtggaatgccgccgccgcctgaccccgccggtgccgcaggagtacctcggcaactgcctccgcccttgcttcgtggaggtcgacacggccggcctgctcggcagcggcgccgacggcgtggtgacggcggcggtggccatcggcgcggccatcagggggctcgacgacggcgtgctggacggcgccgacgggtggttccagaagatcgtgtcgctgatgccgcaccggccgatgtccatcggcggctcgccgcggtacggcgtgtacgacaccgacttcgggctgggccggccggcgaaggtggagctcctgtccatcgacaagacgcccggcacggtgtccatggcggaggcgcgcgacggccacggcggcatcgagattggcgtggcgctgccggaggccgacatggcgcggttcagctcatgcttcgccgacggactgaagcagctgtgagtgacgaacagcttgttgcatttcttgctttcttgctgctacgaattgttgcagagttcagaatttgttcagtttggatgtgattctgtaatgctagctgttggattgcaatcgttgatcgatcacataagcgattgtgaatttgcaattgtcaatctatgaaataatcagataagctgtaatctattctacatttttttcagagatggagcaggataaggcctgcttcgatcaacttctgttataaaaaagacactgaatattcggctgtatactgcatctgaatctcctttttgcttttaagcattaatagtgagcttgtgctgaatttaccgacggcgatggagacacgagagaaacgatggtttggtgaggaatgtgtattgtttaaccgagtaaatctggtgctg

SEQ ID NO: 94007 - DNA, 252 bp, Oryza sativa
  unsure (1)..(252): unsure at all n locations
  Clone ID: PAT_MRT4530_92336C.1
caccgactcaccgtanactactagccatggctgtcgccgcaagaccgccgccgtggcgtgcctcctggtcgtacgcctcccagccgtggcgggggtcgacggcgcgacngcgaactccccgtcccnggcgccggcgcnngncgntgactgcnccgcggaagccctccaacgtngccgactgcctgnactacgtnaccccngggaaganagngcctagccggccgtcgaaccattgntncggggaagtnaaag

SEQ ID NO: 94008 - DNA, 498 bp, Oryza sativa
  Clone ID: PAT_MRT4530_92337C.1
ggaaacaaaaggactcttttctatttcaaaagaattgaagggcctcatttttgaaggaaacagaggtaatcaaaaaagaaatttttgttagtgttagcaactataatttttccgccgggtcaaatcctttcacaaagctgagttgcgccagataactgctttccgcaaaatcatgcaggctccggggaggccgagcaccttcattatcagggctgcttgttcctttattcaccatttgtctgcaagcattggaatcctgtaaaagttttaacatttgctcttcgatggtcccacgcatggcccaagtctcaacaaatttgggacgagttgcccccatacgatgggcccgactaataacttgctcctccctactcctatcccattttgggtccctccgaaaaaccttggagacaaatctggaatcaaggcccagggctgcggttccctccctggctaaggccatgcctgctgggtcctgtttggacttggggggggaac

SEQ ID NO: 94009 - DNA, 231 bp, Oryza sativa
  Clone ID: PAT_MRT4530_92338C.1
atgtcgaggcgcggcgactgggtctacgagaacaacggcggaacgtgcgtggccatcgccggcgcggactactgcgtggtggccgccgatacccgcctttccgtcggatacaacatcctcacgcgcgaccactccaagatctgcgagcttctgtacacaacatggttttacagtattgcaattaaggaatggtttgttcgaatgattcactgggatatgaacataggctga

SEQ ID NO: 94010 - DNA, 279 bp, Oryza sativa
  Clone ID: PAT_MRT4530_92339C.1
acgggaaatgcaaggaaagctgcactcattagctacgtgaactcgctactagaactactgacagttgctagatgatacaataattgctgaatcaagggcggattggtcagataatgattgcggacgatatgcttcttgtggcgtttataggcttcttactatctatgattggcctgtagttcatagtctctattacggtgattatggggtgggtactacttaccgtgacttttatcctgtgtggtgctttccttcttatggataatggcgtcgcagata

SEQ ID NO: 94011 - DNA, 2475 bp, Oryza sativa
  Clone ID: PAT_MRT4530_9233C.1
gtatttcagctcaagcaaggaggatatgctgatcagctcggtggcaaatattcagacttgctgaaatccactagcttggataatgcacctacgcagtcacttctgggtgttttcaacagcatccttgatgagagcattgagaggaagaatggacaaataccttatcgcattgcttgcttgctgaggaaggtcatactagagattgagaggcgcatttccacccaggctgggcatatacggaaccaaaataacctgattaaagctcgcgaagagaagtatcagtcaaggataagagtgctagaggtgttagctggtgggatggagaaagacaagtttggagataaagggcaactagcagtggaagatatggaaaggttaatgaagtaccaggatgatgttgttagattgatgaaagaaaatgaggatttggtgaggttgctgagagagaaggaagatatggttaggttgctaaaggagaaagaagatatggttagattgctgaaggagaaagaaggcatgattaacttgaaaacagtcaaagctgaagaaacacaacgaatagaagatgaagataaatataggataattaaggagaaggatgatgctttagatagattggtgagggaaggggaagaaatgattcggttgttgaaggagaaggatgatgtagttagactaatgaaggagaaggaagatttgcttaacttggaaaaaggtgaagttgagggtacaactaaaatgacagatgacaataaagacaggttgattaaggagaagaatgatgttgtgcttaggttgacagaggagaaggaagagatggttaggttactaaaggagaaggaagatataattagacttatgaaggagaaggaagatatggtttacttggaaaaaggggaggttgaggatagaaagcaaatgacagatgacattaaagacaaattgattaaggagaaagatgatatagtgtttaggttgacaaaggagaaggaagagataattaagttgcttgaagaaaaggaagatataattatacttatgaaggagaaggaagatatggttaacttgggaaaaggtgaggatgaggacagaaagcaaatggcagatgacaataaagacaggctgattaaggagaaagatgatatagtagttaggttaacaaaggagaaggaagagataattaaggagaaagatgatatagtagttaggttaacaaaggagaaggaagagataattaagttgcttgaagaaaaggaagatataattagtttgatgaagcagaaggaagacatgttcatgtctatcaaggagaaggaaaataaggctgaattgaagaaaatcgcggatgaagatgcagcaaggtcaattaaggataaggctgagataatgaggttgatgaaggagaaagaagatggtaacaataccattttgaaacttaagaaggaatcggaaacattaagatcatcatacgaggagagctgcaggttgttagaatctaagaaggaagatgtggccaggcttctcacagacaaggaaaacaatgacagtataatttcagaactcaagaaagagcttgaagaaacaaagagattgcatgaggcacacagtcagcaattagagactaaggctgcacaagtaagtaaggagttggaacagaggatagaagaagtaaagcttatgttagacgattctaccaagagaagaatagaacttgaggaattatccgaaactagaatccaattctggaaaaagaaagaagtggtgatcgatcaatttgtaagtttgcaagtacagaatgttcaggatttgaagctatcttctgtttccgttaggcatgaaatcttaaattgtcaaaacaagtggtctgaagaactagctggccttggaaaaagccttaaggtggtaacaaatactgcagaaaagtatcatggagctcttgcagaaaacagaaaattgttcaatgagatccaggaactaaaaggaaacatcagagtatattgtcggataagaccttttcgacctggggaggatgacaagtccagttcagttgaatatattggggacaatggtgaactagttctatcaaaccctacaaaacaagggaaggaagggggcaaaaatttcacatttaacaaagtttttggccctatcactacacaagatgctgtcttcaaggacatacagccactaattagatcagttcttgatggctacaatgtctgcattttcgcatatgggcaaactggatcaggaaaaacatacactatgatgggacctgaaaaggcaactgagaaggaatggggagtcaattatagggcattaaatgaccttttcaatatttctcatgaccgtagagacacaatcacttacgaacttggtgttcagatgattgagatctacaatgagcaaatccgtgatctccttggcagtggtggcgtgcagaagaaatatccttttcccccagacttgcattag

SEQ ID NO: 94012 - DNA, 1365 bp, Oryza sativa
  Clone ID: PAT_MRT4530_92340C.1
aagggaggcagcgggcgagccctagagaagttcaatggcaaagtcgctgatggtttggcaggacttttagaaagtaaaattgaacccaaacgatgttcataatatagaagtgatgcaatggtggattttaacaaccagcctgctctgaagcatagcattgattcaagattggaaattggagatcatgccttttcattttaggtaatatcgaaaaggtcatgttgattcaagatttcatttttacggtcctcttttgacctctttaacattcaaaagcaacctatattgaatcttctttggcttcttggctgatacatattgggaaaaatattgggtaatcataatttttctctcaatttataatcacgggatgctcattccgacgatttcagcatcaattctagtgcatttgcatttgttcggcattcattgtgttgcggtgtatcatgggctctaccttgtctcatttggaaccggaggcatcaagttctgcacttcagccttccgggctgatcagtttgatcttgctgacctactagagacgaataaaaagtgctcatcactaattcttcaactgctactacttcttgatcaacatcggatcccagctatcagcaattgtgcttctctaggcgtgggacaacattggttggggggtcagattctgatgagtctctgtatcgcagtgttcgtggccggtagaagggtgtacaagtgaaataaacctgatgaagaaagtctagtgaaaagtgattcccgatgatttttgcgtctgtaagaaattgacatctgcaactatctgatgatagctcaaccctccatgagttaccgttaactacagaatcaaatttcaagacccatcatactagtgaattcaggtacttgaattgtcaccaaatacaagctgctgcatgttggtaataagaaagtttccaattttgaaattttgttttcttgttgtgagatgtttgttttgcaaagtataggtcctgccattacttaaaatatagtccgtatatgcatcgccactccaacatgagtagtgttgcacacatccatggagtagctttctacaatagctatggtctactcggcattgctcgaatcaaagcactttgccggccacagccaatgcaatgagcatcatgtggaatgctccatcctgcctcaacctcagcgccgccaagttgttcgactgcattggcatgattgaattgttctatatatgaccagtccccagacaccatgaagagcctaagctttgtgcttgggcagctcggcattgcagctgggaactatctcaactccagcatcctcagcattgttgtggtaatgacacgtcgcatgatggggctcgcctgggtg

SEQ ID NO: 94013 - DNA, 243 bp, Oryza sativa
  Clone ID: PAT_MRT4530_92342C.1
atggcgccaattgaccgggcagtggtatttttctactggcgagccccgttcggacacacaccggtcacaaaatggcagagcaaaaggaccctgcctctctgccggaatctagccaacgtgacgaacagtgacgcccacagagttccgctgaccccgccgtacaaggagcagtggagcactggcgaccagggtttaccttatcgtttgggccgagattaccaccaccccgcggtagtgcgataa

SEQ ID NO: 94014 - DNA, 2525 bp, Oryza sativa
  Clone ID: PAT_MRT4530_92343C.1
atccccggtttttttttttttttttaatcacatcggccatgccaatcggcaacaactccatcagggagcgaactcatgaaatatgattctcaggcaagaaattccaagcactagattgcggtgtaattacatggatagctaaagaaccaacctaatcatcagctagaataagcagatcgattaaagcaatcacaaacttggggtggtgatccctaaacaccaccagaatacctaccacagcacagagggtgccaagcatcatgcgcaatcgaaagacaaccatctggttgacaccaatggtaaattcaatattgccaaaagatgaaagtagtccactcaattgaagataggattcatcaaatccatgaaccaaatgtgggctacagcagttagccgattcctccatcatgttattcaatatcaaggggcaaaaggattgagcccctcagcggattctggcttagaagtctgatcatcgcccgcttcgagatttgaggcctgctgctgcggatctctaccttctaatctttcgcttgactttttgatctcctcgatccgcaaaacaacatgtggcattgaaggtcgggcatctgggacttgtgcaacgcagtctatagcaagctgtagtagctgaaccatctgttcctcaacattctgatacctcaggagctccatatcaaacacctctgcagtccattccgagcggacaactgactgcacccacctgggcaggtcaacaccctcatcgttaagagcggcctgactgggggccttgcctgtgagcagctcaagcaagagaacaccaaagctgtacacatctgccttctgggacaccctccggggatcagtaacctcaggagcacggtatccactggcacgggatggtgcggacgatggaccaacaagagcagaaagtccgttgtctgataaacgtgcttgatacgacttgttcaggaggacattggatgacttgatgttgccatgggatgctgatgagcttgttgagtgaatgtactcgacgccacgggctgcagccagcgcaatgcttgatctcgtctcccagttaagcggtgtacggccagaacctctgttcccatgcaaaaccgcagagaggctgcccatgggcatgaagtcgtagacgagcagcttctcgtctttgctgtagtaataggcacgaaggggaacgatgaactcgtgctgcagctcgccaatgtcagcaatccggtcacggaactccggctcggtcagggtcacatccttgagcctcttcactgccaccgtcgccccggattcaagaacagctttgtacgtcgtcccgaatgcgcctttcccaagcacctcggcggatgcacgcagcaggtcctccaggtcgaagggcgccactgcggccgcagacccgaagaagatcagcttcttccctgaagtcgactgaccgagaggggcgtgaggattgcccacggtggccatgggtgctacggccgcggcgctggtcatctcaggtggtttacggccggcggcgacaacggcaggagccgaagacggaggcggcggcatctccatagaccgcgtcttggtgcgtcccgacctgcagcagaggcaaataaggaggaacaggagaagcgcggctcccacggcggagcctatggcgattcctgcaatggcgccaccagagagcttcttgctcttcttgccactttcacccccatttccgcccttgtcgccgttgttcgccggagtcggcgacaccggctgttcgcccggagccggggaaggcgagacctcaccgggacaaggccccaaggggcccccgcacaaccccgtccccaggaacgccgagcgcggcatggtgcggagcgtggccgggatggatccgttcagctggttgaacgacacgttgaactgctgcagcggctgcttgaggtcgggaatctcgccggagaagcggttgttctcgaggaggagaaccttgagccgcgtgaggttgcccagcgcgggtgggatggagcccgacaggtcgttcccgccgatggcgaggcggacgaggccctggagcgcgaggaacgcccgcgggaactcgccggagagcctgttcccgttgaggaacacgttgcggagcgccgcggcggaggtgaggtcgcccgggagcgcgccggcgagcgcgttgaggcggaggctgagcgtgtgcagcgccgtcaggttcccgagcgtcccctcgggcacccgccccgccagcgccgccccggggagccgcagcaccgccaccctgccgccctcgcaggtcacccccgtccacgagcacgctccgcccgggtcgctcccgttccacgccacgtgcctccccaccgcgtccctgaacgccagcagcgccctcgcgtcccccgccaggtcgtccgccatcgccgccgccaccaccacggacagcaccaccatcgccgccagcgccacgcggcggccgctcgccggccgccacgccgcccgcatcccggcggcgcgcagaggaggaagcgagaggaggagggcggcgc

SEQ ID NO: 94015 - DNA, 178 bp, Oryza sativa
  Clone ID: PAT_MRT4530_92344C.1
ctcagaagcactacacttctgaaaaggggaaaataatagcaaaactgagtacaaccaccgtactcagcaagccacaccaatgatgcagacgtgcaagggaatacaaggacagtttgttgctatttgcataaaggcggttgtaaaacattttattgagaaaaagggtaaaactgttgac

SEQ ID NO: 94016 - DNA, 630 bp, Oryza sativa
  Clone ID: PAT_MRT4530_92345C.1
ccggcccggccgggaagtcgtcttcctccttcgctcaacccgcagaagaacacagattcgaagaggcagaggcggcgaagagacgcgcgagccatgggcgtcaccaaggaggatgtcgaggccgccatcacctcctccctcagcccttccagcctcgtggtgacggatacttccggcgggtgcggcgcgagctacgagattgaggtggtgtcggagaagttcgaggggaagcggctgctggagcggcaccggatggtgaacaccgcgctggcgccgcacatggcggagatccacgccgtctccatcaagaaggcgctcacccctgctcaggcgcagccccagccggagccggccgccgataaggcgccccaggcttaagtagttcttgaactcacacctccaaactgttcgatcacatatgcaccacgagtgaaccgatgcacttggtgtagcgtttgtcatgggtgtttgagatgtgcgtcagctctctctgcttgaataatgtgcatacaatggcagaattggaatgatactatgcttgactgcttagaaatttcaataaaaaaaaaaaaaaaaagaaaaaaaaaaaaaaaaaaaaaaaaaaaaaaaaaaaaaaaaaaaaaaaaaaaa

SEQ ID NO: 94017 - DNA, 411 bp, Oryza sativa
  Clone ID: PAT_MRT4530_92346C.1
cttgcttcgtcttgttcgttgtctttcctttttttttttccttagccacctctctccctggatagagcaaaaaccttgccacgaaatcgtcgacactccaacccaggaagaggcaacgaggtgactccgagcctaggtcatgggtgacagccaatactccttctcgcttaccactctcagcccgttgggaaagcttgtgcagatagagcacgcgcctccagatgtcggatccgggcagacctccctagggatcaaagctgccaacggggtagtgattgccaccgagaagaaactgccttctattttggtggatgaaacatctgtgcaaaagattcacgcactaacaccatatattggagttgtctatagtgggatgggtccagattctcgagttctggtgagaaaaaggcg

SEQ ID NO: 94018 - DNA, 395 bp, Oryza sativa
  unsure (1)..(395): unsure at all n locations
  Clone ID: PAT_MRT4530_92347C.1
ggggggggggnnnaanaacaaaagccanacncgggggangaaagaaccaacaggnncagagaacacgcaagcncagaacnacacancaccaaaangggagcaagggggggggnacananccgcncanacaggggaggannnannncncgangcgaggagggggggaacnagagnncgaccgggaagncaannacgganagaaaggagcanccgggcnncaccancaagnnaagnagggcnccacgggggcgcggaacngggcaccagcgnagacagcagccgcaccaagcnccnccncaanccaaagaagcgggnnngannnggcaaggcgcncngancggcagggggcnccagncngganccgacccggggccaaaccaacagccaaancagca

SEQ ID NO: 94019 - DNA, 1566 bp, Oryza sativa
  Clone ID: PAT_MRT4530_92348C.1
atgtcgacggaggcgctcctcgccggcggaggcggcggtggcggtggaggcgaggtgaagcggcgcgtgagcatcgacgacgcgctggcgtggcacgcgggggagttcgggcggtggcagctgcggcacttcgtgctggtgtcgtcggcgtggctgctggaggcgctgcacaccatggtcatcatcttcgccgaccgggagccggccatggtgtgcgccgccggggacggccggtgcggcgaccgctgcgccggcgccggcgccgccgcggggaccgggtgggagtgggccagcgggcgcgcctcgtcgacggtgtccgagtggggcctcgtctgcggcgagcggtacaaggtcggcctcgtccaggccatcttcttcgccggatgcatgattggcgccggcgtgttcggacacctatcggattcgttcctcggtcggaagggctcgctgcaggtggtctgcgtcctcaatggcgtcttcggcatgctcaccgcgatggcgcccaactactgggcgtacgccgcgctgcgcctcctcaccggcttcagcgccggcagcgtcggcctctgctccttcgtcctcgccaccgagcccgtcggcccctcccgacgcggcgccgcggggatgtccaccttctacttcttctccggcgggatcgccgccctcgccggcatcgcggcgctgttcccgacgtcctggaggatgctctacgtggtcacgtccctgccgtcgctcgtgttcgtcgtcgccgtgctgccgttcgtctcggagtccccgcggtggtacctcgtgcgccgccgcgccgacgacgcgatgcgcgtcgtgcgcgccatcgcgtccagcaatggcaggagcattcctgacgacgtgtccctcaagctcgacgacgagggagacgacgacaacggcgccggcgcaggcaaggtcgtcgactcgtcagcgtcggcgtcgggctccatcatcgacgtgttccggtcgcggacgacgaggttcaggctggtgctctcggtggtgatcaacctgctcgcctcggtggtgtactacggcctcagcctcaacgtcgtcaacctcaagaccaacctctacgtcagcgtcctggtgaactcgctcgccgagatgcccgcctacctcctcaccgcgctgctcctcgaccgcttcggccggaagccgctcgccatcggcaccatgcttctcagcggcatctcctgctccgccggcagcctcatcgccggcgccggcgccatgagggtggcgaggctggcgtgcggggtggtggggatcttcggcatggcggcgacgtacaacctgctgttcatctacacggcggagctgttcccgacggcggtgcggaacgcggcgctggggtgcacgtcgcaggcgtcgcagatgggcgccatcctggcgccgctggtggtggtgctcggggagcgcgtgccgttcgcgctgttcggcgtgtcgggcctcgtcggcgggttcctcgtgttctgcctgccggagacgaagaacaagcccatgtacgacaccatggccggcctggaggaaggggagaagaccctcctaaaatga

SEQ ID NO: 94020 - DNA, 1133 bp, Oryza sativa
  Clone ID: PAT_MRT4530_92349C.1
gcactttctttctctccccctcgcgtaacccctagctgagcggcggcggcggccggcggccggcgagcggtgagggcgcgaggcggcgcggcgtgcggcgcaggatcgagggagggctcggactgccggcggggggcaggcggacagcggcgcgacgtcgtcacggcgagtcggcgacggcgcggggcggggcagcggccagcggcggcgccggcacagggactctgggagggagccgggcaggcgggcagccggcagccgaccagccggggagaggagggattgaagattcgaatttcgaagtattgaaccattgactcattgaggtattaaaggcagcatctttaccaaggtgctaatcagtcacatgcataaccatgacttctgaagacggagacatttcagctctgctctctgaaccaagtattcctgaagagcagcctgaggcatctgaattcgatgacgtcgtccctgcaattttggaatcaattaaatcaagtgagaaggcattcaaaccttcaccggaggaggctgcttgggctgattcttgttttgtgcagacatctgagctttcggatagtgactggggagcaatgaagcatgccctgcttaatgctcttgaaaagccaacagaaatacccaacaatacttctgaaattgtgcacgaagaaggttcccatgcaattttagaggtcaaacctcactctctccctgctgaaattgtttctcagcatgatgacatgcaaatggagcaaaaagaaaataatgattatgacactggtactactgaagcttcggaagttgctaatgtaattaggggcacaaatgaacatggtaagcaaatggatggatacacagccagacctgaagatggcgatgagttgtcttcgtctgaagttcttgagcagacagagtcaagagagactatctttaaggtgtgggatctggacgttccgttttctgatgaggatgagcttgaactcatcaaggatctgaagaaactcctcaaggacaatcctcaggagtctgaatttcgacctcccagtggaacagccaagacattgagccagatagccgtcgatgatctagtggcagacttgagcgacttgtcattgcagcaaacagacgagtag

SEQ ID NO: 94021 - DNA, 442 bp, Oryza sativa
  unsure (1)..(442): unsure at all n locations
  Clone ID: PAT_MRT4530_9234C.1
tgtttgttgttttgtgtggtgtccaccaccnagcggcggagtggggtgatagttgtccgaacnccgagagtgtaataaaaagggtgtgttgagcaccaccctcngggagaccccctacgccctggttttgcgccacatagctgtgtgtgtgatgagagnatatgaagtggtgtggtggngtgaatagattattgtgttgtctntggccctctggccccgctggttgattgggcgtggtgagagtgtgagtgtgtggganatatgtggcctctccccctctgttggtgataaatgttgggtgtttgtctgccacaangtgagcacccacccccattntatatatgaggccactttgtgtgtggcacccctccctacattgttgctgttgtctgtgcncaaatagatataaataatatataattaaaaaaaaaaaaaaaaaaaa

SEQ ID NO: 94022 - DNA, 312 bp, Oryza sativa
  Clone ID: PAT_MRT4530_92350C.1
atggcagagagggatgacgcggtgaggacggcggagcatcaagtgatgagggcaacagccgacgcacatgaagaacacggaggtggagcagcaattgacgccagctgcgaccaccatcacctctccatccacgaggaggaggtgaatatggtggccggcgcttggatccggcctccccagagcttgcacgaggaggaggtggtgaagatggaggtgacgctgctcgcagacaacgcgcacctggatgcggcctcctcggagctctcgcgaggaggaggcttggatccggcctccctagagctcgcgcaatga

SEQ ID NO: 94023 - DNA, 132 bp, Oryza sativa
  Clone ID: PAT_MRT4530_92351C.1
atggctgccgcgagcttcgacggcgccggcgttggggcgctcctctccggcagcctgcagcctgacactgctataccgtaccaatgtcggaacagaaacaatcttgttgaccccaagggaaaaaaaatacgg

SEQ ID NO: 94024 - DNA, 385 bp, Oryza sativa
  Clone ID: PAT_MRT4530_92352C.1
cgcttccgcttctcttcccgtggcccttgcgtcggcggcggagggatggcgaaggccggtggggggatgatctgggcgacggcggaggacctggcgcggagccggccggtggtgctgtcgctgtacaggcagatcctgcgggcgctgaactcgccggcgctgccgctggggcacgcggcgcggctggcgaagaaggcggagtgccgcgccatcttcatcttcgccgccgaggagaggtcgatccacaacatccgcgacctcctcgacgccgcgcgccacaccctcggcctcctccaccgcggccgctctagaggatccaagcttacgtacgcgtgcatgcgacgtcatagctcttctatagtgtcacctaatcattcctgccttt

SEQ ID NO: 94025 - DNA, 4556 bp, Oryza sativa
  Clone ID: PAT_MRT4530_92353C.1
atgcctgcagtgaagaaggatgatgttaggacgcatcggccagttggtatgagaaaaggcagatgggttcttggtgacataactgaggttttggatcgtaattcgtggaggcttgggaagatcgcaaaggtgctgaaggatgactatttcgtcatcagggagcatgaaaagctacagcaaaattatggttttactttcaggacaatgaaaagctaccgcgaaattatcctacttgaatactgcgaggtcagttcccccgcaaaaccgcccttctccctcgtctccggcgcctcccgctgccggatccgccgccgccgcctcctccccgggcctctctctgatcccgaggaggatgctccgccgtacggctcggttgtcctcggcggcaccttcgaccgcctccacgacggccaccgtcgcctcctcaaggcctcggcggatttggcgagggatcggatcgtggtgggcgtctgcacaggccccatgctcgccaagaaagagtacgctgagttgatcgagcccgtcgaaaagcgcatgaaggctgtggaggattacatcaagtctgttaaaccagaactggtagtacaagtggagcctattgaggatccttatggcccatccattattgatgataagttggatgccattattgtcagtaaggagacattaaatggtggatttgccgtaaataggaaaagagaagagaaaggactacctttgctgaaggttgaggttgttgatcttctatccggaggagcagagggtgagaaattgagttcatctgctttaaggaagcttgaagcagagaaagctaatcagcaagaaggagcagcatctaaagagctcatgcgatataattctttgcttgatttctgctccagtgttgttcatggtcctcttcacattgaccaggaagcattctggttctataggttcctttccattgtgtatgaccatgtcataaacccggggcattggaccgaggacatgagggatgatgcattggagcctgctgaactctaccaccatgggctcaaggttgtcgatgttggtggtggcactgggttcaccacattggggattgtcaagcatgtggacaatgagaatgtcacactgctagaccagtctccacaccagcttgagaaggccaggcagaaggtggcactgaatggggtgaacatcattgagggtgacgctgaggacctcccctacccgactgacacatttgatcgctatgtctctgctgggagcattgagtactggcctgatccacaacgaggaatcagggaagcctacagggtcctgaagctaggtggagttgcctgtttgattggcccggttcacccaaccttttggctgtcacgcttcttcgccgacatgtggatgctcttccccaaggaagaagagtacatagaatggttccagaaggcagggttccaggatgtcaagatcaagagaattgggcccaaatggtaccgcggtgttcgacgccatggcctgatcatggggtgctctgtgacaggcgtgaagcgatcgtctggcgattcccctttgcagcttggtccaaaggctgaagatgttgagaaaccagtgaatcctttcaccttcatcttccgcttcgtcatggggacgatttgcgcttcttattatgtgctggcgctagtctacgaccgaagctagagttcttttttttttttttttttttttttttttttttttactacgcaaaaaagttgtcattccattcgacgtttagttattccgccatgaacaccacaagcgttttacaacagcaagcaacggacggagccaactcaatgacagacaaaccgcacaagacacgtcgtccacacggacgccgaccatgacaacacctaaaccgaacaatggcggagggaaaaaaacgatggaaataacacgacagggaccaaggctgcgacaccggagctcagcagctgacacatacatagactacaaatccacaggcatgacacacgcctgatccgcctactttgcacttgatggcaactctagcaatggcactgcaatagccttcctctgtgcccaagtgccctctcctatctaaagagactaaccatagatagatgcatggatagatagacgattgttcatgggttggatggatggatggatacttgctacgacgatttccgaagacactatcttctcttcccttgtaatcttcttcttcaaatttgtttgctgcttggctatggatgtgtgatgctgatttcacagcagcagcagttagaacttgttgttgtaccagaagacgcccttgttgtcctcaggctcgacgtagatgcactccttggcctcgcgccatgtcgccttggcgacgggcgtcgggtcgaactggtagtactcgccgaggatggggcggatcgccttagtggcctccatggcgtggtagtgcggcatggtcgagaactctccttgggtatctggacggactactggctcttggggaaccacgatatcttcttggtgagcgtgcaccgtagggaccatttcttccatacctattaaaatgattccacctatcatttcttccatcattgtagcgagaccgaacaggggaacgctctggagtcggagtcctgtatcgacgtgcaaatgcatattggtgagtaaaaccacgcgccttcacgatgaggctgtccgctgtagacgcgcaccacccaccagaacccgaacgccgacgacagcttgaacagggcgagccccgcggacacgacgccgacgtcggagatgaagatctggacgcgctcccggtcgttgtagatcgggccgtaggggtcgaagtggcacgcgaagcgcgggtacgggcggccggacacgttgaacgccaggtacagcggccacccgagggtgagctgcacgaagatgtgcaccagccggccgatcgggttgtggtacacgtacggggtgtaccacgccatcgccgacttctgcttcgggacgaacacctcgtcgcgctccagcgacccggtgttggagtggtggcgccggtggctgtacttccacgagaagtaggggacgagcagcgacgagtgcagcacgaggccgacgatgtcgtcgagcaccgagtagtcggagaaggcatggtggccgcactcgtgcgcgatgacccacacgccggtgagcacgcagccctgcgcgatccagtagagcggccatgccgcgaactccatcccgctcggcagcacggggatcatgaccagcgcgaagtagagcagcgcggcgacgatcacgaggtcatggaccacgtaggagaaggacttgatcaccgagcgctggaagcagtgaggcgggatggccttcttgatctgccccagcgtgaacggcggcttgtccgtcggcgaccgctgcacggccgcgccattgccggcgcggccgagcagcttctgctgctcctcccgctccttctccgtcatcctgccgccggcacccatcttgctgagttagcgttggtagatttcgcaggcgcggaggagcggagcggcggaggcagatcggggtggggggcgggcgacacccttcccttgttccctccctctttgtggaggaaacgggtggtctgtgcaggggaggaggagaggaggaggcccccggccgggcctatctttctccaaacttatagttttggtgttatctggatctttcttcgaggaatgcttggtacgagtcgtacgacggccttcactttcactgtcagaactgctgccgcctgtctttgagctatctgaatcatcacttgagctcctgtagcttcgtttggatttcctttttgttcctctactctttctcttagtcttcttgtgtttgcttttcccctttgcagacctgtgtttatccttcttcgaactttttcttctcttgtgtctgtggtcgctggatgagctagtatccaatgatgacgaagagtatgattctgattccgagccactatctgaggactgtgtgtcagaataatctgagctataggaatcagaagaataatgctttctctttttcttttgtttatcatgagtaggtggtttttgggttttgacccttttttcagcagcagaattgtcttctgttcttctgagcttcttttctttctctccctttagctgattctgggaatcagagacttcaccacagtccacgattttcacttcacaagtaggctttccggtatcagaacctaccgcttcaagcttcttcagcaagggcattccagtgaccaccttcccaaagaccacatgtttgctgacacaacttgtagacacatttaagaaaggagtagggcttaatgatgtgttctgagccataaaacctttcagaatgcgatgcatgtttgttcccttaaaataaagtggcttttgtgtagatactccaaggcctctctcacccgtgcagagagcccggaaattctccgtggtcttcggaacgacatccgcaaacagctcaaatgtgatcctctcagcggcgcgtccgccgatcgctatgtcaaagaagacatgagggttcttcttcgccttgggcat

SEQ ID NO: 94026 - DNA, 149 bp, Oryza sativa
  Clone ID: PAT_MRT4530_92354C.1
cggcccggaactgtactggctggacccacgcatccggaccttcgtgttcagggtctgcacgcaccggcggatgaggggcatttactaattttccccagcaggtcgctccatcaccatagccaacgtcgtgctggaggcagcccgaggtg

SEQ ID NO: 94027 - DNA, 280 bp, Oryza sativa
  Clone ID: PAT_MRT4530_92355C.1
cggccgccctttttttttttttttatgaaccaaatatgagaataggatatatcgccggcacactacttgttagcgcacccaacaggagaaaatggaacaagcaggcaaagtcaaggaggtaaaagacatgcactaattgcgttatgccttatgccgaatcaatatcgcagcaaaaatattcaccacagtgccatcggagctcgattgattatatggaatggcgatattatccctctttgggaactatgaattcttcggctaaaagggcctggaaagcaag

SEQ ID NO: 94028 - DNA, 403 bp, Oryza sativa
  Clone ID: PAT_MRT4530_92356C.1
aaggcccctaaaggaacccaaatttaaaaaaattctcccaacccccccctataacaaagcggcaacaacaggcccccttttatgggtaaagaataaatggaaaaccccccctaacaacccaagcccaagaaggacatttctggggtatgcccccccaaaaatgcctggggagcccttgggggccggaccaggagggaacaccccaaacccaaccccccgggggggccggagcccccaaacttcttctctggaaaaacaaaaggcattggccacaacatccccaggaaaggcccgcaaaaaaggaaatctttcccgcccgggggctaacccgggaggcaggggggggtttcaaggcaaaaaaagaacaccccccccttggggccctttaaaggaccacaggggg

SEQ ID NO: 94029 - DNA, 183 bp, Oryza sativa
  Clone ID: PAT_MRT4530_92357C.1
atggcgagcggtacaggatctcgtggcaaggcagcacaggagcacgggagccacggcgtggcgccggcgcatggtcgcgcaaggccacccgtcattccagctgcaacgttcctccttactctaccaattgaggaatatgcatatgtcaggaccagcgtcggagccaaggcccggcgaccctga

SEQ ID NO: 94030 - DNA, 116 bp, Oryza sativa
  Clone ID: PAT_MRT4530_92358C.1
gcgtggacgcgtgggcgtgtgggggcaaagatgatgttcaatgtgacgggggtactgttgctgttgggcctggtaaccggtacatatgccggggaagggcttcgctgcaagatgtg

SEQ ID NO: 94031 - DNA, 279 bp, Oryza sativa
  Clone ID: PAT_MRT4530_92359C.1
atgtcgagtgagttgaatccacagttggcgtcccttggacatatgggagtggagtttcctgctcatctcttgaagctccctcgtctaaaggttaccggccaacggctggctcggacggggaggtgccaaccctacatcagggctggcgagggcgggggacgcgagggagtgccgggccaattcaacctgtacgtgttggaccttggggaatcagccacggaagaccaccgaactatgacaaagactgtcagtgggatcagcgatgttgacgagggttga

SEQ ID NO: 94032 - DNA, 608 bp, Oryza sativa
  Clone ID: PAT_MRT4530_9235C.1
gcctacttcctcgagtggtgcgagtggttcgggctactggatggcctgcgggtggtcctgcaccccgcctttttgttcctgttcaacgagttcgtctccatgctccccagggccgtcaacggtcgcaagtggtacgaggagaggttcgggcccgagaagatcaagggccgcaaggctgtcatcccgggactgctgtgagctcgggctgtcttgaggaacaagcaagtgccaggtatgctggccaagggatgttgagtattttctccgccgcttttcttttttgcaacttggttcggttctgtttttttcggcgtctggggaaaggaagagattggagcatggaatgccaattgggctgcataatgtgtagaggggctgcttgtgttcgttaatattgcgggtcagatgatagaggttttacagggattttgcgaccccggcccagaaaggatgtctagtactcttggggatccccagtcataactcggcagaagaggctgggatatagatattgagatggggggttatagaatagtagacctacttaagcaccccgtccactctcaaacagcaaaaatttacatccttggaaaaaaaaaaaaaaaaaa

SEQ ID NO: 94033 - DNA, 368 bp, Oryza sativa
  Clone ID: PAT_MRT4530_92360C.1
atggctgaaaagtttacaaacagacttcacatcttcaatggagttgattatgatttgtggaagaaaaagatggaatcttacgccacatcccaaagctgtgatatttagataaaagttgttcaatgttatgagattcttgctcgcattgacactcccgctcataaaattgattttgaaaacaattgcaaagcgcgcaatattattctcaatgggatttctcactatgattttgatcgtgttccgtttgttgctactactaatgaaatctttgaaagatttaattgctacagaaccattgttacaaacgatgagaaatgctggagcaaagtagcatcccaatgtctcccatctctaggagctagatcgga

SEQ ID NO: 94034 - DNA, 425 bp, Oryza sativa
  Clone ID: PAT_MRT4530_92361C.1
gcttccccctcctcttcccctcttctcgcgggaatctccccgtctccgccgcgaaaccatggaagctgccgccggcgccggcgccggattggcggaggcagcgaacggcgggatcgagagctcggccgccgacccctccacctccggcaccgcctcgcggctctccgtccaccggatcgccggcggcgggaaagctgctgatatcatcttatggaagcgtggacgtgttacaattggtgttatatttggcgctacaatggcatggtggctgtttgagaaatctggactgtccttcttgacagtttgctctgatgtactgctcaatttgaatgttgtgcagttcatacggattaaagtagctggattgctaaataagcaacctaggccactacctgagttagtttatcagaggaatgggttagcat

SEQ ID NO: 94035 - DNA, 870 bp, Oryza sativa
  Clone ID: PAT_MRT4530_92362C.1
atggagaataactcgccactcagtaagaaactaaagttgaacaatgagcacgcggactcagcagttcctcaccaggcttccccggcaaccgccgggaacgttacagtgtgcgaccccccagcgaaacggaacattctctcatcagtttcccactctaccccagcggcagtagccgacctatcaatgaacaagccaccacaatggttcgtacaattctttgctgattttgagaatagacaagaggctcgtattgagtcacttctcgacaaaaaactgggtgaccttacttttaaagtcgcagatcatgaagagaagatcaaatgtctgtcttttgaagttgataatatgaaagatgctgtacaggccttgcaaatagagaatggaaagctggaaagcaagttagacgatcttgaaaatcgttctagaagaaataatctcgtagtctttgggatccaggaatcagataacaaggaagactgcaggaaggtgattcaagatttcatgcgttttgcagaggtgcctgaggatgttatcaaggatattcaacgatgtcaccgtacaccatcatttcggccccaggtaaaggagaattctcaacaatatcccaggaggatccacttaggttttggcgcctacactgcgaaagagagggcccgaaaagcctgcattaagaagcttaaggctactacatcattataccaagaccacaaggttttcgttgcggaggatctctcgcaacgtgttctccaactcagaaaagctaaggctggttcattcaagcgtctcaaggaagagggcaaaaggccttttttcgtttttccggacaagttatgtcataggaatccagatggaaagatgatcatcgcttaa

SEQ ID NO: 94036 - DNA, 110 bp, Oryza sativa
  Clone ID: PAT_MRT4530_92363C.1
atgagtagcttgatgcgaagccagcaccaacggtgtcggctcatgcagacatcggaggcatgaacaggaccggagggcaggtcctatgataccgtgaggaggagcctaag

SEQ ID NO: 94037 - DNA, 336 bp, Oryza sativa
  Clone ID: PAT_MRT4530_92364C.1
atgctgatggaaagattgaaggattcttatgctgtgacaaatcattgggtggatcttttcttcggtgacgatcaagctagccgtgccgtggtgtctgtactgcaaacatataaaagggctgcaacaccgactgctgaaaattctgttggcacaggctttgccgatactttcttagttgccaaacatgacttttgtctacacaatggacggacggtgaacaagaaaagaaaaccacagatgaacatgagcctagctgtgagagcgtgtgacaaatcattggatggatctttttttggtttggaggcagcagctgaagaagaagcaccggatatgctg

SEQ ID NO: 94038 - DNA, 315 bp, Oryza sativa
  unsure (1)..(315): unsure at all n locations
  Clone ID: PAT_MRT4530_92365C.1
ngagcgtctgtgtatcntntgtnggcaatatatgggcanggcaagcgggcggaggctccaagcggagagagagcgcgaggaggagccatgtccgcgtcttcccctcctcctcctccttcccccgccgacgcganggcgtntccgctcttctactgctacgagtgcgagtccaccgtgtcgcttcccccgcctcccccgccgccgtcccgcccgctcttctncccgcgctgccggcngatgttcctcgaggaggagaaccctaaccctcctccggagccggagangtaggaggaggtgtcgtcccctcccccgccc

SEQ ID NO: 94039 - DNA, 194 bp, Oryza sativa
  Clone ID: PAT_MRT4530_92366C.1
ccggccggggcgtgtccctcccgatccaaagcaaagatgtcgcccatgcgcatagccttggcctccattcctcgatcacctcatgctactatcctcgcgcacgaagatcagacgctaccctggatcgagctaggtctgcaggaacccgcaaggctgtggtggacctaatgtagaaggcagccgaggccatactc

SEQ ID NO: 94040 - DNA, 669 bp, Oryza sativa
  Clone ID: PAT_MRT4530_92367C.1
atgaacctgtattacgaatcggccaaagcggcccccaccagaaccctcctctccaccgccctcctcgccgccgccctctccgccctctccgccgcctccttctccaccgccgcctcctcactcactctctcgaccgccgccgtcctctccaccgccatctccaccgtcgccgcctcaacctctcctccgccctctccgccgccatctccgctgccctctctgccgccatctccgccgtcctctccaccgccatctccaccgtcgccgcctcaacctctcctccgccctctccgccgccatctccgctgccctctctgccgccatctccgccgtcctctccaccgccatcttcaccgtcgccgcctcaacctctcctcctccctctccgccgccatctccgctgccctctctgccgccatctccgccctctccgccgccgcctccaccgccgccctcgccgccgatcgtcctctccgccgtccgtccatcgacttccccgacctcctcgaccctgacctccccgacgccgggatccccgaccaccgccgaccgcctcgacctcttcgccactgcctctccgccgccgccaccaggatccaggacgactacggcctgcgccgccgtctccaagtacgccgcttctccaagtatgccgccaccctcccccat

SEQ ID NO: 94041 - DNA, 879 bp, Oryza sativa
  Clone ID: PAT_MRT4530_92368C.1
cagaaccctcctctccaccgccctcctcgccgccgccctctccgccctctccgccgcctccttctccaccgccgcctcctcactcactctctcgaccgccgccgtcctctccaccgccatctccaccgtcgccgcctcaacctctcctccgccctctccgccgccatctccgctctcctccgccctctccgccgccatctccgctgccctctctgccgccatctccgccgtcctctccaccgccatcttcaccgtcgccgcctcaacctctcctcctccctctccgccgccatctccgctgccctctctgccgccatctccgccctctccgccgccgcctccaccgccgccctcgccgccgatcgtcctctccgccgtccgtccatcgacttccccgacctcctcgaccctgacctccccgacgccgggatccccgaccaccgccgaccgcctcgacctcttcgccactgcctctccgccgccgccaccaggatccaggacgactacggcctgcgccgccgtctccaagtacgccgcttctccaagtatgccgccaccctcccctattcctccttttttctgatggatgaattgcattgtttagatgaatgaaatgtgatttgttgtttcgattattggtgctgctgtatagatgaattaaatgtgattattgtctgctccaagctgaaaaaggatggattgatagattagcaatagtgtttctagctaggtagggtagctagctagaaatagtttattaagctagttagttaagggttatcaaaccatcacaaaatacaaaatgcatggggaatttcggtggttcggtcagtgtagtccacggacggaaccgacctacacaccaaaattttcaatgca

SEQ ID NO: 94042 - DNA, 321 bp, Oryza sativa
  Clone ID: PAT_MRT4530_92369C.1
atggggggcctggatccatgtttcccagcgccggatctggacgccgccggcggcttcccttggcgccggcgtcttgccctccgctccgattttgccgacgccccgaccatgaagaccgcgagcgagggagggagtgcctcgccgctgccgtccttgcggcttgggcagcggcgaggcgggaggggggaggagaggggcaggggcggcacggcttgtttcgccgcccgcgtcgcccccggggcagggcgaccgagcgaggtggttggtgttgatcctatgatagaaaagactcagcattttgatggtgaatggcgattatga

SEQ ID NO: 94043 - DNA, 243 bp, Oryza sativa
  Clone ID: PAT_MRT4530_9236C.1
atggacgttccaggagaggatgtcgatgatcggggcgaaactgatggggatgacagccgcgcgcgccaccgcggcgctgtgcgtcgccccacgttgtgcccgcgacagcaccgtttttgtgtcacacctggcatcgagggcgtgaggcatgacggccgtgggggtttgctggcgtcgtcgccgcaattggctaacattatcgatgttgtttgggtgcggagttgcggcaccgagaagggatag

SEQ ID NO: 94044 - DNA, 1281 bp, Oryza sativa
  Clone ID: PAT_MRT4530_92370C.1
atggcgaaccttcaacctcatcctctctggttcatcccgccggggcagcacttgcatccggctggtccaaatcaccgtcgaagggttgacacagtaaacttcattcctactccaatgcggcatgaggattttgtgctagctattgttcatcctgctttacctgaagacctttgggatgaacatagggctgagattagtgggttttttgaacaagtcagccatgttcgagttgctgcttcttttccacacccaaatgttgttgccctgtttcagattgattctccggatcaaagagatgcacttgttcttgggctgcctattaactatgatggaaaccatgaggggcctgtcgatccaaatgttgaggatgcaccagcctggcagtttggaaatgaacagcagcagcataatcagcagaatccaaattggggagcttgggaggataatcagggaggtaatcaggtcgatgaacatcttatgcctcttgtcccacagttgttgattgatttgcaagcaagctctgcaagctctctatctacttacccttctgctagctctgcaagtattgcggattcggcagtcagcatatctactgatgaacaggctttaacctctccagacaagagtattgtggttcataaggattctgttcatgctgacttatataattatctttgtgagaggtttccccataccatgtttgataaacactttactcaagattcttccttttgggctgctctcagtattggaccatatatgcctggtgaatcatcttcttctaggcagcatctgggctatagtcagggaatggaatcggaattgccagtacttatgcttactcatttggttatagtcccacctgtggtccatgtgcttcctgctccagttaagagtccaaaaatacggattgacactccaatcacaactgttgggttaagaaggagttctagattgtctgctttaaatgatgggcacaaagatgaatttctcactcagccagatccaaatcagggcattgggaaacctagaggtaaatcagttaagaaattgaagcaagtggccaaggaggtaggtcttctgttctctggttgtgatctgcaagactcggattttgaggaagggtctaccactgaagatgcttctggtgcgcctgctgactgctcgtgcctcttttgcaaaaaaatggcagttgatctgtgtggtgcttctgctcaagaggtgtcccaaattgaccttttgaagacgcgggctccaaatgaatctgatgggaacaattaa

SEQ ID NO: 94045 - DNA, 864 bp, Oryza sativa
  Clone ID: PAT_MRT4530_92371C.1
atggcaagcccaagggcacagctatcacggcagaagggggtgggcagtgttgatgttagaatagagcagagctatcagggatgtggagcaggtcagaagataaattttgaaagtgattatatatccctgtgggagctgaaacaggaggtagctgcactggtgatgcctacaagagagctcactgcgacaagcttcatcaatccaattctgaaggttgaccagaacaagcacaagattgatgaaaaaagtgtcagtgatattcatgataaatattggcttgcaaacatcatcaaccgtgcatatcttttggctatcttttcctccaatttttgtgcagtaatattcttgagcatggaagctatgcaagagcagcattcgaagcgttccattctaggaacggaagcagcagaggatgactcgttgatgaagtcatacatgctgctgttgtcagcgaacgccgactccggcaacttgacaaggtcatttgcccttccacaaccaatgtgggactattcaacaatctcccccttcacacattggtgtccctccctcaacccttcaccgccccttcaacaatctcccccttcacacattggtgtccctcagcccttcactgccccttcaccgtgtatagaccccacagaacaggcccacggtccatcagcgcgcacggtcatccaactagatgatgttgcacgcttcagaaatcagaggcaatacaattcgtcacaaagttatatgctgatcaaagatggatggaaattgcaatcccattttctgatgcttattatagattgcaggctgcaagcatctctcttggaaggactgtcaagttgccagggtaatagatgtgaaagtgcatga

SEQ ID NO: 94046 - DNA, 193 bp, Oryza sativa
  Clone ID: PAT_MRT4530_92372C.1
aaaaattttatttttatataatttaagcagtttcaacaaactctggtggaacaacatcaacaatatttgagagttttaatgtatatccaggtcttggttgagcagcaactcttttaagtaaaggttttctttgttcttttggtaaattcttattttcttcaacaatctttgagtttgctcttgctctttgtaa

SEQ ID NO: 94047 - DNA, 1040 bp, Oryza sativa
  Clone ID: PAT_MRT4530_92373C.1
atgtcttccgtagtgttcgcatcagcgaggttgaatgcaacaaatcaaagctacttgcctgtgccaatcacacttgcaacagcatataaaatgcagcatggagatagcctgaggttaaaaacttcccatggcttgaagatcaagatcaaaatcaaggaagtagctagcacactgtacatgacgacatgatggaaagaatttgcagaggcaactggattagaaactggagaaacgattcttttctggatgtcatcacagtctaaagcgcgtgttatgatactgaacagacaatgccttattagatgtccagtaaagaccccatccaccacctcatcagacaaaaataggtcccttagtccatcagatcaattaaccagagcaagcacatttgaccatgcatcttctagcaaaagcgttccatttctgaggaatggaacaggcagtaacaaaagaaaacctagcagacacctccttctgccaccagattaagctcacagctgaattgaagagttacatcaaagagattgcagattgtctagaagaatcaaacaagttctatgtagtgcgtatgaacagaacattcatggaacaggacagagtgtactttgcgactgagttttcaaagaaatacattgtgaacttggttcgaggcaagacagcaaacattagagtgcagattgcaggtcgaccctcaacaacttaacatcagggtggttagctttgcagcagccaacagcatcaacttacacaatctgcatcttccactttttaggacacagtcacctcatgctcaccataaatgctctgtgaaagttacctgcatcttcagtagtcgctgctattatctacactggaacaactactataattctctattatcctttgcttgcggtctatctaacttcacttgctctgtaagcacgtgacctataactgcttatcattgtcctcagctccttttgttatccataagctgagtgaacaattaaccactttatgtacaaacagctggcttgttatactacagctactatggtcct

SEQ ID NO: 94048 - DNA, 264 bp, Oryza sativa
  Clone ID: PAT_MRT4530_92374C.1
atggcgagaggagcggaaggcgcgcgacggttggcttgccggcgaagggcggccatgcgggcctatatggggtgctacaaacacctcgagcacctggtccacaaaccccgtgaggcgaggtgttcaatgacaacggtgtatgtgccggtgttcggaagtgcaccttcatggaccatggaggaggttgtgtgcagcatgcccaggatggcagaggcaagtgagaggcagagggtcgtctccgccaacgagtccatggccgcctaa

SEQ ID NO: 94049 - DNA, 129 bp, Oryza sativa
  Clone ID: PAT_MRT4530_92375C.1
atgtcgggtgatcaagccgacatcgttgggtgcgacaactccgcatttgtcgagaatgttctcgataatggggtgtactcgaccacaacctactcaagtgctcaattgttcctgaaaaatattttctag

SEQ ID NO: 94050 - DNA, 195 bp, Oryza sativa
  Clone ID: PAT_MRT4530_92376C.1
atggaggacttgctggacacggagatcgggaagcatgactacgactggcttctgactcccccaggatcacctcatgctcctatactggaggttgtggagaaagctccatcctcagatcaacaacaggtcatcagttgtcaatgcaagcatttcctctgtctgttcgccacctacaactccaagcaagaggactag

SEQ ID NO: 94051 - DNA, 106 bp, Oryza sativa
  Clone ID: PAT_MRT4530_92377C.1
atgtcgcagctcaccctgacaggtgggcccttggccgttgtacagcgtggaaagttgccacgtcggacgctcgtggccacgtcagcctcgcgtgcatggcgcaacg

SEQ ID NO: 94052 - DNA, 864 bp, Oryza sativa
  Clone ID: PAT_MRT4530_92378C.1
tcaatcccatgtgtcaattatctctatgggtgattcccgcaacaacggcgaatcattggatcttgcaacaacggcaaccctcatcactagaccacgctcacgggattcgcggaagtcctccgcacatcgcggcgcccctatcccgtcagccgccgacccgcgcacacacccatcacgccccttccctcccgcttccccccttccccgctcccccgccgacggcagcacctccacctgcgccactgccggatcgacgggagccgccgatcgtcctcctccgccaaacaccaacctcgccgcacagagccgcgtccccatcccatcagtcgtcaggccacctgcgtgttccccttccccgtcgcccgggcctctccatcggtgatctcctcccttctcaccctcaaacgcccccgtcgattccctgcagcccatcgtatcctaaaaccctacaaccactgacccacatcgtctgtcgccgatcagcgcgtgggtttgttcacaaggagagcggcaaaggaggtcgggactcggtgtagagcgacgagcccagcgaagtaggccgatagctatccgccatagcagtgatgaaggccggctggtggagcgcccctgtcagcgcagctttgcacgggatcttgcgcggccagacataggaatcgcacaaccttctcaatcccgacgctgtgccccgatcgtcgccgctcgccgttggaaccgtcaccacgacagtcgggaaggaaccagaggtgcatcgttttcagtaccagcgctctgttcctgcatttttcattcccggtaagttgcaattaatcaagacaattcccagaggttaggtgccaatcccacaagatgttagagttgaaa

SEQ ID NO: 94053 - DNA, 1005 bp, Oryza sativa
  Clone ID: PAT_MRT4530_92379C.1
ttaacagaaatgtgctgcatgtttattgcagctttccattcctgaaacagagaatgggcattccacagtaccaactaggccagcacggagtaactctgtctctcgcccttcaatccaatctactcttatttccagcaacaacaggtcatcagttgtcaatgcaagcatttcctctgtctgttcgccacctacaactccaagcaagaggactagcactctttctcggccatctactccaaataaaactcggccttctactccagtcaaaactagatcttctgtacccaacactatgtccacctcaactattgccaaaacaacatctgcacaaaactcgagaccatcaactccaacctctcggcctcgtatcatgtccaattcatcttcaagtacaagttctgcagcaagtcgtcctagttcatcctctggaagaactagtacaattagtcgcacctcctcttccacaagtacagttccttcagtcagccgctctagctctcgttcatctacaccttctgttgggaggatatttggcagcaataacataacatccatcgggcggcctgtaaccagtaatggtcgaagttcagcaccttcttctgcaccatcatctcgtccaagttccccaaattcacgtgcacgagctccagtcaggccgttagatattcctgattttccaagtgaaactccaccaaacctaaggactaagctaccacaacgaccactatctgctggtagagcacgcccaggagtgggtttgggacccaagtcagccccaaatgctgaacaagttcgctcagctcctgtaaaaaagatgactgtgcctgctattacgcgaagtaaatttcctgatgcaccatctagggtatcttctcttacaaatggacaccaaagcagacagtccgaggggtctgctgtggaaggccaacatactaaaccattacggtctatcacgggcacagataatggctttggtaggacaatatcaaggaagtcacttgacat

SEQ ID NO: 94054 - DNA, 443 bp, Oryza sativa
  Clone ID: PAT_MRT4530_9237C.1
gtggtgttgccgccactgtagccggcgggggcgtgtctccggtgatttccccacgaatcagaggcggcgccggggaagaggatgcacctacgaggccgagagagaagacggtgcggccggacggcactcaggcgaggagggagaggcggctggatgccggccggcgccggagagagagaaggagaaggcggggagaggtggtgtggccacgggaagacgcgggaggaggctaaaacgatagaacgcaaagagttggttccattttataggggaggagagggagccggccacgggaggagcggggaacggcggcggagtttgtggccggcgcccatggaaggtggccggggttggcgcgtccgttcccggcgattgggggcacgaatcaagggggaattaagggggaaagagagaggagggaaaggggattaattccccctaat

SEQ ID NO: 94055 - DNA, 243 bp, Oryza sativa
  Clone ID: PAT_MRT4530_92380C.1
atggcctctccaggcctcctggcctcctccccgtcccctctctgcggcctcggcggcggcgtcatcattcggaagagcggggctggcagcggcattgccttggcgctgcagctgcggcggagcggcgcggcgacgatgtcgcaggtgttgtccctgccctcaccgtctcactcccagatgcatatccgtagcgtcgtggatgccttgccgtccaccgacagccgcttgcaccacggcacgtag

SEQ ID NO: 94056 - DNA, 678 bp, Oryza sativa
  Clone ID: PAT_MRT4530_92381C.1
atggaggacttgctggacacggagatcgggaagcatgactacgactggcttctgactcccccaggatcacctcatgctcctatactggaggttgtggagaaagctccatcctcagatgacattcgacaaaacctgggtggtattcgtggtgcatctctattcccgcctagcattcgctctgccggtgcgaaggtccggtcagctcgaatgtctgatcccgctcatctcagtttaaatggcgattgtcattttactgacaatggcagcatcaatggacacttctctggagattcgaacggaactctttcaaacaacggtggcagctcaactggttctccagacagggaaagcattggaactaaggagacactgagtgaactagatctgtataccactgcacggtatgaggcattgttgttgagggaggacataacgaacacgaactggttgcacaacgttgatgacaaatctgaccagagcccagtgtttgatcaccggtttgagccgctcccagagccatttggagcatatgagggtctgtactctgaggcagctggtggaccctatgagaaactctactggtcgctgcttctaggattcccagcaataactgtgctcaagatgaaaagggggaagaaatcaaagaatgcgccaattggtacgctgttctctggctag

SEQ ID NO: 94057 - DNA, 414 bp, Oryza sativa
  Clone ID: PAT_MRT4530_92382C.1
atggtgatgctggaggaagctgttgaggaggggatcctcccttctcgggatctcatcggctggcggggggccaccggggaggagttcccgaccctgaacaccgacgatatcatggtgttcctccccttctttaggtttggcctcggtctgcctccatataatggccatgccccgggcgtgaaggattgttggtacacactccctagccgcgatgagatggaccaagttagaggggtgctgaggggagtgcgtcttctaatcgatgctggcttgacctgcaacttcgtcacttggaggattcaaccactgaagagtcgtgttcacccagtctgggaatatttaggaaaggatgacccgaccagggagagcaatgagttgattgacaaggaccaggcttccgagaggttgaactag

SEQ ID NO: 94058 - DNA, 2200 bp, Oryza sativa
  Clone ID: PAT_MRT4530_92383C.1
cttccctcctcttctctccccgcctcctcgcggtgtctgcctctctctctcgcgcgcgcgcagcctaccgccacaagcaaagtccaggagggctcgggcacggaagcttctggaagcttccgcgtcggcgtgaggaaggaggcggaggggagggcagggggactgacctactccctcaccgcggtcgttccaagtcccgcgccgccggggattcccatcccctctcgcggcgcgccgcttcgacgggaggcatcgtcgtatcgcatcgatctggtttggggggttttgggagtctgaagtggtgggtttgagatggaggacttgctggacacggagatcgggaagcatgactacgactggcttctgactcccccaggatcacctcttgcgcctcccccgggcggcggggagaaagctccatcctcagatgcccctaaacgcattactactagatcatcctcaaccactagagcatcaaggctttccattcctgaaacagagaatgggcattccacagtaccaactaggccagcacggagtaactctgtctctcgcccttccgtccaatctactcttatttccagcaacaacaggtcatcagttgtcaatgcaagcatttcctctgtctgttcgccacctacaactccaagcaagaggactagcactctttcttcatcaaagccatcagttccagcttcacgtcaagtaccaacacggccctctactccaactaaaacccgtccatgtactccagtgaaacctcggccatctactccagtcaaacctcggccatctactccaaataaaactcggccttctactccagtcaaaactagatcttctgtacccaacactatgtccacctcaactattgccaaaacaacatctgcacaaaactcgagaccatcaactccaacctctcggcctcgtatcatgtccaattcatcttcaagtacaagttctgcagcaagtcgtcctagttcatcctctggaagaactagtacaattagtcgcacctcctcttccacaagtacagttccttcagtcagccgctctagctctcgttcatctacacctacgcgtcagcctatcacacgttcatcagccccactggctggccactcaccttctgttgggaggatatttggcagcaataacataacatccatcgggcggcctgtaaccagtaatggtcgaagttcagcaccttcttctgcaccatcatctcgtccaagttccccaaattcacgtgcacgagctccagtcaggccgttagatattcctgattttccaagtgaaactccaccaaacctaaggactaagctaccacaacgaccactatctgctggtagagcacgcccaggagtgggtttgggacccaagtcagccccaaatgctgaacaagttcgctcagctcctgtaaaaaagatgactgtgcctgctattacgcgaagtaaatttcctgatgcaccatctagggtatcttctcttacaaatggacaccaaagcagacagtccgaggggtctgctgtggaaggccaacatactaaaccattacggtctatcacgggcacagataatggctttggtaggacaatatcaaggaagtcacttgacatggcaatcaagcatatggacattcgacaaaacctgggtggtattcgtggtgcatctctattcccgcctagcattcgctctgccggtgcgaaggtccggtcagctcgaatgtctgatcccgctcatctcagtttaaatggcgattgtcattttactgacaatggcagcatcaatggacacttctctggagattcgaacggaactctttcaaacaacggtggcagctcaactggttctccagacagggaaagcattggaactaaggagacactgagtgaactagatctgtataccactgcacggtatgaggcattgttgttgagggaggacataacgaacacgaactggttgcacaacgttgatgacaaatctgaccagagcccagtgtttgatcaccggtttgagccgctcccagagccatttggtccactatgatggttattagctgtaaaatctcgttcctcgttatgtttacaattagtagttgcaagttgtatgcggttatatctttctgtgtggttgtccatttcccccatcttttcatgaatcttctgaaagataagattgtggggtttatgttttc

SEQ ID NO: 94059 - DNA, 2876 bp, Oryza sativa
  Clone ID: PAT_MRT4530_92384C.1
ggaattcggcacgaggacgcacggagccccgagctcctgttgtttttttttttttttttttttttttttttttttaaacatcgaagccaattttctccattactgatgcgaagtacaaatgagcacgctctgctcatcttgtcaataggaatatcagcaaaggttctgcttttttttttcacccttgtaaatgtaaaggccagtaggccattataccctaaaaaaaagaagataacactaaatatgtaaataataacacgccttattgtaggacagtataattagcatatcacattgtcccctattccttaattatagtcaaactgcacatctatatctcaagtttccaccattgtaattcttttgtaactgtccttacctcttgcaagctagctactgcaccatgtgagattcttttgtaagctgttgtttctgtcctcttctaaagtataaaatgaacaccatgtgtttatgtgcctcctaattattttttttcgaaaaagatgtgccgcctaattatgaccagtgagattttcttctgccttccttctctatctacaacaaaaatattgttgctttttgctgtctcctcctgtgtgtgtatacttatgttactcttggaccaaattaccatcaaatgcctaaaagggcacctgaattccgaacccaaggcccaaaagtctctttgtaatttttttcctcctatataattgtggatatgctgtttccagcaggcgctgatgcggcgaatggactctcaggcagcagttcaatctggttactctcatggtcatcataaatgttgcctgcctgtgtaggaggagcttggctgtttgaaacgatctccagtggatcaggggatgcaagggatggattcataaggtcgagttgtttcgaatcatcctggagagaatggaggggactggcgtcctcaatgctgcaatcgaagtatgcaaactgtggcggcatggattcaagcctccgaactgtggcgcgccgcctctccatctccaagagcatctcgcgcttctctgccaactgcttcctcatcaacctcgaagcatcatactctgctgtgtagagctcttgatcaaactcaaagaagcgtggaggacagtagggaaccatcgatttgatgttgtccacgcacgtcctgtcgacgcatttggatttctccctgtagggcttgacgagaacccgcgatccgcagatgaaatgcgggttgcgccgcatcaggatggtgctcaccgtctccgggctctggaagctgacgaacccgaacatgcgccgctcttggcaggggatcctcacgtcgcgcaccggcccgtactgcccgaagtagttggcgacgtcgtcctcggcgaaggtactctcggctgggaaggtgaggtatatctggtgcgagctcgccggaactgagcccgtgtcgccgccaccaccgccgccgccacctctgaaatccatgtacttggcagcgtcctccgcgagaaccaccgaatgctgcccgtgcggcctttcgatgacccgtatcttgttgaggcgagagagcagcctggtgaggctgtatccggccttgccatggcgctggctctcggtgaggtagccgtcggcttggagtcccttgccgtacttctcgccgtagagcgtcggcagcgaggcgatggacaccggctgcccgcgccgcgagttgagcagctcggtgatctccatctccagcgtctcgagcgagcccggcgtcacgccgcctggctggtggttgtacacgtcgccgttgatggcggcgccggcgagcgcgtcctggtacacctggtggtgcgagtagtggcagttctggccgttcttgcagatgcctttggagaagtagtggcagggacgtcgagtggacagcccgttcgaacgccgcgccctcgccggcgaccccccgccgccacccccgccattggggaaggcgtcctcgccggccgggtagtagtacccgccgccaaagttgttgtcgtcgaggacgtgttggccgccgcgcagcgggtacgggccctccgcggaggcgtcgacgacgagcccgggaggcgcgaactcctgctgcgccgccttagtcggtggcgccggcggcgagtccggccagtactgcggcgactggacctggtatccaaaggcagccgcggcggcggcggcgggagagtagtgatggcgaacgccgccgcaagcaggtaccggggggcgggagaagagctgctgcggctgctggtgatagcctccgccgccgccgacgccgacgccgccgccaccgggaggtccgtgcgcggcggcggcggagcagcgggcatagatgacggtgagcgcggctttagtatcctcgatcttggcgaggagcgtggcctcgggaccatatgcgagctgcaccaactcgtcctcgtcgggctccctcagcagcattacgccgaatatcttgccgacatgctccggctccaccctctgcaccctcgcgaacgccagcttcactaactccggcacctccattgccacccaccaccaccactggtggacatgaaacctaaacctagcctacctcgatcgatcactagacgcccgcaatggaagaatggaattgaaacaggaggaacacgaagaacaaacctgggcctccttttataacaacaaaggaggaaccaattcgagatcgatcgagagcgcgcgattcgatcgggtggatagtatcgcgcgcgcatcgatcgcatcgcatcgcatgcggggggatcgagcggagggctcgctcgccgatcgaagcctagtcgtcgccttggcccagttcaaacggcgcacgcgactgcgtgcgtgcgtgcgtgcgagcgagagagaagaaggcggagagcctcgtc

SEQ ID NO: 94060 - DNA, 1263 bp, Oryza sativa
  Clone ID: PAT_MRT4530_92385C.1
atggtgatgctggaggaagctgttgaggaggggatcctcccttctcgggatctcatcggctggcggggggccaccggggaggagttcccgaccctgaacaccgacgatatcatggtgttcctccccttctttaggtttggcctcggtcttcctgccgacgattttctccgagggctgcttcatttttacggtctgcctccatataatggccatgccccgggcgtgaaggattgttggtacacactccctagccgcgatgagatggaccaagttagaggggtgctgaggggagtgcgtcttctaatcgatgctggcttgacctgcaacttcgtcacttggaggattcaaccactgaagagtcgtgttcacccagtctgggaatatttaggaaaggatgacccgaccagggagagcaatgagttgattgacaaggaccaggcttccgagagcaagaaatggccggagggagccgtgacctttatctccaaccctccactgcttgggacctcgagcaagaggcgtgttgacgatcccccttctagtagctgctctttcaagcatgtggcctcaaagcagccacgcaccccgggtggccaaccggtaggtccaagtcggcaaaggatgccgacagcgcctctacttaggccactctcgagtcgggtcaagagaccgccgcccgggtggatcggggctgccagagccggcacctccgggcccgaggtggccgggcagaccacaggggacctaggcgagctaggcggtgacatgacagcggcaacgacgaaggacgcgacggatcaagggaccgacgggggaattggcggtgggggctttgtgagctacaaacgagacatcgcatgcgcatatgcctcctcaccattctccgttgcgagcttctcccccgtgagcttctcctctgcgagtctcctccatggacttctcctccaccgagtcctcagccgcctccacaccactgacccgggaaggagccggttggcgaggatgaggaaatcgtggaagaaattccgcgtcggcagtgcgcgctgctgtcgacccagtatgtctcgcccctccaaactgcctggttctggggggggcaaaaaggggttcgatgatgccgctgacaaggccgactgcacgaccatgtatgaggcagggctggttctgctggagaagatgcagaagatagtcaatcgctctactgccaagagcgaggcgctgcggagcgtgtttgacaatatcacagagatcgagcaaatctag

SEQ ID NO: 94061 - DNA, 120 bp, Oryza sativa
  Clone ID: PAT_MRT4530_92386C.1
atggaggataattctgcccggctgcccgccagactctatggatggtgtccatacaggaacatatatgtggtggttgagtaccatccacaggccacagctgatcttaatatcgtgtgggtg

SEQ ID NO: 94062 - DNA, 222 bp, Oryza sativa
  Clone ID: PAT_MRT4530_92387C.1
atggcgcttctgccgctgcgacggcgacaccgtctactcgccgtcgttcagctcgccgtggcgctctggctggcggcgacgagcggctaccggtgcaagctggtggtggacggcggccatactccgctccacgggcgcgctggcgcccgcagccgatgccgtcggtctgcccgcgggagggttgcttttggtcaccgccctctgcccgacagccttagttag

SEQ ID NO: 94063 - DNA, 1923 bp, Oryza sativa
  Clone ID: PAT_MRT4530_92388C.1
atgtcctcctccctcccctctcccctcctcttcctcctcctcctcctccccttccccgccgcggttcgttcccagccggcggcggcccccgcgccgcagcagcaatgcccgctcaacttcaccgcgctccggcccttcctggcccagccgctcccgcccgacgactccgcgcgctgcctcctcgccgtgcagtccgttcgcctcctcctcgcgctccacctcgccgccacaggatccttcgtcctcccggctaactcctcctgcctcccgccgctccgcgccgagctccccttcgcgctcccgtcgccctccgcctgcggcctccaggggctcgacgcgctcctcgcgtccccggggtgcgccaacgtttccactctcggggacttcgacgccgccgtgccgccgtcctcgcgggcggacatgaacgccagctgcaaccgggacctcaccccggtccccgactgtacctcctgcaccacctcgctcagcaaggccgcggcggcctacctcctcccgggctcccccaacgacggtgggaacaacgtcaccggctgcgtccagtaccccttcatctacgccggcgccgccgccagcccgcgcggcgccgacgacccagccacggccaactgcctctacctcctcaaggtgaactctgcttccaaggccagctccagcgtccctggttgggtctacggcgtcgtgtttggctgcgtcgccatggttctgctcgttgccgcggcggctgcctcttggttcctggtgcggcggcggcggaggcgggccgccgccgcggcgctggccaaggccgcggccgacagcaggagcaagcgctcgcaggcgatggagtcaatcagcgcgagcaccacgctagtccagttcacctacgacgagatcaaggcggccactgggggattcgcaagggagagcatcattggccgcggtgggttcggcaatgtgtacaagggcgtgctcccggacggcgcggaggtggccgtgaagcggttcaagaactgctccgcggctggggatgccgcgttcgcgcacgaggtggaggtcgtggccagcgtccgccatgtcaacctggtcgccatccgtgggtactgcatcgctaccactgagagagaaggccaccagcgaatgattgtgtgtgacctgatgcacaatggcagcctgcacgatcacctgttcggtgccggggaatgccagatgacgtggccggtgaggcagaggattgccatagggatggcgcgcggcctggcctatctgcaccgcggggcgcagcccgccatcattcacagggatatcaaagcgagcaatatcttgcttgatgacgactttgaggccatggtggctgatttcggattggccaagtttgcaccggaagggatgacgcatgtgagcacaagggttgctggcacgctgggttatgtcgctccagagtatgcactgtatggccaattgactgagaagagtgatgtctatagcttcggagttgtacttcttgagcttctaagtggaaagagggcatttatctctcttggtgaaggccagaactttgtgctcagtgaatgggcttggttattggtccggagggggaagacagtggatgtgatccaagaaggaatggttgagcctggtcctactgaggtaatggagaagtatgtacttgtcgcagcactctgcacgcatcctcagctgcacgctaggccaacaatggatcaagtggtgaagatactagaggcagattcagcgtcaggtcctttaattattccggagcggcctcttccggtagtcgcaaacctggctgagattgagagatcagccagtagcagtggctcaggtcagctgtttagtccctctggtttccggtcttttactcatataaatgaagatgctgctttggagtctcctaaagaagaatga

SEQ ID NO: 94064 - DNA, 1774 bp, Oryza sativa
  Clone ID: PAT_MRT4530_92389C.1
gcgcgcggcgcgtacctgcccctccctccgcttcctcgcgcgccccgcctggccgacctccgcctctctctccttcctcgcggccccctcccgagcgagcgcggcctggttagccgctagccggtcgcgccctctcgcgtctgccatctacttgggtccgcgcccggcgccgccccccctctcggccggcgacctccgccagctccctccccctatggagggggagcaccaccatcaccaccaggatcatcaccaaggccacttccaagccttctccctgcagcctaaggatcccccagtcttattcccctttgtgatcagtagaagaagcagcagcagcagccctagcgacagcaccactctaagctatggttcagaccatcacttgacacagcagcagcagcatcagcatcaagccatgcttgagccccaaaatatgattggaggatcatccgctggcatctttgcgacgccgttcccgaccgtcaagagcatccgcgacgacatgatcgagcggtcgcagttcgatccatacgataccgagaagctgcaggcgagctgcgggttagccaaggtcgtcgccggcggcaagtggagcgcggtgccagcggccaagatgaagatcacgaggaagatgggtgagccgtcgtccggtgtcactggcggggctgcgacgacggtggcgccgaagaagccgaggaggaggccggcgcaggcgtacgaggatcacggccatggcggcgccatgggccaagcttttggcgtgattagggtgtgctccgactgcaacaccaccaagactcccttgtggaggagtggcccgtgcggccccaagtcgctttgcaacgcgtgcggcatcaggcagaggaaggcgcggcgggcgatgatggcctccggactaccagcgtcccccaacgccgccggccccaaggcggccgcacatagcggcgccgctgcggtggcggctgcgcagccgaaggtgaagaaggagaagagagccgacgtcgaccggtcgtcgctgccgttcaagaaacggtgcaaggtcgtccaggtcgaggatcatcaaacgctgcccgccgccacaaacgcagccgccgcagctgccatggaggagacggccgagtccgccaccgtcgccccgcccccggcgccgacgacgaggggtggtactctcgtcgacagcatcgggctcagctggagcaagacccatgccgccgccaccgcctcctgcagcttccggccgtcaccggtggctcccggcttcgcggcggcggtgcaggacgagatcactgacgccgccatgctgctcatgacgctgtcctgcgggcttgtccggagctgagaaagaaaagctatacttcatctctgcatgcatccatcgatcgatcgattggcaccaagctagagagaccaatcgatggagatggagagaggtgcaggctttttgcagctagtgcgttagcctgttcttgctcgctcgatcgatcgtacactgccccccagttggaatgtctcttggcgtcttgtttcctgttcgagtcttgtgatctctgttactttgtgcactgtactagagagtgagagagagagtgaggtagaaacatcaagaggagattagaggagaaagaataattaagagaaaagtgtgagctagctaggtaagatttactgtactgtgagttcaatttggagtaagcttttttgggctgcttcacggctaattatgccactggctgctatatatgtatgtttggtcttcgtttaaaaaaaaata

SEQ ID NO: 94065 - DNA, 1509 bp, Oryza sativa
  Clone ID: PAT_MRT4530_9238C.1
atgcccaccgaccaccggccgctgtcgcacgtcgccgcgtgggtgtgcgacaagccgacgaccgtcagactgccgccgcgccgaccaccaccgcaaggccccgcctggccccttgcctcttttggctcctcaacgccgagagccgaaggacgtcgcgccacctcgtcatcttcttgggtagtcaagtcaacactcagcgactcatccagccatccaggtgcatctccggctggtaccgtagctgttggtactggtcactcggcattggcaccaaatgcattggtactaaatgatgcaaccacagccactggaggtggaggtggaagttcagaacctgttgttattcccgatgaagaagatggagaattcacaggagaagttgaaccggtagcaaagaggcagaagaagtgtacctcgaaggtttgggactatttcattaagtacactgacaaggccaagaacaaagttactggtgtggaagagcaacaacgccagcaagaacttcaggtgaagggtgaagttcagactttcaggtatgatcctgaagtaagcttggaaaagtggtatatagctgttattatgcatgaatatccattttctatggttgatcatgtgtatttcaatgagttcatccactctcttcggcctagttttgaattcaagtgtcgcattaccactagtaaagctatattagagatatttgaagttagaaagagaattttgtatgatgagctgaaatctgtttctagtcgaatttctacaaccatggatatgtggacatcaaatcagaacaaagcttatatgtgcatcactgctcattggattgatgaaaattggctgatgcaaaagagaattcttaagttcattcatatagatgggaaacatacaggaacaaggctagcaaatgcatttgtcaagggagtaatgtctatgaatattgagaaaaaattatttgctctcacactagacaatgcttcatcaaatgataaatgtgctagagaagttgtgatagagcttaacaagctgtttaacatcagtaaggtccctccattgatgtgtgatggtgctttctttcataagatttaccctgacaagtatgaagaggaatttaagcgtgtcttggctgctatcgataaatttttccgggcttacaagagttgtgttgcaaggtcttcgaaacctaccgctgcaggatcaagtgaaaattctcagccacatggtaatacttctttgggtcacaatgaaatcgagaaattcttgtatgatgatgcagctgcaaataaagaagacgatataaatgaattggatgtctacatgaaagagaagccaattcgttgggttgatccaacagttctagtttgtaccaaggattggataagagcatctagaaaaggaccatttaaggacaagatagcaataattcttgatgagctggatgtacagatagaggataaagatggtgctaaaactgacaatgatgaggagggtcaggcaacgaatagtgtttga

SEQ ID NO: 94066 - DNA, 504 bp, Oryza sativa
  unsure (1)..(504): unsure at all n locations
  Clone ID: PAT_MRT4530_92390C.1
cagtgcgcactgtcactaacgttggtgaccagcatgatgctgtgtacaaagctttcctcgagcctcctgcaggaatcgagatggccgtcgagccaccagagctggtgttcagcaaggacaagaaggatcagagcttcaaggtgaccttcaaggcgacacggaaggtccatggggactacacatttggaagcttggcatggcatgatggaggcagccactgggttcgcatccccatcgccgttcgcaatgtgattgaagagatatattccaatatttcctaattcgatatgttagcttcatataatgctagctctgatcaaatctaaataatgaagaagaaatcaatcataagcttgatacatagcatatgtatctgcaatcatgctggatatatattattccagctccaaccagtctatatttaaggttacagtgaataattttaggtaaccctatcttaaataanggatttgctatgtggctaaaccatcgngaatgaaaaaa

SEQ ID NO: 94067 - DNA, 641 bp, Oryza sativa
  Clone ID: PAT_MRT4530_92391C.1
tcacacccttcctgcctcgccctgccacctccacgtccgcgtcgctgcctccacgcaaccgcacaccaccgtcggcggcttgggggtcgccctcccgcaccggggaggccggatccagatgggagagggctggatatggcagctacaccgcctccacgtccgtgcttccctatccacgcagccacacctcagcggcggctcatgggcgtgtctcactccgaggaggccggatctggtagcggacgccagatccggcagtgacaccttgccattgtcgccctggcctacctcgccgtcaacgctgtcgcgttcctcttcgacgccagcggccaggccttcgagcgccagctccatcccagcgtcgctgcagctgtcatcgcctcgaagttggtcggggtcatgggctccgaccctgcgatctcgcaggaaaaggaagcccccgctgccgccgttcttacggccgcgtggtttccggcggcccgctcgggcggcggcgaggcagaggcgggggtagtggcgcggcggcaggagtcaccgcccgtgtcacccctgccccagggagcgacgcggggggccttgcaaatggatttttaagtagtaaattatggtgctgcccaattttgttggaggctgcctcgtgc

SEQ ID NO: 94068 - DNA, 5365 bp, Oryza sativa
  unsure (1)..(5365): unsure at all n locations
  Clone ID: PAT_MRT4530_92392C.1
gcaaagaccagccagagtaacatttttttgcaatttaacatcgctttaaagaacatggcgaccattcattttaacattgccaggattatggaaattctgtaacatttcaatgtaagcaccgtgctcccaaaaacatatcccttccccaacattttccaacgaatacaaccagttttgcatcacaactcgcccttctccaaaaactaatgaacaccacccctatagccttcccatggtaaacacaactctgtacatcgtcgatgcattcggatcagcttcaaaataaattcagcaatgcttatgaatctctgaaattttctctatcctctagatggcaaacgatcgaatggccaccctcccactcctatgccaaaatcttattgacaggatcagggatcagaactataccgaagctccaaaaaacctaaacaaaaggattactggcttttctatttctagtattctcatgtgaccgtttatttatgacggggcatgacaaaactaactgatcagtgcaactgctgaattaccactttacgcctttatcccccacagctcaaaacgaatttggtatcaatttctaatcttcacaacaccacaaggaaaagcctatctgaaggaacaattactttgcagcttcaaagaagagcacctgaggttgcaagtgacctttcttacacattacgagcacatcatcccaattaccaacaaccttcacagtctggtcatcgtacatgacccactgcccatcctcaaaagcaaagcaatgatagtgttgcccgtagtaacagaccactgacaccagagaatgtttgcttccttggtctagaccacggtagaaagtactgatgtctatctcagttgaaataccagccaaagttccagatatgtcatccacactttctttgttgttctgccaccccaaaacatcttctggatcacaagctagatggtcattcattatcacaatcttcaaaagatcatcaaatgaatgatctggaaacatatcctttgcagttcgaagtgaactagcattgatattgtggaaaaatgaagtgtacttgagtcgtcttgactccaaccgacaactctggcagttcattcgttcaaggatatccattccaaaaagacagtgtgctatgcaggaactacttgcacaatcccaggaaccaatataattgatctcatgagatttaacttggcagtcagcacgagaagtgtatgacttatgcaagcactcaaagatcacccccaaaacctcagatgcatcattcatttgcccctcctgaaagaatttgctgttggggtaggatttgctcaaagcgatcctcaaagaagtaggtgcgacagcttccccttgctcctctgatgctttgctcagatcagtgaagatatcatacaatgcacagacagcacaaggatcttcaacatgcttatgcagcgatgatgttttaagaaatccatcacgaaaccgctttaaatgccataatgactggataatcacattcaagaaacaattgtattcaccagcagcatttttaaggccagtcccatagacttctttttcattagaagtgccaaggctttgaagcacagctctctcaaggtctgctttgaaccttttgtcatcctcaatgtacagatttgttgatgggattgcactactgtcaactttctcactacttgaattctctcttccagcggagtgagcaccatgcacacggtgtgaataagacaatagtggtagctgattttgttttgtgtcttgataactgtgattggcagtgtcaactgctttaccagaactgctccatcttgaaactggtgaaccagattgtcgaatagatggcctagtatcatcatcaccatcgtcaacaggaaaagtgcctgtcacaccttgaatgtactttttatgagcttggctggtacttctcctagacttttgggtgctaggaatagttggaacctttgtattttctgcatttttcccaactccattcgctttcagtgtagcctttgtatattctacatttttccaaactccattcactttcactgtaggcttaataaggtccacatcgctgctggctattgggcgtgtaccaggatagcccagaccattatgtacctcgttatgatttttctcctttgtttgcagaagatcagaatcacatgatctcaaaatagaatgttcttcctgcaaaggaacttcagaaaaccgaaaatcaccaaaatttatgccctcaagatgagtgtgtgagttattttgagcacaatggtgcttatcctgatccccgttcaaattcacatcagtccgaaggcaagctgacccatcggaacctggtgaagtccttctgtgttgttctgcaagatgcttcttctttgcttcctcctctatccatctttggtactccaaagtttcctccaactttctttcctctgcttcaagtcgtaatcgattcctgaattcttcttgatcatttaagtaattatcacttgttgaaagtgattgctctgatgtctcctcgtctacactatctgggcggacgaggtactgatcactccagctcaaatccttaagatccttagattttcgagaatccttcactttcttcttgtcctttgacttatcatgggattgttttgtgtcgctcactttgtttgcatttctcttagcatccaaagcaagttcagccaggaaggcttcacttgcagcatcagatctctccctagcatccttgtccaccagctcttccaaatgggttcgcaagaatgatttcaaaaggggaaggataattgttcggtaatcaaggacagaagcaggcccaagcttgagtttcagctgctcaatcacggctgaaattcgcataatcctagcatctatcttgttaagctccatagcaacatgttccttcagtcttgaaacaaccaactgtaccaccgaatcgtttgaatgttcaaagtcataaaaaccccattcatcttcctctgtcccatcatagtcacgatggttcgaggtcatgccagaaaaggtttcatcgtatctaaaaggtgctgttttaacttcccttaagatagtagagatagcatgtagctcagatctgcaaccgctaaacaattcctcagcattgagctccagctgctcctgtcgcttctttaggagctcctcatatccttgaaatggatagggatccacgtcgtccctccgcctttgctcttcacataaaaggctatccacagcaagcaagccctcctcactgctcagctggtcatgcttctgttcgtacgagttctgcaaggctgagaactctttctcgagctcatgaagaatgtgcgtgcactgatcagacctcacatcaagcatatggttccagtccaacagctgctcttcaactgaaggtccagtatataaccatgaaaggaatgggtcagcaacaacattatcacggtcagatctcatttcaaatgcctggccatcaaggataagcaatgatgaatcagaatcaagtgtaaccttctccaagttactgcgattttttgggaaactatctttgtcagctacttcctcatccttatctgtgttcctatcattaagtccactagcctgcataagttcctgcaagaatttgagcaccttccgcagtgatgatacatccaagaaacaaatgcagagtggtgactcatccaacgagtggttaagcagcagtgacgcggaatgcatcttcctgagttcctccatagtaatatgtagaaccttgttcagatggctcaatgaaagattcttgtgtttcacgaggattttgaacaacgaatggatcctctctaaaatatttgctctttcctcatcatcagacagtggccacttcctgtcaccttcccttgtcacggcgccaaaactttcacactcctcgttgtgtggcgaggttgaggaatctgatgtgtctgatttatcttttgtactccaaatatccgatgacattgaatctttgtccctatctgagccaacattgtcagctagttcttcctcgagaattttcagtgccgcagtagcatccaccggcctccaggttgaaccagtgagcttttctgcccaggcatcatcaatctcctccggcaccacatcattcaaccggggaggtagtacacccacatgttcctccattgcatgatgtacatgtgattcagcatcagcaaaatgctcctcacaccggccacataccaaaaactcccattttccactcctagtggcaaaccttatcgcctcgttaagcacatcagataccaaactggcagcatctttctccttatgcatcgcagtagcgtagtgtgacttgagctcagaaatactggtgcttaagaatgcaagcctccgatccatgggcactgtggcccagaactcacgcacctgattcatgcgaccggacactggcgaagctgctgccttcctggacccacccttcctccggtcagcgcgatgcccagacactgatgactgacacgacgaggagggggcctcatcccccggtgactgtgattgggaggtggatgatgaggccgatgtggcattgtgcttctgctgctccatcagcctcatcgcagcaagccgcacctcaatctccttgcgccgctcttcaggggtcttattagccttcttgatctcattcgggcggcgcggcgcaggcgcagcaggcaggagccggacctcggaagaatcgtcggcgccgccgcggcgaatggggaaaacccgaaccttatcctcaggtgtgtagcccatgttcatgttcttaacccacagcgagatggacgtcatgttggacctctgcaacaggttgctgagctcggccttgacctgctcgacgtccggggccggtagcctgagggagtggggcgccgggtcggtggggctctggatggccatcccgcggttgcactcgctgctggcggcctcgtacccggtggtgtcggaggcgatctcgtagaggagcatggcgtggaagtgggcgagctcgatggagtccggggccagctcgaccgccttgcgggccgcctcgagcgcgagccgctggtgccgcgcgcggaagacgggcttgtcgaggaccgcggcgtagcgcgccagcaccgtcccntgcgcgcggagcagcagcggcgatccctccccgtgcttcccgaccgcgtccttcaccacccggagcgccttcgcgtggttcccccgctgcagcgctgccagggccttctcgcagacggcccggaccgcggcgccgccatccgccgccgccgcatcggggtggccggccgccggaggggagggaggagtagggtttgcggcggcggcggcggtgttgagggttcgcttctttcggcccat

SEQ ID NO: 94069 - DNA, 449 bp, Oryza sativa
  Clone ID: PAT_MRT4530_92393C.1
attcatttagcaaactgtcaattttgaaagttcttatacaaacatgaaatgccctagaaaaatggcatgtaaatttatccattcaaaaatgtgattatgtgaaagagataaatgagtcctcataggcataccactgacaccagagaatgtttgcttccttggtctagaccacggtagaaagtactgatgtctatctcagttgaaataccagccaaagttccagatatgtcatccacactttctttgttgttctgccaccccaaaacaactgtaaaaacatgaggggggctagaaagaatgtgatgaatatggtttggttttccacaaccaccatcttctggatcacaagctagatggtcattcattatcacaatcttcaaaagatcatcaaatgaatgatctggaaacaggacctttggagttcgaagtgaacgagcattgatattgtg

SEQ ID NO: 94070 - DNA, 825 bp, Oryza sativa
  Clone ID: PAT_MRT4530_92394C.1
cctcccgagacataagaagagcgtggaagagagggaggagaggggagagagcaatgccgacggggaggttgagcggcaacatcacgcaggactgggagccggtggtgctgcggcggacgaagccgaaggcggcggaccttaagtcgacgagggcggtgaaccaggcgatgcggacgggggcgccggtggagacggtgcggaaggcggcagcgggcacgaacaaggcggcggcgggggcggcggcgcccgcgcggaagctggacgagtcgacggagccggcggggctggggcgcgtgggcgcggaggtgcgcggcgcgatccagaaggcccgggtggcgaaggggtggagccaggcggagctcgccaagcgcatcaacgagcgggcgcaggtggtgcaggagtacgagagcggcaaggccgtccccgtccaggccgtgctcgccaagatggagcgcgcgctcgaggtcaagctccgcggcaaggcggtcggcgcgccggccgcgcccgccggcgccaagtgaatccttcgtggccggaatcgcacctccgatccctcctagttaggcgttgatccgtttgtgaatgtgcagtttgtttgtgttcttggcttaattttggggggaaactatgatatgctaactggctcagacgcatgtgaagtgatgatggctagaaattgaatttccgttggatttgtgaacacatagtttagttgaagcgcttttcgatccggttgtgttcaatcgtcgttgtgctctgcttctaaaaaaaaaaaaaaaaaaaaaaaaaaaaaaaaaaaatgattgatccaaaaaaaaaaaaaaa

SEQ ID NO: 94071 - DNA, 1107 bp, Oryza sativa
  Clone ID: PAT_MRT4530_92395C.1
cgcgccgctacatcccctactgccccccccgcaccgaaggcgcgccccgccccgcggcgacggatctacccccggctgccccactcccaccggcggcaaccccccggcgattcgcctcgtaccgggcccccccgcggtacccccccccccaccgcccccaccatccccacccctccacgcggcgcggggcgcgatcccgccgtcccccccaacactctccccccccgtcacgccctccccccccccccctaaacccggggtcaccgtacgccgctctcctcaccccgccgcctccgccaaggaagcgctacccccccccccaccggcgccccgcccccccccccgccaaaggaaccccccccaacccagccatgaccccccccacaacaccaccgccaaccgccctacaccccaccttcccccgcttcagacccaacacctccccccccctaaactctaccccgcccacggcgccccgctcaccccgcccactccccccgcctcccccctcccccgaacacgataccccctcgtcccacccccaacccacccccccacacccccccccccccctaccccccccctcctcacccccccccccccttcccccccccccccccgcccgcccaccccacgcccccccacaacctccccccccttactccgccgcgctcgccgctgcctcgccgccgcgctcgcctctccgcatccgccgtcgcctgtaccaggcaaacccccccccccccccccgcccccacggcgccggccgcctcgaagtcacggcgaacctcggccgtcgccttcttcatcgccgccgggttccggattagctccgcgaacgcccaccccagcgtcgtcgccgacgtctccgccgcccgcagctccacggtccgcccgtccgccgcggccgcggcgaccgcgcgcagcgtggcggcgacctcctcctccacctcccgcgccgcgtcccgcgacgacaccaccactcccgccgtcccttgctcccacgctgccgatctcgccgtctcccgcagtccacgccgcccaagggaatagggccgccaccaccagaggctggcccaacggatccacatgccctttatgtcgcca

SEQ ID NO: 94072 - DNA, 506 bp, Oryza sativa
  Clone ID: PAT_MRT4530_92396C.1
ctctcaagaaggccgagtggagacgaagccggccgggaggaaggggtcgtcgtcgtcgtctccggcggccgaggaggacgacgacagcactgcgtcggcgaggtcggccaaccctcagcggggtcgccctcaagctcgcctccccttgctgcgccgctctggctcgccgccctcgtcggtcgggtctgcgccggggactcgtcaccccggggagggcagaagtgggagctcccctcgtcctcgccctcggcctcggcgtcaccgtcgtccccgctgcagcctgccgctttgcgcctccgggatggacgccagcagcctgcgtcaacttacaacagtaccctctgataccccacaagtatcaggctgatacctaggtaccacccaataccttggcaccgggtatcagatatcagtcgatacctagtcggtaccaaagcccctttacaaatagaactagggaaatcaatatggatacaatccgagtagtccttgtcatttccatgtag

SEQ ID NO: 94073 - DNA, 505 bp, Oryza sativa
  Clone ID: PAT_MRT4530_92397C.1
tcagtagaagctcgagctcggctcggtaaagctcgcgagcttttgctcatgtgctactttcaataaaaatttatcagaaaaccgagcggagacgaagccggccgggaggaaggggtcgtcgtcgtcgtctccggcggctgaggaggacgacgacggcactgcgtcggcaaggtcggccaaccctcggcggggtcgccctcgagctcgcctcccctcgctgcgccgctctggctcgccgccctcgtcgggtcgggtgtgcgccggggagtcatcgccccggggagggaagaagcgggagctcccctcgtcctcggccctcggcctcggcgtcactgtcgtccccgctgcggcctgccgcttttgcgccttcgggatggacgctgacagcccgcgtcgacctgcaacaggtatggccgtcaacctcctcctcggctcctcctcgagacttctcgcgctctctggcttgggcctcacccctcacctcgccgtgcctcctcgacgccat

SEQ ID NO: 94074 - DNA, 681 bp, Oryza sativa
  Clone ID: PAT_MRT4530_92398C.1
atgtgctccctggtacctgatacctggtacctaatacctgttaccttaccgggtacctggtacctggtaccggttgatacctggtacctggtacctttggtaccgactaggtatcgactgatacatgatacccggtgccaaggtaccgggtggcacctaggtatcagcctgatacttgtggggtatcagagggtgccgtcaaaaagaggaggagacgtgggggagggagggccgcaacggcggaggatagcgtcgaggaggcacggagagttgagggtcgaggcccgagccagagagcgtgagaagtctcgaggaggagccgaggaggaggttgacggccatacctgttgcaagtcggcgcaggctgccagcgtccatcccggaggtgcaaaacggcaggccgcagcggggacgacggtgacgccgaggccgagggcgaggacaaggggagctcccgcttcttccttccccggggcaacgactccccagcgcacacccgaccgacgagggcggcgagccagagcggcgcagcaaggggaggcgagctcgagggcgaccccgctgagggttggccgacctcgccgacgcagtgctgtcgtcgtcctcctagccgccggagacgacgacgacgaccccatcctcccggccagcttcgtctccgcttggccttcttcacagtga

SEQ ID NO: 94075 - DNA, 526 bp, Oryza sativa
  Clone ID: PAT_MRT4530_92399C.1
ccgagcggagacgaagccggccgggaggaaggggtcgtcgtcgtcgtctccggcggctgaggaggacgacgacggcactgcgtcggcaaggtcggccaaccctcggcggggtcgccctcgagctcgcctcccctcgctgcgccgctctggctcgccgccctcgtcgggtcgggtgtgcgccggggagtcatcgccccggggagggaagaagcgggagctcccctcgtcctcggccctcggcctggcgtcactgtggtccccgctgcgggctggcgcttttgcgccttcgggatggacgctgacagcccgcgtcgacctgcaacagtaccctctgataccccacaagtatcaggcttgataccttggtaccaaggtctgatacctaggtaccacccggtatcttgggtactgggcatcaggtatcggtcgatatctagttggtatctaaggtaccaggtactaggtaccaaccggtacctaagatagcaggtatcaagtaccaaccggctgacgttggtgaaaaatt

SEQ ID NO: 94076 - DNA, 3224 bp, Oryza sativa
  Clone ID: PAT_MRT4530_9239C.1
cttcgcttacattccatacatggattgaataggagatggaggcgttggtcgggcagatggacagcagcccaacacgcaagcgcccaacaggccaacacaacaggcaacagccagcccacatccaaaaggcccaccaaacaaagtgccaagcacaaaccctagccttcacttcacagttcagattagggcagaacgcaggcaggcaaacagccaggcagcaccgcgccgcacgccgcatgcgtgcatccaggctccagcaccgtcgccgtgccttcgcagttcgccgaccaccaagtggctacgcggccacgcccaccgaccaccggccgctgtcgcacgtcgccgcgtgggtgtgcgacaagccgacgaccgtcagactgccgccgcgccgaccaccaccgcaaggccccgcctggccccttgcctcttttggctcctcaacgccgagagccgaaggacgtcgcgccacctcgtcatcttcttgggtagtcaagtcaacactcagcgactcatccagccatccaggtgcatctccggctggtaccgtagctgttggtactggtcactcggcattggcaccaaatgcattggtactaaatgatgcaaccacagccactggaggtggaggtggaagttcagaacttgttgttattcccgatgaagaagatggagaattcacaggagaagttgaacctgtagcaaagaggcagaagaagtgtacctcgaaggtttgggactatttcattaagtacactgacaaggccaagaacaaagttactggtgtggaagagcaacaacgtaaagcaaaatgcaaaaaatgtggtagagtgtttggagcagagacagtaaatggcacaaaacacttatggaatcatttgaatcgtattcactcattgaaacaaggccagcaagaacttcaggtgaagggtgaagttcagactttcaggtatgatcctgaagtaagcttggaaaagtggtatatagctgttattatgcatgaatatccattttctatggttgatcatgtgtatttcaatgagttcatccactctcttcggcctagttttgaattcaagtgtcgcattaccactagtaaagctatattagagatatttgaagttagaaagagaattttgtatgatgagctgaaatctgtttctagtcgaatttctacaaccatggatatgtggacatcaaatcagaacaaagcttatatgtgcatcactgctcattggattgatgaaaattggctgatgcaaaagagaattcttaagttcattcatatagatgggaaacatacaggaacaaggctagcaaatgcatttgtcaagggagtaatgtctatgaatattgagaaaaaattatttgctctcacactagacaatgcttcatcaaatgataaatgtgctagagaagttgtgatagagcttaacaagctgtttaacatcagtaaggtccctccattgatgtgtgatggtgctttctttcatgtgagatgtttatgtcacatattaaatcttgtggctcaagatggattgaaaatcattgcacatacaattcagaatattaggactactattggtattgtgaagaattctacgttgcaatgggaggaatttcaaaagtgtgctgtagaatgtgacttgaacaacaattctgggctaccccttgatgtgcctacaaggtggaactctacatatgacatgttgaaacaagctatttactacaagggtgcttttgaaaggcttttattcttagatgaggatagatatcaaaggtgtgcatcaagtgctgaagaatggggtatggcagaatcactatgcaattgtttggagaaattcaatgatgccacattgttattttccggttgcctatatccaactgcaaacttgttttggtggaagttttgtgagattaagttagcacttcgagaatggtgtgcaagtgctgatgtctccattgcttctatggctgtggccatgcaactcaaatatgacaaatattgggacaagtccaacctagctcttgctgtggcttgctttcttgatcctagatacaagcaaaagctaatgattttttttctacagaagatttaccctgacaagtatgaagaggaatttaagcgtgtcttggctgctatcgataattttttccgggcttacaagagttgtgttgcaaggtcttcgaaacctaccgctgcaggatcaagtgaaaattctcagccacatggtaatacttctttgggtcacaatgaaatcgagaaattcttgtatgatgatgcagctgcaaataaagaagacgatataaatgaattggatgtctacatgaaagagaagccaattcgttgggttgatccaacaggtgaaggtgtagaatttgacatactggcatggtggaagaacaaccaaatgacctttcctatcctctcaacactcgcgcgtgatgtaatggctgttcaaatctctaccgttgcttcagagtcagcgtttagtgctggtggtcgtgttgttggtccttttcgcagttctctacatcctgagatgattgaggctctagtttgtaccaaggattggataagagcatctagaaaaggaccatttaaggacaagatagcaacaattcttgatgagctggatgtacagatagaggataaagatggtgctaaaactgacaatgatgaggagggtcaggcaacgaatagtgtttgagataaaagatcgatgcattgaggagcgcggcgcgggatgcagatcttctcgaggccacggatgatggcggagcacaggaactctacatcaactataggcgcatatagattgaagcccgcgcgctgcttgctacaatctcacggtacaagaagcagactgactagtggcttgccgtcaccaacgcaatcaactctgtcttgaaggaaattggagattatgagaactgcatgaagatcatggatttcgactgtaaaagtataaatgcagctatccgtaacattcaccactcctgactttgctggtgactatggtgttaggaagattttatcctactcctacgcagtttaggtcttttttttttacccttgagttgtcaactctgttgtataggactggtttggtctacacaattgaaaaattcccaagctttttactgggaagcctcctcgtaggcaacaatatattctgttgcaaatatttgtctacctcagaaaataaatattggttctaaggagg

SEQ ID NO: 94077 - DNA, 207 bp, Oryza sativa
  Clone ID: PAT_MRT4530_923C.1
atgggagtagggagatctgctagggataggtctgcccgacttggccgcttgagggttttcaccctcttcttcaacgactacagcgggcgggttgctggatcaggcgcccccgagctcaccgccgccagatcttatagccacaagatcatgctggatgagagaaagcaggaggaatcggagaggacgacccagatctggacgctttga

SEQ ID NO: 94078 - DNA, 382 bp, Oryza sativa
  unsure (1)..(382): unsure at all n locations
  Clone ID: PAT_MRT4530_92400C.1
agctgcggggctgggtggggcccacacacatgctgcacttatgcaagggacacatgtaacacactgtggttgcaagccctatgagccccagcaactgaccaactgccacccacgttttgggtggatgctgctgaccttgtggatccggaatctgggctccaagctccaagctgctggtgtgggctgtgtgtaacgtgcccatgctgaagatatgggtatgctacccctaggtaactatgggtgccaccccagtaccntacccccctggccggtgtcttgtaatgagtttaccgtatagtgtttcggaagttaaaaataagctcagatatcatcatatggggacatggggaaactttggggtggttatgaaatgagaaaaaaa

SEQ ID NO: 94079 - DNA, 249 bp, Oryza sativa
  Clone ID: PAT_MRT4530_92401C.1
ggcgatgggtacccctcgagccggccgggctccccctccaccccccgcctcgaccgtataacgataacaactaaaatctcaccaccatgaacatgatatttcttctttggtcaccttaatattgaaggatgtcacgcctctgtgacaatattgaagttcacacccaatgcttacacctcctaccaactgaactacaaaaacggaagctgtagtaaataatgatttaatccatggacagagaaaagaaag

SEQ ID NO: 94080 - DNA, 275 bp, Oryza sativa
  Clone ID: PAT_MRT4530_92402C.1
gatgatcaacgcctgcgtcttgaaaccttctggatccccagagaccgctcacagaagagctcttttttttgtttcccttttgcgaacatttttcttggccttcttttttttttcaatgtacctggggttaattaggttgtatcgatcgtgactgagccaagtgccaatcttcgatgccccccgtgaggcttttaacttcgtttttttttaattaccaatgactcggtctgagctgatccatccaagtttttatctagtatctctggtaaaaaaaa

SEQ ID NO: 94081 - DNA, 2304 bp, Oryza sativa
  Clone ID: PAT_MRT4530_92403C.1
gaagaataacatgttggttgcattgccatcgactatgtcatcctgttctgttccttttggtatctgtctgatcacaacaaatcatatacaattgccaagctagaacttcaccaatcgtgattaattacttactacaatctgaatctacatgatttataaacgtgcctgcactgcaaatgctatctgccgtcctcctccatcaacgtgacgttgctcatgcagtacgactcgccgaaggagctggacgacacggccaggctggagatcctgacgttgaagtacgccggctgcctcggctccggcatcgtcaccccctcgctgccgagcatggcgatcacgtcggacatgttcggccggtcgtcggcgctgtcctggacgcacagcagcgccacctgcacgcacttcatcacctccatcgccgggaagtcctcccccagcgcctggtccaccagctcgtgccattgcccttcttgccatagctggtacgcatatcctgtgagattgaagaatttgccgtactggtagaatccggcggtcctcttgccgcttatgatctcgagaagcaggacaccgaagctgaacacgtcggatttgatcgagaagagaccctcagaagcatactcaggagcgatgtaaccatgtgtgcccacaaccctggtcgtgttggcttctgtcacattcgagcagaatatccttgccattccaaaatccgagattttggggttcatctcccggtcgaggagtatattgcttgctttcagatccctgtgaataactcgcaaccgagagtgcttgtgcaggtaaagaagcccctgggcaatgccatcgattatacggaagcgtttgtcccagttcagcatcgcccccttttcagtgtcaaagatgaagcaatcgaggctcttgttgtgcatgtactcgtagatgagcatcttctcgtcagcctggacgcagcagcccagcagcctgaccaggttggtgtgctgcagcttggctatcagctggatctctgtcttgaattccatcagcccctgcactgaacaggatgagagcctcttgatcgctatctcaagcccatcaggcaattgacccttgtagacagggccgaagccgccctggccgagcttgcaggcgtcggagaagttgtcggtggcgtcggcgatctggtcgaagtcgtagagcgagaactcggagccgctctcctcgatccgccacagcttgagcacctgctccatctccatggacatggtcggcacgctcaccgtccctgccatgttgatcactctccttcttcgcctcctgatccagaggaaacatcccaagaagccgaggaggagcacggcgacggggacgacgatcgccacgatccacaggccaccgctgctgctgctcccttgtgacgacggatccgggagcgggctaagcaccaccatgtcgttggggatcttgaagaatggatccttctcgtacctgaagtcgcagcgcacgccgaggatcctgccgccgacgcggccgctgaaccacttgggcatctggtcgatgataccggcgaggcagccccggcactgcggcggcgacaggtccggcgtgcactgcgcgatggcgtacacggtcatcgcctccggcgcgaacccggccttccccgcggcgtacctcctggtcgcgttgctcgccctgtcggccaccgcgttcaccagctccgccaccagcgcgtcgaacgccgcgacgtcgcccgcgtcggagacgttgttcatgttgaacgcggccgtctccggctcgttggcggcgccggcgccggcgccggcgaggaagtcctggtccgagtaccggagctggtactggtcgtagtagacggcgacgtccttgctgtacaagcagctgctcgccgcctgctggaacgacgacgccagccgcgcggcggagcagtcgttcccggtgaagtcgccgcggcagagcaagaggccgtacgccgtgtccggcgccgcgccgaacgcccccgccgcgtagcccgacgccgaggcgttcctggacagcacggcgaagaggccgttgaggttggcctcgaacgtgctgttcggcaggtacgtccgcctggccgccgtcgtgttacagaaggaggagatcgggttgagcaccggcaaggcgcccccgccgtctccggccgccggcgccggcgaggagacggcggcggcgaggaggagcaagaggacaagcatggtaggttgctaaccgaaaacacttgggagttgggaccgggctaatggtgtttgctgtacatggaatggaatggctaagcctaaagagaga

SEQ ID NO: 94082 - DNA, 3282 bp, Oryza sativa
  Clone ID: PAT_MRT4530_92404C.1
atggcggacgacgtatccaagaggtgctctccggaggaggaggtaattgctgacatactgttcgctctgccgagagggcctcgccccgttcttctccgccgccgaggagaaatcaaccgcaccggcggcgattcaactcgagatggagactcagcggagaagtctcgcaccggcagggggcatgaaatacgggggagagctggcggcgttgaagcggaggcagccaggggcgggtactcgagagaggatctcgccaccaaggggggatccgtcggatcgagggatggcggcggcgaggcctttcaatcaaagagggaaggtgccctgaggtacagatgcactatcgaggacctctccacctcgaagggacccggtggcggcgggggctatgactatgaattagtggggaggggtggagtcgcggcagcggagcgggacacgaggtgcaggtactcggtccaggacctctcgaccgtggggaaatctggggggatgtatgatggaggcaatggccctgggttcaaagaaggtgcccaagaaactgtagattgtgtccaagggttcaagactcatcctgagttaggacttcctgccaatgattctggcactgacacggaaacagttgatgtatcagtgtcagaagagttgattcggcttcagaccacgatcagtaagcccaagactaatactgctactgatgattctgccgatgattctgctgctgaaatcgaagcatttgatgtatcggaagaattgattcgctttcagactgttgttagtaaaccatgggatgcaatatggagagaagcacctctggtcttctgtgattcgttcctatgtcctactggtgataggagtggtttgagtcaaagtgaactgaaagatgcagtagcttcaatacttcttaatcataaaggtgttgtaagctatttcaggattgactcaagtagatcactgaaccttcaaactcttgagacctggtttaatatcttgtctgagaagaaggtcaaagagatggttctgtttaattgttcaggaccacagaaattgatagagtttcctatggatatcctggatggcagccaagttgaggttctcaggatatgttttttcaaaattccagaagtttatgcatttgatctctcaaagctacatctactggatttctcatactgcaaatttgataccgagcacctccttcactttgttgaagcatgtcctaatatcagagagctgcatctgggctactatgatggaaatgtccggatacgctctgacaagctagaaatttttcaagtatggtgttcaactatgaagtctgtgaacattgagcatgctcctgaattgagaaaacttaccatagcggcatttcctggaaagtactcatcctcattgtctgtgagggtcataaactcactttacttggagcatatcacgtgcaacatcagtaatcaatggattacaataaatggctcaaatatacaaacagatgataaagttcttctcaatgtccgaaaactgtacattggactttctatgtccaaaagaaggcaacgggaacagctctctaacattttgaattgcttaacgcatctagaagatctgactatttggcggatggataccgtcgctaacaatgaagattatgatgcggcactcgaggactggtcacctaaactgcgtgtgaagacctgcttgaaaagcctccaaatatgtaagatggaaggataccaaggtgggaagcttgagtcggactttgcatctgctgttctggtgcgtgcaaatcgcttgaaaaggcttataattgaatccgataaggaagatgtctttaagaaggctgttggcatacttcaaaagaaatgtaaactctgtgatattcctattctctggcaatctactgattttcaaaaagaaccagacaacctcttagcgagtccctgtttttgttctaagagtattggaaatggggaaagcactctgttttgggaggatagatggaatgggttacaaactctggtggcatatgtgctggataactgcaagctatcttttcttcttgttatgcttgttttcgccagcttagttggaaatcgatactttgacagagagttagctatgtcgattaatgaacggcttgtgaaatgtgcggcgcagttgctttacggtaacgtggggttcaaggctggagaggtcagaattgattgtgacgaaaaccgcggcgtggtggtcatggtgctcgacgcactcacaagataccagtgggtaccagacactcaccttgcaaaatcattaaaggtgcagaagaaaaagttatgtctgatccttgaatttcttgaaaaacaaatgttcgtaagaagatgtgaggtgaaggccaaaactggacgaaatgtcagtaatactgctacgacagctggtgtttctgctattcccaggaacgagaaagtgaagtcaaaacatcctaagtggtattgctgtataaactatgccaagatatgctctgtcgtaaggtatcacataatgcaaatggaggctaacttgaagtctcaactagagaatacaaatacagtcgataagtacacatgccccaattgtggaaaaagcttttcagcatttgatgtcaaggatttagtgagttgcaccgatggaaatttttactgtgaaagttgcaagcatgaactagttgcatgcagcgaatacggaaattataatgagagagagggaagaagtgcaaacttgttggactttcttgaaaatatgaaggagaaactaaggccactcaagacaaaacttgatctgctagaggacctacctgctccagactttgggagtaccccagacttcaaaggaacttataacatttcagattggtcgaggaccagtgttccacttccagaacctacaaacggtgatgattctttttcaagcccttgtgcaaaagacgatgaatctgatgcaggtgtttcagagttaaagatcttgccttcatggctgataagaaaaggtatgaaacttaagcaagcacacctcagtaacagttctactgtgtgtggagagggaggtacaaatatacaggaagaatacatgaaggcatattatgaggccatacagaagaggcaggaagacagaataagacactctggtcagtcatctgtccctggaggaccttctgtgagttctgagaggccaatgggcgtaaagcggcagaaactttgtaacgacatcaataacaatgcactagagtgccaaggggaagaaccgccaggggatacattcaggacataa

SEQ ID NO: 94083 - DNA, 724 bp, Oryza sativa
  Clone ID: PAT_MRT4530_92405C.1
ctagcgtcctatcttgccgcgcgctgcgccgcagcgcgtaggcctcgagatcgcttgtgcgtgcccgactgccttcgcgcgccatcgcccgtccgacgccctcagaccgccgccgccgcaccaatcttgacgacgacaaagccaggacgacctctgccgcaagaaatcacagctcgacgccgtgcgctcccgtccaaagccgccgccaagtccgaattcgcttctacccggggtgaatcgcgccaattcttgccgcacctcgccgctgccgcgcgtcgagcccggattggcgccaacacgtcgccagacgttttcacccatggtcaagtcaagccttcgtcacatattggagcctaaccgaagctttgcgtcgagtttcacctcgtcgcaccgagctaagcactgtcgcccctgctctgctctggttctcaccgccgagaagtttttccggccgcaatccgtcgtctcagcctatctcgccgttagcccacccacacatcaaattaacccctccgccgccactcgccgtcgccggagaaccctagctacctcccctcctcggccgcaaccccctttccccctctatcgccgtaaatggggaacggctagaggttgaagaagagaagagagaaagagactgacaggtcttgaagagtcctctgacatattagataatatcagtcaatctcaggacatcgagcaaggcaagttactattctacctt

SEQ ID NO: 94084 - DNA, 660 bp, Oryza sativa
  Clone ID: PAT_MRT4530_92406C.1
atggctacgagcacggcggtgatcggcgattgcaggtgggaggcgaggagacggcacgccgtgggccatatctggcacggatgcgggcggcgcaacggcggatccagcgtggatcctgcactggtgatggcaggcgcggctgtgatgggcgagtacgagcgctccaggaggggtggagctgaagctggggcgacgacggcctccgatggcggcaggtgcggcgttgtaccctcccctccaccagatcaggcgggagaggaggtgacagtcttcggtgacagtagcggcgtcggccgcgccctcccctccgctagattaggcaggagaggaggcggcagcggccttcagcagtgccagcgactggggataaggcaacgacggtggcgagatgggggcacagcagcagcatgcttcctctcccctcccgacgtgccggagctgcacgctttattattagttcacgccggcgacgtgctcgaccatgtatcacatgcagggagtagatggagcacctaccgggtgaggaactcgctgacgggcttgctagagaggatgggcgaggtgtcgccgttggcgatgcagaggatgtcggggaggaacggcgccaggcggcggaacgcctcgtctgctgggtgcgcggccggcagcagcggtggctaa

SEQ ID NO: 94085 - DNA, 194 bp, Oryza sativa
  Clone ID: PAT_MRT4530_92407C.1
ccaaaaacccgccagacccccctaatttgggaaccaaaatcttgggccccgggggcccaatccccttatggggggcgacttaaatggtaaaaggcgcacaagctggctcccgggggaaaaaggtaaaccgctacaaattcccccaaaaccaaagccggagacaaaaagggcaaaccccggggggcccaaggggg

SEQ ID NO: 94086 - DNA, 402 bp, Oryza sativa
  Clone ID: PAT_MRT4530_92408C.1
atgagctcggagttcgggcttgacaggggtggcaaagggatgaaaacgagcggtggtgagctggcgtcttcccatgttcgatgtgccgcggcggcgaggggtaaaatggtgggcgcgctcggcggcaagcggcggccatcccggttttcctctgacgagattggtgcgacggcgtttacccaaggcacggcgaacggtggaagacgtgccaaggcggcgggtcacacgcgtgtgattgctttaccgaagtgtggcggcttacggcggcgcgacgtgttgtgcaccagggtggcgcggcagaggcagaaaagggctagggaggccatggttttagaaggttgtggtccccaaggaccatctctagactttgcaaagatttgggtggagattgggccgctttag

SEQ ID NO: 94087 - DNA, 506 bp, Oryza sativa
  Clone ID: PAT_MRT4530_92409C.1
aacatacatatatacacacacacacacacacatatatatatatatatatatatatatcgttgtctaggttccacgtacgatatgctcatggctccgttactttaccatagcacagagtatattagcttcctgctatattgttatattttagacaagcgtcattggacgctatacgcatatatatatatatatatatatatatatatatatatatatagtaaatttgtttatatatatatatatatatatatatatatatatatatatatatatatatatatacatacatacatacatacatacatacatacatacatacatacatacatacatacatacatacatacatacatatataaatacatacatacatatatacatacatacatacatacatacatacatacatacatacatacatacatacatacatacacacatatatacatacatatatatatatatatatatatgtatatatatacacataaaactatatttatgtt

SEQ ID NO: 94088 - DNA, 1149 bp, Oryza sativa
  Clone ID: PAT_MRT4530_9240C.1
atgcgcggccgcctcctcgccgacggcggcggcgcggtcgtgccgctccactggtcccgcgagctctacaacgtggcgagcttcaccatcggcacgccgccgcagcccgcgtcggcgttcatcgacgtcggcgggctgctcgtctggacgcagtgctcgcagtgcagcagcagcagctgcttcaaccaggagctcccgccgttcgacccgaccaagtcgtccacctaccggccggagccgtgcggcaccgccctctgcgagttcttcccggcgagcatccgcaactgctccggcgacgtgtgcgcctacgaggcgagcacccagctgttcgagcacacctccgggaagatcggcaccgacgccgtcgccatcggcacggccacggcggcgagcgtcgccttcgggtgcgtcatggcgagcgacatcaagctcatggacggcggcccttccggattcgtcgggctagcgaggacgccgctgtctctcgtcgcgcagatgaacgtcaccgcgttctcgcactgcctggcgccgcacgacggcggcggcgggaagaacagccggctgttcctcggcgccgccgcgaagcttgccggcggcggcaagagcgccgccatgacgacgccgttcgtcaagagctctcccgacgacatcaagagcctctattacctgatcaatttggaagggataaaagccggcgacgaggcgatcatcacggtgccccagagcggccgcaccgtcctacttcagaccttctcgccggtcagcttcctggtcgacggcgtgtaccaggacctcaagaaggcggtgacggccgccgtcggcgggccgacggcgacgccgccggagcaattccaatctatattcgacctttgcttcaagagaggaggggtcagcggagccccggacgtcgtgctcacgttccagggcgccgccgcgttgacggtgccgccgacgaactatctgctcgacgtcggggacgacacggtgtgcgtggcgatcgcgagctcggcgaggctgaactcgacggaggtggcagggatgagcatcctgggaggcttgcagcagcagaacgtccacttcctctacgacctggagaaggagacgctctccttcgaagctgcagactgcagctcactgtctcctaattaa

SEQ ID NO: 94089 - DNA, 790 bp, Oryza sativa
  Clone ID: PAT_MRT4530_92410C.1
ccggccgggctccctcgccgccgccaccgctcgccgctcctctctcgccgccgccgccgccgccgccgcagcgaggaatctccggcgaggacaccaccgacgcaagcatggccgacacgaagacggcgccggcggtgacgctccgcacccgcaagttcatgacgaaccgcctcctctcccgcaagcagttcgtgctcgaggtgctccacccgggccgcgccaacgtctccaaggcggatctgaaggagaagctggcgaagctgtacgaggtgaaggactccaactgcatcttcgtgttcaagttccgcacccacttcggaggaggcaagtccaccggattcggactcatctacgacaacctcgacgccgccaagaagtacgagcccaagtacaggctcatcaggaatggcctcgccaccaaggttgagaagtctcgcaagcagatgaaggagaggaagaacagagcaaagaagatccgtggtgtgaagaagacaaaggctggagatgcaggcaagaagaagtaagcaatggtgttgaattgacataccaccttagctgccttaagttctccgcccactatcaatttttgtaccccttagcgcatctccttgtcgctattcgcagaatatggattgatctgctagaaaaaaaaagttttttgagcattttgacatatgcccccctgttacattacattgctgcgtttactgtgacttggctttgatcaacataccatctcagtgtccctataaattggctcttaatcagctttcctgctcttaaaagcgga

SEQ ID NO: 94090 - DNA, 291 bp, Oryza sativa
  Clone ID: PAT_MRT4530_92411C.1
atggcgagatcgtgggcgaggagtactgcgccgcggaggagcgggtgctcgatcacggtgagcaagacctcccacttctcccccggcgacggcttcgcggcctacgaccaccgcaccggccttcaggcagtcgagctaaggtccatctcaccacgccgtgggcgcctgcgcacggggtcggcgggccacgcgtcggcctccacacctagaaagagactgcaccgtgttaccgttgctgaggttcatcgcgcctcaacaataaagcaacttcgacaccaccttgcaaactga

SEQ ID NO: 94091 - DNA, 1529 bp, Oryza sativa
  unsure (1)..(1529): unsure at all n locations
  Clone ID: PAT_MRT4530_92412C.1
ccggccgggctctctctctctctctcctgcctccgcttctctcccccgcgccgccgccgcctccaccgaaagcagcagccgccggcgagccagccagcagcctagccatgtcggaatcgaaggccgccgcggcggtgaccctccgcacccgcaagttcatgacgaaccgcctcctctcccgcaagcagttcgtgctcgaggtgctccacccgggccgcgccaacgtctccaaggcggatctgaaggagaagctggcgaagctgtacgaggtgaaggactccaactgcatcttcgtgttcaagttccgcacccacttcggaggcggcaagtccaccggattcggcctcatctacgacaacctcgacgccgccaagaagtacgagcccaagtacaggctcatcaggaatggtcttgccactaaggtagagaagtcacgtaagcagatgaaggaacggaagaacagagcaaagaagatccgtggtgtgaagaagacaaaggctggagatgctgggaagaagaagtgagagatgatactcatcttgcagtcttgatgtgttcattatcaaaaccttgctttgtttagagctgtctccttgtggcaatattactgaatgcttaattataactagaaaaattttgccacttatgttcttgcaatgttgaggcatctgtagtgttcttggattttgaggaaatttgtcggactctagcatatatagtactttaatcacggcgcatgttctttgtgtcttctaattcagatttgggttatcatgtttcaccggagggaataattgttaatgcgtggaacggctncatggcatttttcccatgttttaatnctagtgttagcgtggcttatattttgggaagcgagtgaacgaagacccttgtgtttgatggcaggctggcaacagaacggtccaatcctggccagtggacatgagcatgataaattcattaaaagcaatgcataatccaaatccttctcagtttctttaagatgcgaagaaacagttttgagcatgttgctacatcaatagcacaatcatcacctgccaatgcctcatatgaagtcatcgtggctcacaaatttgcatctcgtcaatgagggttaggatcagggctgtcaactactccaagtgatatgtacattagatggtcagcttttttttttttctcacttctcagcagagcaggtgatagattcaattactatgggagatatttagaaacaacgtgtagttgaactggcataatatttgtggctttgtagcatctgacttttctgttaatgaattatttcaatagttttttattccagccgatgttcatgctctagtacgtcacagtggtatgaatgggctattagattgactatagatgaattggagctagtagttggctatactattgaacttgctcttatatagcaacaggtccagtatatgaattaattaaacaaaaaaaaaaaaaaaggacggccgctcgcgtgctagcggcagtgagctcgtcgtagcgggaattcg

SEQ ID NO: 94092 - DNA, 360 bp, Oryza sativa
  unsure (1)..(360): unsure at all n locations
  Clone ID: PAT_MRT4530_92413C.1
tctccgcggcgcgcgctatacgcgtgaaaagcgncatatgtcgggggggtttttttataatgngtgncgcgtgnccacatacactgtcgtgtgtgttgtaatttgggtgtagatatttatattgcgcgcgcgcgcgcgcgtgggcgcacacacgccacggtggtgtcgcgcccgcgctcacgcgccacgctcgtgccgtggtgttggcccccntcttggtataatgttataaagccntttatatgtatgaggggtgcctntnttgttgaatccgcgtccactgnttaaattgtgtgtggtantcacaaccaccgaaagtcncaacgtggtgctgtaggttaaaaaaaaaaaaaaaaaaaa

SEQ ID NO: 94093 - DNA, 145 bp, Oryza sativa
  Clone ID: PAT_MRT4530_92414C.1
agctcgtactatagaacgatgtagctggccggcatcactgacgatatgtcagcggtgtcctgttactgctactgctgcaagcactgcctcttggcagaatgcagggttcaggaaccacggtaccggcagtctcaaactacatcgc

SEQ ID NO: 94094 - DNA, 726 bp, Oryza sativa
  Clone ID: PAT_MRT4530_92415C.1
atgagcaacctaacaacgaagacatacaccggccggccggagacgatcccatccgacgacactgaagaactgaaagcacaacctaaagctacgtacatgcagaatggtcgacagacagacaactcgacacacacccatcaagcggacaaacgcctctggccccagcctctgacatgcgggccccacacggccacccccgtgaacacggggggacggcgacgttacgtgacaactgggccacaccggcccacgtacggggccccattcgacgtggacaacgtcgtccctgacaggtcagctcccatgcaatcacacccacggaacaccagacacgcacaccccggcgacggcgacgacagccgccgccgcgtgtggccgcacggcgcgtccggcgttcgacgcggcgcagatgatccgaaccccaagcaagcaaaacaccttcttgtttcccccacgcaagcgtctgatccgccccggatcttctgcaaacgcgtcggccggcggccacacgtatcaacatcgtttgcctgctctgagcgattaattagcagtacgtatacttgtaattactactgctcgattactcttaatggcgatatgcaattgtacagtacccctgctgatgatctgagcacatcatttaagctaagcaaccaattaagtgatcgaccaaccaatctgtacacattgtcactgtactgcagtactgacgacgtcccagctgct

SEQ ID NO: 94095 - DNA, 510 bp, Oryza sativa
  Clone ID: PAT_MRT4530_92416C.1
atgaggacatcaccggagatcagcgcgaggctgttcgtgggccgcgtcgctccgggcaccggcaaagcggagctccgccgccacttcaaggtctatggggatgtggccgacatctggctgcgccatgaccgccccttcgccttcgtccagttcatccaacccgcccacgccgcccgcgctctcgccgacaaggaccacttcatcaacggccgcaaggtatacattagagtagcacaaccaacaaagtcatcaggaggattgctaatgaaatgtccaagtacctttgccagcgagtttgttggattggatggtcgagtttttttcttcagctttgtagttgacaaaagtgacgaagctaataaggctgtccatggaaacatttcttctactcgtcttgcaagcgagaccacctctgcaaggttttgcggatactgtcaacgagccgtgacacccggtggcaactgcgacggcttggtccataccgatgcttgtctcatctaccaagaataa

SEQ ID NO: 94096 - DNA, 415 bp, Oryza sativa
  Clone ID: PAT_MRT4530_92417C.1
gaaaatccgctgtattattgggaaatatttctgcatatccgtgcaaatcggctgtgaatttggaagctgatgaaatacgtccagtatgcatttactaaggggatgccctaacacattacaaaatttatctttagccaacgatgcatgagtggaagaaatggaatttgttatgcaaatggattgtaacattatttattataaatgagttttgtagcatttgactacgtaccactaaaggggttaatcgcaaactcgtcagaaaaccccagaaactgtaaaatattgtttagataaattgagttaaatatgacctttttgggagtgtaaccatacccgaaagatatcattggccattgaattaacaaaataagttttgccgtttatttcataagaaagcgggggaatcccttttgtt

SEQ ID NO: 94097 - DNA, 1177 bp, Oryza sativa
  unsure (1)..(1177): unsure at all n locations
  Clone ID: PAT_MRT4530_92418C.1
atccgnctcaacgcaccaagctcttcccgtgcacgtgtggtaggcagaacgtgcgcggcgatctcgacgaaatggacgtcgcggcagacgcgacagcttggccgccggggtggtcgctggtccgcggctacttctccccggcgacgctcttcctcctgctcaacgtggtcatcggcaccatcgcgctcacctcccgcgcgtcccaccgccgccgccaacaccaccacgacgagcactacaaggcacagcaccaccatgaccaccatgatgagccgcagcgctgccatgatcagtacgctccaccgccacccgcgccgctcgagcgcacgtcgtcggtcatggagcggctgcgctccttcggcctctaccgcttccgctccggcgacttccctcccgagtacaacctctccgccgccggcgccaacgccatctgcgacgagagcgagaagcagcaggcgcagtacacccggagccggtcggagcctgctgctcggcccgcgccgccgccggtggagaagagaggcaaggcggagaacgctgccgccgccggcgccgccagagcgaaggtggcggtcaagaagtcgtcgagctcggaggtgaggaagctggagcgcgccccggcgcaggcacagcggcaggtactgcaagtgcaacgcgcgcagccgccgccgccgagggcgccggccccggcaccggcacgcgccgtgaagtcggcggcgagggaggaggtggagaccgcgcaggttgggctcgccaccgcgagcagcgtggacgcgagggcggacgacttcatcaacaagttccgggagcagctgcagctgcagcggctcaactcgctgctcaactacaacgagatgctcaaccgcggcacgtagctcgatcgcgcgcgcgcgctctcaaaaccgcggcgccggtgcagatccaaaagcgcggctcggcgacccatgcgtttagagtggtcaccatgtgtacgcgttgtttgtaaacgccaattagttttcaattttgggtgtttttgaagttcatttatctcgtgtatgttcgactcaggtagtactcgaatttgcccgactcgagagtcgtggtaacgaggctcccagcgtctgaatctgttccgtgtataattcaaagcggaaagtctagattaaagtctaaaaaaaaaaaaaaaaaaaaaaaa

SEQ ID NO: 94098 - DNA, 558 bp, Oryza sativa
  Clone ID: PAT_MRT4530_92419C.1
gggaaccacaaactttcagtttcattattcagggctagaacgggatacagggccctgatgcattggaacacattcaaggggggcccctaggaaagggaaaaagaaaacaaaaaggtagttgggctggaaccacaagaggggacccacatcaaaatatccaaactggccaaaacattggcattgggaaaaagggcatagcttgaggggcccgtccccaaaagggggatacataaacaagaccttcaaatatgggtctttcaatcaggggctgacaaaaagcaacagccccccgcataaaaatttggtgggcccctaaaaccagtatgaaggactgcctgggcaagaaaccatggcccttcattattcatcttaatttaagcagcaacaggaggggccccggacttatctattccttcaagggggggtattccaagctttggcaattcctgacgagggccctttggtcgacggaaaattttccttcttttcttttggaaaaagaaaacctttgcatttagggcatgcccctaaacgacgggttgaacagtagcatcagga

SEQ ID NO: 94099 - DNA, 121 bp, Oryza sativa
  Clone ID: PAT_MRT4530_9241C.1
gtaccggcctggatactgctagttcacaccacgcgtccgtcatgtgtgctgtaagcttacactcgcgaaatacatcaactggttcttaagcttttaccgcagaaaataaaaattataaata

SEQ ID NO: 94100 - DNA, 210 bp, Oryza sativa
  Clone ID: PAT_MRT4530_92420C.1
atgtggcgcggccggtgccgctccatccggatctggccatgggggggaggggggcgcagatccgcctatgacgacgcaggatctgtcgccttcggccaccgccagtgccggaaccacttcgactggaggccgggtaccttgggctgggacacccattatgagctggcgtttctccatcaagtggcctcagattttgaagaacccatctag

SEQ ID NO: 94101 - DNA, 426 bp, Oryza sativa
  Clone ID: PAT_MRT4530_92421C.1
atggcaagcattcaaacagcaagcaaccaagcaacagcaagtaagcaaccccaaggcggcgatgctgtagcacaggccaaagagacggtgccgcctgcctggcaactgtgcccgaggccggcgcccggcgaggtggccggcgtgaacagagctctgtcgagaagacacggctcgttccggctcgacgacggcgacgagagagtgtgtgcgcgccgagatcgtcggctcttcccacgctgccgctgccttcgcatcccacgctgtcgccgctgcagccgcctccaccgcatcccgcaccgccgcggtgttacgggtgctgctactgtatctgaaccggcaagggagaataatcctgtgaagtctgggaaacgacctcaaagggagagaaggccgaatgtccgagtctctgggccggagtgggcttag

SEQ ID NO: 94102 - DNA, 480 bp, Oryza sativa
  Clone ID: PAT_MRT4530_92422C.1
agaaggagcgcccaaactcgccgcgcagccccgcgctcgaggcgcccgcgctgccggtccgcgcgcctccgccgccgtccaaggattccggcggctcccgcgccgcctccagctcggcatcggccatgggtagagaatactgcagatttcatctcacgatggtcctggtgcacacaaggttatagctgtagctgcgatcggtggattgagctgaccttccactttattgctttgctcagttagtacatgactatcatgatagttcttgaagtgtatcagcggtggaatttgctccgattgacaatgcgttggtgctatgttgatgtctcgtctggaaacctggaaaaaagcatgttgttggatgccatttgagtaaatttagctgcaaggagcatgagccgataactgttctgttgtgcgtctttgaaaactattggtgaaacaatgaaagcttcctttctgaaaaaaaaaaaaaaaaaa

SEQ ID NO: 94103 - DNA, 395 bp, Oryza sativa
  Clone ID: PAT_MRT4530_92423C.1
gattgacaatatatgttcattgatatcggtagtgacaatatacaatgatcgaattctacttctgtatttgaaccttaaatccaaaagaaatttctctatttcctgtataaggatttgagcataatctctaggccttgtagttgtcagtggctggattcaagaacaaaatcgtgattgagacctacaaaactctcaaacagaatgtactttttcagagacgatatataacttccacaagggtaagtaggtaggtactgctctcaagaaccctctgattgtaaaactgcaagggttctcactgttgagatccagaatcaggttcttcttcatcaagcagatgagactgaaatccgcaagtgctcaggtgatgtgaaagcttttcgcccagttgcttc

SEQ ID NO: 94104 - DNA, 566 bp, Oryza sativa
  unsure (1)..(566): unsure at all n locations
  Clone ID: PAT_MRT4530_92424C.1
attttaaataggagagagnacatgagataggggngganctgtcatagtcttcgagaggagtcaatttgcaaccagacaaaaaatctaaccaatatatagtgttgcaggcttgcagcaaaccaagaaatggcctactccactaatcaggtgttttcgtttatttagttcttcaaaacctacttgcatccctaaataagggcagtttcagacttcaacttgcattttgttttctatagataattagcatccctaaaataagagcagtttcagacttcaacatgcattttcctgatagataatgagcatccctaaattagagcagttttattcttcaacatgcatgtttttttatagataatgatactccaacatgcatggtattaattgtgaaagtcttagctacaattttcatagaaacatgttcataacggtcgcactacgaaaatataataatattaattaaagcattcttgatggaaaattggaaatgcacattgaaaatggatcttccaccaccgtatacaacttggtgaagaatctaaaatcaagtgtcataatttttttag

SEQ ID NO: 94105 - DNA, 555 bp, Oryza sativa
  Clone ID: PAT_MRT4530_92425C.1
ggtagcaccgccgcttagccgtcgtcgcgccgccgccgtctgccgaatcgccgccgccgtccgccggtcgccgccggtgccgcgctgcagcgcatcggggctgtcggttcggctgccgcgtgtgcgccgcgtcggcgccacgtgtgcaccacgtggtgcgccgctccttcccggtccgccgtggaccgccctcctcgagtcactgccatatggggcccgcatgtcggcgccgccccctctctctccccgggatttatttattgcgcaataaatcaattaagtagtcttatagcctgtttgtattgtttgctttgtatgtcgcttagattcaggcttccccgacgctccggtgtactttgaaatagtcgccgggtccctctaaccgcagagcaaggcaagtcatgcttgtcacttgaacatgttgatcctatattgcaaatgttctattgcaagggtgggcgtgatggagtggggcgtcccctgcgacggcctctgtcacttccggattcacctaggcacgagaggggactgcccgttgcccactggggacggggg

SEQ ID NO: 94106 - DNA, 911 bp, Oryza sativa
  Clone ID: PAT_MRT4530_92426C.1
cccacgcgtccgcgaacaagcaaagcggttggtatagcagcggcggcggcggcggcggcggcgggcgtcgccggcgagcagagcggaggagggaggaagcgcgcgagcgaacgatggaggcggcggcggcggttacgaggttgtccttcgtccccctcgcggcggctgcgaggccactcctcgccggcttcatgcgcccccgagtcttcgcgtccatctcctcctcctcctcctcctctcccttctccggtggaggcggaggccacttcttcggaggcggaggcggacgcggtaggggcggcggcggaggcggaggcggagaagaatacggtgcaggtgctgctgcagcggcctccgccgccgccgccgtggttctcggcgagaccgagacggcggacgccgacgtcatcctgctccgcgtcgggcctgaggttacttctgccacagtcgactttgagaaaaaaacggctgccgtgtggacaacacctgaagccaaggcaacaaaagactggcggaagcaactgggcgaaaagctttcacatcacctgagcacttgcggatttcagtctcatctgcttgggtcctggtgccacagcccacagatgaagaagaacctgattctggatctcaacagtgagaacccttgcagttttacaatcagagggttcttgagagcagtacctacctacttacccttgtggaagttatatatcgtctctgaaaaaccactgacaactacaaggcctagagattatgctcaaatccttatacaggaaatagagaaatttcttttggatttaaggttcaaatacagaagtagaattcgatcattgtatattgtcactaccgatatcaatgaacatatattgtcaatcatgaaggctgatgagtttgcaactgaattcatttga

SEQ ID NO: 94107 - DNA, 1382 bp, Oryza sativa
  Clone ID: PAT_MRT4530_92427C.1
cgatggcctcctcgcccgccccaccaggacaccacgacgagcgccacgagtccacctccagctccgccgatgacgacgagatcaccgccgcagccgaggccagcccggagcagggcggaggcggaggcggaggccgcggcaccggcggatcgggctccgccgccacggagggcgaccagaagggaaagggaaaggtcgtcgaaggttcgcaagaggccgccaagaaggacaaggtcgattcccagctaaagaagttcatcaggaggagctttcttgcggtttctgaaggcttcaagaaaaagctttcagatagacaaggaaagcaactggatgaggcaagcacgtcaaactcgccacctcatgtggatcacaagaaaattcccatggaagaagctgtgtatcattattttggggacatccataatgttctgaggctatcgaaaagggaaagggagtcagttatcattatgcgcttggtgcctcttcatagtcattattcagcattgaggccagtgtatagagatggggagagtttctacaggagcttcatattttcctacctggagcaaattgttgatagagtagacataggtgaggaagatcgccttcttgctgctgttagagaattggctagacgggctgaacattttcagtgggcctctgaatttccccggaggcgcgaagcatttgagaagctgatagagaaaataaagggatggaagcgcatgttgcagtacccaacattaagagtcaggtttttgaaacgctacaacaggggtgaatttctcctcgagttcttcagcagttatgatacaacggatgatagtgagaaaaacaccttaagctcgtgttgtttcaatgtcatcctaattcatggttctgacatatgcattctgcattctgtcctgtcagtttttgctttcctcagattagcagcagcaatctggatgtgctcgcccgaccacataacgatgtatgcaccgggtgtgattgggcctggagaaggtcgcagtctggaagattggtgctcgacacaggttattcctccccgtgtgtatgcagacgaggttgcagtaagagccttggcggctgcacttcaggtgttcatccgagtggaggcgccagaatatggaggtcgccaagatagctactacatcgcccgtgacagaccccgtgtgaccttgttgcgcatggactctcagtatgacattgtctacccactctctcctgagttgattcaccaaagggctaagcgtggaggagcgagcaggttctactgctgcataggtggagattcaaatctgcaacggctgtcgcaacaacaagaagaacgaggaggaggagctggcctatctggcttaatcatgcattctgagttgtga

SEQ ID NO: 94108 - DNA, 574 bp, Oryza sativa
  Clone ID: PAT_MRT4530_92428C.1
ggtggagagaagagggggaacacacgcgcatgctcaatcgcttggcctggcatggcagcacaattttgttttgttgcggaaaattcagatctattttttttggaaacactccgaataatctggtgcgtaaaacggcatggagtccggataagttacgcacgacttatccggttcggcatggagtccggataaattacgcacgacttatccggttcggttatgcggagtggagatcatgcaagcatcctgatcaagcgtcctgatatctctatataagtcgagccgccgcctccacgcaatatacgtgaaatcaatctatggtttgcctcctcttctgtactgcaccatcgctgttagtctactccattccgctcgtcggcgtgcaccggcgatcgggtgagcaggtctccggaaccttcaccttcaacgtcctgaatcgggaaaaggcggcaataaggtttttggaaagcgctttgcgcaactgctccctgttcgaccacaacggctcgtcttcctcttcgctcgcgtgctgcacgtcgtcgtcaatgcccgcaactgcgagtccttcatgcat

SEQ ID NO: 94109 - DNA, 1317 bp, Oryza sativa
  Clone ID: PAT_MRT4530_92429C.1
atgaggctgctgaaccacccgcacatcgtgcggttccacgaggcgatcgccggcggcgacggcggcggccacgtgtacatcgtgatggagctcgcgacgcaggggcagctctacgattacgtcacccagctcggccgcctccgcgaggatgacgctcgcaggatcttccagcagattatatcaggcgccgaatactgccaccacaacatggtcgtccaccgtgacctgaaactggagaacatcctgatggattcagagatgaacgtcaagatcgtcgacttcggtttcagcaagttcttcaggcacaacaaggtgctcagcgcgtcatgcggaagccgagaatatgccgctcccgagctactcgcgggtagaaaatatgttggtccacctgtggatgtttggagctgtggagtaatcctttacatcctcttctgtggacgcttgccctttgacagcgccgatgtatcagagctgcacaggatcatcaagagaggagagttcagtatcccaccgtacgtgcctgacgacgcgagggatctcatctccagcatgctgatcgtgagacctgacaagcgcctcaccatcaccgagattgatgctgagactgtcgacaaggtagtcggccatggctttgaaaggaggtacttggttgaatcacttgagaacagagtcgaaaacgaggcgacggtcgcctacaacctgatcctcaataagaagttcgatgccccaacacgttatgtttggacaattgacgtctatcaagaagctggacaaagtaacaccacgggagcagcagaagcaactggcagcagtgctgccggagagccgccggtcgccgtcgccggagaagacgacggacgcaacaacggatgggcgctgggaggggtggagttccacgagtgcccccgcgaggcgatgcgcgccatcgcggcggcgctgcgcgagaccggcgtcgtctacgcgcacgacgacgacgaccgcggccgctacggcaagctgctctgcgcacgcttcgccggcgccgccggcgtccgccgcatcatccgcagctacctcgccgccaccgacgacgcgccctcctcttcctcctccgccggtggtggcagtggcagaggtgaggctggccatggcggtggagctcccgtcgatgatgctgtcctcgagagcttgtctgcggctgtgttctttgaaattcagctgtacaagtcagaaggggaagggaattacctgatggatctgaagaggctttctggcccacagcttcaatacctcaacatatgctcagagttaagctccaagttgagagcaattaactga

SEQ ID NO: 94110 - DNA, 1173 bp, Oryza sativa
  Clone ID: PAT_MRT4530_9242C.1
cacacacctgcgactgcgagctccccgtctctcgccaatggcggcgttgtcgtctgcctccttgctccctcctccttccaccttcgtccccgtcctctcgccactccgcaagccgccgccccagcacctcgccatccgcggctccccccaccgccgtcgcggccgccgcctctcgctcgccgcttcctccgccgcctcaccggacttagagaaggagccctcgcaatcgccctcgccctcgccgcaggagaaatcccctggtgatctgtcggccgtggcggagagcgtgaaggtgctgaaggaggcggccaagacgaggaaggtgccgtcgccggagttgctcgcggcattggccaagatcaagaaggcaaagctcgacacatccaccttcttcgagaccctcggtgggacacagtccccgggcaggacatggatgctcatcttcactgctaagggtcggctggagaaaggacagtacttcccagtgaccgcagtccagcgctttgatgctgcaatggtagtgggtctattaggttggagtggagctgtggagcagcaaaaacccaactccaccctcgtagttcattttttaggagtagctctgctaactccactcccaaaaatggaggatctgaaccgtttggcacagttccggttccagggaaagaggattgagaatggcgtgtatttggggcctgttgggtccttaacctttgaggggaggctgtcatggaagaagaagatactcgcattcatcttcgagcgggttcgcataaaggtcggccctttcggccccctcgaaatcagcctcggaggtggcaatgatggtagggagccgagcacaaaggaccctttctttgtgtggttctatgttgatgaggaaatcgctgtggcacaaggcagaggagggggagtggcttactggtgcagatgtaagcgtgttccatgaactctgaagattcagttcagtcatcattccaggatgttcagttcagtttatgtatagataatttttcatcttctacatgtgtaaaaaaacgaagtattgaaaatgataccagttcgatgatgtctgcctgtacctgtaaattgtgttggtatagaatgccaaacgattgagcatagatgcaaagcatatggagtatattatgagataattgaccatcaaaaaaa

SEQ ID NO: 94111 - DNA, 416 bp, Oryza sativa
  Clone ID: PAT_MRT4530_92430C.1
tcgtcctagcgcgccgacgccgtagacatctacggcgacggtcggggggctctgtgcatctaccatccacgatgaagctgatttacgactatttgaaggactatctgactgataacttcagccacactgcggaagattagacaacgattatggagtcagatggctgagaaaatgactatgcatagatggaactagtgtggtctcaaggaagtaacaaggacatgactgagctcatcgatagagggaggagaagttagcatcacttccatccggtggtggtagcgtagctgctgctgctgctgcacctgctggagcacgagctggacgagctgctgcaggtgcagcaaaaaaagaagatacagcaccacaaacagaagaaagtgatgatgacatgtgcttgacacaagctagacatg

SEQ ID NO: 94112 - DNA, 289 bp, Oryza sativa
  Clone ID: PAT_MRT4530_92431C.1
atgagagagctcggtgagctgcacagatggccctctccttgatggcgtcaagggccaccaccgtatgtcccttgcaggggcttaagtccaccgccggtatgcccgtcgcccgacggtccggcaactccagcttatgcaacgtcagcaatggcgggaggatcaggtgcatgcaagcgtggccgatcgaggacatcaagaagttcgagaccctctgctacctgtcaccgatcaccgtggaggaccttctgaagcatatcgagtacctgctacggtccaagtgggtgccctg

SEQ ID NO: 94113 - DNA, 325 bp, Oryza sativa
  Clone ID: PAT_MRT4530_92432C.1
accaaaaaatccaccaaattgaatatcacaaatgaccccaaatatacagaatgaacaagatttgatcaagtaaacaaaccccatcagacaaaaagagggggctcaacacatccccttaacacataatttaaggccccaataaatactgggggagtatatatgaactaggggtatacacaatacacacaggacatcatatgggatgaacaccatgcatgcatgatcgatgaaccaccatgcttgctcataaaaagcacatgtcgggggggcagcagcagcagagggcagcgcaaaatcctttccagaatcctgtcgcctggtggtg

SEQ ID NO: 94114 - DNA, 1107 bp, Oryza sativa
  unsure (1)..(1107): unsure at all n locations
  Clone ID: PAT_MRT4530_92433C.1
atgcaacagtgctgctgcagccaacttgcagcagcgtcggcatcgcgaggatcccgcgtgggcgtccgtgtggccgtccgcgtcgctaatagtactatatcgtttctagtgcgtgagcatatgatcatctcaagtctcgatcgagggaaagcagttaaatccaaatccaatgaactgaccctgacaatccgatctaggcgagatattttctggtggatccaatgcaagcaacctcaggtcaccacgtacggtgggttaggtgtccgcttacaggtgcccacctacccgcatttatggcgacccaagcggtcgcgccacgccgcatttaatgtggcgtgcagtgtactcaaccggtctgtgaccggtcgaatcaccgatgggactggaggcagccgacggcggcgggatgggggatgggcgcgggctggcagcggccggccggcggtggcgggatggaggcggccgggcgcgggctggcggcagccagatccggccagaggggaagcggcgggatggaggacggccggcggcggcccggcgcgggccggcgggatggaggccggtcgccggcggcctcgccctcccctcccccagatccggccggaggggaagcggcgagatgggtggccggccggcggcgggatgggaggccggccgtcccggttgatgacaccaaccgggactaaagatatttagtcccggttggtgtcatcaaccgggacggccggcctcccatcccgccgccggccggccacccatctcaccgcttcccctccggccggatctgggggaggggagggccgaggcnncggtgaccggcctccatcccgccggcccgcgccgggccgccgccggccgtcctccatcccgccgcttcccctccggccggttctggaggacaccagcccgcgcccggccgcctccatcctgccaccgccggccggccaccgccagcccgcgcccgtcccccatcccgccgtcgtcggctgcctccagtggcattctgcacacgtacggctactttaagctagggctacagttaattaggtatggatgtttgtcccctgcaggctgcagcatctgcattactgcttgaacgtcgagctg

SEQ ID NO: 94115 - DNA, 411 bp, Oryza sativa
  Clone ID: PAT_MRT4530_92434C.1
cacctcgcgccggccagctgctccgagtcgggcttcgaagctaaccttggtgcacccgctgatcgattgattcgttgttttttgggggggatttttttctggtgtgtgtgttttttttcccgatcggatcggtccagatcgggtcgatttgggcggggtggaggaggtggatggaagggggagatgcggatcgaggaacttcccgcagaatcctcgcgctgaagaggagatggaggatgtggaagaatcaaccacctcatatgaggccacttcctcagggctcagattatatcggattgtcgcctggaagctataatccatccagtgcacatttggttccgccttacaagttcggaaatgctccttcatatttagaatctgaattaactcctccaaagcatccacctgact

SEQ ID NO: 94116 - DNA, 281 bp, Oryza sativa
  Clone ID: PAT_MRT4530_92435C.1
cccacgcgtccgcccacgcgtccgcccacgcgtccgcccacgcgtccgaaattgtttaacaatttgtggtgttgtaacaaatatatgttctgtatatttcctcattggctcaatatgttatcttgtcattatggatctggacaagccaatatgctccatttcttactaacacaattttacatttaccagattttgagtgttggagtttgataagtaagcattttgtagaggaatgtcgggactttgtgagaataagaagttcattatagattaactattta

SEQ ID NO: 94117 - DNA, 467 bp, Oryza sativa
  unsure (1)..(467): unsure at all n locations
  Clone ID: PAT_MRT4530_92436C.1
ctgctttttaataatggnaataaatatccccaccgctgcactttaaggatgcacaaataatcctgattacttatactccctntaattacgaaaaaaaaaaaaaaaaaaaaaaaaaaaaaaaaaaaaaaaaaaaaaaaaaaaaaaaaaaaaaaaaaaaaaaaaaaaaaaaaaaaaaaaaaaaaaaaaaaaaaaaaaaaaaaaaaaaaaaaaaaaaaaaaaaaaaaaaaaaaaaaaaaaaaaaaaaaaaaaaaaaaaaaaaaaaaaaaaaaaaaaaaaaaaaaaggggggggcaatttaaagggataaaagaaaatacccggtgtagcgaatagaattaatatttaaaaaggggcccaaaaaataaaataagcggcggggggttaaaaaagaggggagggggaaaacacctgggtacccaaaaaaaaaacgcggtggaaaaaatggtttcggaatgggggggggaaaaa

SEQ ID NO: 94118 - DNA, 1335 bp, Oryza sativa
  Clone ID: PAT_MRT4530_92437C.1
atggacacgtcggcgtccacctcgccgccgccgccgcgctctgtgctcagcaccatcgaggacaagatgagcccgggcgtcctcctcatcatcgccatcctcgccgtcgtcttcttcctcttcggcttgctcaacctgctgatccagaacctgctccggatgcgccgggcgcggcggcggcggcggcgcgtgggcgacggcggcggcggcgtcggcatgggcagcccgacggcgttccagggccagctccagcagctgttccacctccacgacgccggcgtcgaccagaccttcatcgacgcgctccccgtcttcgtctaccgcgccgtcgtcggcgccgggctccgcaaggacgacccgttcgactgcgccgtgtgcctgtgcgagttcgccggcgacgacaagctccgcctcctcccgacgtgcggccacgcgttccacgtgccctgcatcgacgcctggctgctgtcgcactccacgtgccccatctgccgcggcagcgtcctcgccgccgccgccgccgccgacgacgacgacgactcgtcggcgtccaccccggtagcgcggcgcgtgctcgactcggagagcctcggcgagacgttcgccaacaatggaggtggggacagcgaggggtcttctcccaaggcggcggcggcggaggaggaggaggtcgtcgaggtgaagcttggcaagctcaagtgcatcgacggcaatggcaatgccggcgacctcgccgtcgtcaaaggcaccaccaccagcaacgatggcgacatcggcggcggcggcaggggagatcttggacagagacggtgcttctccatgggatcctacgagtacgtcatggacgagcacgccgcgctccgcgtcgccgtcaggacgcccaagcggaggccgccggcgaggtcgaggtctcgccgccggctcgcgctgtcggagtgcgacttcgcgggctccgcctccaagaagggcgcgtgggaagcggcggtgatagaggccgcgtcggcggacgccgcggcggcgaggctgaacagggacagcttctccgtgtccaagatctggatgacgtcagccactaggaaggaagatgtccggacggcggcggaattggccggcggagggaggcgtgcggcgtcgttccggtggccggcgatggccgaggccagcaagaagcatggcgggatcaacgacgagcgccgcgacgtcgaggccggcggcaatggcgactcgtctctcgccgacgagcggccgtcgttggcgaggacggcgctgcagtacatcgtcggcggcggcggcggcgggcggcagcagagcagccgagttggaagccattcttga

SEQ ID NO: 94119 - DNA, 1437 bp, Oryza sativa
  Clone ID: PAT_MRT4530_92438C.1
gggcaaagatgctggtaaaacttaacaatgttttagagcaagataccagtacatagtacaaatcaacatacagatttgtcacaatttactttagtacaattttacttattgacaaacacattccattctccgtggtccatttgctctgattgcagaatgctccaatatgaaatccctgccgattcttcacttctgaccatgcacagttgggacggcaaaatatactcatccacttaaacagatacttgaatagcctgcaaaaccaaatcattcatcttatatccagctggagatactgttcgactcaggctatcaaaggcacctgacattgtccgggctgagaaataatgctagggcatagtaagtagaaagattgaaagcctcccctgtctctccattgcttcaattacatgtggcttggtagtcaggcactcttcagaaattgagagtggtgagcaatgtgatcatcaatgaatgtagcaataaaaaagtaggagtggtcgtatccaggttgcatgcggagagtcaaaggagctcccacagccttgcacgcctcctcaaagttgcgaggtagaagctgctttgccagaaatttgtcatcctctccctggtcaatcagaataggagttgaaattttgttgcacttcttgatcaggcaggttgcatcatattccttccaatctgatttagctgggcccaaatagtttgagaatgctttctgaccccaagggcagttgattggattgacaaccggagagaatgcagacaccgacttgtatttatcagtgttctttaagtagattgttagtgcaccgtgccctcccattgagtgcccaaaaatagatgcccgtgaagtgttcagctgttcaaagttgtcacttaaaacttttggaagctccttcacaacatagtcatacatgcgccaatttttccacttttcatttgttgcattcaaatagaatccagcaccaacaccaaaatcccaactgtctgcctctccctctatattaagcccacgtggggaggtgtcgggggcgacgagggcgatgccgtgggcggcggcggcgcgctgcgcgccggccttggtgacgaagttctcgtcgttgcacgtgaggccggagagccagtacagcacggggaggtcggatgccggcgacggcgggaggaagacggagaaggtcatggggcagccgagcgtggcgctgtggtggcggaagcggaggttgtggccgccgaacattttggtcctgctcatctgctccagcgccgcgacgggtgggggagagggcgccgccgccgccatcacgccgatccgcgcgctcgccttcgccggagcgggaggaaggggagggggagagcagtgtggaagtggaagtggaggaggggacgaggagtggtggcgttggcctggtttgggaccgaacaggtttcgagcga

SEQ ID NO: 94120 - DNA, 1289 bp, Oryza sativa
  Clone ID: PAT_MRT4530_92439C.1
tcagtccctgccctgcacttcgtcacactcgcatggcttcgcgtccttctccctggaagccgtcggcatctttgcatcgcatcttcctcttccatctcctgactcctttttttccccgtgcatcgccaccacccccggtgatgctagcctttgctgccgtgttttttttttttttgttgcttcaaaggaagaatctcgaattgctttcgcaatgtggtgttttaaattaattggcttgttccagcttcgatctttttttacaagatgccgaatcttcaaactttctaaaattctcgcgccgttatttcgccgcgacgtacgtatacacgacgacgacccctgcaaccccaaatgaagagtcgtcgtcgtcggcgtgctccgatctccgcgcggggcattcgtccgccgtcgtctcgctctccggtgagggcggccaaaatatatggtgctcgatcgagatgtgatcgagcccggccggcctgccgcttcaccgggagagcgaacacgacgccggcgacttcgcgccgccgcccgtgctgtgctcgtagcccgcccgtttcccttctcgcgcgactcagctcgctttgattttggttgggtttacagcgcagactgcagcttgttggtggcgtgccgggagacgagccgctcgagcgcctcacgcatccaaccgtgctggcatccatccatcgcctgctgcaccgtggcccaggtgcgcttgcgggaggacatctcgggccactggaggagctcgtcggtgacgcggagagggaacatgaagccctcgtaggtggtgtcgtaccggcggctcttgtagtaccagcagccgagggacgtctcggtgttgccgcggacgccggcctcctcgggcccctggcggagctcgtcggtgacccggagagggaacatgaagccctcgtaggtggtgtcgtaccggcggctcttgtagtaccagcagccgagggacgtctcggtgtcgccgcggacgccggcctcctcgagcgcctcgcggcgggcggcctcgtccatggactcgtcgagctcccacccgcccttggggaacatcatgccgtgccccttctgcgacgtgatcaccagcacctccatctcgccgccgctgcgcacccggtacgggatgcaacccaccacgatgcggcccccggcgctcgtgtaccgctgcagctcccgcccctgcctcgccaccagcacggccatcgaatctttgattgttggagagagagagtagggttgtcgttagggttagaattggtgatgcgagagcctcgtgc

SEQ ID NO: 94121 - DNA, 412 bp, Oryza sativa
  Clone ID: PAT_MRT4530_9243C.1
ctggcgcacacaaggagagagcttggcgagctgcacagatggtcccctacgggatggcgttacggatcaccagcgaagctccctgtcaggggctgacggccaacgccggcatgcccgaggtgcggcggtacgacaacttcagcttaggcaacgtcagcgatgagcagaggatcaggtgcgtgcagctgttggcgattgagggcattaagaaggccgagaccattgcatacctgccaccgctcaccgaggaggacctgctgaagcacatcgagtacctgctatgtaagaagtggtggccctgctcttggtatagcaaggccagatcctgctaccgtgggaaccacagatcccccggatgctacgatggcaggtactggtccatgaggaagctgcccatgttcggacgcactga

SEQ ID NO: 94122 - DNA, 435 bp, Oryza sativa
  Clone ID: PAT_MRT4530_92440C.1
caaagattcgatggccgtgctggtggcgaggcaggggcgggagctgcagcggtacacgagcgccgggggccgcatcgtggtgggttgcatcccgtaccgggtgcgcagcggcggcgagatggaggtgctggtgatcacgtcgcagaaggggcacggcatgatgttccccaagggcgggtgggagctcgacgagtccatggacgaggccgcccgccgcgaggcgctcgaggaggccggcgtccgcggcgacaccgagacgtccctcggctgctggtactacaagagccgccgctacgacaccacctacgagggcttcatgttccctctccgcgtcaccgacgagctcctccagtggcccgagatgtcctcccgcaagcgcacctgggccacggtgcagcatgcgatggatggatgccagcacggttggatgcgtga

SEQ ID NO: 94123 - DNA, 321 bp, Oryza sativa
  Clone ID: PAT_MRT4530_92441C.1
atgaatcttcgggatgcggaggagctcgcgccggcgaggaatcacgcacggaggcgcttgattcctaggaggattcatcgggttgtggaggagctcgcgccgacgaggaatcgcgcacggaggtgcgcgattctgaggaggattcgttgggttgcggaggagctcgcgccggcgaggacgcgcgattccgaggctgattcgtcgggatgcggaggagctcacgccggtgaggaatcgcgcttcgtcgggttgcggaggagctcgcgccggcgaggaattgcacacgggcgcgcgattccggaggaggattcgtcgggatga

SEQ ID NO: 94124 - DNA, 228 bp, Oryza sativa
  Clone ID: PAT_MRT4530_92442C.1
atggatgaacacaaagcttaagtgggtgtgagagaggtgtaaggggtgtatgcaattgaattgggtgccaagagagtccccttgctgctggtgggggagtatttatactcccacccaccaaaactagccgttgggggcgaaatcccccaatcattgtgctctgccggtctgaccggaggtatgtggccggtcagactgtgctattctgcaacggatagaaaactagcc

SEQ ID NO: 94125 - DNA, 366 bp, Oryza sativa
  Clone ID: PAT_MRT4530_92443C.1
atggggaaggcgcgacgtagagcgatggttggcggtatggatcccaaagggttgacctcatgcctcatatcttccccttccaatcgatcccttctcgacgcctcccgacccacctcgatcctctcgtacggcgcccgcatgccagcgatatatggggccttgcaatcctccgtgaatccgcagcagtcacaactcccctcccaggtcacccaagtcggcaccgccgctggcgctcgcctcgccccccacgtcggtggcggcatacgagcaggagcagacaaaacagcacaggaggaagccttttgccatctctttgtggtcgaagatctatctgttcctctccttccagatttcccaaacgactag

SEQ ID NO: 94126 - DNA, 390 bp, Oryza sativa
  Clone ID: PAT_MRT4530_92444C.1
atggggacaattttgtacccgcgacgggtgtgggtatttaagtgggagtatttagacatcgtgggtgtgggtatggggcaagagaacccgatgggccaggagggtgagcttgatgcaggggcggattggtggcgtgatcttgatggtctgctcaccgccgatggtgagctcgagcgcggggcaatgctcaatgcagatccagtgcaaggtggtgtcagtgaaggtcgagctcggtgcagcgtagggcggtgcagcgtagggcaggggcttgatcaccggccggcggcagctcactcaaggtcttggtctcccgaagccttgctcatctgtggtagcgagcttgagctagatggcaggtgcagagacttctacaaatcgggcccaatgtga

SEQ ID NO: 94127 - DNA, 516 bp, Oryza sativa
  Clone ID: PAT_MRT4530_92445C.1
tacttcctgacaaaatcagcaagatgatctcctagctgtccagcaaccaacactacgtactcatctacccccgccaagatatgttcggcagcaagtatcaaagcatcttctaggcatagcatctaaacccatacctgcttgtgtttgagtaggaaaatgcaactgggcttgaccttaagaagcagtacctcagagagaataaccttgccttcaatccaaaagacgtgtactggtaggagtaccgcactgagttctttcttgataatggcatggatctctctacttttagttgggagctggaggatgattgcatcgacggctactgcttttgggtcagcatcactgaaatggaagttgatccctaggccaacatgtaacagatgatacactttgacagcaatacaagaaaggaagccagtattgccttcttcataccccaaaataggtcgtatttctacatcaagaaggatcccaatgataccttcacaacctcaggaataagatagtcatgaactg

SEQ ID NO: 94128 - DNA, 653 bp, Oryza sativa
  Clone ID: PAT_MRT4530_92446C.1
cttcctctcatgcgacatcagcctcccgctcgccttccgcgtcgaccgcctcctccactaccccacgcccacccagccttctcctcctcaagattgtacaaccttggcgaccaacaagaaggttccggagcttgttgttgagtgcaaactctacatcgatgggatacaattcggcttgcccgtgagcacgaggctcgaatcgtcagggccaccatacttctggaacgaggttatgacgctcaccgcgaaatacagggatctcacctccctttcgcagcttgcgttcacggtttgggatatgtcatctggtgaggacggaaatattgttggtggagccaccatatttcttttcaacaacaaaaagcaacttaaaacaggaaggcagaagctgcgattatggccccaaaaggaggcagatggaagagtccccaccacgactcctggcaaggtacctaagactgagaggggtgagatagagcgtttggagaggcttgttaataagcatgaaagaggacagatacaacatgtagaatggttggatcgtcttttcttcagagccatggacaaagctaaggagaagtgtgaaagaaccgaaaatttgtaccctagccttgttgttgaattttgcagttttgaacacagagttgtcttcc

SEQ ID NO: 94129 - DNA, 612 bp, Oryza sativa
  Clone ID: PAT_MRT4530_92447C.1
atgccgccgcggcgggggatcgaggtccggcaggcggtcggcgacggagcagcgccgaggtggcgcatgtcgctgctggagaacacgttcagctcgttcctgcagtcgatcggcggcggcgtggcggcggacggggcggcggcgagggccgtgttcggggaggggtcgctgttcagccccttcctgttcggcaagttcttcgacccggccgacgccttcccgctgtgggagttcgagccggaggtgctgctcgccgcgctccgccgcggggccaggaccaccgtcgactgggccgagacggactccgagtactacctcagagctgacataccaggtgggaggaaatgcgacgtggaggtgagcggcgacgacgccatgagggtggtcgacgtcagcgggctgtggcgggcggcgccgccgccgcctccgccggacggccgggactggcgcgccgggcggtggtgggagcacggcttcgtccggcgcgtcgagctgccggaggacgcggactggaggaaagtggaggccttcttcgacgacggcgaggggttgctcgagatcaaggtgcccaagtccggcgacgcccaccaagcggcggccgccaccgcctga

SEQ ID NO: 94130 - DNA, 339 bp, Oryza sativa
  unsure (1)..(339): unsure at all n locations
  Clone ID: PAT_MRT4530_92448C.1
tnctctcgccgcgccgtcctcttcatctgcacttgcactgcgccatggcggcctcgaccaccctcgccttataccaccccaaaaccctagccgccgncgccgccgcgtccccaaggcccgacgggccggcgccgtntccttcccggtctcacatgccgctgacgccgtcgcnnccgngncgcgggtcaacgcatngtcncgngcgcggccgtcggggcgnatgcgtcgtcgacttcncaaatcgtcttanaagngaagtttcctcgcggcacgagagatatcntagggttgaggaactgttccgtgtttcganggntaaggataagaattngtattgtt

SEQ ID NO: 94131 - DNA, 961 bp, Oryza sativa
  Clone ID: PAT_MRT4530_92449C.1
agttgtaactttattttgtattgagcttcatccatactttataaaagcaaaataaagaagttacagagttgcctaattacaacaaaatcttttgaaattacatagtttgtaccaatcaagagctaagaatgtttgaaaatgccatccatctacaactatgtaacgattaagaatgtttgaaaatgcgaatacgggtggggaatgctcctgcattacaaacagtaagaacaaaatccgtggaccattctatcttacggcagattcaactgcagaaaactaatacagattcaatgcaagacaggaacacttttcctcgttgaaaaataataaaataagattgtcagcaagtgaggttacatatcgcaatctgaaattgatctatgcagatcaaccctgtattacaccctcgttgctcaggaatgccctggcaagtttcatttgtagttaaggagacaaaataatcatcatggggagctcataggaaccccaaaatgaacctaaaataacccgccatccaacagcgaatatgaagatcttaatctttatgtgaatgcgccaggtattggcttgtgtacttgtccaccttcggtccagatgtgccgtacttcgcgtcatagtactctaccattgcagatcccactaacgctgctagtgttagggcttgagcatgcaaccttgcatggatgatcttgacgctagtcttcatattgggcctcgaccagttgtacgcaatcgagctgctgatcccagtaagccataggcaacctacggcgcggagcttgtggtcgatgacccacttcctcatggattcaatcttgcccggggcttccgccatttgcttcgccgcctcttcccccatcttcctctccgatttctctcgcttctctttacgcgctttgtttttcttctttctttttttttttcgagctcttttcttctctcccgaatccggcagcccggg

SEQ ID NO: 94132 - DNA, 807 bp, Oryza sativa
  Clone ID: PAT_MRT4530_9244C.1
atggcaaaaccagatacaacgggcctcttcgacctcagggagctctccgaccgcctcctcaccgcccgcctcgagttccgtgagcggcaagagcacctcgccacacgccgctccctcctttcccgccgacgccgccgcgcaccgctccctcctgtcccgccggcaccgccgctcgcttcatgtcgtccccggatggcaactcctcgtcgtggccgacaagaccacgcccctcgattggtcgcacccggcactgcgctgctcatgcagactgacctggcgagcttcgggacaaagccattggcatgtgacccgacgagcttgcccaagctcccgccgagcaaggagtacaacgccaagctccgcggcaaggaggccatcaggcaaaacacgacagccatcggaggtaagggctccatgtccgtcaagccggggaggaacgagccgtcgaaggcggcgccggcgcaggacgccattggaggaggagatcaccagcgcgtgtctggtgcacctgaagagcgaggcggcagcagctgccgtggtggaggcgcggcggtgacgctagagacggggaggacgagggtggagagtcggagcgccgtgccgtcctcctccgccggcgccgcgcccgccaccgccggccccatgcccgcatccgccggtgccgcaaagagggagagaggccttgagccgacgatgggagagagagagggtgagaggcgtggagccggtgacgggaggtcggaggcgtcgagccggcggaggcgtcggtcagctcctcgcctcctcggtggatgccacacgcggtag

SEQ ID NO: 94133 - DNA, 2328 bp, Oryza sativa
  Clone ID: PAT_MRT4530_92450C.1
atggatctcgacaagtccacctccaccaacgcgtccctgaagaagctgcaggatgacggtgccctccctggtcgcgggaccatggagagagaaccaggaggtattgaacccgaacctatcctgggccgcatggttttggttgaggattatattctttgcggttttcttcctccgccctccgagcttcttcttcttgtcttgaatttgtacggtctttccttgctccatctaaaccccaattccatcgccttcctcagtattttctcttatctttgtgaggcctacattggggtaaagccatttattgatctcttccgcttctactatgagttacgctggatggaacctaaaaaggtatccagatgtgtcggtttccgacttcggaatggcctgaagtcgcgatacatccccttccagtgcccctcttctcgtagtaaatggcgggcgagatggttctatcttcagatagaacattcggatccagtctttgttgtccctgaggaacaaccagacaagatttcggaatggaccgccaaacccgccctaactccccccctccagtctttcatcgatatcatcgatgacctccgagtacgagggttgtcggggtatgaagttgctgccgacttcatcggtaggcggatccagctgctccaggctcaagcccacccagcctttgactattctaggccggaggacgcgacccgggtttctcctcggggtttgaacaacgaaaccgtggagcgccgcatcggccaagtgatgatcagcggccctacgacagtgagcaacatccccgtccccctttgcgagaagggaaaggccgatcgcgaggctgcgatcaacgctctccctttaacggacgtcatcgagctgctcgcggatcaccaggcggcagcgtcgttaaaggagggcgttgccaaggaggcgtccgacattgctgttgctgctgccacgacgagtggcaacaatgttccaaagaaagggaggaagttctcctctgtacttggaaaccgtcggaaagcgcctactccgtcggcctcggatgcgtctcctccgcccaagcgaaggcaaaggctggtgacgcttggcgagaaggcggcatggtcgaaggcggcgcaagatgggtccggcgcgacctccaatgtgtctcccgtggtggcctcgacggacatcgtagtcacagttagggaccgggaggcgacgctgagtggacccgctggcggtcttgcgcccgctcggggcccgccagttgatgccctcacctggggggagctccaagctgagatggagcgcatcctccaggctggtgcccgcagcgtgggccgcgagatcgaggaggccagggcggcggcggtgtcggcaatccaacgcgccgagcagctggcgcgagatctgtcgaagacccgcgaggacctcctcaagatgagggagttggtggccggcaacgaacggcagcggcaggggctcaagcacaggatgtcggagctcgagaacaacctgtcggagatccgcggctcgctgcgggtgtcttacaccggtctacaccaactcaccggggagtgtagcgtcacgaccaccatcccgacaacccccgatgagttctcgctgacgtcctcgctcgcggagctagctgcggcgatggaggagatcccctccaagcatgcggccgggatcggcgaggagacatcgaatgggatctacaccagggggtgccacgtcctcgcagatgtcgatgtcgaggatgtccagcagcgcgggcagcctgagtcgccggtagtcgttccagcacttgcgcttgagccgtatgtgcagcgggacgatatcgatcaaagcctgtccggggaggcggacatggcgatgactttcttaggttggacgaagtccgaggtggccaaactcaagaggactatggtggaagtcaaaaaagaccaagccgtggaagcgctccaaggttgcgaggtgtggttcaactcgtacctcaggagctgttgtatggccatggctggagtctgcagggaactccgagtacctcgcgggaatcccgaggagtcagcggctggatacatctcgtggttgaatggggcctgcgctcagcttgaaggcatcggcaagcgtatcgacgaggccctgaagcaggagtttcgtcgatcgagccgatatgccagagggcacgtgctggcctgtatccgagatcaccgcccgcagcgacatctcgagttcctccacgaagggttttcacattctcggaggactcccacagagatagataatctggcgaagtcgatggagccgcttgcggagaaagtctttcagtctatggactag

SEQ ID NO: 94134 - DNA, 1047 bp, Oryza sativa
  Clone ID: PAT_MRT4530_92451C.1
atggcgagcacgaggaggcgacgcgcgggcggcgtgccaatggcggtgatccggctcggagtggcggccatcgtcgtcctcggcgccggcgtgatcggcggcgcgcgcgcgcagctcaggatggggttctacgacgagagctgccccgcggcggagcggatcgtcggggagtacgtccggcagcacgtcggccgcgtccccaccgtcgccgccgcgctcctccggctgcactaccacgactgcttcgtcaggggctgcgacgcgtccatcctcctcaactcgaccggcaatggcggcgcggcggagaaggacgcggcgccgaaccagacgctgcgagggttcgacctcatcgaccgcgtcaagggcctcgtggaggcggcctgcccgggcgtcgtctcctgcgccgacgtcctcgcgctcgccgcccgcgacgccgtcgccgccatcggagggccgtcgtggcgcgtgccgacggggaggagggatggcacggtgtcgagcatgcaggaggcgctcgcggagatcccctcgccggcgatgagcttcccggagctcgccggcttgttcgccaccaagggcctcagcgtgcgtgaccttgtctggctgtcaggcgcgcacaccatcggcatcgcccactgctcgtccttcgccgaccgcctctacaacggcggcggcggcgccggcaatgccaacggcaacaacaccgacccgccgccgctggacgccgcctacgccgccaacctgcgtgagcgcaagtgcaggacggccggcgacggcgtggtggagatggaccccggcagccacctgacgttcgatctcggctactaccgcgcggtgctcaggcaccgcggcctgctccggtccgacgccgcgctagtcaccgacgcggcggcgcgggccgacatcgccggcgccgtggcgagcccgccggaggtgttcttccaggtgttcggccggtcgatggcgacgctgggcgcggtgcaggtcaagaccggctccgatggggagatcaggaggaactgcgctgtcgtgaacagcggccactga

SEQ ID NO: 94135 - DNA, 319 bp, Oryza sativa
  Clone ID: PAT_MRT4530_92452C.1
gggaaaccggaacaaaagctcccccaattttattggggtacaaaaaagttacttttttttaccaggggaaggcacaactgaacacaaaaggccgaaaaccaacaattggaattttaacgaaaagggggcccgaggatagggcccaaaaaagggaaaggaaaaaagttccaagggggggatgaaactatgaaccctattttattttccatccgacaacaaaacacttacgaaccacaggatggagatttttggaaagggggggccccagcaacaccccctgggttggggaacttgaacgggcgaaccccaaacttggaaa

SEQ ID NO: 94136 - DNA, 2541 bp, Oryza sativa
  Clone ID: PAT_MRT4530_92453C.1
ttaaatgtcccccaaaaaaacatttctacagctatcattgccatctgtgcggtagaagcaaagctttactagcatcaatgttgatcgctgggcgactgtaagaacagtagcgaggttgatccaggcaccaacgctttgcccgtctattgtcacccgttcaacgattttttgtgtggatcgatataccattgagattgataagccattgacactgcttaaatcgtgtatctatatgtgaggggctatgtatgcatgtacaaggtaaaactaccatctaatggcaaataatgcgtcctggttacagtctcatgtactaaattcaggagccctgatcaaagatgccggaaccgcacgcaccagttgaggcagagattctcgataactgttagggagcggttgctggactccatccaaatatttagaatctggagactcccctagcatattagcttctccatcaggacgtcttaggccacacagccgttaatttatgactgatgttaatccataaacattaagaccgatcccggtcacaactgttgacaagtctaaagtatagatgagagtatgccagacttggcgtaaagtttcaacccgagacctttggctagaccccagagccttctgtcgtgatcaaacgtctgcaatactagcagtggatttagcagaattgtacccaagagcagtagagatgcggcatatggatggcacagcagatggatctctggctccagctcgtgcagttaacaaagcagcatgtttctctgcagctgcaactgcttctgatcctgtagcaccattggagcccaaagcctccaaaagagcctgaggagttgctggcaacctgcataagctgttatccaagctctgaccaaacgcagacaattctcgctcgatgagatcccttgagttagttgacatgtctaccacagcattacaagcagggatgattgttcttgacgcatatcctcttgcagataatggctgttgctcccaaaatgttgatgcctccatattggcccgcagaagagcattgtaaatgcactcaagttctgatctacgagcatcaaattcttctattttcttccactttttcttcaaggaatcttccgcttctttccactcagcacataacttgtacagacgctgtacctcagaagtcagtgtattcaagcttgcctttaacccagcaacttctctttccttcgcccaaacatcgagctccaagtgtctgctgttagtcatgttctgtgaggtgttcccagtaggcatctttttacttcctgccgcatcactagtgccatgaaggcgttgcaagagcttctggcttttagctttagcttcagcagctttatttaaagcatcttctgtggccaagaattgctgaacatgttctttctgtctttccagtagctggtcatatgttccgcgggttgacagctctgatccagtctttccattgccatatacttgatatggcaagggtgagcttgcatcagttgaagcagcatcaatgacctgctcattttcatatttatacctcaaaagttctgcatcagcacgtatgtcaatcttgtctgtttctttatgtatgagtattttcatgcgtgatgtgtatgtaatgattgattgcagcagtaatgaaggattttttagggaatccaatgccacagctttaacatcctgtggtatttcaccatccagatcaatgcccaactttgctgcatctaactgggaacttgaattgatgccacttccttcaaatgctgggaaagagcttcgaatcatttcgatcatatctccagcaagagtttcacatgccttccgaatactcctttcacgtgaggtctctacaagatcatctgacaacctgttgcttttgacagtcgagtagagttcttctctctcgctctgcaactgcatatcctcaacagcatctgcaggtccacccgcacctatacttgaccttcgcacatcccttgcttgattaacaaattgatgtagtcgtcgttggtattcagcaaatatcttgcatgcttcatcgcattgctgttcgtatgcctcaagcataacttgtttgtgcctggcattggagcgctccccgaggacgcgcttccgctcggcctcctcgcgcgcgacctccgcgatgcgggcgcgcagctccttccgctgcctccgcacgaccccccggagccgctcggcctcctccgcggcgaggtcccgctccctcgcctcggcctccctggccgccgcgtcgcccccggccccggcccccgccccggccccgccctcccgcgcccgcctcgccgcgacgccgtggacgaggatgttcttgcgggcggtggagacggtgcgctcggagcggacgcggcggaggaggaaggaccagacggggagcatgttgccccggcagatcttgcggagctggtccggcgcgggcggggcggacgggtagcccatctcgtcctgcagccactcgatgatggcctccggggacacgccgccggggccgctgccgccggagacggaggaggcgggcat

SEQ ID NO: 94137 - DNA, 1896 bp, Oryza sativa
  Clone ID: PAT_MRT4530_92454C.1
caagaattcagtaagaacttggatctccttctcgtgctctctctctctctctctctctctctctctttctctctctctctctctcacacacacacacaacaacatcaacaacaacaacaaacaagaggtgaataaaaagtgaaaaaaaaggcctgtgatggaggtggttgtatcggctattgcaggtgatgttgttaatcgatttatatccttcttgatcaagaagtatgagagccaggaaaatcttgaaagaaagatggaaaggcttcagaatctcttgctcaaagttcacatgattgtcgaggaggctgaggggcggcacatcactaactccaagatgctacttcagttcaagaagattgtagatgccatgtaccaaggctaccatgtcctagacatcatcaagaatagcatcctttgcaagtcaagacctgaagagcaggttagcagtgccaatactatttcagcccctacatgttatgttaatcctttccgtacttcacaaagctctaccattagacatgatcagctaaaaagcacactggatagtttagaaacaattgtttctagtatgacagagtttgtctatcttcttggtggatgtgaacgcatgtctcctagaccctacgacacgtatctttactttgataacttcatgtttggccggcaagtggaaaagcagcaagtcatcaatatcttactgcaagagaatcttccaccttttgctccaactgttctcccgatcattggccctagtagagtcggtaagagaactctagttgcgcacgtatgcaacaatgagatagttcgatcacacttctcgtcaatcttgcacttgaatggtgaaaatatcatgaaaatggagtgtgaaactttcactgaaaggagggatttggttgtggttgagtttacagcagatacggatgatgacaattggaagaaattttatgcatcgtgcacaaatatgggcagaggaagcaagattataattgtaagtaggattgagaagatatcaaggtttggaacagtacggccaattcatctaaatagtttgtcacatgaggagtatagttacctcttcaaggtactcgcatttggaagcactaacccagaggagcatcctcaattggtatctatagcaaatgagctaacagtattgctcggtggctcattcatcacagcaaacgtgttcgcagatattttcagaaagaatcaaaatgttcacttatggctccatgtcttaaaaaaatatagaaatacggtgctgaaaaatttctcagagttcagtgaacaccctaagcttcttttggagaaagaacatcttatagatataaccaaacttgcatcgtcatcctctccacttcgtcttatgcctcctcattgtgaaggctatgggtcgaagaggaggttaaccaaggtgatgttcagtgacctgatagctgactccattgttgtaccaaaggaggactttgagttagtcgcatgggaatcacggatacccccttatagaaggtttgtaaacattgttttgtattgtgatgatgagaagaattttcagcatgcggactcacttcacaagaagcgtcaaaaaaatacataaataacatggtagcaacattttattgtggcaatgtatagctttcttaaaggtaaccaaacaaaataatatagttgtatttctatttataatcaaagaaagtgttggttagtgatacgcccttgaagtaatcatagaaattatcatatcatatactatgtgaattcgtgaataaagtacatggtactccattttctgagatagatatcattattattgatcaatgagtatatgctattaatatgagatcctttatgtgtcgtgtttacatgaaatgaatatgattttgagattagcac

SEQ ID NO: 94138 - DNA, 435 bp, Oryza sativa
  Clone ID: PAT_MRT4530_92455C.1
atgggtccaggagctagcaaggagacacctactcaacagcaaaaaccagcagagtccgtctcgactcctcctgagtgccaagagaggagcactcaagctgaggccaagaccacatcgccatcacctgctgcaagcccaaagcctacagaggtcctgaagccaggatccaaacagtcgggagaaaacattgaggaaagcagagcgtgcgagttttctgatatagaagctcttttagatggagggacaaaccctgaaaccggcctcagtctggactcacctactttctcaaatgctactcaggaggaccatgttgactcacatcttccagagaacgatgaggcttgtactgagtctaagtttgatacaggaagggaggaaagctctcctcaagattttggttctaggtatataacatccaaacatataattcgttag

SEQ ID NO: 94139 - DNA, 696 bp, Oryza sativa
  Clone ID: PAT_MRT4530_92456C.1
atggagcctgccgccgcggcggcggggcctgggaaggccggtcaccacaacgccgacgctttccacgcggtggcggcgggcggcgtagctccgcccgcggagacgacgcggtggtcgtccctggcagccacggccgcgagcctcgtggcggtcggcctcggcggtgccgcgctgctggtgtggtgggcgctcgcgttccacccggcgaacgcgcgcctctggatggtgcccgcggggctcgtcctcctcggcacgcccatcctcgcgtggctctccctctgcctgtccgccggcccgtgcgccgccgtccgcgacgcgccggtgcgcgtgaccatgttggagaacgtcgccggcggccgcggcttccgtcgtccacgccccacgtcggaggtcgtcgccggcggcctcgtccttcgctgccacgccccacgtcggagcttgttgctggcagtcgcgtcctccgccgccacgccccacgccgggctcgtcgccggtggccacatcctccactgtccacgctccgcaccatgccggatctcgtcactggaggctgcgtcctccgccatccgcagccatgccacgccaggaactcgtcactggcaaccgcgtcctccaccatccacaccccatgccgcgccggagcttgtgcagcaatacgcatgctttgacagagatgtggtagaatggataaggtag

SEQ ID NO: 94140 - DNA, 808 bp, Oryza sativa
  Clone ID: PAT_MRT4530_92457C.1
tcgcgatctagaactagaaagaagagaaagcaaaggagaggaaaagccaagagcagagaggagcagtgatctttttggaggaggccaggggaggcaattggtatgctcagtgtactaattccctgcatatctcacatgcacatagcttttcttcaaaagcctgggttaagtatatgcaaaaacctgctgtgcatgcgttgggatataatccctaggtttattccatatgtacacacccatgcaaactttatatcctttatccacatctcatcaagaatattctagcattaggcttttgatcttttgcatgcctactgccccttctttttcaaaagcatttggatccgttcaaaatggtagttgtatgtagcatgtatatatatgcatcaagtctttacattattgtagtatcacaatgttattaatgtgtgctgcattgatcaaacagtgattttcggtcttaaggagttacacgatttttagcgtaatagttgggatactgtaccttctttttttcagtcaaacattttatatctttaactattcatatagatgttaataaatttaggcacatatatatgtctaattcattaacatatatatgaatgtggacaatgctaaaaagtcttataatatgaaacggatgaagtattttctacaatttcatatagttcaacaccataagatttatgttattagattctaccatgaggaatactttcactaatatataattcatatgttgttaaactacaccaaaatataaaaaatcatggtcaaatatataaatgtttaacttaattagtac

SEQ ID NO: 94141 - DNA, 1059 bp, Oryza sativa
  Clone ID: PAT_MRT4530_92458C.1
atgccctcggcggtcagctcgccgccgcaacgggagagcatactccgcccatactgcgttccctggacccgcggctccgttgcgacggccgccgtggcgaaggctgctcctttccggggcgagcaaaaccacaagcaggtagcgagcgtggcgaaccccctggtgaagcactgcgttaggctcaggctctcctccgcgtaccgccgctcctgccgccgcattctcctcgtcggactcatccccatcctggagatgtgtagcttcgaattctccaccatcgaaaccttgcttctcttggacggcatagagctaccggaggaattgtacgggttctctggcaatgtcgtgtatgtcagcgccgctgtgatgaagaaagtttctgggatgcaatcagttgattcaactgaggcaatcgctatcattcacatgcctaagtatttccgcgaccttgacagcgaccagggtggagctgttcttgatgagtggctcggctctgcaaagaggattttggttctggatgggattcaggaccctggtaaccttggaacattgataagatccgcttgtgctttcagatgggatggggtatttcttcttccagcttgctgtgatcctttcaatgaaaaagctcttcgtgcagctcgtggagcctcattgcagcttccagttgtttctggtaactggtctgatctgcatgctttgatggctaaatctgatatgaagatgctggcaggtcatccagaaagcagcagtaatggatctgaaagaacacatgttctatctaaagaactagcggattcactgatgagtgaatcagtgtgcttagtgttaggaagtgagggcaatggcctttcggcagatacccttcaagcctgtgagcttgtaaacattcctatgcaagccttgcctttggcccttgaatatagtagcttcaatcaaacacggtggtcctttatcaatacgagccttttggaacaggccagatcagtagtcctggtccacaagcttatgaatccttctatcagcccaagcatttactatgtagaattgaaatgttag

SEQ ID NO: 94142 - DNA, 228 bp, Oryza sativa
  Clone ID: PAT_MRT4530_92459C.1
atggggatccgctgtcgctgctcgcaaagaaaggagggggagtccaatgatgttatcccttccaccatcgccactcgcagagaagacgcggaggagaggctggaggtggaagagaagtgcacctgtggatgcgaagtaggccaggggagcagcgctgctgtggctgaagaggaggtgacaacgttgagaggaggaggtggcattgcggtcggccagttgtgggaatga

SEQ ID NO: 94143 - DNA, 403 bp, Oryza sativa
  Clone ID: PAT_MRT4530_9245C.1
gaggcggcagcagctgccgtggtggaggcgcggcggtgacgctagaaacggggaggacgagggtggaagttgggccaaaagggagagagaagcggtggcgcaccagatctggcgacgacccgcgacatcaacgggcggagggacggccgcgccgtcctcctcgtcctcctccgctggtcagagtcggagcgccgtgccgtccttctccgccggcgccgcgcccgccaccgccggccccatgcccgcatccgccggtgccgcaaagagggagagaggccttgagccgacgatgggagagagagagggtgagaggcgtggagccggtgacgggaggtcgaaggcgtcgagccggcggaggcgtcggtcagctcctcgcctcctcggtggatgccacacgcggtag

SEQ ID NO: 94144 - DNA, 336 bp, Oryza sativa
  Clone ID: PAT_MRT4530_92460C.1
atggcgagtggcggcggcgcgcgcagctgccgacggcggcgaccgacggagagaggcggcgggggacagcgggagcggcggcacggccaaaggcagtggcgcacgcgggaaggggagaaaagggagggggagggagtcctcaccagaggggcggcgcgaccggtgcggaaaacaagggtggcggcgacgattggcggcaaccgaatggtggccgaggcagacgtgtgcgggaaagcctctgatttcgccggcgacgtgggctactccttctaccagggtgactcgtgcttccacctgagctgctccttcttcctctgctgcaccacagcgttctga

SEQ ID NO: 94145 - DNA, 413 bp, Oryza sativa
  Clone ID: PAT_MRT4530_92461C.1
atctagattgattaacatataaatgaacgggggcaaagctagaaaggtttacattttaaaacgggggaaggaaaactcatacgcgcacacgtggttgaaaaagaaaaaaaaaacaataatttttttacggatttttcgcttaggttgggttgaactttatttggtggggccaatgggaacaacgtccaaggcactttaattaattcggaacctcaccaaatttacacccactaatggggaaccgcggggggtcgtacccgggtaatttccgggaccggtcaccctgcaggccgtcaccaggattttccctatagggggggcgttttaagagcttgggggtaataatgggccataggctggttccccgggggaaaatggtatccggttacaatttccccccaacattcgatccg

SEQ ID NO: 94146 - DNA, 300 bp, Oryza sativa
  Clone ID: PAT_MRT4530_92462C.1
atgacgggcggcaggtgcgccgttggtcacgtccgctcttccctcgccctcccgccgtcggacctcacctgctcaccgctgtcgctgacaagtctcggagaggcggtttccgaaggcggttgtagaggcggtcgtcgactcggccacggcgacgctgtcgtgaagaaaagacggcgccgcttcgtctctggattggtcgacgacggattgtgggcgacggcgcaccgatggcgcacggcggtggcgtccacagagaaggatggagcggctgcttctgtgcggtggggccggctgggctaa

SEQ ID NO: 94147 - DNA, 392 bp, Oryza sativa
  Clone ID: PAT_MRT4530_92463C.1
tcggagggcacggaggaggtggaggaggagatggggtttgacggggactgctacgccgtcagcggtggggggctcagggaaaacggcgagctcagttatggctatgcaagtgctcctgcgaagagggcttcaatggaggatttctaccagacgagaatcgatggtgttgatggacagaccatcggattatctggcgtattctgactgacatggcggatctcgagcgaatgaatatgtgaagcaggaccttttcagcagtttaattaagcatgcaaagttcatgagagatatcaagtccgctatcgctgtgacgtacaaccatacagactcagaatttctgagagccgaacgtagccacactagggatgctggatcaactgactcaacagcta

SEQ ID NO: 94148 - DNA, 400 bp, Oryza sativa
  Clone ID: PAT_MRT4530_92464C.1
ataaagaagatatataaatggactaaaaaacgacgaatataaatttgacttttttcctccgcgcttttttccgattgattcaggtggttcaccaggttttcacaagattcaaggcactgggccaggtttcataccggaaaatttggatagatctatcatcgatgaagttgtgaccgtaagctcggaggaatccataacaatggccagaaggcttgcaaaggaggaggggctgcttgttggcatatcttctggtgcaaatgtgtctgcttgcatcaagattgcagctagagaggagaacaagggtaagatgattgttacaatgctgccgagtgggggtgaaagatacatgaactctgatctctttgcagatgtaagggaggaatgtgctaatatgaccttc

SEQ ID NO: 94149 - DNA, 690 bp, Oryza sativa
  Clone ID: PAT_MRT4530_92465C.1
atgtctgcacaagccaccgttgactaccgaagctcctgcgaaacactaaaggttgcccccattctctaccccttgcaagaccctcgcaactctacaaatgatgctgttgataacacagttgttacgatacttccaaatctcccaacggcggttgctccggcggcgtttctcgggtggcggggcgcggcgctccaacagcagcgtgtggcggcgacggcgacagaacgtgtggcggcgacggaaggcgagcgcgccgcggtgcacggaggcggcggcgggggaaggaggtgcggcagtggcacggggaagagggtggcggcggttctcagcggcacgtgcgggagcaacattgagaagctcggcgatgatggatccagtagcagggacctcattgatggcggatacgacagaggggacgttggtaacggtgggtccaatgctgggacctcagttatggtggatccgacagcggagaccttggcgacatgtggatccggtggcggggaggtcggatacctgagcgatggcaatccgtggcggcaatttattttagctgggattgtgctagggttcctggaatgcaccttgttctgggtgggccggcggaggcagaacccgcccgctgcccgccgttccgccggctacccaaggtcgcccgtgccgccctctcctgcccgcccgttgccttaa

SEQ ID NO: 94150 - DNA, 310 bp, Oryza sativa
  unsure (1)..(310): unsure at all n locations
  Clone ID: PAT_MRT4530_92466C.1
tcaaggagcanagggaaccccggancgagagcttggcaaaaaggaggtccagctttttttttctggcaaggntgctgcttcccccgccttagttgggttaaagcttagatttttaaaatcggtcattcctgangttanaanagcccagaacctctgcactatgtcgatcaaatccacccccagctctttcagatttctcgagtaatgggcaaatttgcataacatgctgcccntgtttggaattttttttttagtaccggagaattccatgttagtgtgttggtttatgttttaaaaaaaaaaaaaaaaa

SEQ ID NO: 94151 - DNA, 487 bp, Oryza sativa
  Clone ID: PAT_MRT4530_92467C.1
agaggacaaatacacagtacaaaattttataggttacctaggtactccgtagacaacaagattgtactaacaagctaaaatactactaatacatatatgcaggaatctaatgtacatgtatcgaaatatatgtggactcaaattggtcggataattttaatcaaaagatcttgtaactggcagttagggggaggacaatgatagagtagcctttgtcgttcagctaagcagcatgaaaagaatatctcacattgaaagggacgtgtgaattagcagatactttggtccagtatttcatttgacaaaaaaaaaaaatcaggtattattttacatcgctggctgccaattcttgccttagacgcatgtacgaaaatgatgtcttaatgtatgaattggccaaaactgagtttttttaagcaaaagaacaaattgacatccaagtttacctcgacaatgatacccaaagatccacacccatgaagaaatt

SEQ ID NO: 94152 - DNA, 420 bp, Oryza sativa
  Clone ID: PAT_MRT4530_92468C.1
gccacgcgtacgcccaggcgtccgacctcgcatcccaacaagcaacgaggtggtcttcactctcgccggttcaaagactctcgtcttgaccttatggccagcctcactcgttggagccttcgccttcgtaccgagtgctagatacttgcgcagcacgatgaagcggataggacgcttggagaggttcctcgcggaagccgtgctactgtacgctgcggcggcacattcggactgcgcgagcgatagttccaggtgggtcggacgaccggggttgcgacaccctgccggcgctcagcgccaggctggactggacgtaccacccggtgaacggcacacgggacgtcgtgatccccgcaccacacagtatcagcgtcggaaggttggcgtggggcatcaacacccagcgcaccatgatggtcg

SEQ ID NO: 94153 - DNA, 309 bp, Oryza sativa
  Clone ID: PAT_MRT4530_92469C.1
accggacaccgtcgccctttttttttgtggtttttaatttttcacgccccgcggaccaggccacgaaggaggagcggctcaatggcaaaacaccgcggccaccccataaactacaccccgtgtcaaattggatctacacaaagacaccggaggccacaaagaaccaacgaaactaagatgttaccgataccgaaaaaaaaggggagggccaaacccccccaaagcacacaaggatggtgggggaaaaccccccaaatcccaaggggaggggggtaaagagcccccaaagcggaagacccaaaggggggg

SEQ ID NO: 94154 - DNA, 297 bp, Oryza sativa
  Clone ID: PAT_MRT4530_9246C.1
atgaatggtgctgtgctgcttcagatgctgctgctcctcttgctggctgctcgagctcagcagcagcagcaggtgacgcaggccaggacagatccaaaagaagtggcggcgctggacgcgatattggggagatggggcaagacgacgtcgccgctgtggaagatggccgacgagccatgctacggcgtcgccgtcgacgacagcaccgacctcgacggcaaccccaagaacaaccccggcatcaagtgcgactgctcctacatcaacggcaccgtctgccatatcacccagctgtaa

SEQ ID NO: 94155 - DNA, 475 bp, Oryza sativa
  Clone ID: PAT_MRT4530_92470C.1
ttattctccctcatatggttattattgtaattatttaccctttaattcaacctctgctattacttttgtggtgctctcaagtacgttgatggtcataactgctctatgtggcatagtgatctacttctatcgctcaaatatgcttatacaatcaactaggttgcttattttagaatccattctttttggttgtttaatgcaatatgtatctgtttttcttcttctgggacctataacgagtacaattaattgcgtattgtgggtttgggttttctccattggatttgtactggtaatagctggtctattaactcgtatagctcacattagagcgttaaacaaacctaaaattcgacttcaaatcaaaactattaccttaatttttgcctggtttgatcgtttgcatggggatctacaagtcttgggttatcttggagccatattggcttcttaatgttatggacatttttaaacc

SEQ ID NO: 94156 - DNA, 465 bp, Oryza sativa
  Clone ID: PAT_MRT4530_92471C.1
atggatcactctgagcagagcgtgcacgcggcggcgcacgacatggcgctgatcgagcggcaccagccgtgggagatgctggacggcatggcgctgtccatcatcgacgacgcgggccacggcgacgccgcggcggccgggggcggcgtgctggcgatactggacatgatcgtggcccgcctcggcgcggcgatcgggctggaggaggcgctgctcgccatggccaggacgagcagctacgaggggcccaaggtggatgagatcctccgggtgcgcaacgcgctggatgagatcaggagcgagatggacctccccgcgctgatgcggaggcttctccacaagcggcggggtgtcacggagatcaccacctgccggccagccgccggcgccggcgccgccgcgacggagcaggaccaggccgacgagacagagaggttgatgaagaagatgaggctcaagtgctag

SEQ ID NO: 94157 - DNA, 774 bp, Oryza sativa
  Clone ID: PAT_MRT4530_92472C.1
atggatcactctgagcagagcgtgcacgcggcggcgcacgacatggcgctgatcgagcggcaccagccgtgggagatgctggacggcatggcgctgtccatcatcgacgacgcgtacgccgccgcgctcggcatcgtcgggcgcggcgaggagggctaccacggcggcgtggtcgagatcagcgccgccgacccgggctccccgatgctcaccgtccacgccagccgcgcccactgcctcgtcgccctcaacgacagcccgcgcggcggcggcgacagcctggtttgcgcgtaccggaggtacacgtccccgaagcagaagtggcggccgcgccaccgcctcggccgcgccagcgtcagcgtctcgccggggacgctctacctgtcccgcgccgacggcggcgccgccgccgccgtccccaggggccacggcgacgccgcggcggccgggggcggcgtgctggcgatactggacatgatcgtggcccgcctcggcgcggcgatcgggctggaggaggcgctgctcgccatggccaggacgagcagctacgaggggcccaaggtggatgagatcctccgggtgcgcaacgcgctggatgagatcaggagcgagatggacctccccgcgctgatgcggaggcttctccacaagcggcggggtgtcacggagatcaccacctgccggccagccgccggcgccggcgccgccgcgacggagcaggaccaggccgacgagacagagaggttgatgaagaagatgaggctcaagtgctag

SEQ ID NO: 94158 - DNA, 251 bp, Oryza sativa
  unsure (1)..(251): unsure at all n locations
  Clone ID: PAT_MRT4530_92473C.1
cccacgngtccgagaagtactcgagcaaagaaggagagagcttggtgagctgcagagatggccccctccgtgatggcgtcgtcggccaccaccntcgttcccttncaggggctcaagtccaccgtcggnatgnccgtcgcccgncggtacggnaactccannttcggcaacgtcagcaatggcggcaggatnangtgcatgtaggnntggccgattgaagggcatnaagaagtttgagaccctttattact

SEQ ID NO: 94159 - DNA, 235 bp, Oryza sativa
  Clone ID: PAT_MRT4530_92474C.1
gtgcaagaaaaggagacggcatttggtggctgccggatccagccacccccgaatgcagcttgcctgagaaatgacctcgcccaggtgaatcctggggagctcatggacacggacaccgggcatgcacacacgcacgagccccactcggagatcctgcctgggccggacccgcgttccatggtggatggatacgtgcatcggcaaattcgaccagccgacctccattagatcggct

SEQ ID NO: 94160 - DNA, 402 bp, Oryza sativa
  Clone ID: PAT_MRT4530_92475C.1
atgcagatagatcgcgcgaggctccttgttggcttgaaagaggttgtcgatggtgatccacaagtcctgggccgattgattaggctccatggcgaggtcgaggacatcgtcggcgacggagccgaagagctagctgcagaggcagcaatcggcctgttcccaggcggcgtcgggttggggttacgaagctcgagggagatcggaacatgggacttgacggcgatggtcacatacgggttgacgaaaaccggggcgacggtagaggtggaagatgacaccgtagcggagtcggtggcagcggaagtagccgaggaagtggatatggtgagggaagtggggcgcggcagccagggaggcggcgatgctcggtggacgcagcgaccagagaggaagcagcactag

SEQ ID NO: 94161 - DNA, 1997 bp, Oryza sativa
  unsure (1)..(1997): unsure at all n locations
  Clone ID: PAT_MRT4530_92476C.1
cgggtgttgagcgcccaaagagaccagagacctcctgcgtgaaagagtccaaagagaagaccttccacaattctccccaaaaagaacctttctccaccaaatagcacgtgcgcaatataattatgcgcgggtgtgattattttagagcatcgatacccaaactcggtaccgttgtcggctgaaaacacttgagncgntggcgaacttgtgtgtgggcatactcaacgaactcacggatatggcgatgaacatgggatttgtggcgaagagaaaacgtccacttanaatgagtaaaatcttcaaccatcactaaataaaatttgaagccagaaatgctcataacaggagaagtccatacatcgcagtgcacaagttcaaaaggagaagaggtactggaagtggacttattaaaaggaagacgagtgtgtttccctaactgacaggcatggcaaagggaattatttgtcttggagcgaggtatggcggataaatgttggagagtggtgatggcaattggacccggatgaccgaggaggcgatgccataacgtggaggaggtggcgaggttgcactgggcggcgatggaaggtgcagcggccaggagggtgtagagctcgccatggctattgcaatgaagaatcacgcgcctggtccgagggtccttaatagaaaaaccaaactcgtcaaactcaatggaacatttattgtcgcgggtaaattgacgaacggagagtaaattgcgaaccagagggagcaacaagaacatgacgaaggtcaaatctagtggtgccaatagggagaaaggaagtgccatttttatcaaccggaatagagggaccattaccaacggtgatataagtgtgtgagttggggaggcgagtaacgagtataccatcggtggaggacatgtgcgaagtggcacccgtgttgagaacccatgaattggggctgtgaatcgtcatttgattgagaacggcgacgaggccggtttggtcccaagccggctggacagaccctgcaggcggtggcgaggagtatggcccggcgaatgcagtgtgagcctgaggatacggcccaagtattccggcgctgggagaacgccagggttgctgctgtcctgcccagggcaagaagcacatccatggtgcggcttagcgtggcccggagttgcggatgttgttgcgggcgtcgttcttgcccttggtactgacggcgttgccgccgccggcgcggttcttgtgctgcccaccgctgacagaggagatgcaagtgcccctggcgcagttggagtaggtggtgttggctgtgacgagggcattctcggactggacctgcacggaattggcgttgcaaagctccttgagaactagcgtgttcctcaccgaggtgaaggacgacaagacaggggcgctcgcgatggtgtcggccgtgctggtgaagcgcgagttgacgccacggaggaggttgaggacgagcagggactcggtgacggggtggccgacgtcgcggagggcatcagccgccgtcttcatgcgctgacaatagtcggcgacggagagatcgccttgggtcatggagtggaactcgtgatgcagatagatcgtgcgaggctccttgttggcttgaaagaggttgtcgatggcgatccacaagtcccgggccgattgatcaggctccatggcgaggtcgaggacgtcgtcggcaacggagccgaagagccagttgcggaggcagcaatcggcctgttcccaggtggcgtcggggttggtgagaggagcagcgtcaagaagatcgaggagaccgaatttcccacacatcgagcggaagaaggccttccacttgttgtagttggggttacgaagctcgagggagatcggaacatgggacttgacggtgatggtcgcatacgggttgacgaaaaccggggcgacggtagaggtggaagacgacaccgtagcggagtcggtggcagcgaaagtagctgaggaagtggacat

SEQ ID NO: 94162 - DNA, 577 bp, Oryza sativa
  Clone ID: PAT_MRT4530_92477C.1
atatgtacagatgttcaatatcattgttgataggaatcagggagattattaattaggttacaattgcaagaaattatgcaaatgaccaaatatacccaaaaaaagaatcatgtgatgaccaatttagcaccacggtccagccaatatgatgtgatacacatagagaaaaacttgcgtgccttgcaatgtggcagcaataactctcccaatagttgcacactcaccacctcactatcccgctaggttgaagaacaacatgcttaatttgtgtccggttgtatgtgtacgtgatatgtatgagatcatccatggtctggatcactgcaggatatgaaaactccatgccttcagtatcttccaatgtcattacatcgttccatgaatcaccatcatccatggagactgcaacttttagtgttcctctgggagaaggtgttgtaagccaggagtactctcccatccttcatcttaactccatcaatcccagagtttggggtagggagggcagtctcgtgcacataactccatgttacacccccatcagcaggatcagccatgcagacacgaccaattgtct

SEQ ID NO: 94163 - DNA, 243 bp, Oryza sativa
  unsure (1)..(243): unsure at all n locations
  Clone ID: PAT_MRT4530_92478C.1
caactacgccgccgccacctaatccccccggcgagcgacacggtcgatcccaccggagctcngaccgccgcagcgacgatggnntgcgccggagaagaagccgcgtgggngggaaggcggaggngggggggggtgggggtgcaatggagacggaggtgttccccgtggttgacctccgcttgctctcgcagtccgacctggaagngntcgncgccgcctcancccacgcggtggacccggggg

SEQ ID NO: 94164 - DNA, 382 bp, Oryza sativa
  Clone ID: PAT_MRT4530_92479C.1
acggcacgagggttggaccttatcccggaggagaccgcaccgccgccgtcgcacgggcgagaatggaggccgccggcttacggctgcgcgccctcggcctgtgccgcggcaaccggggagcgttccccgccgcgcatggcggcggcggcggccggctccacccccgccgcccgcgcctcgcgggcgccttctgctcccttgctacgaccggcaacggagccgccgccgccgttggacccgtcgggagcggtgccgaggtcgcgcgcgccaagaggatgcttcacgtggtgctggtctcccctctgatcccgggaaacactggatcgattgcgaggacatgtgctgcgtcagcagttgggctagcatcttgtcgggccattag

SEQ ID NO: 94165 - DNA, 550 bp, Oryza sativa
  unsure (1)..(550): unsure at all n locations
  Clone ID: PAT_MRT4530_9247C.1
gggctgcaggattcggcacgagntcgagctnaacatacttgtgcatgtttcgcatcgttattgtttagttcacttctgatgtacttttttgggtttcttaaatatttttccacatgcatgatttactgtttttgagcantagtctcatcaaaatacaattcttattaaaatcagttgatgttcanagcgaataatctgaaataggcttaaggtnaggagaaccngatncatgtntaatgagttctcattgtttgttactatgatcactctggagttcttattgctgatngtttttatatctagatgttttaaattagtttcttgttgcacgacaanacggcgttgttttatttcacatacacccntttgtttacnaccatggacncattctctgtattagaatgcccctgtttcaccatggncggnccactttgggganttttgttccagacagctggacagaatctgtttttcncattatgcngtanntccccnggaaaccaganagncttcccnggggttgaaanaacccccnggaacctgcctgatc

SEQ ID NO: 94166 - DNA, 972 bp, Oryza sativa
  Clone ID: PAT_MRT4530_92480C.1
atgggggcggagaccggcgagcccagctccttcctcagcttatctgctgccttctcctatggaattgcatctatggcaatggtattcgtgaacaaagcaattcttatgcagtatgctcactcaatgactcttctcaccttacagcaaatagctacagcacttatcatacattttggtcaaattctaggagtgtctaaaagaaaagatttcagtatggcaacaggaaggaagcttcttccgctgtcgatcttctacaatgcaaatgttgcatttgcgctggcaagcctaaaaggggttaacattcctatgtatattgcaattaaaaggctcactccccttgctgtactggtggctgggtgtttacggggaaaggggaaaccaccaacacaggtgtccctttcagtcatctgcacggccgctggagtccttattgcagctcttggagatttttcctttgacttgtatggatactccatggctctaacatcagtcttcttccagacaatgtatttgattcttgtggagaaatcaggagcagaggatggtctttcctccgttgagttgatgttttataacagcgtattatcactaccctttctgtttttcatcattatagcaacaggagaattcccctattctctttcagtactctctgaaaagacggcctcgctaacattcagtgctattcttcttgtttcgctggtgatgggtatcgtcctgaatttcaccatgttttggtgcacgatagtgaactccgctctgacgacaacaatagtaggagttctcaagggtgttggatctactaccctgggtttcgttctgctgggaggtgtggaagtgcatactctcaacgttactggattggtgatcaatacatttggaggtgtctggtattcatatgcgaagtatatgcagaagaggaagatgccaaagaggattgcacctgatgtagaggcacatcctcacaagtaa

SEQ ID NO: 94167 - DNA, 745 bp, Oryza sativa
  Clone ID: PAT_MRT4530_92481C.1
atggcgagaaacgaggagtcgggcactgattccctcccgaggggcctcgacagccgaatcccccgggggtctaagtccgagtggccggggcggctgggagccggccgaaccggggccgtgaatccttcacagccccccagcgggggccgtggcccgtacgccgggtccggctccgaatctaccacggccgagaccgccccctcgagggaggagagggtgccatccaccgtcggtggtggcggcaccgagatccccctcggcggcgttcccgagggcaccgccgaaggggaacacggcccagaggcggaggccgaggtagaacgcggcctagaagccgaggtggggcgcggcccgggggccgaggcgagtcacagcctagaggccgaggtggggcgcaagcccgagcccgaggccgaggctgaatcggcccgggggcccgaggcgaagggcgatgacagcaatcgtacccctctgcacctggggcgcccttgggtccaaccacgcccagctgacggagatccaggcacgcgaggagacgctggactccatcatgcgggagacggaggaggagcggcaggcggcgctcatcgcctcgagcgtcctagacgaggcgctaggcaacatccgcctgcagtatgaggcccatgcggacgacctggtgcagagggttgaggacgccagcggggtccttgatgcggccgcggcctatgagcggtgggcatcggaggtcgacgcctcgctgtga

SEQ ID NO: 94168 - DNA, 141 bp, Oryza sativa
  Clone ID: PAT_MRT4530_92482C.1
atggcgtcacgtcggatcctctgtcacctacacgtcatggctatgacgccgcgcggcaccgcggcgaagatggagacgccgaggagcaagaagcagattgaggaatggagactggagagcagcggagtcgtcgacgactag

SEQ ID NO: 94169 - DNA, 372 bp, Oryza sativa
  Clone ID: PAT_MRT4530_92483C.1
atggcgcgattccgccggatccgccacggtatcgcaacagtaggtcgcgagaccggcggtccgttcataggccacgatctaatgacggcaattgaccgtggtggcggcgatggtgctcttggagcccctcgttgcaggaggagtggtgctccaggagttttccgtagagacggcgacggcactcccggagttgtccgcaacgatggcggttaccccatcgtcgacgtccgtgctagggcactcagctcctccgcggcctaccatgagtgtgagttccgcatactgaaatcagctttccgctggaacgatacggcagacatcgccggcgatgcagccatcgtggagtttttggctttgtcttggaaggaatga

SEQ ID NO: 94170 - DNA, 1109 bp, Oryza sativa
  unsure (1)..(1109): unsure at all n locations
  Clone ID: PAT_MRT4530_92484C.1
tccttaaagcggccgcccttaannannnnnaanaaaatttttttttttttatgcaaagaattctcgttcaatttccgtatagaaataataatgaatccataaatctgtatagtatacatttattctgtatttctgtatgcgcactaatgtacaagccaaaatatacacaacacaacacatcagcacaacgcaagggtcatgtaaaataaaacaataaatcaacacaacacaaagaatcaagacacagcacgagtccctttcatgaatcttattcgattcaaaagtgaatcattcacgaatctttctttctttttcccatttactttatgaaatggatggtatttttcatcaggtctttcatgagacctggacgttggcattgaggatctgagggatggacctgatctgcagcgccggtctgatggcgagaagtccggcgaagctctccggcggcaccctcatcccgccgacgttgatgcactccagcctccggcagccgccgacgagcgccaccaggccggcctccgtcacgtggcggcagctccacactatgatgctcttcagatttatacaactttttgcaactgcatacaacgattcatctgtgataaatgttccaccaatgttcaggtgctgcaaagaatgcgctcttgaaaccagctggatgacgccattatcggtgatcccagccaatccccagagagagatggaggtgaggttcttgacgcaatcggcggtggaaatcctgatcaatccttgatcagtgatctggcagccccagcagcttcgtgaaatgtcgaggtctcggaggttgacggcggcgcggacgaagcgcgcggtggagtcgtcgccggtgcgctgccccgcgaagctcatccgccgccgccccgccagcgacctctccaccgccctgcgccaccgccggctcactccccccgccatggagaggtcgtggaaggatgggaggagggagagcacgtgcgcgaggaggtcggccggcagccgctcgacgtgcggctcgggctcctccgccgccgccggtggcgcgacgccgatgacgaccccaccagccatggctcgcttcggctcggttgcttctcccctcgtgc

SEQ ID NO: 94171 - DNA, 215 bp, Oryza sativa
  Clone ID: PAT_MRT4530_92485C.1
cgtgttggcataatcatattattattcttccacctttcccaaattcaactaaacacctatttcatacttttttcaaaactaaaatttgttgatagaccaacttatatcattatttttatagcaaaaaaacaaaacctattgtaaaatttcccacacttttattcaaataaacagagccgcggcggaaaaatggacaaacaaaacaatcgctcccc

SEQ ID NO: 94172 - DNA, 837 bp, Oryza sativa
  Clone ID: PAT_MRT4530_92486C.1
atggcttccaccacacccgaccggcgcccctccgtcggtcagctttcagtcctgccaatgacaagactgccaccacaccgcaccgacgccccgccgtcggccgacttcctcgaaccaccatccctgagagctggtccaggacccctccgttccaccacccgccggcctcctcgccagatctggccgaaggagaacccgggactagaaagggtgagggtgccgatcggcaacgaggaagatgacccaccgccgccagttccctttgcaccatctaggcctgcgccgacaccggaaatgcagccgcacgccgccgccactccaggctggccgcacgccttcctcggacgagcctcacgcgcgtgccagcctctgttgcggcctccactgcggcctcctcgcgccggcctgcgctgcctccgccaccgcgtcctccgctgcctccgccaccgtggcctccgcctccggccgccaccacgtcctccgctacctccgccaccgcggcctccgctgccgaccgtcaccgcgtcctccaccgccgtcggtcgcgtctccgcgcacgccggcctctcaccggctgccgctagccgccgcctccacctcccgtcgtcgcgcacgccggcctcctccactagctgccgccagccgccagccaccgccagacgccgctgcctccacctcccgtcgttaccgcctgagagcggcttgctccggccagctccggcgtggaggcgccggatccacccgtggggaggccggatccggccgcggcggcgccggattcgccgcctccacaccacgtctgtgacgcctccgcaccgcgcgttggcccgcctgtga

SEQ ID NO: 94173 - DNA, 316 bp, Oryza sativa
  Clone ID: PAT_MRT4530_92487C.1
ccgaattccggtcacccacctccggaacttctattcgttcttatagagcaggtacaaagacggtgggttgttctttgaaatagagatcggcaactccgccgtcgaaaatggctgaattctcttggctcacggcgctcggctccatgttcctcacgacgctcctcaccgtcatgttcagctataaagaccccgaactcatgccgcttggcatcaagatcgtcgtgtgggcgatggcaacggccacgacatgcggcggcttctatgccttcttcatccacgaagagaagcagccgcagtacatggccgtgccggcctc

SEQ ID NO: 94174 - DNA, 702 bp, Oryza sativa
  Clone ID: PAT_MRT4530_92488C.1
atgtcagcggtgagaagttatgatgatgcttttttaaggcaactgcatcaaagtgtagctccttcaattgtgcaactggcagttttcaatgcaaaaagtacccaaataccatgccatcttggtactggattggtattatgtgtgacacccaattatattggggtaatcacatctatcagttgtgatccgaaagatggtttcagagtcgttgcgagatttggtgatcaagaagatttggagacagaagttgtcagaacaagttcattactttctgcgttggttgtgcgaggatgtaatgttcaggccataccttgcattcctacatcgtttcatgaaggcgacttaccagaggcagatgttgttttttgtattggatgttttagcattgtgaaagagcagataatgactgcgggaataatcagttatttaatgcatgccagtgtatgcgaatttgaaaaggaactgagaggagaacaacagatgtcagctcttattgagaagtacgattctgaaaaaacgagtgcatcgaagaagagaaagggaaggggtgttagcagttcgcaaatgtcaaggtcaccagtgaagagaaaggcgggtggcagttcttcgtcaagaagggagaggggtgttgccagttcgcaaatgtcaagtttaccagcgaagagaaaggcgggtggcagttcttcgtcaagagcgatataa

SEQ ID NO: 94175 - DNA, 235 bp, Oryza sativa
  Clone ID: PAT_MRT4530_92489C.1
atgatcttcccatgggattaaataaatacgatacccttggaatactctcgggtgaaatgctacaatggtatatccgtgcgcttgcggattaactctgtgaccatgatataccaggagtatttctgcaccattgctgagaattatatttctagtaatgtcgttaaaaaataccaacaccggggtcaaatggggaagaagacgggctgccgtgtgtgcccccgccctcccaggtctg

SEQ ID NO: 94176 - DNA, 522 bp, Oryza sativa
  Clone ID: PAT_MRT4530_9248C.1
atgtccccttgtgataatgagaaacttgaaaaagggatagtgcgtggcctcgtgctcgctgcatgtgcaccgtggagcggagcctcgcggcgcctgttgttggtgcgcaaggacggggacgaggcgaccacggcggtggaggagaagaacgtggcagtcttgtgcgccctaaccgggctgcgaggtggagtgttatctcaattcaccaaaaatcgggtcaatcaaagccgtgagcatagcgagtggagcttaaggaaggtcgaggctcttcagaggacaagcaacgtgagcgcgggggtgccctctaaacacaaccacatggaggagcaggagcgtgttgccccttacggtggcgacggcttccaggtccacgaggagtgccttcacaagccaactctcggcatcaccggtggccgtgaggttgggaagaaggtggtgattagtttggtggcaaggtctccgcctctggcgatgccatcgtgtgcgtcggtggtgggtttggcgatgacactggccatctag

SEQ ID NO: 94177 - DNA, 771 bp, Oryza sativa
  Clone ID: PAT_MRT4530_92490C.1
atgagcagggcccgccccatgtttatgataaatgataacccggtggacacactcttgagtcatgcaagctccaaggggctctccgttctgtcatacagggtagcgttgcaggctctggcaaagacaatgcaaaaggatctcaatacgattgctgccaaggtggacactactaaaacagcgtcgctacaaattcatgttaacggagacgatatgttccttgaaccgtcagaaagattactggttctcttcagccttatcgtcgacgaaatcgattcttgggaggagcattttgataagatttctattgaggagaggagcaaaactgatgaagaaactctatttaacgtggagggaatcaagataagtaaaaaatactccaaaaatcctgaaagctgcagaaaagagtacatagtgttaaccattattcttgctgctgagggaaaactgaagtttccccaaatcagaagcgccgatgatctgcgattagtactgggaatgctcaacggtatacatgcaagtgaaattaagggtgttcaaattctatggactccacaagaagaggatgatgctctttcagaagagaggctactaaaggactatccatatctgaggcccctaaaacaagttttaattggagagtcaaaacaacttttacttggagagtcaaaattcaaacaaattttgtttggagagtcagaagagaagcaacttttgcttggagagccaaaagaaccgtcagtacaagaagatcctaataatactaagggatag

SEQ ID NO: 94178 - DNA, 291 bp, Oryza sativa
  Clone ID: PAT_MRT4530_92491C.1
atgggcggcctatgggtggcggcggctctcctcctctctgcccctcgcctcctctccctctcccctggcctcccaccggtggcgcatggtctcctcctctctgcggaggcggggcgcaacctcctctccgttgtggccacgagcggcctcctcctcttcgccgctggccgccgcgagcccggggctggatctggctgccgcgatgatgggggtgtctggatcggccgccgtgacaacgggggaggccggcgaggaggcagcgacgacttctccacggtggcgggagggtag

SEQ ID NO: 94179 - DNA, 719 bp, Oryza sativa
  Clone ID: PAT_MRT4530_92492C.1
atgcaccgatctcctttctgtacgtggccggcggcggagcggggacggtggcagcgggagagggagagagaggcgatcgacgcgacggcggcggcgggagaagaggagagtctctccctccccaaggcgatggggctgctccgctgccgaaagagctgctgcctccactggatgaactacctcagccccgacctcaagtgcagcaacttcaccgacgacaacgacgagcttaccatcaagctccacgcccttctcggcaacaagtatctgctccggttagctcttcttgtgttcttggtgctgattgattggttctgcaggtggaacacgcacatcaagcgcaagctcatgagccagggcatcgatccgcagacgcatcaaccggttagcgccgggaccagcgttgccgcggcaagcgagctgaccacgacggccagcactgtcggcttcccatccctgcaggcaccggcgcccgaggcggcggtacgcgtccttgatctcccgcgcgctggcccccgcgtggaggccgaggacgtcgtagaacgaggcggcggcggcggcggccacgtggtccggcgcgacgacggaggtcgacggggagaaggaggccgagagcggcggcggcgcggcgtggaggcgcggggagggcggcggcgaggggttcgtcgtgggcgacgccgccgcgggacggaacgcgaggaagctggaggaggacagcg

SEQ ID NO: 94180 - DNA, 207 bp, Oryza sativa
  Clone ID: PAT_MRT4530_92493C.1
atggcagccggcaaccccggctatcggtcatggtgcagcggtgcgcgacacgagagatgcgagggcggcggcgaggctcacccaaacggctggaacggtgaggaaacaacgacggcgatgaggaagaggatgatgccggctcgggttgacgtcggggatggagctccgaggcttgccaagctcaatgaaggcgtggccgagggatag

SEQ ID NO: 94181 - DNA, 746 bp, Oryza sativa
  Clone ID: PAT_MRT4530_92494C.1
ggaacaggaatgaacgaaattcagttcctcttcccaactatctcaacactgttattattaacctatactctgagagctaactgatcctgccatgatatcttcctcttcccagctcgggaggaggcggcgttccggacatcccagaatgccgccattttcgcatcactaggaccggcggcaaaatcaccctccattgggtacctcatgaccctgccaaccctaacaggttcctggtaaccatgaagctcctccatctcttctgaactcggctcgcaggcctcgttgaggtcaatcaccggagatgctcttggagcagcattcagcctccggtgcgccgatgggcctttgctagagcttccgatagcccgaaccgtgtggtactcttcaccatgagaccaaccaggttgccgcaatgtgggcggcaatgccggattctttactctatagacaaacgtctgggatggattttcggacatggatttgtaccttttccgcaaaaacttgacttcagccaaaagcctctgtttcttgagcttctccatctgtaatctcttcttctttgcttcagtttcctcgaggagctccttgtagtcctggagaagattcttgtacttggccctcgccctgtacgcctcttccccgccaccaacgccgccgccacggctgtgccccggcgccctcggcagcagcggcgacggcggcgccctcgccgccggctgagccaacaccaccttagccttcttcat

SEQ ID NO: 94182 - DNA, 1257 bp, Oryza sativa
  Clone ID: PAT_MRT4530_92495C.1
ttctgcgcggccacaacgacatggtcatggcaatcgcggcgccgatcgacatctcgcccctcatcgtctcctcctcccgcgacaagtcgctgctggtgtgggacatcaccaacctgtccagctgctcgtgcccgccgccgcagctcgcgccgtcgcccaccgcccgtccgccccctcgcgccgctcgccgccggccaccgccgtccaccgccgctcgcgccgccgctcgcagccagtccgcccccgcgcgccgctcgtcgctagcccaccaccgtcctccgccgctcgcgccgttacccaccgccagtccgcccccacgcgccgctcgccgccagcccaccgccgtccaccgccgctggcgccgccgctcgcagccagttcgcccccgcgcgccgctcaccgccagcccaccgccgtcctccgccgctcgcgccgccgcccaccgccagtccggccccgcgcgccgctcgccgccagcccaccgccagtccgcccccacgcgccgctcgcgctccccgtcaccccacccacccacccacccacctcgaggagctccttgtagtcctggagaagattcttgtacttggccctcgccctgtacgcctcttccccgccaccaacgccgccgccacggctgtgccccggcgccctcggcagcagcggcgacggcggcgccctcgccgccggctgagccaacaccaccttagccttcttcatgtccgcctcacctcacccgcgaagaaaccaacccccaatccatcttcgcgcatccccacatcgccgcgcccgctccactcttccacccccggcgccgctgacccctccccagctcccgcctcccggtctccctcgacccatccccgccgcttgaagccctcccgtcgcgcctcacggtctccatcacgccggctcgccctcgacagatccccggaagccctcccgtcgccagttcgtcgcacacacctaccttgccgatctgctcctcgccgccactgtcggcgcccgcatccacgacgccgccgtcatcccttggtagtttgatgtcttctccttctcctaggacccctcgtcctcctcctcctcctcctcctcgccgtgcctccctgacccgccgccgcttccaccctcaagcgccaccgcacgtcgcacgagaccccacttcctcccgctccccccgctgccgcgcctcgctgacctgtcgcctttaaaccttgcgccggttccaccttctccgaggtcgctgcctccctagagggc

SEQ ID NO: 94183 - DNA, 214 bp, Oryza sativa
  Clone ID: PAT_MRT4530_92496C.1
tgggtttttgtacacctttttgggggtttattttttttttatagcatctaaacaaatacgtgcgacgcggggcttgatctcagaggaacccgggacaaaggacactttagctattaccaggccgcgtcacgtattgaagacgtctgcaaaggactgagtgcacaaacctttgggaagggcgcacagggggggctcctacacaccctttagtggg

SEQ ID NO: 94184 - DNA, 1607 bp, Oryza sativa
  Clone ID: PAT_MRT4530_92497C.1
cggacgcgtgggcggacgcgtgggcggacgcgtgggcggacgcgtgggcggacgcgtgggcggacgcgtgggccgccgccggcatcctgcccgagccctagctctcccctatccctcgccgcacgcaccaccaccaaccatggccggcgcgcaggagtctctggtgttggccggcgtgatgcacggccacaacgacgtggtgacggccatcgcgacccccatcgacaactcgccattcatcggctcaaatactattagccctagagtagttgttgagatggcattccgctaacaaaacagacaagtgattgattatacacgactacatctacaggtccaggagcattacacccatccaccgattccttaggattcttttacaactcgaggaacagggatgaacgaaattcagttcctcccaactaacactgttattattaacctatactctgagagctaactgatcctgccatgatatcttcctcttcccagctcgggaggaggcggcgttccggacatcccagaatgccgccattttcgcatcactaggaccggcggcaaaatcaccctccattgggtacctcatgaccctgccaaccctaacaggttcctggtaaccatgaagctcctccatctcttctgaaatcggcgaagccaaccacgaggcatgactccaagaaacgccatgaatccacccacccacccacccacctcgaggagctccttgtagtcctggagaagattcttgtacttggccctcgccctgtacgcctcttccccgccaccaacgccgccgccacggctgtgccccggcgccctcggcagcagcggcgacggcggcgccctcgccgccggctgagccaacaccaccttagccttcttcatgtccgcctcacctcacccgcgaagaaaccaacaaacgccccgcaagaaagcgatccgaaatcagcgcaacagaagcccccaatccatcttcgcgcatccccacatcgccgcgcccgctccactcttccacccccggcgccgctgacccctccccagctcccgcctcccggtctccctcgacccatccccgccgcttgaagccctcccgtcgcgcctcacggtctccatcacgccggctcgccctcgacagatccccggaagccctcccgtcgccagttcgtcgcacacacctaccttgccgatctgctcctcgccgccactgtcggcgcccgcatccacgacgccgccgtcatcccttggtagtttgatgtcttctccttctcctcaagatggatccaaatgtgccaaatgcgtttattagcaaagcgaacaaactggggatggcgccacgacctgcttgtgctggagacagaggacccctcgtcctcctcctcctcctcctcctcgccgtgcctccctgacccgccgccgcttccaccctcaagcgccaccgcacgtcgcacgagaccccacttcctcccgctccccccgctgccgcgcctcgctgacctgtcgcctttaaaccttgcgccggttccaccttctccgaggtcgctgcctccgcgggcgccgtcgctacctcgagcaccgtatgtgcgattgcagccgcctccgctcgccat

SEQ ID NO: 94185 - DNA, 927 bp, Oryza sativa
  Clone ID: PAT_MRT4530_92498C.1
atggatgaagagtatggtgctttaatgcgtaataacacatggcacttggttcccgcaactcagggacgcaatctgattgattgcaaatgggtttataagataaaaaggaaggctgatggtactattgatcggtacaaggctcgtttggttgctaaagggtttaagcaacgttatggtattgactacgaagagactttcagtcctgtagtcaaggcggccacaattagactaatattgtcactagcagtctctaatggatggtctttgcgacagctagatgttcaaaatgcttttcttcatggagttcttgaagaagatgtttatatgcgtcagccacctggttatgaagacaagtcaaagttggattatgtgtgtaaattagataaagcactctatggtctcaagcaggcaccaagagcatggttttccagactaagcatgaaattgcagaatcttggatttcaaccgtcaaaagcagatgcttcgctcttcttttacaagaaaggtacaatctccatatttgtgttgatatatgttgatgacatcattgttgctagttcttgtgaaaaagcaacttcggcattacttcaagatttgaaagaagaatttgcccttaaggatcttggtgcgttgcactatttcttgggcatagaagttaataaagttcatgatggaattatcttgactcaagagaagtatgctactgatctgttaaaacgtgtcggcatgcatggctgcaaggagatcaatacaccgttatcaacaacagataaattattggcgaaagaagcagttaagcgcatattgagatatctcaaaggatccttgggacttggtcttcgaatttgcaagtcagattcaactctagatgtccagatgatcgcaagtccactggagggtttgcagtattcttgggagctaatctga

SEQ ID NO: 94186 - DNA, 320 bp, Oryza sativa
  unsure (1)..(320): unsure at all n locations
  Clone ID: PAT_MRT4530_92499C.1
attcccggcctcgaccctcnnccgtccggtccgtggtcggtgcgccgtcctggcgcggggggggcggcgcgggcctttctgcccgccgcgggggtcggccccttccgccctctcccggtccgcgctgcggccctcttggggcgccttttgtctaccttgcggggctctcccggcggggtcgcctgtctgcctgtggttgcctgcccttgcgttcggggggggggggctttctgtgtctttccctcttcngnnttgtgcccttttggggcctccttctttttctttgtccggtgcgtcttgtggcccccgtgcccggcggg

SEQ ID NO: 94187 - DNA, 1380 bp, Oryza sativa
  Clone ID: PAT_MRT4530_9249C.1
gcacgagggcagcgtgagcccgtgacgagaatttctccacctacttcgagctgagcctgatcgattcgcgagatttccgttcatggcggcgaagtctttgagggagatcaggagagcggcggcggcggggattgggagtaggagatgcttctccggcgacgcggcggcggcggcggcggcggcggcgggggtggcggaggggaaggtgggaggaggagcggggaaggaggtgaacctgttcacggccatcaaccaggcgctccacatcgccctcgacaccgacccgcgctcttatgtcttcggggaagatgtgggtttcggtggtgtcttccgctgcacaacagggctcgctgatcggtttggcaggaatagagttttcaatacgccgttgtgtgaacagggaattgctggatttgccgttggtctagcagcaatgggtaatagagctattgctgagatccagttcgcagattatatctttccagcttttgatcagattgttaatgaagcagctaaatttagataccggagtggaaatgaatttaactgtggaggattaacgattcgatcaccttatggcgctgtcggtcatggtggtcactaccattcacagtcaccagaggctttcttttgtcatgttcctggactcaaggtaatcatacctcgaagtccacgtgaagccaagggattgttgttggcaagcattagagacccaatccagtcgtattttttgagccaaagtggttgtaccgtttggctgttgaagaagttccagaggaggattatatgctgcccttgtctgaggcagaggtgattcgtaaaggaagtgatataacactaattggttggggagctcaacttgcagtactggaagaagcatgcgaagatgcagcaaaggatggaatatcttgtgagctcatagatctaagaacactgattccatgggacaaagaaacagtagaggcctctgtcagcaagacaggaaaacttcttgttagccatgaggctccaatcaccggagggtttggtgcagaaattgccgcatccatcaccgagcgctgcttccaaaggttagaagcgcccgtcgcaagagtatgcggcctggacactcctttccctcttgtttatgaaacattttacatgcccacaaagaacaaggtcctggacgctatcaaagcaactgtaaattactgaggtgctggagcaagctacctatgcgttgttccttgacagtatagacaaaaattatgtgcaccttattgctggttgtagcctgaatatgcatctccataaaagcattgtatttgataatatagaattatagatcaataaagccgtgaagatgcgaattattgttctgcggttaaaaaaaaaaaaaaa

SEQ ID NO: 94188 - DNA, 1617 bp, Oryza sativa
  Clone ID: PAT_MRT4530_924C.1
atgggtgcaaaggaacttcaaggtaagctacaggagacatacaagaccaccataggctatcagacaacgtggtatggtttgcagagggctaaagataagttatttggaaagtttgatgattcatttgattggttgtataggttcaaggctgagatagaaatgagatcccctgccgcctcctcgatccacgccgccgccacctcgagccacgccatcaatcatccgcgactctgcgtgaccgcctatgatctaggcaacggagatcctcctcggctcctcgcgccccggcggctgatacactgcggtccgcgcgtcaggcgaagttgggagaggatatcctctgaggggacattggcggcggtgatccttgaatggatctgctgctgcggtgcttgaagcaatcttactaactggacacacattcagactagtgtgtttagcagcaagaagttcaagtgcctcccgcatatcaagatccttgtgcaacattccatttggcaacttccaatcgaaatgataaagaaggttagccaaggcaagctctatgttggccagcccaagatttatgccgggacatatcctgcgtctctctggcatgaattctttggcattctcccaatacttactatccctgcaaattgcccacatattcacaaatattgatgtacccttaggtacatcataacccatgatcttgcttgtctcatggcattttcgagggatcaagaagggcgccgggcaatgtagtctcaaggactcctttatcaccatcttgaaatagctcaattttccaatatcgtcttcagtgatagtgctctttccttgaaaggcttgacgtagcttagcttgtaccttcgccatcactctcagcgacctgatgagctttgccatggtccgggtcagtgttgttgacgatgtatcgctgccacccgcaaaaatgttcatcaaaagcacgacgataacttggtttgtaattggaattggcgggccgccttccttctggagcctgagcaggtcgtccagagagcatgacttgctctccaccgccgccgcctgatcgccgccggtgtccgtctccatttggtccttgcgttcctggatgatctgctctatgatgcgctccatcttcttgcggttcgccagcgcgctccgcggccccatcgcgaccatggacgccagcttcgacaacgggaagaggtcggcgatgctgagcccggatgtctggcgtaccatggcgtgcagggcggccaggtactcttcccggtgcctgcaccggctccccacggagcaccggagcacgatgtcgttgatgagcctggctcccatcccggtgaggttcacggcggcacccgatgcggcgggggccgacacgtcgcgcacgagccgcgccacctccacctcgcggacgcgccggaacgagcgcacccgcgccgcggtcaggagctcctgcgtgagcagcttgcgggagctggcgcggccgctcgccgtatggggccggcacgacgtccctgaccactcccaacttgctttagttccaatgcatcttgcgaagaagacatggtgccatagcattgatacttgagctgcaaaagcttggttcccggtgcctccctccat

SEQ ID NO: 94189 - DNA, 562 bp, Oryza sativa
  unsure (1)..(562): unsure at all n locations
  Clone ID: PAT_MRT4530_92500C.1
cccggtcgccccgcgtccggcgttggtggcggggaagaggcgtgcagggcgagggccaagtacaagaatcttctccaggactacaaggagctcctcgaggaaactgaagcacagaagaagagattacagatggagaagctcaagaaacagaggcttttggctgaagtcaagtctttgcggaaaaggtacaaatccatgtccgaaaatccatcccagacgtttgtctatagagtaaagaatccggcattgccgcccacattgcggcaacctggttggtctcatggtgaagagtaccacacggttcgggctatcggaagctctagcaaaggcccatcggcgcaccggaggctgaatgctgctccaagagcatctccggtgattgacctcaacgaggcctgcgagccgnttatatttnnngcgaactcggttaagttccgttatctgaagaaattattttnnnaatgtggttgaatttgctctttccagagttcagaagagattggggagcttcatggttaccaggaacctgttagggttggcagggtcatgaggtacccaatgg

SEQ ID NO: 94190 - DNA, 1108 bp, Oryza sativa
  Clone ID: PAT_MRT4530_92501C.1
atggaatttgtaaaccaaaagtttatacggattgcgcagtacggtatggcacttgatgataaaaattggaagggagcaatagatgaagagtatggtgctttaatgcgtaataacacatggcacttggttcccgcaactcagggacacaatttgattgattgcaaatgggtttataagataaaaaggaaggctgatggtactattgatcggtacaaggctcgtttggttgctaaagggtttaagcaacgttatggtattgactacgaagagactttcagtcctgtagtcaaggcggccacaattagactaatattgtcactagcagtctctaatggatggtctttgcgacagctagatgttcaaaatgcttttcttcatggagttcttgaagaagatgtttatatgcgtcagccacctggttatgaagacaagtcaaagttggattatgtgtgtaaattagataaagcactctatggtctcaagcaggcaccaagagcatggttttccagactaagcatgaaattgcagaatcttggatttcaaagctccgtcaaaagcaaatgcttcgctcttcttttacaagaaaggtactatctccatatttgtgttgatatatgttgatgacatcattgttgctagttcttgtgaaaaagcaacttcggcattacttcaagatttgaaagaagaatttgcccttaaggatcttggtgcgttgcactatttcttgggcatagaagttaataaagttcatgatggaattatcttgactcaagagaagtatgctactgatctgttaaaacgtgttggcatgcatggctgcaaggagatcaatacaccgttatcaacaacagataaattattgatgaaagaaggtgaacccctggctgcggaggactctacaaggtatcgaagtattgttggtgcgttacagtacttgacattgaccagaccggatatagcttttccgacagcagttaagcgcatattgagatatctcaaaggatccttgggacttggtcttcgaatttgcaagtcagattcaactctagatgtccagatgatcgcaagtccactggagggtttgcagtattcttgggagctaatatga

SEQ ID NO: 94191 - DNA, 189 bp, Oryza sativa
  Clone ID: PAT_MRT4530_92502C.1
tttctccacccacttttggttagggtctccgtcagccgccgtcggcgtatccacgctcagtagccatggtggcggccgctgacagactactcggccagctgctgctcccctcccactgcggttccctctgacctcgcctctgctagcctcgtcgccgtctcctacctcgtcgtggtggtcgtggggggt

SEQ ID NO: 94192 - DNA, 473 bp, Oryza sativa
  Clone ID: PAT_MRT4530_92503C.1
ttcacgtttggtgagtcgagtgagctagccatagctagctatgaagaaggcggccgccggcggcatggcgcctcttcctccgtcgtcgtctcctccgtcgtgcaaagccggcggtggtggtggcagcccgaggtggtcgttgcttcacggcggcggcggcgagtggggcgtcgtggtgcggcggaacgtcgtcaagtcgtcgtcgctgctgctgctggtgttctccaccttcttcgtcttctccgtcttgcgctcgtcgcagacgagcttagtcccgccgccgccgccggctgctgccggccccggcgagccggcgctggcgcagagtggtcacgacgttgccggcgatgatggcggcgaacatgttgccgtcgcaatcaacaatgtggcagctgagacgcaaagcacgcccgatgacatctcgctgccgtcgacgaacttattgggtgcagctgtttcacaacaccaacaaa

SEQ ID NO: 94193 - DNA, 1931 bp, Oryza sativa
  Clone ID: PAT_MRT4530_92504C.1
atggaaatctcccccaactccgccgccgccaccgccgccgccacggcggcggctccggcctcttcctcgacctcctccccatccgcccccaagcgcctcaccaccacgctccgcatcctctgcccctccagccgcgcgtccgcgctccgcggggcgtcgcgggacctccacgtggaccagccccccgtcggcgacgaggccgtgctctccatctccgggccggacgcccccgccgtggccgtgagggcgtgggagcgggtcgtggggcacagggtcgggggcgacgaggccgccggggaggaggagagggaggtgcccggcgtggtgggctgccggatgctggcggcgagcgggcaggtcgggtgcgtgctggggaagggagggaagacggtggagaggatgcggcaggagagcggcgcgcagatcagggtgttccggaacagggatcagctccctccctgggctgcgccggtggacgagcttatccatataagtgggaacttttctgcagtaaggaaagcattattgttagttacaacctgccttcaagataaccctaggccagatgcaagcaactttccacctggaagatttgggcctcctggcccagttggcatagatcctcattctcaaagaggctatttaccaccatccatgcctgattatcatgcaaggaattattcaagtaatatggctgcccccggtcctagattctttgttgaacaagagatagtcttcaggatgatatgtctcaatgaaatggtggggagcataatcggaaaaggtggttcaactattcgcgcattacaaagtgaaactggtgcttcgattaagattatagagcctaattctgattcagaagaacgtgtaattgtgatatctgcacatgagaattctgagatgatgcattctccagctcaggatgcagtacttcgggtgcattctagaatctcggagtcatcgatggataaaagttctgctgtaactgcaagacttcttgtaccatcacagcatattggttgcttactaggcaaaggtggttctatcatcgcagaaatgagaaaaataacaggagctggtatccgaattttcgggaatgaacaaattccaagatgtgcacaacgaaatgatgagctagttcaggtcacaggtagttttcaatccattcaggatgcattgcttcatatcactggaaggattagagatgtcatcattcccatgaagccacatccaggtggagctgatcgtcctatgggtccttttgatatggtcgatcatcgaccacctccccctcattcaatggagcacatgggtgctgataggatgccctactcatatggttgtgaacaaggaggtggtcctcgaccttttctggaccagccatcaccaagtgcctgggctcctgaggcaccaaacagtgaagctccaagaaatatgcctgagacagtaccacctgcagatttcagaaagggagcagtggcaggaacaaatcaagtggctacaccatctaatgcaactgaagtcattattccccgcaagtacataggttttatttgtggagccaatggcagtgaccttgctgagataaagaaggtgccacaattactgtccatcatccaaaacctggggatgcaaatgcattggttattatatgtggggatcctgaccaaactaagaaggcacaaagcctacttcacgcgttcatcttttgtggtctctaccaaacttagccctgagctttcagctggattttccgtatggtcgtacgagggatttttttccaggaaactcatcagtggtcactggtcacagatgcaactgttcttttgtgctatctggtgttcaaacgtttgaagccgtgcgcatgcgcattactgcatcaatgtaaatcttgtattatttttgttctggtaaaaaaaaaaaaaaaaaaa

SEQ ID NO: 94194 - DNA, 621 bp, Oryza sativa
  Clone ID: PAT_MRT4530_92505C.1
cggatggtaaaaaccctctgtgatccgctctcctcacgccatggctaatgatggctcctcctccacttctcggaatgaaaggctcccttggaacatttgcaagttagatttatattttttttttcccaccggaaggaaggtaatgatcctgatatctcttctacgactgctactactgctactaattcgatgaaatttgagattgcgagtgtatattgatgagctaatggagggtgggaggcgtttgcgaatgctccatttgatgcgtgcgcggtaggcgaacttgaggaataatatgcattttgcggcggcgatagctagttgtgttgcttatcttttgttactgatcagatgatttagtagtagagttgtgtgggtggatgtatcttttgttgatcgataaaaaaattttctcctgctgttttggaggcctcaacccgagttggtatttggctatttgctaccacagtttgtttgttgttacttctactgaattgaagatggtgtaatattcaccaatacttgacacttgatagatgtagaaatgggtgagatgatcatctttgctcatcagttttatttgtttaatattcaccgaaaaaaaaaaaaaaaaaagcggcc

SEQ ID NO: 94195 - DNA, 1663 bp, Oryza sativa
  Clone ID: PAT_MRT4530_92506C.1
ctcctccacctccgagacctagggttccaatgtcgagcggcggcggcggcggcgacgactacaagcgggaggagtcggtggcactcatggtcatcgtctccctcgcggcgctctccctcctctccctcgtcgccgccttcgcctactactgctacatcacccgcaaggtctcccgccgcctccactcgctcgacctccccaagcaccaccgccgctcctcctcctcctcgcctcctcccatgcccccgccgctgcctccccctcctccttccgcgaatgccccgacgctcgggaaggagagcccgtctagcaactccgccagcgacggcgcggcggcggcggtcgtggtcggcggggagaggggggccgtccaggtgttcagctaccgccagctgcacgccgccacgggcgggttcgggcgggcgcacgtggtggggcaggggagcttcggggccgtctaccgcggggtgctccccgatgggaggaaggtcgcggtcaagctcatggatcgccccggcaagcagggggaagaggagttcgagatggaggtggagctgctgagtcggcttcgatcaccttatcttttgggcttgattggccattgttcagagggtggacaccggctgctggtctatgaattcatggccaatgggggtctccaggagcatctctacccaaatggagcttttgaaaagattgaaacattttcgatctacttggtgaaacaacgcccgatttttgacaaaaatatcgggcacccgatttgtaggcgcgcccatttttctcgtcaactgatatcccacaaagctgacattgtaggttcctgtggtggtatctcaaaattggactggcctactagaatgagaatagctcttgaagcagcaaaaggtctggaatatcttcacgagcgtgttaatccacctgttatacacagagacttcaagagcagcaacattctactggacaaggacttccgtgcaagagtgtcagattttggtttggctaagcttggatctgatagagctggtggtcatgtatcaactcgagttctaggcacacaaggttatgttgcaccagattacggtgttgtacttctggagttgcttactggcagggtgccagttgatatgaagaggcctccaggcgaaggtgttctagttaactgggcattgcctatgctcacagaccgagagaaggttgtgcagatcttggatcctgcactggagggtcaatattcattgaaagatgctgtccaagtggctgccattgctgccatgtgtgttcaacaagaggctgactacaggccactaatggctgatgtggttcaatcgttggttccgcttgtcaagaatcgttctactccaaagacgtgcaaccctagtgtccaagcgtagaagccacttgaaggggaagttgaatgctcagtttccagtgaattcctgattttgcgaggtgaatcgtaagcagttagatttagaaatcaagcattaatttagttcgatggaccagaaagctagtttcagtttgaagggaagtcctctagtcatgtgcaattagtgatcatgttaggtggtttggcttagtacttatggttgtgccctgtgggaatgatcagagagtgttgtttccagctggcagaattgcaatgtactgctgaattttc

SEQ ID NO: 94196 - DNA, 255 bp, Oryza sativa
  Clone ID: PAT_MRT4530_92507C.1
atcggagctgggggagaaccctaatgccatgggaggattttaggatgacaaggttccatccaaactatcacccatggaagccgatcaagggtgcagaaaaactatcgtatatgaggctaatgatacttgcgatacttgcaatggaagtggtgttcctgctgtcactgctaattacacatgtaaagcctggccaggcacatggggtgatagccacgcatccgtagtctcccgagagaccaaaccaccttggcctag

SEQ ID NO: 94197 - DNA, 147 bp, Oryza sativa
  unsure (1)..(147): unsure at all n locations
  Clone ID: PAT_MRT4530_92508C.1
ggacgcgtgggcggacgcgtgggttggccgaccaggttctggttatattttcacgattgatgagaacactagcatctcacgtagctcgcatgagtgagctcaccatggnccatgttntccatctgttccagaggccatcgccgcagc

SEQ ID NO: 94198 - DNA, 286 bp, Oryza sativa
  Clone ID: PAT_MRT4530_92509C.1
acagttgcggtggctgactgactaactgagtggagctgagcggggcgagtgcaaggggcgggagtgaagaggctgatatgctgttttcttgttgtcccccagaagccgggggtttcggcttggctcggacatgtgagacgccttggtcaaggtgtgtgcgggaggtgcagagtgagttagcaggaggagggagggaagaagggcggtgtagaggagtagaggtggcaagaaggggcagagaggaggctagtaggatagagagtgagagagtagagagggggggggg

SEQ ID NO: 94199 - DNA, 762 bp, Oryza sativa
  Clone ID: PAT_MRT4530_9250C.1
ccacgcgtccggagattatcactgttgtttttttcgttttcttgcttgcggcaagcaaagcaaagctaagctaagccagccgaacaatggagaaggccgctggattcctctcctccctcctcggcggcggcgaggaggtgccgccagagccggcggcgacggtgaggtcgatcctgatataccccatcaagtcatgcaggggaatctccgtgccccaggccccaatcacctccactgggttccggtgggatcggcagtgggtggtggtgaactccaaggggagggcctacacgcagagggtggagcccaagctcgcgctggtggaggtggagatgccgccggaggcattcgccgaggagtggcggccgaccgccgattcctacttggttggaagagcacctggaatggacccattgaagatccctctcagtgctgaacaagccataattaatgatgtctctgtatgggagtggtctggttctgcttatgatgaaggagctgaggcggccgagtggttttccagttacttcgggaacccaagtcgtctagtgcgtttcaaagaagggtcggaaatcagaccaactaatcctgactatgctcaaggctacaaaattatgtttacagattgcttcccgtttctgatggcctccccaggttcattggatgcactaaatgaggttctgaaagacctgtaccgatgaaccgcttcagcaaacatttttggtggatggatgccaccatactcagaggatctatggaaaa

SEQ ID NO: 94200 - DNA, 540 bp, Oryza sativa
  Clone ID: PAT_MRT4530_92510C.1
atggcggcggcggcggtggagaagaagagcgggagcgagatgacggtggtgcgggggctggacgtggcgagccccgggacggccgggacacgcgggcgacgtacgcgctgcggcccgacgggcgcgacggtggacgtgctgaacgagacgtggaccagcagcgggaagcgcgactacatcaagggcaccgcctacaaggccgacccggccagcgacgaggccaagctcaaggtcaagttctacctgccccccttcctccccgtcatccccgtcgtcggcgactactgggtgctctacgtcgacgacgactaccagtacgcgctcgtcggcgagccgcggcgcaaggacctgtggatcctgtgccggcagacgagcatggacgacgaggtgtacgggcggctgctggagaaggccaaggaggaagggtacgacgtcgagaagctgcgcaagacgccgcaggacgacccgccgccggagagcgacgccgcgcccaccgacaccaaggggacgtggtggttcaagtcgctcttcggcaaatga

SEQ ID NO: 94201 - DNA, 461 bp, Oryza sativa
  Clone ID: PAT_MRT4530_92511C.1
acaccaacgataaatcaatcagacgatgtagaggaccagacttatgtatgaatgggccaagaactaagaattgacacgatgaattaggccaaaattcacaagtccgcggagaggagcaatagaggaggccaccagccgaaattgggctggattgggccagccccaggttcggccgaacctggtggttcagtcgaaccaatcctggcgccgttggatccaggttttggcgcggatgtccaggattgcatcccaatgacggttggagggcacttcggacaattccccttccacaaccgtcataactacctctatataaggagctcactctcttcacttcacacacatctcaagcaatagctctctcatttctctcaagtttaatttagtagtatctagctggtggaatagaaatagaataggaatcaggagtccggaagccttcggaagagttcaggtatggc

SEQ ID NO: 94202 - DNA, 1008 bp, Oryza sativa
  Clone ID: PAT_MRT4530_92512C.1
ccggccgggatcctctatactaacctctctagcttcttcagttcttctccaaacccaacccccccaagaggccaaaaccctctcctatatagccacactcatccttgcaattagctcaactcagctcaagttggcaattcatatcaaacagataacatcagtagttcgcagctagatcgatcgtcacagcaacacaatcaccacgacgacgatggcggcggcggcggtggagaagaagagcgggagcgagatgacggtggtgcgggggctggacgtggcgaggtacatgggccggtggtacgagatcgcgtcgctgcccaacttcttccagccccgggacggccgggacacgcgggcgacgtacgcgctgcggcccgacggcgcgacggtggacgtgctgaacgagacgtggaccagcagcgggaagcgcgactacatcaagggcaccgcctacaaggccgacccggccagcgacgaggccaagctcaaggtcaagttctacctgccccccttcctccccgtcatccccgtcgtcggcgactactgggtgctctacgtcgacgacgactaccagtacgcgctcgtcggcgagccgcggcgcaaggacctgtggatcctgtgccggcagacgagcatggacgacgaggtgtacgggcggctgctggagaaggccaaggaggaagggtacgacgtcgagaagctgcgcaagacgccgcaggacgacccgccgccggagagcgacgccgcgcccaccgacaccaaggggacgtggtggttcaagtcgctcttcggcaaatgatcgagaaattctcagcggccgatggatggatcagaggacgacgatgtatagctatagtatgaatttgccttcagtagcagtggagaataaaatggacttttggtgtgagtgtgttcttgaggtgattgtgtgtttgtaatgctgtgctttacaggaattaatggaaatgaactcttacacgtgcttaattttagttcaaaaaaaaaaaa

SEQ ID NO: 94203 - DNA, 1163 bp, Oryza sativa
  Clone ID: PAT_MRT4530_92513C.1
atggcaatggaagccggagcaccgcggggagccgccgccaccaccagcggcggtggcgggggcgcgccggaggcgggggcggagctggggagcagtggcgcgccggtgacgtgggggcgggtgtggagggcggggcaggaggcggcggcgcacgcgctgctgctctgcttcaccgcgctcctcgccctcaagctcgacggcctcttccgcggctcgtggtgggtgctattcacccctctatggttgttccatgctgttattgctcgatgtagattttcgttacctgctccttcatcaccacaaagttgtcagatggcttcctgccattccattgttgccacaccattgctagttgcttttgagctgcttctatgtgtttatctggaaggtcatgatgaaccttttattgatttaaagcttgtattccttccactattagctttggaaatcattacacttgttgacaatttcaggatgtgtggtgcactaatgcctggacatggagagactatgacagatgaagcaatttgggagaggcttcctggcactccatctaacgcaaaatttttcccactccgagctgttttcttacctatacttttgcttcaagtgactactgtatcgtttgctatttggatattctttgaaaggcttgttacaaaattacgagctaaaaagatcactgacggatatatttctttctcatcaaagattgatgaattgtttatgatgatgcaacatggttcaaggctcatcgcttggtggtctattgatgaagatagcaaagaggagcaagctcatttatgctatgcaaataattctgggtatagtaccttttgcagctatccaccagagatggtaaaagagatgccgaagaaagttcttgacaaagaggtgaaaaaacgcaagataaaattttaggtgcaatcctaaatggctaagcttagtccactgcagtgtgataagctaaaaaatgcactgatcctatgtcggatatgctttgagagagacatttgcatagttctgcttccatgccgccattatgttctttgcgaagcgtgctctgataagtgccggtcatgcccaatttgtcgagtgagtattgagaacaagctacctgtttgtgatgctatgagttcagctgattcaataagtgatacagt

SEQ ID NO: 94204 - DNA, 310 bp, Oryza sativa
  unsure (1)..(310): unsure at all n locations
  Clone ID: PAT_MRT4530_92514C.1
tcatgttgtggctgcccgncgccgtctcgctcctcctctcgtcgtcgctgcatgtcgncggtgacgtcgcggggcgtcgcctccctctccgtccggcgctacgacggcatcttcagcttcggcgactccttngccgacaccggcaacaaccccgttgtcttcgctggtactccatcttcgccncgtatccgncctccctacgctcaccttcttcggcgcccaccgccgcaactggacggcgctcgtctcncttcgtgctnacgctgggctgcgttggtgcgcgtcttggtaaacggagttcgcagcgcaa

SEQ ID NO: 94205 - DNA, 311 bp, Oryza sativa
  Clone ID: PAT_MRT4530_92515C.1
cttcaaaattcttgcttaatctgtattctgtgatggatccatttaaaacacagtcaacgacctctacctttccacatttgttgcttcacactttacacttcatccccaccagcaaaaacacaaccaacatctttacaatttacacatgatccacatacacacaacaattaaactaactgatctacctgctttcgaacctcctgtactccatttacacaaacacactaacaaatatgaactaaaatttggctacaaaagtgcattacaattttacaccaacgccaaaatatctcatgttctaccactttcgc

SEQ ID NO: 94206 - DNA, 5469 bp, Oryza sativa
  Clone ID: PAT_MRT4530_92516C.1
atggccgaacgggcagtggcgcacagcctctctccgaacgctagcggtgacgacggggagcagaacccgcgccgtcgggctcgcaccccaccgtccccctctcgccgaaatcttgggcggggggaggcgctcggggaggtcggaggatccgcgacatcgccgcccgcgggcgacgggggaggacggcgagacggggcgcgtcgccgcctcgactacggcgatggcagcacgccccagggcgcgctccaggctgcgggtgcgctcttgcgtcacccgcccgtcgtccccgatccagagactccagcccgacgttggctggatgacgtggccgacttggtcatgacggcgcagcagcgcctaggcgccggtgggcggccctccgcccccgaggcctctggcgctgccgccgccggctccacgtcgtcaaggcggagggcgcggcgagcggcggccgtcacccgccgttcgtccgccattccctcgtcaacgcctccgacccaagaagatgagcgtggggggtcggatgcccggctcgatatcgagcgccagcgcgacgatcgtcgcgccgcccacgcaacggagggcgctttctcgtccggagcgccacttcggttccggcccaccatcaccgaaaaatacgacggaagcgtcaaccccgccgagtttctccagatctacacgaccgggatcgaggccgccgggggtgacgacagggtcatggcgaatttcttccccatggccctgaagggtcaggcgcggggttggctaatgaacttgccacccgcgtcggtccactcctgggaggatttgtgccagcagttcaccacgaactttcagggcacatatccgcgcccaggcgaaaaagcggacttgcatgcggaacagcgagggtacgatgagtctcttcgctcgtacattcagcggttctgtcaagtccgcaacaccataccgtgcatccccgcacacgcggtgatctacgcgttcagggggggcgtgcggcacaaccgcatgctcgagaagatcgcctccaaggagccccagaccaccgcgcagctttttgagctcgcggaccgtgtggctcgcaaggaggaggcctggacctggaactcctccggctctggcgtggcagctccggccgcccccgagtccgccgctcggtcagggcggcgggacaggaggagaaagaagaagtcggcccgttccgacgacgagggtcatgtactcgccgtcgagggcgcttcgcgggccccccgaaaggggaggcctgcgagcgacaaaaagaaggaggccggcgctcccagcagggagcgcccgaccggcaagtggtgcaccgtgcacaacacctccctccacgacctcgcggactgccgcgcggtcaaaagtttggctgagcggacgaggaagtgggaggaggagaagaggcaggagcgccgtgaggcaaggccccagcggctcccgccggcaaccggcgaggagcctgaggccaccatcgccaccgtcgatgggggagcgtgcgctcacgcttctcgccgaagcctcaaggccatgaagcgagagcttctggccgcggcccctacccatgaggcgacgcggcgggcgtggtggtcggaggttgccctcaccttcgaccagaccgaccacccgccatgcgttgcccggggaggacagatcgcgatggtggtttcccccaccgtttgcaatgtgaagttggggtgtgtcctcatagacgggggtgcagccctcaacatcctttcccctgcagcctttgacgccatcaaggccccggggatggtgctccggccgtctcagccgatcatcggtgtgacgccggggcacacctggccgctgggtcatatcgacctcccggtcaccttcggtggctccgccaacttccgcatggagcgggtggacttcgatgtggcggacctcagtctgccctacaacgcggtcctggggaggcctgcattggtgaagttcatggcagcggtccactacgcttatctccagatgaagatgccgggccccggtggccccatcaccgtccatggcgacctcaaagtcgcacttgcttgtatggagcagcgcgcgtaccacctcgccgcggcgtccaagcccacgggtggcgacgaaaggctcggcacctccgtccccgccgccccgaggcagcggatggtcacgtgcgacgaggtcccggaagacgcgctcgtctccttcctgcgggcaaatgccgacgtcttcgcctggagaccggcggacatgcccggggtccccagggaggtgattgagcaccgtctcgccgtgcggccgggcgcaaggccggtccggcagaaagtgtggcggcaggccccggaacgtcaagccttcatccgcgaggaggtggcgcgacttctggaggccggattcatacgtgaggtcatccatccggagtggctggcgaacccggtcgtcgttcccaaggcgaacggcaagcttcggatgtgcatcgactacaccgaccttaacaagaatgcaggtcctacttttcaacgtactactcgaatttctttgggtagccaaataggacgtaatgttgaggcctatgttgatgacttggttgtgaagacgcgcaaccaagagaccttactctcggatctagcggaaactttcgaaagtctccgctccgcccgcataaagctgaaccccgacaagtgcgtgttcggcgtgcctgcgggcaagcttctcgggttcttggtctctgcccgaggcatcgaggccaaccccgagaagatacgagctatagagcggatgcgcccccccagcaagcttagggatgtgcaatacgtcaccggctacatggctaccctaagtcggttcatatcgaggctgggagagaaggcgctacccctatttaagctcctcaaacgctccgggccgtttacctggacggaggaggctgagcgggccttcactcagttgaaggcgtacctcagttctcccccagtcttggtcgtcccggagccagatgagccgttgctactctacctggcggcaaccccgcatgtggtcagcgcggcgttgatcgtggagcgcgacgaggacaaccctcactccgcgcatccccaccctgtgtcgactcgacccgggagagagcagggaagagaggcccccgagccgaacggcggcccgaggcccccgacggccggagctggccctccgcctgcttgtccgacggtgccaggcgcccccaacccccaggatggccccggggccactgcgggaaggccgcgcctgtcgccctctgaccccgaggtcgtcggcacagaagccgagtgcgccccgcgtggcctctcggacaaagagcgccctcgagatgcggcccctggcgaagaggatcggccccgccgaaaggtgcagcggcccgtctacttcgttagcgaggccctccgggacgccaagacccgataccctcaggcccagaagatgctctacgctattctgatggcttcgaggaagttgcgccattatttccaggcgcattgggtcacggtggttacgtcttaccccctcgggcaaatcttgcataaccgagagggtactggacgggtgagccaggccctcgccgactttgtggcggagtggaccccagctcccgagcccgtctccgcccccgaggccacctcggactcctcgcagctgcctcacaccgcctactgggtgatgcagttcgacggctccctgtctcttcagggcgccggtgcgggggtcacgttgacctcaccgagcggagacgtcctcagatatctggtccgcctcgactttcgggcgaccaacaatatggcggagtacgagggactccttgcgggactcagagtggcagctggactggggatccgccgcctcctggtgttaggcgactcccagttggtcgttaaccaggtctgtaaggagtaccggtgctctgacccgcagatggacgcttacgtgcgccaggtgcggcgtatggagcgccatttcgacgggatagagcttcggcacgtgcccagatgggataacgcggtcgccgacgaactctcaaggctcgcttcctcgcgagcccagaccccaccgggcgcctttgaagaaaggcttgcccagccgtcggcgcgacccgaccccctaggggagacggacgcgcctgaacggcccccgaggcccgtcggagtccaggcctcgggacccgaggggagcgctcccaactcccctagattgattgcttggatcactgagatccaggcatacctcgcagataagactctacccgaataccgcgaagggggtgaacgcgtccggcgcatctccaagcgctacgtgctggtggaagggaccctctatcggcgcgcggctaacgaagtcctcctgaagtgcattcctcgggaacaaggcgtcgagcttctcgccgatgtccatgaaggcgagtgcggagcccactccgcctcacgcaccttggttggcaatgcctttcgccagggtttctattggccgacggctctcaacgatgcggtcgacctggtccggcggtgcagggcgtgccagttccacgccaggcaaacccatcagccggcccaggccctgcagaccatacctctttcatggccgtttgctgtctgggggctcgatatcctgggtccgttcaggagggccccgggcgggttcgagtatctgtatgtcgctgtcgacaagttcactaagtggcccgaggcttatccggtcatcaagatcgataggcactccgtgcttaaattcataaggggcatcactgctcggttcggggtgcctaaccgtatcattacggataacggcacccagttcactagtgagctcttcggtgactactgcgaagacatgggcatcaagctttgcttcgcctcccccgcccaccccagaagcaatggccaagtggagcgcgccaacgcggaaatcctcaagggtctcaaaaccaagaccttcaacatcctcaggaagcacggcgactcgtggatcgagaagctgccagcggtactctgggcgaaccgaaccacgccaagccgagcaaccagggaaacgcctttcttcctcgtctacggcgcggaggcggtcctcccatctaagctcaccctgaggtcccctcgggtatccatgtattgcgaggctgatcaagatcagcttcgccgagacgacctcgactatttggaggagcgaaggcggcgcgcggccctccgagctgcacgctaccagcagagcctgcggcgctaccatcagcgccacgtccgggcccgatcactctgcgtcgacgacctcgtcctacgccgcgtccaaacgcgtgctggactgagcaagctctcaccaatgtgggagggtccgtatcgagtgattggcgtcccccggccgggctccgttcggctggccacgggcgacggcacagagctgcctaacccgtggaacatcgaacaccttcgtcgcttctacccctag

SEQ ID NO: 94207 - DNA, 471 bp, Oryza sativa
  Clone ID: PAT_MRT4530_92517C.1
atggcgccaacctttctagcgctgcccctgccaccgtggcacacgcgaactaacgtggagatcgccgggcttcgccggaagaagcccgtcaagcccaagcccaaggattgcggccgcttcgtcaggttctaccagtccctggagactggacgagaggagaacagcagtggtgaagcaacaacctcgagaaattcagaaatcaaccaacacattgagtatgacttggtgttcgctaggcagctgcaagcaatggataatctgacaattgagacacctgcagatgaagatgatgatataagctgcgtaccctctccatctgactctgaaactgatgaaccagcagaaggcaacaacgaagagctgtcctatatgtatatccgctttcatatgcatactgccatcagagatgcacacaaagcttgtaaagttgctgctgccatcccagctattctttcttgtaaattgagatag

SEQ ID NO: 94208 - DNA, 5529 bp, Oryza sativa
  Clone ID: PAT_MRT4530_92518C.1
atggccgaacgggcagtggcgcacagcctctctccgaacgctagcggtgacgacggggagcagaacccgcgccgtcgggctcgcaccccaccgtccccctctcgccgaaatcttgggcggggggaggcgctcggggaggtcggaggatccgcgacatcgccgcccgcgggcgacgggggaggacggcgagacggggcgcgtcgccgcctcgactacggcgatggcagcacgccccagggcgcgctccaggctgcgggtgcgctcttgcgtcacccgcccgtcgtccccgatccagagactccagcccgacgttggctggatgacgtggccgacttggtcatgacggcgcagcagcgcctaggcgccggtgggcggccctccgcccccgaggcctctggcgctgccgccgccggctccacgtcgtcaaggcggagggcgcggcgagcggcggccgtcacccgccgttcgtccgccattccctcgtcaacgcctccgacccaagaagatgagcgtggggggtcggatgcccggctcgatatcgagcgccagcgcgacgatcgtcgcgccgcccacgcaacggagggcgctttctcgtccggagcgccacttcggttccggcccaccatcaccgaaaaatacgacggaagcgtcaaccccgccgagtttctccagatctacacgaccgggatcgaggccgccgggggtgacgacagggtcatggcgaatttcttccccatggccctgaagggtcaggcgcggggttggctaatgaacttgccacccgcgtcggtccactcctgggaggatttgtgccagcagttcaccacgaactttcagggcacatatccgcgcccaggcgaaaaagcggacttgcatgcggaacagcgagggtacgatgagtctcttcgctcgtacattcagcggttctgtcaagtccgcaacaccataccgtgcatccccgcacacgcggtgatctacgcgttcagggggggcgtgcggcacaaccgcatgctcgagaagatcgcctccaaggagccccagaccaccgcgcagctttttgagctcgcggaccgtgtggctcgcaaggaggaggcctggacctggaactcctccggctctggcgtggcagctccggccgcccccgagtccgccgctcggtcagggcggcgggacaggaggagaaagaagaagtcggcccgttccgacgacgagggtcatgtactcgccgtcgagggcgcttcgcgggccccccgaaaggggaggcctgcgagcgacaaaaagaaggaggccggcgctcccagcagggagcgcccgaccggcaagtggtgcaccgtgcacaacacctccctccacgacctcgcggactgccgcgcggtcaaaagtttggctgagcggacgaggaagtgggaggaggagaagaggcaggagcgccgtgagggcaaggccccagcggctcccgccggcaaccggcgaggtgaggccaagcagaaggcccccggcgaggatattgacgatggcgactatgacctgggcctcaaggccatgaagcgagagcttctggccgcggcccctacccatgaggcgacgcggcgggcgtggtggtcggaggttgccctcaccttcgaccagaccgaccacccgccatgcgttgcccggggaggacagatcgcgatggtggtttcccccaccgtttgcaatgtgaagttggggtgtgtcctcatagacgggggtgcagccctcaacatcctttcccctgcagcctttgacgccatcaaggccccggggatggtgctccggccgtctcagccgatcatcggtgtgacgccggggcacacctggccgctgggtcatatcgacctcccggtcaccttcggtggctccgccaacttccgcatggagcgggtggacttcgatgtggcggacctcagtctgccctacaacgcggtcctggggaggcctgcattggtgaagttcatggcagcggtccactacgcttatctccagatgaagatgccgggccccggtggccccatcaccgtccatggcgacctcaaagtcgcacttgcttgtatggagcagcgcgcgtaccacctcgccgcggcgtccaagcccacgggtggcgacgaaaggctcggcacctccgtccccgccgccccgaggcagcggatggtcacgtgcgacgaggtcccggaagacgcgctcgtctccttcctgcgggcaaatgccgacgtcttcgcctggagaccggcggacatgcccggggtccccagggaggtgattgagcaccgtctcgccgtgcggccgggcgcaaggccggtccggcagaaagtgtggcggcaggccccggaacgtcaagccttcatccgcgaggaggtggcgcgacttctggaggccggattcatacgtgaggtcatccatccggagtggctggcgaacccggtcgtcgttcccaaggcgaacggcaagcttcggatgtgcatcgactacaccgaccttaacaagaatgcaggtcctacttttcaacgtactactcgaatttctttgggtagccaaataggacgtaatgttgaggcctatgttgatgacttggttgtgaagacgcgcaaccaagagaccttactctcggatctagcggaaactttcgaaagtctccgctccgcccgcataaagctgaaccccgacaagtgcgtgttcggcgtgcctgcgggcaagcttctcgggttcttggtctctgcccgaggcatcgaggccaaccccgagaagatacgagctatagagcggatgcgcccccccagcaagcttagggatgtgcaatacgtcaccggctacatggctaccctaagtcggttcatatcgaggctgggagagaaggcgctacccctatttaagctcctcaaacgctccgggccgtttacctggacggaggaggctgagcgggccttcactcagttgaaggcgtacctcagttctcccccagtcttggtcgtcccggagccagatgagccgttgctactctacctggcggcaaccccgcatgtggtcagcgcggcgttgatcgtggagcgcgacgaggacaaccctcactccgcgcatccccaccctgtgtcgactcgacccgggagagagcagggaagagaggcccccgagccgaacggcggcccgaggcccccgacggccggagctggccctccgcctgcttgtccgacggtgccaggcgcccccaacccccaggatggccccggggccactgcgggaaggccgcgcctgtcgccctctgaccccgaggtcgtcggcacagaagccgagtgcgccccgcgtggcctctcggacaaagagcgccctcgagatgcggcccctggcgaagaggatcggccccgccgaaaggtgcagcggcccgtctacttcgttagcgaggccctccgggacgccaagacccgataccctcaggcccagaagatgctctacgctattctgatggcttcgaggaagttgcgccattatttccaggcgcattgggtcacggtggttacgtcttaccccctcgggcaaatcttgcataaccgagagggtactggacgggtggtgagatgggcaatcgaactctctgaattcgatttgcgctttgaaccacgccgcgcgatcaagagccaggccctcgccgactttgtggcggagtggaccccagctcccgagcccgtctccgcccccgaggccacctcggactcctcgcagctgcctcacaccgcctactgggtgatgcagttcgacggctccctgtctcttcagggcgccggtgcgggggtcacgttgacctcaccgagcggagacgtcctcagatatctggtccgcctcgactttcgggcgaccaacaatatggcggagtacgagggactccttgcgggactcagagtggcagctggactggggatccgccgcctcctggtgttaggcgactcccagttggtcgttaaccaggtctgtaaggagtaccggtgctctgacccgcagatggacgcttacgtgcgccaggtgcggcgtatggagcgccatttcgacgggatagagcttcggcacgtgcccagatgggataacgcggtcgccgacgaactctcaaggctcgcttcctcgcgagcccagaccccaccgggcgcctttgaagaaaggcttgcccagccgtcggcgcgacccgaccccctaggggagacggacgcgcctgaacggcccccgaggcccgtcggagtccaggcctcgggacccgaggggagcgctcccaactcccctagattgattgcttggatcactgagatccaggcatacctcgcagataagactctacccgaataccgcgaagggggtgaacgcgtccggcgcatctccaagcgctacgtgctggtggaagggaccctctatcggcgcgcggctaacgaagtcctcctgaagtgcattcctcgggaacaaggcgtcgagcttctcgccgatgtccatgaaggcgagtgcggagcccactccgcctcacgcaccttggttggcaatgcctttcgccagggtttctattggccgacggctctcaacgatgcggtcgacctggtccggcggtgcagggcgtgccagttccacgccaggcaaacccatcagccggcccaggccctgcagaccatacctctttcatggccgtttgctgtctgggggctcgatatcctgggtccgttcaggagggccccgggcgggttcgagtatctgtatgtcgctgtcgacaagttcactaagtggcccgaggcttatccggtcatcaagatcgataggcactccgtgcttaaattcataaggggcatcactgctcggttcggggtgcctaaccgtatcattacggataacggcacccagttcactagtgagctcttcggtgactactgcgaagacatgggcatcaagctctgcttcgcctcccccgcccaccccagaagcaatggccaagtggagcgcgccaacgcggaaatcctcaagggtctcaaaaccaagaccttcaacatcctcaggaagcacggcgactcgtggatcgagaagctgccagcggtactctgggcgaaccgaaccacgccaagccgagcaaccagggaaacgcctttcttcctcgtctacggcgcggaggcggtcctcccatctaagctcaccctgaggtcccctcgggtatccatgtattgcgaggctgatcaagatcagcttcgccgagacgacctcgactatttggaggagcgaaggcggcgcgcggccctccgagctgcacgctaccagcagagcctgcggcgctaccatcagcgccacgtccgggcccgatcactctgcgtcgacgacctcgtcctacgccgcgtccaaacgcgtgctggactgagcaagctctcaccaatgtgggagggtccgtatcgagtgattggcgtcccccggccgggctccgttcggctggccacgggcgacggcacagagctgcctaacccgtggaacatcgaacaccttcgtcgcttctacccctag

SEQ ID NO: 94209 - DNA, 468 bp, Oryza sativa
  Clone ID: PAT_MRT4530_92519C.1
atggggtgcacggcaaggtgggagcttgcgtccacggcgtccacggagaagaaccagatggtgttcaccgactgctcaaccacctccgccgctgccgactgccctccgcacgcagcagcccgcggcgagggcggagggagacggggtgcgcggacatggggggtggccacggaggagggggaggacggagccactccaggacgcggcggcaggcaaggtgggagcttgcgtcgccatggggtgcgcgctgctctcgctagctgcccgctaccgcggctcctgccacgcgctcgctcgccgccactagctaccgcctacgctgcgctcgctcgcacgctgctagctgccgcctgccgcgcgctcactcgccactgttgccactccacttggccgacgctgccactccgccggacgccgtcctcgctatctccgccgcgaccgacgccgtcccgtgcgcctctgagatag

SEQ ID NO: 94210 - DNA, 689 bp, Oryza sativa
  unsure (1)..(689): unsure at all n locations
  Clone ID: PAT_MRT4530_9251C.1
nggttggggggggggggggggccaaaacncccctttccggtgcgttttaagagggcaaaaaagttcccnaagggaangggggcngggggcaaacccattaagggggnnngttaantttttggggnnccccggggttgcacgaggccgtgtgccggcgcgattcgcggggcggcttccgcgcggcgtcgccgttctctacccggggggagcaggttgggccaggggtagccgctcaggctgggcaagaagacgatgaatacaggcacggccaaggcgggggcggcgcagccgccggcccccgccaaaggggataagaagggcggggaagctcgcccaacctgatccgctgggtgacagtgaaactgatgatcaatcacacgatccggtgctggtgttctgtttgaatgcttctgatatgttgattcgcagatactagtagctaagtactcttttaaagtttttttctgtacagtgggaaaggagtcaagaaataaataacagcatgcccctggggtgtgtttattttactgatgtgaattagtaggagctactctgtaaaagggaaatgtacctgcttgtgttgtgacgcatcatatatgccagtgtaaattccagatgtctttttcgaacttgtgggaatgttcagttgaaactacataaatcatggtggataatgagagattgctctg

SEQ ID NO: 94211 - DNA, 879 bp, Oryza sativa
  Clone ID: PAT_MRT4530_92520C.1
atggagctccgatgctcaccaggcacaacggaggcgtggacggggacgacaaagacggcggtggtcttgccggtgctcggggagcgaggtaaagggggagaggtggtcctgggcgctgtttataagccgtcgggggagaggaggagccgtggaggagctcggccggttgaggcgcacgggacggcgtcggtcgcggcggagatagcgaggacggcgtccggcggagtggcagcgtcggccaagtggagtggcaacagtggcgagagccgcggtagcgggcagctagcgagagcagcgcgcaccccatggcgacgcaagctcccaccttgcctgccgccgcgtcctggagtggctccgtcctccccctcctccgtggccaccccccatgtccgcgcaccccgtctccctccgccctcgccgcgggctgctgcgtgcggagggcagtcggcagcggcggaggtggttgagcagtcggtgaacaccatctggttcttctccgtggacgccgtggacgcaagctcccaccttgccgtgcaccccatctccctgtgccctcgccgtgtaccccatctcccttcgccctcgccacgcaccccgtctccctcgccgcggcatccgccctcgccaagcaccccgtctccctcgctgcggcatccgccacctcgccgacgaccgtaccgtcctcgccttcaccacccggcgcgccgcaaggatcgcgtcacgcaggatgacccggtcaccctgctcggcgggaggaagaagaagaagggagaaagaaaagtgtggaagatagatggagtgctgacaagtgggcccaagggaacttttgatatttcacgcgatttccctctcctatccaaccggaaattattattttaa

SEQ ID NO: 94212 - DNA, 171 bp, Oryza sativa
  Clone ID: PAT_MRT4530_92521C.1
acatgtgccgcaaatactatcttattgagggctgcatagattgaacaaaggtcctaatgtgcactgggtatgggactgggcccaaacttatatggctatcccgattgcatccttatcctatcaggttgtagtatacacctttgacatagcattcccgtgcaaatatccaaa

SEQ ID NO: 94213 - DNA, 336 bp, Oryza sativa
  Clone ID: PAT_MRT4530_92522C.1
atgtggaaaggagccattgggcaaggaagaaactttaaaggtaaaacggctgaagacaagaagagacagaacgtcggtgagcttgtggaaggacctttgcatgaggtggacatcgccaacaagctcaaatgtgcgagattggagggaagagcggagcaggaggtgaagattgtcggcaactccaggttgatctggctggctagcttggagatcccgccacctctccacctcccagcccctccagtgcacaaggatccgtcaatggcggtgacaggaggggtggatcctgtgctcacttcccctttcacgcggatccgccagcctctctacccctaa

SEQ ID NO: 94214 - DNA, 1128 bp, Oryza sativa
  Clone ID: PAT_MRT4530_92523C.1
cccacgcgtccgcggtaaagtgggtttccatcttccccgagctctccaccctccacccgccaccgccaccgttcgccttcgccgccgccgccgccgccgacgacgatggggagagggccggtgcagctgcggcggatcgagaacaagataaacaggcaggtgaccttctccaagcggaggaacgggctgctgaagaaggcgcacgagatctccgtgctctgtgacgccgacgtcgcgctcatcgtcttctccaccaagggcaagctctacgagttctccagccactccagtatggaagggatccttgaacgctaccagcgttactcgtttgatgaaagagccgtactggagccaaatactgaggaccaggaaaactggggtgatgaatatggaattttgaagtccaaactggatgcacttcagaagagccaaaggcaactcttaggtgaacaattggacacactaacaacaaaagaactccagcaattggaacatcaactggaatattctctgaagcatataagatcaaaaaagaatcagcttctgtttgaatcaatttctgagcttcagaagaaggaaaagtcacttaaaaaccagaataatgttctgcaaaagctcatggagacagaaaaggagaaaaacaatgctataataaacactaaccgggaggagcaaaatggagcaacaccaagcacatcatcaccaacaccagtgacggctccagatcccatcccgacaacaaataacagtcaaagccaaccaagaggatcaggggagtcagaagctcaaccgtctccggcacaagcaggcaacagcaagcttccgccatggatgctccggacaagtcacacatgaaggcatctgttgatctcaaacgtcactccactcaatggccaacatcaacatgtttcttccaactaaggcagccactgttgtgcaatccatcttccagcgatattgatatatcggcattcggcatagccaatatatattaatgtaatgtatcttgtcaaagcttcatagggttaatgacgccttgagcttctctgttctatatctgtcttgtaacgatctttgcatatctgctgcatttttttttctctctaaaaaaagagtagtcaatggtcc

SEQ ID NO: 94215 - DNA, 807 bp, Oryza sativa
  Clone ID: PAT_MRT4530_92524C.1
atggggagagggccggtgcagctgcggcggatcgagaacaagataaacaggcaggtgaccttctccaagcggaggaacgggctgctgaagaaggcgcacgagatctccgtgctctgtgacgccgacgtcgcgctcatcgtcttctccaccaagggcaagctctacgagttctccagccactccagtatggaagggatccttgaacgctaccagcgttactcgtttgatgaaagagccgtactggagccaaatactgaggaccaggaaaactggggtgatgaatatggaattttgaagtccaaactggatgcacttcagaagagccaaaggcaactcttaggtgaacaattggacacactaacaataaaagaactccagcaattggaacatcaactggaatattctctgaagcatataagatcaaaaaagaatcagcttctgtttgaatcaatttctgagcttcagaagaaggaaaagtcacttaaaaaccagaataatgttctgcaaaagatcactacaaaagctgtattggaggtcaaacccttttgtctacattcttcggagcagctcatggagacagaaaaggagaaaaacaatgctataataaacactaaccgggaggagcaaaatggagcaacaccaagcacatcatcaccaacaccagtgacggctccagatcccatcccgacaacaaataacagtcaaagccaaccaagaggatcaggggagtcagaagctcaaccgtctccggcacaagcaggcaacagcaagcttccgccatggatgctccggacaagtcacacatga

SEQ ID NO: 94216 - DNA, 177 bp, Oryza sativa
  Clone ID: PAT_MRT4530_92525C.1
gaaatcgtggtcatgagcgcgtcctactggaatgctgcacttggctcatcacacactacacacggggaaaggtgacccaggaatagcgatacaccttgacatcaattgtggagccccagatctcaacgtccttgcgttggaggccaccaacaaatgtgctctcgtgttaaggacgat

SEQ ID NO: 94217 - DNA, 186 bp, Oryza sativa
  Clone ID: PAT_MRT4530_92526C.1
acattcggtatttttctcatttttttctaaatctttacttttacaaaaaaaaaattacaacaaccattatttgcttcaacctttaaaaaccaactaaaccttcttaaaataccaatccggacccctgtgaaaccccagaaaatccatacccacccctttaaaccctccacctaaaccttaacgagg

SEQ ID NO: 94218 - DNA, 361 bp, Oryza sativa
  Clone ID: PAT_MRT4530_92527C.1
atgtccaaaacacacaaggcaaactattcagaatacgttttggcgaaggcaatttgggtggagactcagtatgccacatgggagaagcagcaggaggagattgagcagacaaaggaactgataaacagacttggggctggagttaacgcagggcgtgtgtggagcgagcagaaggatatatgcgagactgaagtaaaagagacaaagacgaggatttttatacaggttcgggctcctgaattgtcaggtctgactcgtagtcgacaacagggtagtcttcctcctcgagttcgtacccggcaaaatcagagacagcgcgagatccctacggccggcctctgttgtttccgtataggacatg

SEQ ID NO: 94219 - DNA, 138 bp, Oryza sativa
  Clone ID: PAT_MRT4530_92528C.1
ttttagccgagtcagtggctcgctatgctacctcacgagcttgaactgtgcttgcgatcagagcgagctggttactcaatgggtgctcgccgtggatgccgtaatggccgcgctcttcgtcggtggcggctccggggg

SEQ ID NO: 94220 - DNA, 201 bp, Oryza sativa
  Clone ID: PAT_MRT4530_92529C.1
atggcgacctccagcatgaactgcatgcgagaccaggcccatgagtccgatggatccacccccgtagaccagatggaatggaattggcaaggcgttgcaccgcgtttcggcctcctgacgatgcagcagcaattcgatgagacagtgaatggaaacccagccaagccagatggatgcatggacgtgcctgctcgtccatga

SEQ ID NO: 94221 - DNA, 277 bp, Oryza sativa
  Clone ID: PAT_MRT4530_9252C.1
aagctttttttttttgtatattatttattttttaaatatctttttttatcatatcatttggcattaaaagttcagtatgttcattaattacaagaggatcttcaaagtcgtagtgagcttcacgtccaactaaccataaattgtgatatgcaaactctccatgttcaaccaaatcaagtcctttttcttcttcttctgttgtaattttaagtcccattgttttatcaatgattttcgcaattacaaaagtccagaaaccagcccaagctccaagctt

SEQ ID NO: 94222 - DNA, 408 bp, Oryza sativa
  Clone ID: PAT_MRT4530_92530C.1
gggcaaacgggttccccaatttgaaagggatatcgggggcccaaagggcggaaacaggtgggaaaaaggggggctttcggaggcaaaatttcaatttaccacaaaaatttgggtgggagctaggaagcaaacctcaaacccccccattacaaaaaaaaaaaaaaccgatgggttgggcccccagggcgggggcccactagcccaaaacaaaccagcccttattttggttttagggggaacccgggtgttttggcccccccaacttgaccccaaaaaatcaaaacccccctttttttttattcataggggaaaaaaaagcttccggtttccaggaactaaacacaactctggatttggcaaattggctgggggtccccaaagcccaaaaaataggggaaaaacccccca

SEQ ID NO: 94223 - DNA, 276 bp, Oryza sativa
  Clone ID: PAT_MRT4530_92531C.1
accactcctccagctattaatgatactgctggttgtggttcatactgccgcgaaccatgggcgctgagactgtcgccatcaaggttggtatgtaatgcctagggtgcactggagccatgcggagagttctcacataaatggactgcatgtagaccttcgacataaacatggagcagaacaaggtcacgcagaagggcactgtcaagccaaaaaacattttccagaccgtctcatagacagggaagatgacctccttgtaggaggctgaacaaaccg

SEQ ID NO: 94224 - DNA, 371 bp, Oryza sativa
  Clone ID: PAT_MRT4530_92532C.1
gggagatgtctcttttggatctatccattcaggttagccgtggcacgttttgctattttggcgcgtagaggagtgaggtgcgacgacgaccgacgacgacgtgatgggtctcctcgcacatgctgtgggacgacaccgtcgcggcgccccgccccgacaccgtgctcggacgccttcgcaagcacgccgacggccgccccggcggcgtttttatcccgacccgacacgggacgctgtgatggaggacgtcccgtcgacgacgccggccgtggcggaggaggctcccgcgaaggtgacgcgcatcatcatgatcaaacgcccctcggagtacccgaggtcggcgaagatcgccgccatgacgccgccggtct

SEQ ID NO: 94225 - DNA, 481 bp, Oryza sativa
  Clone ID: PAT_MRT4530_92533C.1
ccaactaataatagatacaatcagaatacaacagaattcaaacaatagttcatctcagattcaacctaattacaggaggcggcccaaagcatggcttcctgagaaacacacacacaatcaatcaatcaatcaatccaagccgagaaagtaagcgcgtaggtcgggatcacgcttgttctggatcaagacgacgacgaccagaaggaatcagataccctggaaaacatgacaagaaaaactcagtagtgttcagtataagataaagacagttaacaaactttttgaaacagatatgagccaacgtctccgtgatcgaaggatgtgggagaaaaacttaactttgttattttcacgtccataaatcatggcaccaaacagattaataagcagaatatgtgctggcataccattttctcacatcacatggtagattatatattttctccccaaagctaccacataacacacactggtagcactt

SEQ ID NO: 94226 - DNA, 1186 bp, Oryza sativa
  Clone ID: PAT_MRT4530_92534C.1
ctaataatagatacaatcagaatacaacagaattcaaacaatagttcatctcagattcaacctaattacaggaggcggcccaaagcatggcttcctgagaaacacacacacaatcaatcaatcaatcaatccaagccgagaaagtaagcgcgtaggtcgggatcacgcttgttctggatcaagacgacgacgaccagaaggaatcagatacctcttcctcttcttttctcccttctttgccaaactgtgtacatttccggttactctctgccatctccaacaaagagtttgtcctaatcaacagtaaaagctgacttcaccaaccgatgtatcgaaatcagatgttacccgtgcatcgatatggctgctgcaagcgtgatttcagagatgacttgcacgcgtgcacacaggcgatggcagccatggctcagtcccactgtcccagccctccggcggtagcggcagggggacaaggggacggccgcagaccgccacccgccgccgtcgtcgtcgccgtgcccgccgccgtcggggaagggatgccgccgccacgcatgggaggtcggggaagggaggccgccgccgccggtgccgagcccgccgctcccgcccaccacgtcgcgcagctcccgtcctcgcatcaaacacactcaaattaagcggacgcgtggggctgaaaaacatgacaagaaaaactcagtagtgttcagtataagataaagacagttacaaactttttgaaacagatatgagccaacgtctccgtgatcgaaggatgtgggagaaaaacttaactttgttattttcacgtccataaatcatggcaccaaacagattaataagcagaatatgtgctggcataccattttctcacatcacatggtagattatatattttctccccaaagctaccacataacacacactggtagcactttgtagcaacaaaggctgctcaaaatatatataaaaaaggtgatggatgacaaggagaaactcagtatcaatttatagacaagaaataggcatccaagttcaagtcaaccaactgagctaagttcagttcctattttcaaataaatggaacatatatgtctttgtccttttgtaattctattaggcgattttaaatgctgatggcaagagctctcctagataatcagcacagagctcactgctatatttc

SEQ ID NO: 94227 - DNA, 509 bp, Oryza sativa
  Clone ID: PAT_MRT4530_92535C.1
ggcggagacggcgagccagcgccggccctggtgacgacgacgacgaggagtggcggcggcgagttcttctcctctcctctacggatccaccacaggagaggcggtgaatggcgagacggtgagccggcaccggcgccgccgcctcctccctccttcctcgcgcctgcgccggggccgccgccgccgcctcctccctccttccgtgtgcctgcgccggcgtcgccgccgccgccttcacctccctcattccgcgcccctcagctgccgccgccgacggctccctccctccctccacgagccggcgcggccgatcgccccctctgtgcgccgccaccgcaactcgccccttcgtcagccgccgctgccgctccctccctccgccccctcagagcgccgctgccgccgcaagtcgccgccccatcggcgccggcttgccgatccgtggaggagaggagaggagaggagaggagaagagagagaagagagaactgacgggtgggtcccacatg

SEQ ID NO: 94228 - DNA, 780 bp, Oryza sativa
  Clone ID: PAT_MRT4530_92536C.1
agcatcaataccaataaattattattagtaggcgctcatgtgccatcaaattaatgaatacacatcatgcctctgaaactgattctgctaattcatgatgagatttccagagttgacaacaaatcacattttcttcaggcgacaatgggaaaatgggttctagactaacatcttcactcgggtggaaagatacattcaaagctttccaagtcagaacaacatattcctttgactgcacacagtacctccagtcactagctaaacaaatggagaacaggaatcggggaatcaccgactgtaggcgctactcctatgctcgcccagataggcgaatatgtcagtgaattgcataggggcaatttacgagacatgtgttcaatttgttttacagggccatgcgtccagcaagccgactttctgatattcttcgatcaattgctgcatcaactgagttcatctgttcacacattgtgggagaagagagacggtgttagatatgattggcatgattaagaacaaaaaaaaaaaagcagttaatctcttctctttgaacataagtaccaggctcacgggccaaaatgaaagctgacctggaaccaaattcttggcacaatctcgaccaaaattaagttacaataaatgttacggtattggcagaagctcagccacctagttcttgttacaaacccatatttgcatgtgggtgaatcgtaatcaataaaataatgatgctcaattgaaatcaatacatacatattttgggaactgtccagggcttgg

SEQ ID NO: 94229 - DNA, 522 bp, Oryza sativa
  Clone ID: PAT_MRT4530_92537C.1
ttccatcgactgaactattttgaagaagtgagcatcttttgttttgcgaaccataataatcaaaacggagcatattttccagaaatgtataattttgccccaccattttcctaaaaccatggtatcgactcactttaatcactttcctgatttatggccagttatatatagcatttgggtaactttatcttcttagtggtaagctgaactaacagcacatgaccactagttgcttttcttacattgcattctgtaattggcaactaaatccagaattcttgcagacaagtatactttggaaccgccttcatgactgttcttttgaaattcttttacattggtactcaggcaagaagagcccgtttgcagaactatttctgtatgtaccggcatgcagagctccaccctcgctggacttcttgctacacaatttcttggaagtagccaggcagttcctgcagcatgctcagttgttatcatggccatatttggtttgactctagcatcatactggggaaatgg

SEQ ID NO: 94230 - DNA, 335 bp, Oryza sativa
  Clone ID: PAT_MRT4530_92538C.1
aaaaaaaaaaaaaattttttaaggggaactggtaaaacccaaatggtggtggccccaaaaggttcagaatttcgggggggggtttcggggcccctgggttcaccccggaatttcgggccgggccctggggggggtccaatttttccttttggggggggttttaaaagttgggggaaataagggtaaaaggtgttcccgggggaaaatgttattccttcaaaatttcacaaaaaaaaaggggcgggaggttaaaggggtaaagcgggggggcctaaagggggggctaaccccaattaattgggttgggcttaattgccggttttcaagggggaaac

SEQ ID NO: 94231 - DNA, 231 bp, Oryza sativa
  Clone ID: PAT_MRT4530_92539C.1
atggaggggaggaagggtatcagcggcggaggcgggtgggaggtcggccaccctcccggcaaggaaggcgacgtcgtctctccgcctccaccgagggccaccggccgcgtcggccgccctcgacaaaaagtgggaggtgttccccattttagagggatggatgtgacggggttgcgaggagtcggtggcaccacctcatccatgggagaggagatcggtgggacgggttga

SEQ ID NO: 94232 - DNA, 1155 bp, Oryza sativa
  Clone ID: PAT_MRT4530_9253C.1
atgatcgcatttgcggcgcaaatcttggcgttctgcctcctcctgctgctgctgttgctgctccagttgcagacaaccatggcgggtgattcttctttcagcggcgtgttcgaccatgggagccatggcgtcacccttgtcaaggtcgacgaggcgcccaggaagtgctcgtcggcggcggcggcgaagaagacggatgatgatactgctccggccggtggagcgccgccgaagccgctgctggtggcggcgccgtgcgacgccggggtgtacccggtggtggtgttcttgcatggatacctcgcctataattccttctactcgcagctgttcgagcatgtcgcctcccatggcttcgtcgtcgttggcccccagctatttttgggttgtgaactgattttatctaacaattttgatgctaaaatgctatatacgatgtctggaccggataccaccgacgagatcaactcggcggcggccgtcatcaactggctcgccgccggcggcctcacctcgaagctgccacccaacgtccgcgccgacgcgaccaagatctccatctccggccacagccgcggcggcaaggtggcgttcgcgctggcgctgggccacgccaacgtctccctccggggcggcgccggcggcgccaccatcgccgccctcgtcgccgtcgaccccgtggacggcttcgccgccgggaagcagacgccgccgccgatcctcacctacggcggcgccaactccctgcgcgtgccggcgccggtgatggtcatcggcacgggcctcggcggcctcgcccgggcggcgccgctgctcccggcgtgcgcgccgcccggggtgagccacggcgagttctacggcgagtgcgcggcgccggcgtgccacctggtggcgagggactacggccacaccgacatgatggacgacgtgacgcccggggccaggggcctcgcgacgcgcgccgtgtgcaggagcggcggcgccagggcgcccatgcggcggttcttcggcggcgccatggtcgcgttcgtgaagaggtgggtggaaggggagccggagctcctggactgcgtcagggcgcggccggagacggcgccggtggtgctgtccgccgtggagttccgcgacgaggcgatagctaaccactcttattaa

SEQ ID NO: 94233 - DNA, 160 bp, Oryza sativa
  Clone ID: PAT_MRT4530_92540C.1
atggacgagagagacggtggctgtgacttgctgttggggcctcaacatcagcgaggcatttcatttcagtaccagtcaggaggcagcagctgccggcctcgtgacggcgcccagtgcatactacgtgacagggcccggcagaggcaggtcgaggttgacg

SEQ ID NO: 94234 - DNA, 288 bp, Oryza sativa
  Clone ID: PAT_MRT4530_92541C.1
atggcgagcggcggcggcgcatggtcgccggcggcggcgtcggccgaaggcaacggcgcgcgcgtggtggatagcagcggacacgggagggagagaaagagggaggagagaaatagtggaacctcaacggagcacggggagaaacgggctccgacgacggaactcgacggatgggaggtggacgaggtggacctcggccacgcaaacccgacggtggtggtggcgcggggctcgggaggggcggacatggccgggaacccccccaccccgatttggccggtgacgtag

SEQ ID NO: 94235 - DNA, 996 bp, Oryza sativa
  Clone ID: PAT_MRT4530_92542C.1
atggcccttccccgcgctggcgccgccgccctcctccacgacttctacgccgccgccaagaaactcctcgagcggctcaacgcgaagctccccggcgcgagcatgtccctcgccgactgctactccatcgtcatggagctcatcgagcacccgcagaagtacgggctcaaccgcacggcgttcgtgttctgggacgcctaccacacctctgacgccgccaaccaggtcatcgccgaccgcctctacgccgacatggtgagcgctagcgcggtgcaggggaacgggaacgccaccacagcctccacccgcgcgcctcgcgttgtcgtcgacggcggcacgccacgccgcctccaaagccttgaaaggcccagagattggacggaggaggctgccccccaatgccacgtggccctccccgaggggagtgaggcccgagctggcgcgccaggtgggggcgcgttcgtgatttttgaggttctttcgagcgccggcgtggtctttgtggcgagtcttcggaatgtccgagggcccccaaagctccagccctgcctcaccgagaagtacgacgatggcgccgacccctccgagtccctccagatctgtacggcgatcatagaggaggcggggggtggcgaccgggtcatggcgaacgtcttccccatggccctcaggggccaagcgcaggcggctggctttggacccaccggctggctacggtgcccggcccggctcaactgtggacggggattgctggctctagaatttttcggctctcacactcgtgcgaaagctcatgggagcttgacctcgtttgctaagtggtcgcaggcttccctaaagggttcggagcctagggtggggagccctcttcgagccaaagagattggacggaagcccgaggtagggcggcggccactccttcccagagactggatggaggaggctgccctccaatgccacgtggccctcccccgaggggggtcgggcccgaggtag

SEQ ID NO: 94236 - DNA, 376 bp, Oryza sativa
  Clone ID: PAT_MRT4530_92543C.1
attgttacatagaatttcaaattgctgagttaaaaaaaaaacgggaggaggggagaagggacacacgcgcaagataagtgggctagatagcacgaaaaacggtgagaccaaacgaagaagaaacaattgaggcgccaacactacaattagatagggacatcaaagagcgcacaaaaaacaaactaatttcataaccaaaggaactcacacaggccagccaagagggattcatcaagctcaagaccaaggatcagctggccaccctcccatttggcctggaggggcccgccaacccggagagctgacccaaggaaccatcttgaccatgggttttaataaagttgagatggaacaagcccgggttgtcaggggagcc

SEQ ID NO: 94237 - DNA, 351 bp, Oryza sativa
  Clone ID: PAT_MRT4530_92544C.1
atgggtggcggtcggcgacgcggagcacgacgacgacttggggccgccgctcgcttgctcctgggggatggaagagcagcacgcagccacgcactcagagtggaggcgctcacagcctcacacccgctcaaattcttcacaatctatgggctgtggctagtggccgcagtacagctatgggggatgccatcctgctgcagaccaaccacattcgacgttaacaaggtgccaaccatgcagggacctagcgcaccggcggcgcggcgcactgaggacgacgaggggtggcggcggcacgcggcgcgcggtgagggccggccgtgcgtcggcggggtgcggcgcacggcgtga

SEQ ID NO: 94238 - DNA, 2918 bp, Oryza sativa
  Clone ID: PAT_MRT4530_92545C.1
gatcgctccccccctaattcccgccttgccccctcctgggcatgtcgccgccggtggccggcgccgcctcctccggcgacgggccgccggggcgcccgccgcgcgagctctacaccatccctgcctcctcgggttggttccagtgggatgagatccacgagacggagcggcgggcgctgccggagttcttcggcggcgccggggggagcgggttcgggacggcgtcgcggaacccgcggatctacagggagtaccgcgactacatcatcagcaggtaccgcgaggacacctcccgccgcctcaccttcaccgaggtccgcaaggcgctcgtcggcgacgtcacgctcctccggaagctcttcgccttcctcgactcctcgggcctcatcaacttctccgcctccccctcccgccccgaggcgcagcagcagcagcggcagacggaggcggaggcccggagggaggcgcccggggggctgcaggtgaggccaaggccgctcctggagtcctccgcggaggagaagggggggcggggcaaggagaactggttctgtttgccgccgctgacctcgtatagtgatgtatttggagagtgggcgcctgggatggcgcctatatgtgggctctgtggcatggagtgcagagacgggaatgcccaaatattgaaggatggttttaaagtatgctcaaaatgttatgccaataatgataataagggtgaagcaaatatacatccaggtgacaaaaaggagcggatcgacaatcattcttctagtgcatggacagatgcagaaactctccttctcttggaaggtgtactaaaacatggagatgactgggatctcatcgcccagcatgtccgcacaaagaataaatcagaatgcattgcaaggctaattcagttgccttttggtgaacatatgctgggcacagtaaatggtaaattggataacagactccataaaatccaaacaaccgatggaaaagtgaacaagtccactgtgaaggagtcttcaagtcaaccaactgaaacagttgatgacatgcagattgatggaaatgaagatggcgctgataaatctgttgaagaacatcctacaaaacatagacggttgttttcttcaatagatatcactgtctcattaatggagcagttagcgcatcttaccacatcgacaagcccagatgttgttgctgcagctgctgatgccgcaattaaagcactgggtaatgaaaacccccaagcaaggagagcttttcaactcagtgagaaagagtaccaaaccagggcattctcttctaaccatgcccggcagagggattattgcagtgatgatgttggtggtggtgatcgggatgtagaaatgcacgggcacccagaccaggaagaacgggaaatggagctcctaatggcgtccataatagaaactcagctaaaaaagatccaatacaagatcaaacactttgaggagctagagttgatcatggatcaggaatacgctactctacagcaaatgaagtcttcccttgtcgatgaatggcaaaagcaaagccagcaattcggtgtttggagaattggagccatcctgaaccgtttagggtttgatcggacggctggtatggaatctcacagaagggcaccaccatttttccccaacgcggagcggcggaggcggcagccaaaaacccctccctcctcccctcctggactctcggtttcccctaacctcgcgcgccacctctcctctcctcgtcctccgcctccggacgcgcagttcacgggcgccctaatggcgaaaaagggcaaggcggcggcggcggaggccgcggcgcccgacgcgggggtatccggcccgcagggcggcggcggggagaaggagggcagcttcctgctgggctcgccgacctgggaggacgccgggggcgggcggtggcggtgcaaggagacggggcacgagctgccggagcgggagaaggaggcgtacgggcggtcccgcgcgtgcaggctcgcgctcatcgaccaagccgtcgcgcgcaagaagccgccgctcaacgccttcaagcctcaccccgagcacaagtcgaagcttatatgcaatattactggggacattataaacaagtcggaggaacacatctggaagcacatcaatgggaagaggttcctcaacaaactagaaaaactagaagaaaagatggcatcaggtgaaatggccgaaggtgaagctgaacagtcaaatgaaggggaaaataaaaccaagtcaaggaagaagaaggacaagaagaaagctgctgttgttaacccttctttgccacgagaacctaaaccagagattgatgattcagataattctgatgatccagatttctgggtgcctcctgttggaagtcgttgggatgatgatgatggaaaagaccgatggacctcctctccagtgaaggataaggatgatgcagcagaggatgaagatggtgatgacgatggtgatgacatggctgacaaggatgacaaggagacaagagaaattgcttcaaggacaaagcgactgtcagtagaagcagttggcccaagtagcttcgcttcaaggaagaaaaaaaccaaaaaggagcagtaaaggttggtccacagcttatcatcgagttcaatgaagaacttatttgatctttctgtgtggacgaacaaagtccatctttgattcctcttggctggctagtcaggtgcgggttttgtattaattggtttgcttttagttagtgcttctctgtgtagccctatcgctgcacctttcagtggtatactattgcatgacaattctctatacttgcattagttaattcctgtgattttgatgtgagaatgaactgtgctacttgtcctatatttattcttgctatataacttcatatgtttcttttgt

SEQ ID NO: 94239 - DNA, 2392 bp, Oryza sativa
  Clone ID: PAT_MRT4530_92546C.1
ttttttttttttttttttgctatggctacttccatattttttttaatgtaatgagcctatcctctaccctctcttttctgtttatatttcaatataccgaaacccatataagactagataaatattaagaggactcttccgcctagataaaaatctatcgtgggcagcaaagttgtttttttatttgtatttgccctttagttaaaattttcaatttcattaagaaaaactaaatagaaaaatggaaaatgaaaatggatagaattcctacttttttcttcaaatccaaaaactttctccttttttatacataggtcgtcgattcggcattggataaaaaagggcagggtgccccttctagtaaatagttcaaaccattttatcgatatgagtgttctatatcagataaattctacattagctatttcctgtttaaagcatttggtactaatactaatatagttgtagaaagagtacccccttttgcctagacttcaagcagtttagctttaaccgtgttaatggtctcatattattggtctatagagaatcaaagttgatttgatttaccaataggtcgcgaaatgctatggttctttcatatgatttctgcatttattcagaagtaattcgtcgagatcgtgcacccttttcttatttattcgaaaaatactaaaaaatattctaaagtgcagccggatagatccaatctattcttgaaatagacaactcgcacacactccctttccaaaataaatcaatacaccaaccactacagttagatttattagatttgttgctaaaatatcggtattaagcccgaaactcccagcggatggccagtgagctaaaaaaacgaaagaatgggttacatttttcatatgctctcctcttatagataggacgaacaaagaacaaagtttttcgatcacttacttcgctcgcccttttttatttttttttttaatgcaattttttttaatagaaatagattcaatttagtaatttcttttagattaagtcttagatctcgtttgacctgtgaaagacctcctttgttgaaatgttcccaaaattcctaaaataaaaggaaaaatactttccactgccctaaacaaagggcgggaagcaagacggcgaacatatcctctaaattgatcatcctcaaatcagctattcctggggtggggtattgtctgtccccataaatagaaaactctaggagtaataaattaggagtaaagtattgatataattggaattgcagaagcaaataccaatttactaaaaaaagaagaaagtatctaatctaaaggactcgttttcttttttaggattaaacaaaagggttcgcaaataaaagcgccagtgccacaactagtccataaattgttaaagcttccataaaagctagactaagcaataaagtaccgcgtattttaccttctgcttctggctgtctcgcaataccttctacagcttgtcctgcagcagtaccttgaccaactccaggcccaatagaagcaagacctacggccaatccagcagcaataacggaagcagcagcaattagtggattcatgatgagttcctcgtgtcaaaaaaaagaaatggttaaggatacaatcaaccaagaaattcatatttctaagctctattggacagaagtaactaaaaagtacaaattgaaacgataatctgaattctccgaactgcttcgagatctcctttttagtttctaatcattagaggtttgtgtactcattattctatttctctttctttccaaccaactgatctttcattccatccttctttctttcctcttcgatatccttgagtttctattttttcccctatcatctaattcataataaaaggtgaaatagaggaagaacccctatggaaatcgacctaatccagatccaataggaattaaatcaagatatccaattgataacaatatgctgcatcgaattggatatggaatccgattccatatatcggattagataatgaatctaacttgggaatatataatatcccatatcaatttgtttcttcttttttgtttgtgtattttctcattttctattgaatcggattcaaaaaaaattccttaaagtggaaacccatacaaaagatgactgaacttatagacataaaggatatagatctagcctgactccgcccctccctaatgcctatatactttgtttggcaattccgtaatatagcctattctctcttctacaactctagattgtatattcatacgcaattctaactattttgttttccaaccaagcgaattttccgcaaccatgcatgaattgagttaagctaaaaaaaagactatttggaaatagcctgcagcccgggggtcccacta

SEQ ID NO: 94240 - DNA, 252 bp, Oryza sativa
  Clone ID: PAT_MRT4530_92547C.1
atgatgattgatcagcctatgcaaaagcacaagacgagcacagtcatcgctacgtacctcgccgcgtacaggatccgacgcccgtatgagatgcttctggatggaggatgggcctacgtgatctgtgggggcgatggagttttctcgctcgccgacgagaaatactcagattacgctagtggaagacgccgtccgtcggtcgacgaagcaccggagggtggaacgaaggaggatgcgcacgggatcggataa

SEQ ID NO: 94241 - DNA, 360 bp, Oryza sativa
  Clone ID: PAT_MRT4530_92548C.1
ttgggttttttatttttttggggttttttattcattcttttccttggtagaacaagctgatttgataaataaatcacaacaccataatctatgggtccggtctagaaccggcacgaaaaaacccactgccggtacagggctgaccctcatggcaaaactagggcatacacccaggcgggccacacggatcctcccatctatacgggccacggacgaacatcaaggggaccggggacacacacggacactttattggagagacccgcatggccgctaacctagctaggttagctggaggcgatgcgatggcatggcagcacggagggggcggtccatacttgccggggacaaaagtggggg

SEQ ID NO: 94242 - DNA, 444 bp, Oryza sativa
  Clone ID: PAT_MRT4530_92549C.1
aaaaaaaccagcactagggggggataaataaaccaaggaatcgaccccaaattgggggggttacaacccatatgaaacaatgggggcaaaaaagcaggggaaagggggtatatacagagaggatttttactatatacacgggacacgcttccataaatccattttaccgggaaaagcccaggggccagggagcggggtcagggaggggcaaaggggcccatgaacatgcacacgggggcctcggagtcggaaaggaggaagctggtgcccctcggcctcggggggatctccgggaaaaaaccataaccaaccttactttgggaggtttcccctttgttttgagctcggtggcccaccccggggtgggccgccggggcccccccccggcccatttgggggaactcccccagccaaactccaaccaggcccgccattgattaaggg

SEQ ID NO: 94243 - DNA, 405 bp, Oryza sativa
  Clone ID: PAT_MRT4530_9254C.1
atggtgggttgtgagtagatggtttgaagtttggatagttgtgctcatggcaattaaggaccggttcgtgagctactgttgtgaaacattaaccgtgccaaccacaagctagcatgggcaacaacttgacactttgtatagcaaggctcattgtggtgtgccaaactatgaagtgccagagataaacccatgggggtcgctggggagtccataccttggctaaaatggggtgattatgatccaggaaagttgcgcctctctgagttgagttatgcgaggggtcttgtcacaactacagaaatggagacgtgttcagcatggtgttgacgatccttaaatcataatatctaaccgtcaatacctgcatataatgaaataaaacatggtatccaacttagtggtaag

SEQ ID NO: 94244 - DNA, 348 bp, Oryza sativa
  Clone ID: PAT_MRT4530_92550C.1
atggaagacatcggtcagcgaaagaggggtaagggagcaaagagcaagagcagtggtgtcgggacggagagggacaagagaagaaatcagtcagtcagtcatcagccggtcaccgggctcgcgcttcttggtgccactgggaaagaaggcgccaccgtccctcataaatgctcatgcaacttgcgagagacccgttcgaccgagcaacatcatatctcgtcgtcgtcgcgcgccgtcgcgctcgcgcaacagcagccactgggcggttcatgccaatcaatcaaaatcatgtacgccgtgacgccatgcaaggcctactccgcggggcgcgcgcgcgagataagctag

SEQ ID NO: 94245 - DNA, 2062 bp, Oryza sativa
  Clone ID: PAT_MRT4530_92551C.1
gttacatgcaaacgctggagcaaggctgagatccgaaattcttttgcttccttcctccttatatcaaaatattgcaactaatggggttgaacataatgaccgcatgcctaatgtccctgagcaatctaatgtgcctgttgagcatgtgacagatcaggagatacaattcggagaaggttcagaaaatacagcacaaaatgatcacagttctgcagcaaatattgaaggagatgcaccggatctggatgccacagaagatcctgaggacatttttcctggcagcagcgatcccgagggaggatttcagccctcacctgtgcacacgcctgcactgtcttttcccgacgatgaagaaatcggcgaaaccggtggcttgacgtctctgcagcagggggagcagtcgcatgcagccacgtcgtcaagcagccatcatgatggggggagcggcagccctctgaccggcggatcgtctgcacccgacacagccgtggctgagcccgcacggccggtcactcgtcttcagcgaggagaacctcaaaacctagatgaagctttgactgataaaaactggaaagatgctatggatgctgagtttactgctttattagaaaataaaacttggcacctaattccacctagtcatggtaaaaatgttatagactgcaagtgggtctacaaaattaagagaaagtctgatggtagtctggatagatataaagctcgtctagtagccaaggggtttaaacaacgctatggtattgattatgaggacactttcagtcctgtggttaaagcagctactatcagaactgtcttgtctattgctgtttccaggggatggtgccttcgccaactagatgtgcaaaatgcttttctgcatggataccttgaagaagaggtatatatgaggcaacctcctggttatgaaaataagagtaagcccaactacatttgcaagttagacaaagcactttatgggttgaagcaagctcctcgagcttggtattcaaggttaagtactaagttgattagccttggcttccaagcttccaaagctgatacatcattgttcttttataacaaaggaggtgttacaatttttgtacttatctatgttgatgatataattgtggctagttctagacagaaggcagtatctgctttgctggcagatttgagtcaagaatttgcactcaaagatttgggggatctgcattacttccttggaatagaggtcagtacggcaggtgatgatattttactgaaacaagaaaaatatgcctatgatttgttgaaaagagcaagtatgctagattgtaaacctgttagtactcctctgtctgtatcagaaaaactgtcagctcatagtggaactgctctaggagaaacagatgcaactagatatagaagtatagttggagctcttcagtatctgactttgactaggcctgatatttcatttgcagtaaataaggtctgtcagtttttacatagtccaactatagatcattggatggcagtgaagaggattttaagatatgtgaaattctcagttgatcttggtcttaagataagtcgttcatcatccactcttgttagtgctttttcagatgctgattgggcaggatcaattgatgacagaagatcaactggaggttttgctgtgtttctggggtcgaatttggtttcctggagtgcaagaaaacaggctacagtatcaagatcaagtacagaagctgaatacaaagctgttgcaaatgcaacggcagaggtaatgtgggttcaggctctacttaaagagctaggaatagattcacctgaaactgcatgtatgtggtgtgataatctgggagctacttacttggctgttaatcctgtgtttcatgcacgaactaaacatattgagatagactatcattttgtcagagaaagggttgccagaaagcaattagaaatcaagtttatatcttcaggtgatcaagttacagatgggtttactaaacctctcggtgctccacaacttaggaatttcagatacaatcttaacttagataagttatga

SEQ ID NO: 94246 - DNA, 465 bp, Oryza sativa
  Clone ID: PAT_MRT4530_92552C.1
cttgttccttttcactacagcctataatcttttatatttactttctaaagtgaactatcccatacaaacactatcaacataaaacagtttataaatatgctcctaccctacctgtcagccactcgtccatcatttcagcttcccacactcccatctctctccccccaccaatttctttgatcttcctccattccataccgacacaacaatatacatctttctcgatgccagcactaacaacacgagcctagcagaaagccaccttaatgagggatcgaccagcctcctacctctctatattgaaaccttaatttgggatttgtcaactacccaatgcctcttccctctctctttcccatctgtagttgcaactgtgtactccgctctattttgtaacggacaggatccccttctctccatgaacccaagcctcaacttcatctggagaagccatagcgaagtatg

SEQ ID NO: 94247 - DNA, 125 bp, Oryza sativa
  Clone ID: PAT_MRT4530_92553C.1
gcttgtattcaccgcggctaccggtctggggggagagctctttttatccttgctcgggcgctgcgcccacttattatgatgaaaaaaaccagcacctgcttggctcttgccatcacagggagcac

SEQ ID NO: 94248 - DNA, 2355 bp, Oryza sativa
  Clone ID: PAT_MRT4530_92554C.1
ttcatctcgtttctttgccataagggatcaggtcacgaagaatctcttcttagaggaccgtgccgcaatggactgtacccgttgccaacatcttcattggccacatccaagcaagtccttggtgccatcaagcccacaatgtcaaggtggcatagccgtctaggtcatccttctctagctattgttcagaaagttgttagtagcaataatctcccatgtttaggagatgtcaatgagtcaggagtctgtaatgcctgccaacaggccaagagtcaccagctaccctatccaaaatcctttagtgtgtcaaataatcctctagaacttgtgttttcagatgtgtggggacctgctcctacttctgttgggggcagaaagtactatgtcagttttatagatgatttcagtaaatttacttggatctatttgcttaagagtaaagctgaagtttttcttaagtttcaagaatttcaacaacgagttgagcgccttttcaatcgcaaaatcatctctatgcaaactgactgggggggagagtatgaaaaattgcactctttcttcactaagattggtatctcacatcatgtttcatgtccctatgcacatcaacagaatggttctgcagaacgcaaacatagacacatagtagaggttgggttggctctcctttctcatgcttcaatgcctctgaaattttgggatgaggcgttcctagctgctgcctatctcataaatcgcacacctagtaaggtcattcagtatactactcctttagagcgcctccttgatcaaaagcctaactattctgctcttagaacctttggttgcgcttgttggcccaatctccgtccttacaacaaacacaaacttcagtttcgctccaaacaatgcgcttttcttgggtatagcaatatccacaaaggttttaagtgtcttgatatatcaactggcagagtttacatctctagagatgttgtatttgatgaaaatatttttccctttgaaaggagatgcaccggatctagatgccgcagcgatcccgagggaggatttcagccctcacctgtgcacacgcctgcactgtcttttcccgacgatgaagaaatcggcgaaaccggtggcttgacgtctctgcagcagggggagcagtcgcatgcagccacgtcgccaagcagccatcatgatggggggagcgacagccctctgaccggcggatcgtctgcacccgacacagccgtggtcgagcccgcacggccggtcactcatctccagcgaggtataagaaaacagaaggtttatactgatggtactgtaaggtatggcatgctgacaactacaggagaacctcaaaacctagatgaagctttgactgataaaaactggaaagatgctatggatgctgagtttactgctttattagaaaataaaacttggcacctaattccacctagtcatggtaaaaatgttatagactgcaagtgggtctacaaaattaagagaaagtctgatggtagtctggatagatataaagctcgtctagtagccaaggggtttaaacaacgctatgatttgagtcaagaatttgcactcaaagatttgggggatctgcattacttccttggaatagaggtcagtacggcagaaaaactgtcagctcatagtggaactgctctaggagaaacagatgcaactagatacagaagtatagttggagctcttcagtatctgactttgactaggcctgatatttcatttgcagtaaataaggtctgtcagtttttacatagtccaactatagatcattggatggcagtgaagaggatattaagatatgtgaaattctcagttgatcttggtcttaagataagtcgttcatcatccactcttgttagtgcttttttagatgctgattgggcaggatcmattgatgacagaagatcaactggaggttttgctgtgtttctggggtctaatttggtttcctggagtgcaagaaaacaggctacagtatcaagatcaagtacagaagctgaatacaaagctgttgcaaatgcaacggcagaggtaatgtgggttcaggctctacttaaagagctaggaataaattcacctgaaactgcatgtatgtggtgtgataatctgggagctacttacttggctgttaatcctgtgtttcatgcacgaactaaacatattgagatagactatcattttgtcagagagagggttgccagaaagcaattagaaatcaagtttatatcttcaggtgatcaagttgcagatgggtttactaaacctctcggtgctccacaacttaggaatttcagatacaatcttaacttagataagttatga

SEQ ID NO: 94249 - DNA, 6204 bp, Oryza sativa
  Clone ID: PAT_MRT4530_92555C.1
atggcggagaagctgagggatcttagcccgtccacagatctccctctgctggtcgcctctctggccgcttatactggcggggttctcaggaagagtaattccgcctctcagataccatgctatcgagggaattcttcggttatttggctgtggttcggccagaatttggaacctctgcgctgcctgcactgcaagttctcagtcttccgactagaagaaggtgcgctaacggctcggcaccattaatggccagcactcagtgttccctgggtgagcaagggagctgggtactttatcgtgctggccaattgtgtcgtcgcaaagcctcggcgaactatccagctgaagttctcgatcgcgcagattcattggacacatacaagcggtcggtctttgggttgtctaggcggtgaaatgccccaacggaagacagaagggaggcgatgatgacgtctcactaatgtaggtcttattgctgaactaagattatatgttctatcggctacagtaagacttctgcgattcagtcttactctgccagctcgtaatcctgtcttatcctcgataccggtggggcccttatcttaccattgcccaagatagactctagggatgtgagagaaggtggctctgtatgggaattttattatccgtttgacctccagtggtggtgctgattgcgagatttctgctagtcaataggaaaggccaactcaattttgtcgcaataccgtcagcttatctggtggttagaagtggttggagataatgattttggcttccctgaaggaacctacaagcttatactctaggattccttctcggtaagttctacaagcattttggacgccgatttggggccactgcacatattaatggttgggacatgcagcctttttacgattccatttatcttcctttgatgggcggcactcatttttttagtgctccctgggtgagcccggaagttgggtactttaccatgcaggcgattttgtggtctcaaagcctgaccaaacaatcaagctgaagttctcgatggcgcagatcgattgcacacacacaaaaggtggtctttgtgtcgactcggcgttcatatacccaaagggctttcagcaggaaaggatggtcaggtctcagaaatgtagatgttgagaaggaacttacattagattgtagacaaatgcagcttgcagcctaattctatttttaatttgggctcatgtatgcgcggcgaaaggtgtatataattgtaggcttcaattttgtgtgatcggtaacatgaatgtgctttgtgtgtccaataaaaaaaaaaaacaattaaatggagaagactggagttggaataacctcaatactctctgctgggcaatcggatcaatatctggttctatggtggaggaacaggaaaataggttcttggtaatggttattcgcgatttattaaatctctgtgaaatcacaaaggggaaggataataaagctgtgattgccagtaacatcatgtatgttgttggtcagtacccaagatttctcagggctcattggaagttcttgaaaacggtggttaacaaactatttgagttcatgcatgagatgcatcctggagttcaggatatggcgtgtgatacttttctgaaaattgttcagaaatgcaagcgcaaatttgtcacacaacaggtgggcgagaacgaaccatttgtttctgaactgttgtccagccttgccacgacaattggtgatcttgagccgcaccagattcatacgttttatgaatcggttggccacatgattcaagctgaatctgataacactaagagagatgaatacctcaaaagactgatgagcctccctaatcagaaatgggccgagataattggacaggcaagccaaagcattgatatcctgaagaaccaggatgttattagatctgttcttaacatcctgcagacaaacacaagtgttgctagctcacttggaccacactttttcccgcaaatttccctaatctttcttgacatgttgacagtttacagaatgtacagtgagcttgtatcaagcaccattgctgaagggggaccttttgcctcaaggacctcctttgtaaaactccttagatctgtcaagagggaaacattgaaattgattgagacttttgtggacaaagctgaagatctaccacacattgggaaacagtttgttcctcctatgatggatcctattcttgctgactatgctagaaatgttcccgatgctagggaatctgaagttctgtccctgtttgcgacgatcataaacaaatacaaaggtgaaatgcttgaagacgtgcctcgcatatttgaggctgttttccagtgcactcttgagatgatcactaaaaactttgaagattacccggagcatcgcctcaaatttttctctttgcttcgtgcgattggcacccattgcttccaagcattaattcagctttcaagtcagcaattgaaacttgtgattgactctatcaactgggcatttagacatacagagagaaacatcgcagagactggtctcagtctattgctggaaattttaaagaactttcaggcctcaggattccaaaatcaattctacaaaacttattttttgaatattgaacaagagatctttgcagttctgacagacacattccacaagcctggtttcaagcttcatgttttggtgctgcagcacttattttgtgtggttgatggtctgacggagcctctctgggatgcatcctcagtaccataccaatatactgacaacgctatgtttgtccgagattacacaataaaacttttaggttcatcatttcccaacatgacacctactgaggttacaaaatttgttgatgggcttcttagttcaaaacatgaccttccaagcttcaaaaaccatattagggatttcctggtgcaatcaaaggagttctcggctcaggataataaggatttgtatgctgaagaggctgctgcacaaagagagagggagcgtcaacgaatgcttgccattccagggcttattgccccaagcgaattacaagatgagatgctactgcgacttttgttttacgacgcagtgtgttatgttagagatagaggtgcttggatttctccttgcatctgtatcaaagacatactcacccaagtcgtcaatcttgaaacggcggctgcgacatggagagtgatcacaacgatgctctcctcgcaatcccgtgcgcgtgctctgaacacgcggcttgcactgtcgacgacccgcaagggcgatctcagtgtcacggagtacatcggcaagatgaagacgctggctgacgagatgtcatccgccggcaagcccctcgatgacgaggagatgatgtcgtacatcctccccggactcgacgacgattatgagcccgtcgtctccactcttgtcggcaaggcggaggctgtaccagtcgccgaaatctacacccagctcctgagttttgagagccgagccaagctgcgacagcaggctaatggttcctccgtcaacagcgcacgacgaggaggcaagggaggcggcggcggcttcagcaacaacgtcaacaccggcaacaccggcgcgtttcgcggccgtggcggtggtcgcggcgatcgcggaggccgggggcgaggaaacggtggcggcgcgcgcttctccaacaaaccgcgctccacctgtcagctatgtggcaagattggacatgtggtggcagactgctggtataggtatgatgaaaatttcattccagattcaaaaacagcagctgcggcttcctatggtgtagatacaaattggtacatggacaccggagccaccgaccacatcacaggagaactggacaagctgacaacccatgagaagtacaacggcaaagaacagattcacacggcaagcggtgcaggtatggacattaagcatgttggtcattctattattcatacccccatatgcaatattcagttgaaaaatatccttcatgttcttaaagctgaaaagaaccttatctctgctcatcgtttagccgttgataatcatgcctttgttgaagttcatcctcgtttctttgccattaaggatcaggtcacgaagaatcttcttcttagaggaccgtgccgcaatggactgtacccgttgccaacatcttcattggccacatccaagcaagttcttggtgccatcaagcccacaatgtcaaggtggcatagccgtctaggtcatccttctctagctattgttcagaaagttgttagtagcaataatctcccatgtttaggagatgtcaatgagtcaggagtctgtaatgcctgccaacaggccaagagtcaccagctaccctatccaaaatcctttagtgtgtcaaataatcctctagaacttgtgttttcagatgtgtggggacctgctcctacttctgttgggggcagaaagtactatgtcagttttatagatgatttcagtaaatttacttggatctatttgcttaagagtaaagctgaagtttttcttaagtttcaagaatttcaacaacgagttgagcgccttttcaatcgcaaaatcatctctatgcaaactgactgggggggagagtatgaaaaattgcactctttcttcactaagattggtatctcacatcatgtttcatgtccctatgcacatcaacagaatggttctgcagaacgcaaacatagacacatagtagaggttgggttggctctcctttctcatgcttcaatgcctctgaaattttgggatgaggcgttcctagctgctgcctatctcataaatcgcacacctagtaagcagggggagcagtcgcatgcagccacgtcgccaagcagccatcatgatggggggagcgacagccctctgaccggcggatcgtctgcacccgacacagccgtggtcgagcccgcacggccggtcactcatctccagcgaggtataagaaaacagaaggtttatactgatggtactgtaaggtatggcatgctgacaactacaggagaacctcaaaacctagatgaagctttgactgataaaaactggaaagatgctatggatgctgagtttactgctttattagaaaataaaacttggcacctaattccacctagtcatggtaaaaatgttatagactgcaagtgggtctacaaaattaagagaaagtctgatggtagtctggatagatataaagctcgtctagtagccaaggggtttaaacaacgctatggtattgattatgaggacactttcagtcctgtggttaaagcagctactatcagaactgtcttgtctattgctgtttccaggggatggtgccttcgccaactagatgtgcaaaatgcttttctgcatggataccttgaagaagagatagaaggcagtatctgctttgctggcagatttgagtcaagaatttgcactcaaagatttgggggatctgcattacttccttggaatagagaaaaactgtcagctcatagtggaactgctctaggagaaacagatgcaactagatacagaagtatagttggagctcttcagtatctgactttgactaggcctgatatttcatttgcagtaaataaggtctgtcagtttttacatagtccaactatagatcattggatggcagtgaagaggatattaagatatgtgaaattctcagttgatcttggtcttaagataagtcgttcatcatccactcttgttagtgcttttttagatgctgattgggcaggatcaattgatgacagaagatcaactggaggttttgctgtgtttctggggtctaatttggtttcctggagtgcaagaaaacaggctacagtatcaagatcaagtacagaagctgaatacaaagctgttgcaaatgcaacggcagaggtaatgtgggttcaggctctacttaaagagctaggaataaattcacctgaaactgcatgtatgtggtgtgataatctgggagctacttacttggctgttaatcctgtgtttcatgcacgaactaaacatattgagatagactatcattttgtcagagagagggttgccagaaagcaattagaaatcaagtttatatcttcaggtgatcaagttgcagatgggtttactaaacctctcggtgctccacaacttaggaatttcagatacaatcttaacttaaataagttatga

SEQ ID NO: 94250 - DNA, 6144 bp, Oryza sativa
  Clone ID: PAT_MRT4530_92557C.1
atggcggagaagctgagggatctgagccagcccatagacgtcccgctgctggacgccactgtcgccgccttctacggcaccggatctaaggaagagaggaatgccgctgatcagatactacgggatctacagaataatccagatatgtggctgcaggtggtccacattctgcagaattctcacaacttgaacaccaagttctttgccctccaagtacttgaaagtgttataaagtataggtggaatgcattgccaactgaacaacgtgatggcatcaagaattacatatctgatgttattgtccagctctccagtaatgaggcttcttttcggcaagagagactttatgttaataaactcaacattatactggtgcagcttttaagcgaagaaatttttgatttttcaagaggtgaaatgacacaacagaagattaaagaactgaagtcatcacttaacagtgaatttcgtcttattcatgagctatgtttatatgtcctatctgcaacacaaagacctgagctcatccgtgctacactggctacacttcatgctttcttatcatggataccagtgggcttcatatttgagtcacctttgctggagacattactgaagttctttcctatggctgcttatcggaaccttacactccagtgccttacagaggtcgctgctcttcagtttggtgatttttataatgtgcagtatgtgaagatgtatacgattttcatgatgcagttgcaggctattcttcctcctggaacaattcctgatgcttatgctaatggctccagtgaagaacaggcattcatacaaaatctagctctttttttcacttctttcttcaagaatcacatgcgcatattggaggcatctccagaaaatagagctgcattacttctgggccttgagtacctcattggaatttcatatgttgatgacacagaggtttttaaggtgtgtttggattactggaatgtgtttgttttagagctatttgaagcacacaatcaaatggagcctgcagcatctgtaaacatgatgggacttcaggctcagatgctccctggagttgatggcaccatcacagctgttcagcagaggcgtcagctttactcaggcccactatcaaaattacgaatgttgatgatttgtcggatggcaaaaccagaggaggtactgattgtggaagatgaaaatgggaatattgtacgtgaaacaatgaaagacaacgatgttcttgtccagtataagattatgagggaaacactgatctacttgtctcatcttgatcatgaggatacagagcagcaaatgctgaagaaattgagtaagcaattaaatggagaagactggagttggaataacctcaatactctctgctgggcaatcggatcaatatctggttctatggtggaggaacaggaaaataggttcttggtaatggttattcgcgatttattaaatctctgtgaaatcacaaaggggaaggataataaagctgtgattgccagtaacatcatgtatgttgttggtcagtacccaagatttctcagggctcattggaagttcttgaaaacggtggttaacaaactatttgagttcatgcatgagatgcatcctggagttcaggatatggcgtgtgatacttttctgaaaattgttcagaaatgcaagcgcaaatttgtcacacaacaggtgggcgagaacgaaccatttgtttctgaactgttgtccagccttgccacgacaattggtgatcttgagccgcaccagattcatacgttttatgaatcggttggccacatgattcaagctgaatctgataacactaagagagatgaatacctcaaaagactgatgagcctccctaatcagaaatgggccgagataattggacaggcaagccaaagcattgatatcctgaagaaccaggatgttattagatctgttcttaacatcctgcagacaaacacaagtgttgctagctcacttggaccacactttttcccgcaaatttccctaatctttcttgacatgttgacagtttacagaatgtacagtgagcttgtatcaagcaccattgctgaagggggaccttttgcctcaaggacctcctttgtaaaactccttagatctgtcaagagggaaacattgaaattgattgagacttttgtggacaaagctgaagatctaccacacattgggaaacagtttgttcctcctatgatggatcctattcttgctgactatgctagaaatgttcccgatgctagggaatctgaagttctgtccctgtttgcgacgatcataaacaaatacaaaggtgaaatgcttgaagacgtgcctcgcatatttgaggctgttttccagtgcactcttgagatgatcactaaaaactttgaagattacccggagcatcgcctcaaatttttctctttgcttcgtgcgattggcacccattgcttccaagcattaattcagctttcaagtcagcaattgaaacttgtgattgactctatcaactgggcatttagacatacagagagaaacatcgcagagactggtctcagtctattgctggaaattttaaagaactttcaggcctcaggattccaaaatcaattctacaaaacttattttttgaatattgaacaagagatctttgcagttctgacagacacattccacaagcctggtttcaagcttcatgttttggtgctgcagcacttattttgtgtgctatcctgtgcttctgtggccatcatagacctaacaacttttcccgcacaggttacaaaatttgttgatgggcttcttagttcaaaacatgaccttccaagcttcaaaaaccatattagggatttcctggtgcaatcaaaggagttctcggctcaggataataaggatttgtatgctgaagaggctgctgcacaaagagagagggagcgtcaacgaatgcttgccattccagggcttattgccccaagcgaattacaagatgagatgcttctgccacttttgttttacgacgcagtgtgttatgttagagatagaggtgcttggatttctccttgcatctgtatcaaagacatactcacccaagtcgtcaatcttgaaacggcggctgcgacatggagagtgatcacaacgatgctctcctcgcaatcccgtgcgcgtgctctgaacacgcggcttgcactgtcgacgacccgcaagggcgatctcagtgtcacggagtacatcggcaagatgaagacgctggctgacgagatgtcatccgccggcaagcccctcgatgacgaggagatgatgtcgtacatcctccccggactcgacgacgattatgagcccgtcgtctccactcttgtcggcaaggcggaggctgtaccagtcgccgaaatctacacccagctcctgagttttgagagccgagccaagctgcgacagcaggctaatggttcctccgtcaacagcgcacgacgaggaggcaagggaggcggcggcggcttcagcaacaacgtcaacaccggcaacaccggcgcgtttcgcggccgtggcggtggtcgcggcgatcgcggaggccgggggcgaggaaacggtggcggcgcgcgcttctccaacaaaccgcgctccacctgtcagctatgtggcaagattggacatgtggtggcagactgctggtataggtatgatgaaaatttcattccagattcaaaaacagcagctgcggcttcctatggtgtagatacaaattggtacatggacaccggagccaccgaccacatcacaggagaactggacaagctgacaacccatgagaagtacaacggcaaagaacagattcacacggcaagcggtgcaggtatggacattaagcatgttggtcattctattattcatacccccatatgcaatattcagttgaaaaatatccttcatgttcctaaagctgaaaagaaccttatctctgctcatcgtttagccgttgataatcatgcctttgttgaagttcatcctcgtttctttgccattaaggatcaggtcacgaagaatcttcttcttagaggaccgtgccgcaatggactgtacccgttgccaacatcttcattggccacatccaagcaagtccttggtgccatcaagcccacaatgtcaaggtggcatagccgtctaggtcatccttctctagctattgttcagaaagttgttagtagcaataatctcccatgtttaggagatgtcaatgagtcaggagtctgtaatgcctgccaacaggccaagagtcaccagctaccctatccaaaatcctttagtgtgtcaaataatcctctagaacttgtgttttcagatgtgtggggacctgctcctacttctgttgggggcagaaagtactatgtcagttttatagatgatttcagtaaatttacttggatctatttgcttaagagtaaagctgaagtttttcttaagtttcaagaatttcaacaacgagttgagcgccttttcaatcgcaaaatcatctctatgcaaactgactgggggggagagtatgaaaaattgcactctttcttcactaagattggtatctcacatcatgtttcatgtccctatgcacatcaacagaatggttctgcagaacgcaaacatagacacatagtagaggttgggttggctctcctttctcatgcttcaatgcctctgaaattttgggatgaggcgttcctagctgctgcctatctcataaatcgcacacctagtaagcagggggagcagtcgcatgcagccacgtcgccaagcagccatcatgatggggggagcgacagccctctgaccggcggatcgtctgcacccgacacagccgtggtcgagcccgcacggccggtcactcatctccagcgaggtataagaaaacagaaggtttatactgatggtactgtaaggtatggcatgctgacaactacaggagaacctcaaaacctagatgaagctttgactgataaaaactggaaagatgctatggatgctgagtttactgctttattagaaaataaaacttggcacctaattccacctagtcatggtaaaaatgttatagactgcaagtgggtctacaaaattaagagaaagtctgatggtagtctggatagatataaagctcgtctagtagccaaggggtttaaacaacgctatggtattgattatgaggacactttcagtcctgtggttaaagcagctactatcagaactgtcttgtctattgctgtttccaggggatggtgccttcgccaactagatgtgcaaaatgcttttctgcatggataccttgaagaagagatagaaggcagtatctgctttgctggcagatttgagtcaagaatttgcactcaaagatttgggggatctgcattacttccttggaatagagaaaaactgtcagctcatagtggaactgctctaggagaaacagatgcaactagatacagaagtatagttggagctcttcagtatctgactttgactaggcctgatatttcatttgcagtaaataaggtctgtcagtttttacatagtccaactatagatcattggatggcagtgaagaggatattaagatatgtgaaattctcagttgatcttggtcttaagataagtcgttcatcatccactcttgttagtgcttttttagatgctgattgggcaggatcaattgatgacagaagatcaactggaggttttgctgtgtttctggggtctaatttggtttcctggagtgcaagaaaacaggctacagtatcaagatcaagtacagaagctgaatacaaagctgttgcaaatgcaacggcagaggtaatgtgggttcaggctctacttaaagagctaggaataaattcacctgaaactgcatgtatgtggtgtgataatctgggagctacttacttggctgttaatcctgtgtttcatgcacgaactaaacatattgagatagactatcattttgtcagagagagggttgccagaaagcaattagaaatcaagtttatatcttcaggtgatcaagttgcagatgggtttactaaacctctcggtgctccacaacttaggaatttcagatacaatcttaacttagataagttatga

SEQ ID NO: 94251 - DNA, 4338 bp, Oryza sativa
  Clone ID: PAT_MRT4530_92558C.1
atggcgagttcctccaattccaccaccaatccactctccggccaagttgtcccagagaagctcacaaggaataatttccttctatggaagacacagatccttcccatcattcgcggtgcccgcatggaggggtacctcaccggcgcgactcgcgctccgtcggcagcgatcgacgtcaaggaaggcgacaaggtcatcaccaagatcaatccagcctatgaggaatgggttgtcgtcgatcaacaggtgcttggatttctccttgcatctgtatcaaaggacatactcacccaagtcgtcaatctggaaacggcggctgcgacatggagagtgatcacaacgatgctctcctcacaatcccgtgcgcgtgctctgaacacgcagcttgcactgttgacgacccgcaagggcgatctcagtgtcacggagtacatcggcaagatgaagacgctagctgacgagatgtcatccgccggcaagcccctcgatgacgaggagatgatgtcgtacatcctcgccggactcgacgacgattatgagcccgtcgtctccactcttgtcggcaaggcggaggctgtaccagtcgccgaaatctacacccagctcctgagttttgagagccgagccaagctgcgacagcaggctaatggttcctccgtcaacagcgcacgacgaggaggcaagggaggcggcggcggcttcagcaacaacgtcaacaccggcaacaccagcacgtttcgcggccgtggcggtggtcgcggcgatcgcggaggccgggggcgaggaaacggtggcggcgcgcgcttctccaacaaaccgcgccccacctgtcagctatgtggcaagattggacatgtggtggcagactgctggtacaggtatgatgaaaatttcattccagattcaaaaacagcagctgcggcttcctatggtgtagatacaaattggtacatggacaccagagccactgaccacatcacaggagaactggacaagctgacaacccatgagaagtacaacggcaaagaacagattcacacggcaagcggtgcaggtatggacattaagcatattggtcatttctattatttatacccccatacgcaaaaatcaggtgaaaaaaatcccttatggggcctaaaactaaaaaaaaaccttatctctgctcatcgtttagccgttgataatcatgcctttgttgaagttcatcctcgtttctttgccattaaggatcaggtcacgaagaatcttcttcttagaggaccgtgccgcaatggactgtacccgttgccaacatcttcattcgccacatccaagcaagtccttggagccatcaagcccacaatgtcaaggtggcatagccgtctaggtcatccttctctagctattgttcaaaaagttgttagtaggaataatctcccatgtttaggagatgtcaatgagtcaggagtctgtaatgcctgtcaacaggccaagagtcaccagctaccctatccaaaatcctttagtgtgtcaaataatcctctagaacttgtgttttcagatgtgtggggacctgctcctacttctattgggggcagaaagtactatgtcagttttatagatgatttcagtaaatttacttggatctatttgcttaagagtaaagctgaagtttttcttaagtttcaagaatttcaacaacgagttgagcgccttttcaatcgcaaaatcatctctatgcaaactgactgggggggagagtatgaaaaattgcactctttcttcactaagattggtatctcacatcatgtttcatgtccctatgcacatcaacagaatggttctgcagaacgcaaacatagacacatagtagaggttgggttggctctcctttctcatgcttcaatgcctctgaaattttgggatgaggcgttcctagctgctgcctatctcataaaccgcacacctagtaaggtcattcagtatactactcctttagagcgcctccttgatcaaaagcctaactattctgctcttagaacctttggttgtgcttgttggcccaatctccgtccttacaacaaacacaaacttcagtttcgctccaaacaatgcgcttttcttgggtatagcaacatccacaaaggttttcagtgtcttgatatatcaactggcagagtttacatctctagagatgttgtatttgatgaaaatatttttccctttgaaaggttacatgcaaacgctggagcaaggctgagatccgaaattcttttgcttccttcctccttatatcaaaatattgcaactaatggggttgaacataatgaccgcatgcctaatgtccctgagcaatctaatgtgcctgttgagcatgtgacagatcaggagatacaattcggagaaggttcagaaaatacagcacaaaatgatcacagttctgcagcaaatattgaaggagatgcaccggatctggatgccacagaagatcctgaggacatttttcctggcagcagcgatcccgagggaggatttcagccctcacctgtgcacacgcctgcactgtcttttcccgacgatgaagaaatcggcgaaaccggtggcttgacgtctctgcagcagggggagcagtcgcatgcagccacgtcgtcaagcagccatcatgatggggggagcggcagccctctgaccggcggatcgtctgcacccgacacagccgtggctgagcccgcacggccggtcactcgtcttcagcgaggtataagaaaacagaaggtttataccgatggtactgtaaggtatggcatgctgacaactacaggagaacctcaaaacctagatgaagctttgactgataaaaactggaaagatgctatggatgctgagtttactgctttattagaaaataaaacttggcacctaattccacctagtcatggtaaaaatgttatagactgcaagtgggtctacaaaattaagagaaagtctgatggtagtctggatagatataaagctcgtctagtagccaaggggtttaaacaacgctatggtattgattatgaggacactttcagtcctgtggttaaagcagctactatcagaactgtcttgtctattgctgtttccaggggatggtgccttcgccaactagatgtgcaaaatgcttttctgcatggataccttgaagaagaggtatatatgaggcaacctcctggttatgaaaataagagtaagcccaactacatttgcaagttagacaaagcactttatgggttgaagcaagctcctcgagcttggtattcaaggttaagtactaagttgattagccttggcttccaagcttccaaagctgatacatcattgttcttttataacaaaggaggtgttacaatttttgtacttatctatgttgatgatataattgtggctagttctagacagaaggcagtatctgctttgctggcagatttgagtcaagaatttgcactcaaagatttgggggatctgcattacttccttggaatagaggtcagtacggcaggtgatgatattttactgaaacaagaaaaatatgcctatgatttgttgaaaagagcaagtatgctagattgtaaacctgttagtactcctctgtctgtatcagaaaaactgtcagctcatagtggaactgctctaggagaaacagatgcaactagatatagaagtatagttggagctcttcagtatctgactttgactaggcctgatatttcatttgcagtaaataaggtctgtcagtttttacatagtccaactatagatcattggatggcagtgaagaggattttaagatatgtgaaattctcagttgatcttggtcttaagataagtcgttcatcatccactcttgttagtgctttttcagatgctgattgggcaggatcaattgatgacagaagatcaactggaggttttgctgtgtttctggggtcgaatttggtttcctggagtgcaagaaaacaggctacagtatcaagatcaagtacagaagctgaatacaaagctgttgcaaatgcaacggcagaggtaatgtgggttcaggctctacttaaagagctaggaatagattcacctgaaactgcatgtatgtggtgtgataatctgggagctacttacttggctgttaatcctgtgtttcatgcacgaactaaacatattgagatagactatcattttgtcagagaaagggttgccagaaagcaattagaaatcaagtttatatcttcaggtgatcaagttacagatgggtttactaaacctctcggtgctccacaacttaggaatttcagatacaatcttaacttagataagttatga

SEQ ID NO: 94252 - DNA, 2116 bp, Oryza sativa
  Clone ID: PAT_MRT4530_92559C.1
atgcggggcgcggcgcggctactcctgccactggtggtgctgctgctgcacgcagcacgcggatcagcgggatcgacgggcggcggaggcaacggcagctgcacgcagagctgcggccgcatgagggtgccgtacccgttcggcttctccagaggctgcacggttcagctcggctgcgacgacgcctccggcaccgcgtggctcggcgggacgcgcgggctgggcctgctcgtgagcaacgtgacgccgcgcgccatcgtcctcaccctgccccccaactgctcccgcccgctcaacgagtccctggatgcgctcttcaccgacaactacgcgcccaccgcgcagaacgccctggtcgtgagctcgtgcgacccgcaggccgccgcccgcctcagcaactgcagcatcccacccgaggcctacctcgagaagagctgcaattccatccgctgcgtcttaccttctaccaaagccaacgtcgacgggacaaacgtcacagaccctttcttgaatagaagcgagatgcggcggctcggctcggactgccgcgggctcgtgtcggcgtcgatctattcgaacacggcggggccggcgctgcagctgaccgcgctggagctggattggtgggtgcaggggcggtgcggctgctcgagccacgccatctgcgacgggttcaccccgccgtctacgcagaaggaggcgttccggtgcgagtgccaggaggggttcgagggcgacggctacaccgccggcgccggttgccggagagttccaaagtgtaatccttcaaaatacctatcaggatcatgtggcaagttggttcagatcggccttcttgtggcaggagtcttttttggagccatggtgatgggcatcacctgcttggtgtaccacctgctgcggcgccggtcggcggccctccggagccagaagagcacgaagcggctgctgtcggaggcgtcctgcacggtgcccttctacacgtaccgcgagatcgatcgcgccaccaacggcttcgccgaggaccagcgccttggcacgggcgcgtacggcacggtgtacgcggggcggctgagcaacaaccgcctcgtggccgtgaagcggatcaagcagcgcgacaacgccgggctggaccgcgtgatgaacgaggtgaagctcgtgtcgtcggtgagccaccgcaacctcgtccgcctcctcggctgctgcatcgagcacgggcagcagatcctcgtctacgagttcatgcccaacggcacgctggcgcagcacctgcagcgggagcgcggcccggccgtgccgtggacggtccgcctccgcatcgccgtcgagacggccaaggccatcgcgtacctgcactcggaggtgcacccgcccatctaccaccgcgacatcaagtccagcaacatcctgctcgaccacgagtacaactccaaggtcgccgacttcgggctgtcgcggatgggcatgacgtccgtcgactcgtcgcacatctccaccgcgccgcagggcacgccggggtacgtcgaccctcagtaccaccagaacttccacctctcggacaagagcgacgtgtacagcttcggcgtcgtgctcgtcgagatcatcacggccatgaaggccgtcgacttcagccgggttggcagcgaggtcaacctggcgcagctggccgtcgacaggatcgggaaaggcagcctcgacgacatcgtcgacccctacctagacccgcacagggacgcctggactctcacgtccatccacaaggtggccgagctggcgtttcggtgcctggcgttccacagcgagatgagaccttccatggctgaggtcgccgacgagctggaacagattcaggtcagcgggtgggcgccgtccacggatgacgccacattcatgtcaacgacgtcctcgctttgctcgtcggctccatcacgttgcacggacaagtcttgggggaccgctaagagcaagaggcaggccgcggcaaacgcagtggtaaagcaagagacgacgaagtgtgcagtcgccgactcccccgtgtccgtgcaggagagatggttcagcgataggagctccccttcctcaaatagcctgctgaggaatagctccctgaactaag

SEQ ID NO: 94253 - DNA, 414 bp, Oryza sativa
  Clone ID: PAT_MRT4530_9255C.1
atgccattgccgaggctgctgccgtcggccaagcttccgaaaacaacggcggcatcgattgggtactcggggaggctgctgccgctggctagaccacttttccaactagatcccccaagtgggcttggggaggttgccaccaatgagctgaggcatcgtctggatcacctctctggccaaatccgccacgtgggcttgagaagattgttgtcaccgcgtgggctcaaggaagctgccaccgccgtgtgggctcagggagctcctcgactgccgccactgcgtgggctcggtgtagccaaaggacgagaccggaaggggaagaggataagggaaagagaggaggatgttcgccctgccgctgctccacccagtgccgtcaatgctagggccaccctgctagccaccgccacttag

SEQ ID NO: 94254 - DNA, 412 bp, Oryza sativa
  Clone ID: PAT_MRT4530_92560C.1
atggaaaagacaaggactactcggattgtatccatattagttttcctagttttacttgtacaaggggacacctatgagtataaatacaaaacaccttatgaggagagaggacacggacaacatagacaccacaaagccacaagccaatacaagcatacatacgccaagacaagctgctagatatcgacatcagagataagcctaggaaaaccccatatggtacctacgggaaccaaagagaggaatctagtgctgtctctgatctcgccgggcaagaactcgaggaggaagactaccctgttgtcgactacgggatggtttcatggccgccatgtcgacaatagatagataggctaccccaaacattgtattggtgtgattatggtgaataagagcaatgaccggcttcggc

SEQ ID NO: 94255 - DNA, 355 bp, Oryza sativa
  unsure (1)..(355): unsure at all n locations
  Clone ID: PAT_MRT4530_92561C.1
ccacgcgtccgctccgggagcgggagcggacgctgtcgcgggcgtccacacatcctccctaactgccggaacgacctcgccgccgcagacgacgctgcgggcgaactctcctctgccctcgctgccgcgggcgtccacgcctcctccctcgccaccgcggttgaccacgccgacgtcgacggcgacggcaacggcgagagcggtggcggctcgctcgggagaggccgggacttgtggatccagccgaggcgagcgacggcgagagcggcgatggctggctcgggagcggcaaagcggnggcggcggcggatctggtgtcgggccctgcnatggcgtggatctggctcgtccggcg

SEQ ID NO: 94256 - DNA, 320 bp, Oryza sativa
  Clone ID: PAT_MRT4530_92562C.1
gttctagagaggttcagggttcttgcctggtgccttggcaatgcttgattactgctgctatcctatgatctgtccgtgtgggcttctatctatcagtttgtgtgtctggttttgaaaaacatttgcttttcgattatgcagcgaaagctacaagcaaaccctgcataatcgaaaagcaaatgtttttcgattatgcagggtttgcttgtagctttcgctgctggtgacctgtgttgtttatgtgaaccttctttgtggcatctttaatatccaagttcgtggtttgtcgtaaaaaaaaaaaaaaaaaaaaaaaaaaaaaa

SEQ ID NO: 94257 - DNA, 406 bp, Oryza sativa
  Clone ID: PAT_MRT4530_92563C.1
gggaggatcacaacatgaacgggatcagttgttcatccatttttttgtgggaagtaaacaaattcagctggagcatacaacatagttctgaatttttttacccgtcgtacttttttttccccaaaattaagcattgtaagcccgtcctaaacacatttttacagtaggtaggctcgggttaaaaatgtcccagtggatagcaaacattctttttatgctacaaagctcgcctatgtcactttttcatccttttcttggcaaacatttgtgggctaaaaaataaacaaaaaaaaccctgcttttttgttacctctaatttaaacaaatctttggatcacctttaaatcgaacaattttttaggccccccctggataacaattatttaggcgaaacttataaaaattt

SEQ ID NO: 94258 - DNA, 662 bp, Oryza sativa
  Clone ID: PAT_MRT4530_92564C.1
acgacaaaccacgaacttggatattaaagatgccacaaagaaggctcacataaacaacacaggtcacagcagcgaaagctacaagcaaaccctgcataatcgaaaagcaaatggttttcaaaaccagacacacaaactgatagatagaagcccacacggacagatcataggatagcagcagtaatcaagcattgccaaggcaccaggcaagaaccctgaacctctctagtactcgtcaccctatcaccctcgtcaccatcgtcgaactcggagccgacctcctcgtagtccttctccagcgcggcgaggtcctcgcgggcctcggagaactccccctcctccatgccctcgccgacgtaccagtggacgaaggcgcgcttggagtacatgaggtcgaacttgatgtcgatgcgggaaaacacctccactacgctggtggagttggagatcatgcacacggccctctgcaccttggccaggtctccccccgggacgacgctgggcggctggtagttgatgccgcacttgaaccccgtggggcaccagtccacgaactggatggtgcgcttcgtcttgatggtggccaccgcggcgttcacgtccttggggaccacgtcgccgcggtacatcaggcagcacgccatgtacttgccgtggcgcgg

SEQ ID NO: 94259 - DNA, 1056 bp, Oryza sativa
  Clone ID: PAT_MRT4530_92565C.1
atggtggcgactctgggctccgacgaggtcccgaccaccggcgaggggtggctggagttgcggcagcggcggcgacgcaagaagagagcggtgcggcggccgcggagagaggagggagagggcggcgggcgttacaatcaccatcaaaatcaaagaaatcaaaccatgctcgggtggatcccccactctacccagttcagtatcacggagggggacaacttcgaggctgagaagtataccttccaggaggtccgtccgtgcaaggaggagcacagccacggccagcggagacggatcgacgaggcggcacaccttcccgctgccccggagaagataccaaccgaaccaaagcaacacccgactgagaagcactcaaggaggaagaggaggaggcgaggaagagggcttgccacccactacaactgctgctcggttgttgctgcggctgcgaccaccatcggatgcggcgaagccggtgtttgggatgagagagggcgaagcgctcacaccgctgctagttgcgtggtggagtttcacgagggatttatggaaaaagtacacccaaggcgaggcgggagagaggagggcagcagcgccgcgacggtggccggcggcgcgacggaggccggcgcccggcggcggaagctgcagctgggaaacacggcaatgagggagaaggggagcacggcggcagcttcgattcattccgactccttcccatcgccaccttttccttttcctccaaatccaaccccccttctcccccttctccggcgccgcggcggcggcgacgacaccggagggcggaggcgccgacgctccctcggctcgccaaaagtggtcaacctcgccatggtgctcgtcctctccgccgccgacctccgcgctatcagcgtctctgcccgtagccgccaacgtcctacccagctgcctagtgcctacccagacgagaagaccgccacgtcgaacaaaactgggttgaaaaccaccaagggacctcgggtgaccggatttattcccctggtagtgggcttccccttcagggccgggaaatag

SEQ ID NO: 94260 - DNA, 324 bp, Oryza sativa
  Clone ID: PAT_MRT4530_92566C.1
ccggagtacgcatccaaaaagctcatgagttcgcagtcagctgtcgagtcgacaagctggtcgatccgcggcagggggaaatcatctttcgggcacaccttgttgagccttgagcagcttctacacttcgggctttgctgcctcttggtgatcggtggacattttgtgcagcttctgttcccttggcttggcatccggcttgaccgccagatgatgcatgatgaagttcgtcgaaacacctcccacttcgtcggggctccaggtgaagatgtcaatgttcttcttgagcacctccaggatattcttggcttcctcttcgcctag

SEQ ID NO: 94261 - DNA, 415 bp, Oryza sativa
  Clone ID: PAT_MRT4530_92567C.1
cttttatagacgtacaccaactacagtcattgttcgtgaatcacatgttgagaggatggggagcatacaagacgttgcatatgaaattctgaatgttctagaattcaacagtacaagaaagcgtcaatcagtggtctgccgtttcccaaatggaaggcttgttctctattgcaagggcgctgacaatgtcgtttatgatttattagctgatggcaataatgacattaaaaagatcagcagagaacatctagaacaatttggctctgctggcttgcgcacactttgcctcgcttatcgagatctcagcagggagcaatatgaaagctggaatgagaagtttattcaagctaaatcttctttacgtgatcgtgataagaagcttgatgaggtggctgagttgattgaaaaagacctt

SEQ ID NO: 94262 - DNA, 1473 bp, Oryza sativa
  Clone ID: PAT_MRT4530_92568C.1
atgaagagcccaaattgttactttgagggtgtcgtggagggttcaaatttctacaccaaggacactgtagatgatctcgatggcaagttaggacaaagttttatgtcggccgatgatttggaagaaattgatataggcccaggggatagaccgaggccaacattcatcgaagaagatatccataaaactgcattctggtgtcctggtgcaatcggcttgtatgagtgggttgtgatgaccttcggttcaaaaagtgttggagctacatatcagagagccatgaattatatattgcatgatctgatcggcttgttggtcgaagtttatattgatgatgtggttgtcaagtcaaaagaggaggcttcaagatgcagagacaaggcgaactcacagggaaaatcgccaacaaggagccgcaaactctcgagcacctgcttcgcatcattgatgggtacgcaagaggcaaagaggattccaagcgacggcaagcaatccaagccgagtacgataaagcctctatcgctgctgcccaagcccaagttcaagcgcagaaatgactgcacgggcaaggctgtgatggctgtcaaagaggtccaagccctccgcaaagagttcgacgctcagcaagcaggcagtcatcagcacctattctcaagaaagtcaggaaggacttgtattgcgcataccacgggtgatcctcgcacaccaccgagcaatgccgaaacattcggcagcatggcaatgctcaagacccaaggccgcaacaaggggctgctgtcgaagcacctcacgaagccgctcaagaacaagcacccccagccgaacagtgccacgacgtccagcgcaaaggctccgaggtacttgaaccagcaaatctctttcgggcctgaggacgccgaaggggtgctgttcccacatcaagaccccttggtgatctcggccgaggtagctggcttcgaagtccggcgaatcctggttgacgggggaagctcggccgatgtcatctttgccgaagcatacgccaagatggggttgccaaccctagccctcacccaggcaccggcctcacttcgtggttttggcggcgaagcagttcaagtcttgggccaagtacaactggtggtagctttcggcacaagtgagaacaggcgcaaagagcaaatactgttcgatgccgtcgacatcccatataactacaatgccatcttctgccgcacaaccttgaacaagttcgatgccatctcccaccacaattatctcaagctcaagatgccggatcgacgacgccgatcccacaaagcttgtcttgctgggggcgatctgggcaaagaggaagccgaaaacatccttgaggtgctcaagaagaacattgacatcttcgcctggagccccgacgaagtaggaggtgttttgacggacctcatcatgcaccatctggcggtcaagccggatgacaagccaaggaaacagtag

SEQ ID NO: 94263 - DNA, 1200 bp, Oryza sativa
  Clone ID: PAT_MRT4530_92569C.1
atggctatcgaagaggtccaagccctccgcaaggagttcgacgctcagcaagcagtcagcaatcagcagcctgttcgcaagaagcgtggcaacgctcaagacccaaggctgcagcaaggggcagctgtcgaagcacctcgcgaagccgcccaagaacaagcacccccagtcgaacagcgccaggacatccagctcggagtaattcaagtgattacaagggccgatccaccagttcaacagtcgaagcggcagaagaagatgcagctgcgaacggtgcacaacatcaccgcggcaggccaaggggctctgagagaagttcaagttttgggccaagtacaactggtggtagctttcggcacaagtgaaaacaggcgcgtagagcaaatactgttcgatgtcgtcgacatcccatacaactacaatgccatcttcggccgcgcaatcttgaacaagttcgaagccatctcccaccacaactacctcaagctcaagatgccgggcccaactggcgtgatcgtcgtcaaggggcttcaaccttcgaccgcatcaaagggcgatttggccgcaataaatagcgaagaggaagccaagaatatcctggaggtgctcaagaagaacattgacatcttcacctggagccccgacgaagtgggagacctcaacaaggtgtgcccgaaagatgatttccccctgccgcggatcgaccagcttgtcgactcgacagctgactgcgaactcatgagctttttggatgcgtactccggctatcaccggatccacatgaatccggccgacatcccaagacagccttcatcacgctcttcgccggtggcggtcagtgcagctctcgttcaagagacggagccaggccagaaaccagtgtatttcatctccgaagcgttacaaggggcgaagacaagatacatcgaaatggagaagattgcctacgccctagtgatggcttcgcgaaagcttaagcactactttcaggcccgcaaagttactgtgccatcgcagtatcctttgggcgaagtgctacggggcaaagaaatcactggccgactcagcaagtgggcggcggaattatcccccttcgacctacattttgtcgcccgcaccgccataaagtcccaagtcctagctgacttcgtggccgaatggacactggcattcgcccctgaacccgagcccgtcgaatag

SEQ ID NO: 94264 - DNA, 747 bp, Oryza sativa
  Clone ID: PAT_MRT4530_9256C.1
atgacaaaagacgagactctactagtcttcactcttgtggtttcctcggtttctgttttcttattcgggatcttgcttttcatggttctcatctctgcaactcgcgattttcgcgagagaaccaaatccaagttggtgaagatcatgatttgggctggcatagtagtgattacctttgcaattgcggttcgaatctatccgatctttatctttttgctcaaagaacgaataaaaccccttgtcgaagccctttatgataagcttccctggatctgggaagtttctctttcacggtattgggatcgtttgatcgatttccttgatcgctacttatgggcgtgcgctcaaaggatacaaacagggattcgcaaacaaaaaggggaattcgtagtcactttttcctgtcgcgtaaaaaaaaggctttacgcgagagcaatagaggttgggatacatctatctcttctgagcaacctcttttggattcttaagaccacccttgcagtaggataccgtctgctttgggttctttattatattatctccttcgagggatttttaggatcgttcaggctatatttagtctattttggcttttactgtctccttttctcagggaagtggttaaggacctcagaagatagaggagagcgccaggcgcagatttccggaatacttctacggggaatgctcattgaatgcgcattctccgtattatgccttgaagaggactcgaacctccacgctctt

SEQ ID NO: 94265 - DNA, 280 bp, Oryza sativa
  Clone ID: PAT_MRT4530_92570C.1
aatagttgcgctgctatgtactgtccagtctttcgactaatgaggataaagcctctctttatccgtgggaaaaaaaaaaaaagaaaaaggaaaaaaaacctgacggaaaggaacaaaaaaaaaaggaaaaaataagaacgaggggcggaggatgcaagagatccaaggttagggacgggtgacaactaaggaaaagatattggacagtggcgccaaaatgaaataaagtgggacgcgtttaacaacgttgacacagggaaaaccctggggataacaaact

SEQ ID NO: 94266 - DNA, 5637 bp, Oryza sativa
  Clone ID: PAT_MRT4530_92571C.1
ttactgctttccaaccactgttgagtaaccacgtccttcgacgtatgcagttgtcatttcgacaatagctggcgccgacgttggggacctccgagcgaaaccactgagagtaaatggcaccgaagagggtcgtgaaggagaaggttgcaaagcgaatggggagtgaagcaggagaggagatggccgccgaagagggagccgagccttcggcgccatcgttgaaactgggggagcaccgtcggcttcggcacctgcgccgcaaccgccaccttcagctcttgccacttcgtcagggctggtgccaaacacggtcgacgcggcgaaggcagctacggcagcaagggcgctccagatcagggcagagatcctttcgacgagccagctgctggtgccccaagccgcttcgtcacagctggcaacagcttcgaccgcgcttgccgctacgcaagtcaaccccagcctcgaagcacaagccgaagccgacatggaggccatgcgccaaaacatgacccgactccaagacatgcttcgccagatgcaagaacaacatcaagcgtacgagacagcacggcaagccaaggtcacttcggccccaatcctccggtattcggcaggctacattccaccccaagcctaaccgcaagcatcaactcaggcccttccgccacaagccatacaagcgccagtgtacttcgctgggcagccttcggccgcaacggtacacccgacccctcatgtacaaccgcaggttcggccggtcgttgccaaagtacaccctggccaaatgtcacaagcaatggcggaaggggcctcggctttgcaggcacagcttcaagctttcctttagcaactcaaccaaccccacaatatctcaagtacaggctcttcggcccgaccagaggggaacacaagtcaagttcgactccagcaatgctgctcaagcaccaaccatttaaccacaggcaccgacaccaagctttggaacaaaccaggcgtcgaaccaggccgccatggcttggacccagccttcgttcgatctatccatggcggcaccccaggcatcgctgttcgtggccggagtgccgaacactgtggtgcaaccacacatgcaagccatgacttcacccttcgccacgccatatccacagacaaacgggccttcggcacttatgaggagccgaagatgcagcagcatctactcggcattcgccagaggccgggggaatcaataagagaatacatgcgtcgtttctcgcaagcccgatgccaagttcaagatataaccgaagcgtctgtcatcaacgccgcttcggccgggctgctcggaggtgaactcacaaggaaaatcaccaacaaggagccgcagacactcgagcacctgcttcgcatcatcgacgggtacgcaagaggcgaagaggattccaagcgacggcaagcaatctaagccgagtacgataaagcctccatcaccacagcccaagcccaagtacaagcacaggtcgccgaaccggctcctctcaccgttcgccaacctcagctggcaaaccaaggacagccgccaaggccaagtcaagctcccatgacttggaggaaattcagaaatgaccgcacgggcaaggctgtgatggctatcgaagaggtccaagccctccgcaaggagttcgacgctcagcaagcagtcagcaatcagcagcctgttcgcaagaaggtcaggaaggacctctattgcgcattccacgggcgatcctcgcacactaccgagtaatgctgaaacatccggcagcgtggcaacgctcaagacccaaggctgcagcaaggggcagctgtcgaagcacctcgcgaagccgcccaagaacaagcacccccagtcgaacagcgccaggacatccagctcggagtaattcaagtgattacaagggccgatccaccagttcaacagtcgaagcggcagaagaagatgcagctgcgaacggtgcacaacatcaccgcggcaggccaaggggctctgaggtacttgaactagcatatctcttttgggccagaagacgccgaaggggtgctattcccacatcaagaccccttggtgatctcggtcgaagtagctggcttcgaagttcggcgaattttggttgacgggggaagctcgaccgatgtcatctttgctgaagcatatgccaaaatggggttgccaaccctagccctcacctaggcaccagcctcgcttcgtggttttggcggtagagaagttcaagttttgggccaagtacaactggtggtagctttcggcacaagtgaaaacaggcgcgtagagcaaatactgttcgatgtcgtcgacatcccatacaactacaatgccatcttcggccgcgcaatcttgaacaagttcgaagccatctcccaccacaactacctcaagctcaagatgccgggcccaactggcgtgatcgtcgtcaaggggcttcaaccttcgaccgcatcaaagggcgatttggccgcaataaataggtagtgcacaatgtcgaggccgaaccacatgaccatgctaaacgaatgccgaagtccgcccctcatggcaaggtgatcaagatgcaagtcgatgacgccgatcccacgaatttttccagctagggggtgatctaggcgaagaggaagccaagaatatcctggaggtgctcaagaagaacattgacatcttcacctggagccccgacgaagtgggaggtgtttcgacgaacttcatcatgcatcatctggcggtcaagccggatgccaagccaagggaacagaagctgcacaaaatgtccaccgatcaccaagaggcagcaaagcccgaagtgtagaagctgctcaaggctggggtgatctaagagatcgaccacccagagtggttggcgaacccatttttggtgaggaagtcaaatggcaagtggcgcatgtgcattgacttcacagacctcaacaaggtgtgcccgaaagatgatttccccctgccgcggatcgaccagcttgtcgactcgacagctgactgcgaactcatgagctttttggatgcgtactccggctatcaccggatccacatgaatccggccgacatcccaagacagccttcatcacgctgttcgacacgttctgccacctcagaatgcctttcagcctgaggaacgctggagcaacattcgccaggttggtgtataaggtcgtttacaaacagttggggcgaaatgtggaggcctatgttgacgatatcatcgtaacaagccgcaaggctttcgaccatgcgtctgacttgtaggagaccttcgacaacttgcgtgcggctggtatgaaacaaaaccctgagaagtgtgttttcggtgttcgcgcgggcaagctgttgggctttcttgtttctgaaaggggtatcgaggcgaaccccgagaaaatcgatgccattcagcaaatgaagcctctgtcgagcgtacgcgaagtacaaaagctcacaggctgaattgcggcgcttagtcgatttctctcgaaggcagccgaaagaggtttgcccttcttcgagacccttcgaggcacgggaaaatttagctggacacccgaatgccaagtagcgttcgactagctaaagcagtatctgcaaagcccacctgccctggtcagtccagcgccgagaagcgaactgctgctttatctagcagcttcgccggtggcggtcagtgcagctctcgttcaagagacggagccaggccagaaaccagtgtatttcatctccgaagcgttacaaggggcgaagacaagatacatcgaaatggagaagattgcctacgccctagtgatggcttcgcgaaagcttaagcactactttcaggcccgcaaagttactgtgccatcgcagtatcctttgggcgaagtgctacggggcaaagaaatcactggccgactcagcaagtgggcggcggaattatcccccttcgacctacattttgtcgcccgcaccgccataaagtcccaagtcctagctgacttcgtggccgaatggacactgttcgacacgaccaacaacatggcagaatacgaagctgtactattaggcctaagaaaggcgaaagcatttggggttcggcgcttgctcatccgaacggactccaagctggtggcaagtcatgttgacaagtccttcgaggcaaaagaagaaggaatgaagagatatctggaagcagttcggtctatggaaaagtgcttcaccggcataacggtcgaacacttacctagaggccagaatgaggaagcagataccctggcaaaatctgcagtctgtggaggcccgcattcatcaggcatcttttttgaagtcttgtacgcaccaagtgtgcccacagaaagcctggacatcatggcaatcgaccaggcaaagctgggcgaagacccagaagattggcgaaccccattcgtcaagtacctcaagaattgctagctcccacaagatgaagcagaagcgaagcgtttacagctcagagccacaaaatacaagctggtctcagggcagctgtatcgctccggggtgctccaacccttgcttcgctgcatctcctttgccgaaggagaagaaatggcgaaagaaatacaccaagggctgtgtggtgcacaccaggccacaaggacggttgcctctaaagtgtttcgcctgggggtgtattggccaaccgtgctgaaagtttgtgttgagcaaaccaagaggtgcggaagctgtcagcggcatagccgaagccaaactgcaccccaatacgagctgcaacctatcgcgccagtctggcctttcgctaggtgggggatagacattattggcccttttcctatggcacgaaatggatacaagtttgcaattgtagccgttaaatacttctcctgttggatcaaggccgaaccactcggcgcgatcactttggcaacagtatagaagtttgtatggaaaaacattgtttgccgttttggagtgccaaaagagttcatcaccgacaacggcaaacaattcgattctgacaagttcagagagatgtgcgaagggttaaacctggaaatcaggttcgcttcggtcgcgcacccacagtcaaatggggcggccaaacgaacaaatggtaagatccttgaggcgctaaagaaaaggcttgagggggcagcgaagggtaaatggccagacgaaatgctatctgttctctgggcccttcgaacgacccccacaaggccaaccaagtttagcctgttcatgcttctctatggcgatgaagcaatgaccccaactgagctaggggctaattcaccaaggtgatgttctctggaggcgaagatgggcgcgaggtgtcgctcgaactcctagagggggtgagagtcgaagcattggaacacatgcgcaaatacgccacaagcacttcggcaacttacaacaaaaaggttcgaccgacagagctattgcttagccatctcgtcctaaggaagaaggcgaacccggtggcggtcgggaagcttgaattgaagtaggaagggccatacctcatcaaacataggtccaggataggctcctttcgcctagcaacgctggaaggcaaagagttcgaccattcctggaacgctgcttcccttaagcgtttctatgtc

SEQ ID NO: 94267 - DNA, 924 bp, Oryza sativa
  Clone ID: PAT_MRT4530_92572C.1
atggaggcggcactacctgaggacttgctggccaacgtccttggccgcctcccaccgtgcagcctcgccgtgtcacgctgtgtccgcaaggactggcgtgccctcatcgacaaccgacgcctccttcgtgctgacctcctccctctccgcctcgacgctttcttcttcaagggccagatcctcacgtctcacccctacttcttctcgtcacgctctacggcacgccggatcggtggccgcctcgacttcctcgacaccttcaatgacgaagatctacagatcatggatcactgcaatggcctgctcctgttcttcgagcggctcgccaaccctgccactcgccaatggatgcacctgcctaccttcccgatgtcgccatgcgtcacgctgggcttgcgcacgggcttctgcctcgtgttttgtgtccctttggttcccgaaaacatcttctatagaagcagcgataatttggaccccgacagcaacagcagcgttgatcaggagtcattagaatggccgttgtcatcgcggtgcacaacacacgtcttctcgtcgaggaaatggaggtgggaggagaggtcatttgtccgccaacaaggagtggagcctgccaatgagaccattgccgacctacaatttcatccccagcaattccaacgccgtgccttatatttgaagggagaaatttatgtgcaatgcaagaacaattctcttatgagaataaccctgtcaaatgataagtaccaaatgatcaaatcgccagtagagagcaaaattgatgatggcaacggcgtccttcagttgggaaaatcagagaaaggagtctactttgtgttgcttatgaagataataatttcccccaatttcaagtttggttgctcaataaatcttcatcatgtggtggtcaggttgagtgggcgttga

SEQ ID NO: 94268 - DNA, 560 bp, Oryza sativa
  Clone ID: PAT_MRT4530_92573C.1
cccgggctgcaggaattcggcacgaggcacagctgataatcagccataagagtgttcaaatcatcagattacaaatttaatttaaacagttttcccggttgtgtgctgtgctcgcatgcatctgttgttttgggccgactggttgtgcagacagaactcggcccaactaatggcccatttaagttcacatgggttattacacgaaactcaaagcccataatcatccaattcaaaggccctcgtttttcgcttatgcttataacttatcaactaaaatttgaattttcaatcttaaatttgaagctgattttgaggttttctcatcgaagtttatttttcaacctttgcttttagatcgctaagaacaagtatataaaagttttattcagaaattacttttcgtttgcaaaataacgatggctccaatgtactaacgcatggtttccttccaatgatggacggacagggcatgttcttgctgacgatgacggccgccgcggacgggctgcacccggcggagtgcggggtgggggagacgtgctcgaaggcgacgtcggggc

SEQ ID NO: 94269 - DNA, 454 bp, Oryza sativa
  Clone ID: PAT_MRT4530_92574C.1
cccacgcgtccgcccacgcgtccgcccacgcgtccggaagtggttgcgccgacgacgaggtgagcgggttgacggaggaggaggcagcgcgcgccggcttcgggtgtcgttgtccctgctcgccagttgctcctccagactgcagctagcgtgacgagaaacatcttcttgagacgatatcagaagtcgagtgcatgactgcgatttgctcggtcgtgcacatgtcgagcttgacgtgcgcttagtccgcacggagcgcgtcgcgcggcttgatcccacgtttttactttctgtactgaataaaaggaagaaaaaacagagaaaatgctggaacgtttctacgcagcgccaaaacacacctgagttcatcgtgttcttgtgttcattctctctcgcgttctctgctcgagtgactgtgggtgcaggttgtcgctgacctactgctgagcaaaaa

SEQ ID NO: 94270 - DNA, 423 bp, Oryza sativa
  Clone ID: PAT_MRT4530_92575C.1
gggcccaagggaagaggggcccaaaaccggggtttttgaaaaggtaaaattacaaacccggggggcaaaaagggggcaaaaaaacttacaggtttaaaaaaagggtttcaaccccccctaatttacagggggggcccaattaaaatccaatggggggggggccaaaaaaacggggcccaggtacaaatggggagggtccccacccaattttttggttgaacacccgggggttaaatatggcccttttttggggaatttttaattagaacccatttttttttttttttttgggaggcaatttaaacagggccccaagtttttttttaattttttattaaagggggaaaaaaaaaacccggccttgggggggccaaaatcccaatttttgggggaaggttcccccccggccgggaaaaaaaacaa

SEQ ID NO: 94271 - DNA, 668 bp, Oryza sativa
  Clone ID: PAT_MRT4530_92576C.1
gaggaagtggttgcgccgacgacgaggtgagcgggttgacggaggaggaggcagcgcgcgccggcttcgggtgtcgttgtccctgctcgccaggtgctcggtacaatgccccactgtgcgctttgtttcttcagaatattagtagaactctttgaaagaagttagaagttagtaccttgttctcttcggaatgtttgttttcctatgttcttagggtgcatggcatcatttgtgatgctgttagaaatggtcaaaccacttaaatcaccaattggcattggcacacttggaattaacttggaagtgatttgttcatgcatattgatatcagcgtctccatcgcctgcagttgctcctccagactgcagctagcgtgacgagaaacatcttcttgagacgatatcagaaaggttttctctacaaagcttcccttcgatcgtgtagccagcatctgtaggctatagctcgttagctgtaaaacttgtgctagctcgtttattggttctttcatttgtttcctgttagtcagtttctcctcccccagttttttagcttgttctcttctgttttccagtcgagtgcatgactgcgatttgctcggtcgtgcacatgtcgagcttgacgtgcgcttagtccgcacggagcgcgtcgcgcggcttgatcccacg

SEQ ID NO: 94272 - DNA, 324 bp, Oryza sativa
  Clone ID: PAT_MRT4530_92577C.1
atggtcggccgcggatttggagggcatctacacgtagaggacgacgagacgaacccaacggtactcaccacgacgacaaccgacgtcggacgacggccggcgacgaagggggcggcggcggcggctcggctcgaccgacgacggcgagctacggcggccggcggcgaagggggacgggcggccgggcttcctcactcctcggcgcacctcttggcggcggcggcaagcggcggcgacggcaggagcggcgcggcggcgcggctggcgtcggccggcggcggcaagcggactaagcggcgaggcagcgactctacggcgcactag

SEQ ID NO: 94273 - DNA, 260 bp, Oryza sativa
  Clone ID: PAT_MRT4530_92578C.1
ggatactctagcaaatcggaccgaacccgtggctggggacctatatctccaggttcgagacgacgcacacaacgacggagattccgtggaacacgatccaagcagacatggggaacccgcgctgagaaagagggccgccccggggagccagaacatcgctgcaaggcctgtccaccgccacctgggaggcgccgacgccaatttgtgttgtgcagaaggcggacctggctagctatgaggatcatgaagcactgagagga

SEQ ID NO: 94274 - DNA, 968 bp, Oryza sativa
  Clone ID: PAT_MRT4530_92579C.1
cgatcaaatagtagcagtagtaaattaagaaagcagaagagattattgattaagcaggcagcatgagcgggagcgacacctcgggcagcgtccacgtcgacgagcacgggcacgggcacggcaaggcttcatcgtcatacgacggtgctggtgccccggcgccggcgccggcgcctttccaggggcatcgcaaggctggcagtggtagcagcgacgtgccgttcctgctgcgcagcggcggcagcggtggcgacggcctccggcggtgcttgggtctgatagactttgtgctgagggtggctgccttcggccccacgctggccgccgccatctccatcggcacctccgacgagaggctctccgtcttcaccaactacttccagttccgcgccagattcgacgacttcccggctttcgagttcttcattgtggcgaatgcgatcgcggcggggtacatggtactgtcgctgcccttctccgccgccaccatcatgagctccaaggccaccggtgtcaagcttctgctgctcatctgcgacaccatcatggtgggtttactgacggcggcagcgtctgcggcggcggcgatggtgtacgtggcgcacgagggcaacctgcgcgccaactgggtgcccatatgcttgcaattccacggcttctgccagcgcaccagcggcgccgtcatcgcctccttcctcgccgtcttcgtcctcatggtcctcatcgtcatggccgccttcaccatgccccgccgcacccaccacaccgcctcataatacatcatattctagcttcttcatccgcgcgatccaatgacgagctccagcaagcagagcaaaagcgtcaagtttgatttgatttggtggtttgattgcatttctctgttccctccggtatgtgctgcatgtgtcctgttttagttccttccttgtgtgcattataccatatacgtgtatgtattcttctgc

SEQ ID NO: 94275 - DNA, 370 bp, Oryza sativa
  Clone ID: PAT_MRT4530_9257C.1
ctgaggaatcggcacgaggcgtcatcctactacatttctatcagctgtgggcacaggaagtttctcaaggattaattgtgttcatttctgtttgccctctgaatgatcgatgagatcctcaatgtagcagtgaaaaatcgttcatctaagtaaacccatatatattacgatatctgctataggttctccttgcagcattgctgctctctctgatgggtgaatgtcaacagatgtatctataatctatatatgtttcaggtactacgtacccatcaattcttctagctagttaatcaccttaattttgaaccattttgttactgcattgatctatataacgagcatacacttcattttgtcttttctcccc

SEQ ID NO: 94276 - DNA, 251 bp, Oryza sativa
  Clone ID: PAT_MRT4530_92580C.1
gcgattagaacccggcgccggcttttgttttttcggcaagtcgctgttccagaccttccgcaagttcttcaaaaagccgtccagtatgaaatgatgtcgctcttttctgaaaacaatatgaatgatttgagtcaataagtgatgtatttccagagagagaactatcagacaatggactttctggtaaaaaaaaaaaaaaaaaaaaaaaaaaaaaacaatgaaaaaaaaaaaaaaaaaaacccacgcttccg

SEQ ID NO: 94277 - DNA, 486 bp, Oryza sativa
  Clone ID: PAT_MRT4530_92581C.1
atggagctggcagcggacgccataggagtcgtatacagctcgggttccaccaccagactgctcatatccgacacgctgcgcacgccgggccgcaccatcaggaacttcgtcgtcggctgcagcctcatgtccgtgtaccagcagtcgtccggcctcaccggtttcagctgtggcgtcccatccgtgccatcccagctgggcctcactaaattcttctacttcctcctggctcgccggttcgacgacaatgccaccgccagcgacgagctgatcctcggcggcgcgggtggtaaagacgacaacgtcaggatgcagtacatcccgttggctcgaagcgcgagcacaaggccattgtgctctgtctactactacctggctctgattgccatcacggtgcgtaggaagagtgtgcagctaccgaagagggcgttcgtcgccgaggaactggaggaggctccattgtcgaggagaagggactcggcctga

SEQ ID NO: 94278 - DNA, 593 bp, Oryza sativa
  Clone ID: PAT_MRT4530_92582C.1
atggatggccaggatttgacagaggatttgtggtcaccggtgaggacttttgtttctggtaccagtatcgaagagaaaaagaagctgccgccgttggatgatgatggacggataggattggagctaatgccaccatctgcattagcttctccaatgcagaggatctggatccgttctcgtagcaatctctcttgtgccagccaaatggatgaactaggagaaaaaaaaaacaaggacaacaaaattctaaaagttggagatatagacagtataacgccgtccactaggataaagcaacgtgttgcacgcctccaccagggacaaaacgccaggtattctcccgttctagagctagacgcgcgaaaagaaaacggaagcagaggctatcagagcagcgctgtggccctgacacttgtcgatgcaacaactgcgacagaaatgtgcaacgagccggcgcacgaactaactacttcctcagtttcaaaatgaagctattttttaagattggcacggatattaagaaagtaggtgcctacgaatcctcgtctcccgtacttctggagtacgactcgtggcacggtttcccgcgctac

SEQ ID NO: 94279 - DNA, 455 bp, Oryza sativa
  Clone ID: PAT_MRT4530_92583C.1
gaagtttatttttcagcctttgattttggatcgctaaggacacatatataaaagttttactcataaattatttttcgtatacaaatatgtcgtttggattattccatgaataaaccaaacgatggagccaaaagtagttggacctttttaagggacaacaaactattttggaccatttacggaacatcgatccaactaggcggcggaaagatatattgatattgaaagcatactagtatcaattattgcatcccaattatggaagaaacaatgtttccttattttaatgtgtacacattcgaattatgtataacagacaagtaaattcgaaaatttcaatatccatgttgtaattttaaaatgaatttcaaatttgtaattgaatttttagcatagttggaattattttactttattttttttagaactactactctatcaaaaaaaaaaaaaaa

SEQ ID NO: 94280 - DNA, 478 bp, Oryza sativa
  unsure (1)..(478): unsure at all n locations
  Clone ID: PAT_MRT4530_92584C.1
cagaggtgcggatcggagctctgggtctggagaggcagatgtcgtgcatggatgganagaccgcccctgctgctgacccctgcacactgtgttgagcctcccccaaacccagctggtgttggaacccggatggcctgaccgccaaccagtggaaaatgatggggttgctgcccactgggctgcacaaatgccaaatgcaagggacagtgccacaaatgtgaccaagatggtgtgcaaacagcaacccaatgcctgctggacacctgtgctgcactgctgggctgagttgccgggatgccaccctgtgttgccccanggatggatgttggcttgcaacgatgatttggaggccacacaagcctgcaaatgcctttgggcctggtgtgccaatgccacggggggntaattgccaggtctgctcatattctcccgccctcatggaaatcaataagaaggaatttctccaaaaaaaaaaaaa

SEQ ID NO: 94281 - DNA, 353 bp, Oryza sativa
  Clone ID: PAT_MRT4530_92585C.1
gacacaaacaacaactgggaccatgagaatttcttactaacagtaaaggatcccagtttaaatggatcagggtcccaacaagaaagtttcaaagatgccggcaagaacatcaaagttcctggagcgcatcttattagcgggggttcactatctggggttccccagagaggaacctttccacttctaactttccaagaatattcactgccatggcgagaggcagatattatagggcttccatcagggctgaatgatgttttcagcgttgaaatgcataccattggcttcacgcgggatgttgctgaagtgctggcatgaaatgaatttggcccatgaacacccccagtgtttgg

SEQ ID NO: 94282 - DNA, 392 bp, Oryza sativa
  Clone ID: PAT_MRT4530_92586C.1
tgcgtatgcccaagcacgcaagtggttaatgtcatgtggtatagtgcatctccgccacgttcgtcgttgccattgccaatgccgatgactacaccactgccgcgccagcgccaagcccagaggcagaggcaagcccgccgtctccaccgacggaggccagcccgccgccgcttgcgccgccaccgtcggttacaagctctccaccaccgccggcggccggccctctgatgcctccgccaccgccaccgccgtcggtcacaagctctccaccaccaccaccactaccaccaccaccaccaccaccggcggccagccctccgcctccgccaccatcaccgccaccgccgtcgccggttaagagctctccaccgccaccgccggcgtggtcgccc

SEQ ID NO: 94283 - DNA, 219 bp, Oryza sativa
  Clone ID: PAT_MRT4530_92587C.1
aagtggtttcgtggcactccaggccaggaggcgtaggcgcggcttgccagaggcgcaggatgctgaggtggttgttctcctccatgtctctactcgttcttccctccctctcttttctccatttcctttgtccgttcttgctttcctaatcttctcttctcctgattgtatgtcttttctttcttttcttcctccttgtatcttcatgctcctttttct

SEQ ID NO: 94284 - DNA, 1501 bp, Oryza sativa
  Clone ID: PAT_MRT4530_92588C.1
atggccgacccgatctccaccagcaccccaacgtcgttggtaggccgcgccgcccgctggtcgtcggcctcacctggtgcgaggtcgccccgacgctgccggtgccatctccatcaagctccgccggcgtcgtcaaggtcgtcgcggcgtcatcggtgcggcacagggccgccggttcaccgtcgatgcatcctccgccatccacgctgccgcccggatctggatgtcatcgtcgttgcggtcaatcccatctcgccgagctccggcctcgccgtcgtcaccatctccacccggccggatgacgccggcacctgcctcgccgtctcctgtgccgctgcggggggactcgcctccaccgccgactgtgcgggtcgccgctgcccggattcctcgctgcccctcctgggactccacgatgggcgcccgccggtctccgccgcgttgctcccggcgccccgacaccgccgccgccggggggacggattccgccctcaccgagcacgagctccctccaccgcctcccgccgcctcccgccatccgccttgctgcgccggcgccctccgtcggcccgatgcccctggctcctctcataatctcccaaatcaagcgtcggggccagaagatcgatccccacgccatcaatctccatcacagcatcctcggagctagcgcagcaccatccaatcccctgcttgacctcacagagagaggaagagaagggagcaaaggtggggggagcgccaggagcccaggagatggaggaaggcgggggagagcgcgagggatgtcatctgcggtgaggagaagcgggtgagggggagggaagacgatgcagcaccggcggcgccgcaaaggcaggggaagagcaatcgagagaagggcgagccagacgacgacgttgtgtccacctacatcgtgcacgtcatgcccgcacacgcgccacgccgccttcccacgcaccgcgcgtctcgtcgtctcacccgcggctacgcatcgctcgtccgcgggctcctcccgcggcacatcgccgacccggctccgcgactcctctactcctacgcgcacgccgcgacggggttcgcggcgcgcctcacggcacggcaggccgcgcacctcgaggcgcagccttccatcgcggccgttgtccgcgatacggcctatcagctccacaccacatggtcctccgactttctcaacctctcgccgtcttttgggctacaggcggagtccaacggcgccgtagacgcggtgattggtgtcatagacacgggtatatatccgaaagaccgtgcgtcctttgcacctgacccatctctgcccccaacaccgcctcccaccttccgtggtagttgcgtgtcgtcgtttcgtgattccaatgccagcgcttactgcaacaacaagcttgtgggagcaaagacgttctaccggggatacgaggcacaaaatgggccaatagatgagagggtgcagaccaagtcaccgctagaccaggaatcctaa

SEQ ID NO: 94285 - DNA, 678 bp, Oryza sativa
  Clone ID: PAT_MRT4530_92589C.1
atgccgccggtgccatctccatcaagctccgccggcgtcgtcaaggtcgtcgcggcgtcgtcggcgcggcacagggtacgggggaacccgtccctgccggctcctcctctgcggccgccaccgcctggggagctcgtgcccgccgcagccgcctacgcctgcaggccgccggttcaccgtcgatgcatcctccgccatccacgctgccgcccggatctggatgtcgtcgtcgttgcggtcaatcccatctcgccgagctccggcctcgccgtcgtcaccatctccacccggccggatgacgccggcacctgcctcgccgtctcctgtgccgctgcggggggactcgcctccaccgccgacttgtgcgggtcgccgctgcccggattcctcgctacccctcctgggactccacgatgggcgcccgccggtctccgccgcgttgctcccggcggcgccccgataccgccgccgccggggggacggattccgccctcaccgagcacgagctccctccaccgcctcccgccgtccgccgcctcccgccatccgccttgctacgccggcgccctccgtcggcccgatgcccctggctcctctcataatctcccaaatcaagcgtcggggccagaagatcgatccccacgccatcaatctccatcacagcatcctcggagctag

SEQ ID NO: 94286 - DNA, 681 bp, Oryza sativa
  Clone ID: PAT_MRT4530_9258C.1
atgtcacgtagattcgttgtgccacgtaggatagatgatgtggtggaagagagagaacgtggggtgaggggggcattgctttgtgaggttttctcaggtccaaaggaagagtcgagttcctcacctgcaaaaataactggtgataggcaaaagtggagcatgtgcaagaaccaatgccgcaagcaacctgcgcgccgctatcctgccgcccctatgacctcactgcctcaaccaaaaaaagggaggggatgccctcgccacccactagaggaagtggaggagccgatgacggggctgatctactgcgtcgccacccggcgcgcccgatctatgttgccggagccaacgtccggagaaggagagcagcttgagcttgtcccatcgctagatttgcctgccgagcttgccgctgacctcgtcaccatctcccactttgtgctgcagagcttgccgtcgtttcccattctgtgccgctcacctcgaggcagccccaccgatctcgtgccccgctcctacgctgctatcattgtcgccgtctcctcctccatgccgctgacctcgaggcggtcacgccggtgccccatcgagctcggcttcctccgagcgatctgcgctgcgatggaaagacacttaggcgtggtggctggagtgggggaaagagagggatggtggtggccatag

SEQ ID NO: 94287 - DNA, 390 bp, Oryza sativa
  Clone ID: PAT_MRT4530_92590C.1
atgccgggccggcccaacgtgccggtggaggggcccaggcacggcccggtgaacgcggggcagagctcgtcagccgaccacgacgcgcgcgtgggaaggagcttgccggccgtgtcgtgcgcgggccgcgggggagggaggtgtttccggccgggaggagctcgtcagaagcggcgcacacgggtggaggggtcgccggcgcggtgcgcacgcaggaaggaactcgccataagcggcgcgcgcgtggggagcggtcgcgggccagtcgcacgctcattaggagctcgccggccgcggcgagcccgcggggaggagcttgctggcctcgacgccagtcgatcgcgcgcgcgggagggctcaccggctggtcgcacacgcgaggagggctag

SEQ ID NO: 94288 - DNA, 723 bp, Oryza sativa
  Clone ID: PAT_MRT4530_92591C.1
atggccgacccgatctccaccagcaccccaacgtcgttggtaggccgcgccgcccgctggttgtcggcctcacctggtgcgaggtcgccccgacgccgccggtgccatctccttcaagctccgccggtgtcgtcaagttcgtcgcggcgtcgtcggcgcgacacagggtacgggggaacccgtccctaccggctccttctctgcggccgccgccgcctggggagctcatgcccaccgcagccgcctacgcctgcaggcccgccgtttcaccgtcgatgcatcctccgccatccacgctgccgcccggatctggatatcgtcgtcgttgcggtcaatcccatctcgccgagctccggcctcgccgtcgtcaccatctccacccggccggatgacgccggcacttgcctcgccgtctcctgtgccgctgcggggggactcgcctccaccaccgacgtgtgcgggtcgccgctgcccggattcctcgctgcccctcctgggactccacgatgggggcccgccggtctccgccgcgttgctcccggcggcgccccgacaccgccgccgtgggaggacgggttccgccctcaccgagcacgagctccctccaccgcctcccgccatccgccttgctgcgccggcgccctccgttggcccgatgcccctggctcctctcataatctcccaaatcaagcgtcggggccagaagattgatccccacgccat

SEQ ID NO: 94289 - DNA, 384 bp, Oryza sativa
  Clone ID: PAT_MRT4530_92592C.1
atgaggaggtgctctgatccaagcccgttgtcgtcatgctcattgacgagtggatgcgcaccccgctcgccgccgcactcgccgaggagctctcctcccaccccgccccttccccatccaccgtcgcgccttccttcctcctccggcgctaattcctctgttgaggatctacttgcgctcatctacttcggctccctcttcgacgtgaagctgcataccgagttcgtcgccaccatgctcgagcgtgcaaggagtgggactgctgcatcacctatgactatatccgcccttgccgcctcatgccctgctgcggtcccgcctcacaccctgtcgcttaccggtcccgccactcatcggatcatagtggtcgtggcatttttctga

SEQ ID NO: 94290 - DNA, 492 bp, Oryza sativa
  Clone ID: PAT_MRT4530_92593C.1
ttgtttgttcattttctgtgtgttgatgcgctgtatgatggtctgatgcaggatggtcgttagataatgaaagatatgattagttgttctctcccagataacactcttaatgtgatgagtaaatttcattgtatccttgtatgtatctgctagttgaatttggaacgccgattttacctttcctagcacatgtagcagcgaataaatttctgaattgtataatattggaagatttatcaacctgaacctctgtagctcattcaagaagcttattcttgccccccgtcaatgcattaacaaagtgcatagactttgtagttgtggtttactgttacaaacttgagctaacatttggagcagaagagttggagcacatggtgttacatgatcagttttgtactcataaaccatctctagggagctttcatatttccgtttatacttgatttgggttcttggcttatgatatcaaattgcatctttttatgttta

SEQ ID NO: 94291 - DNA, 265 bp, Oryza sativa
  Clone ID: PAT_MRT4530_92594C.1
cccacgcgtccgtttggtcatagattatttatttggaagtggggaaatatacattacagtatagttcatgcctgctgtaatggtagattacgtattggattgtttggttccttctgtactggatttacatgcttgtaatggcaggttaaagcttgggctgtttcttgttcttatcgtcaaaaaaaaaaaaataaaaaaaaaaatataaaaatttaaaaaaaaattataaaaaaaataatataaaataataaaaagtgtacatctt

SEQ ID NO: 94292 - DNA, 543 bp, Oryza sativa
  Clone ID: PAT_MRT4530_92595C.1
atgacgtcatcaatggtggccggttcagattgcactctcgccggagctagggcgatcggccgggattttggagggcacctacacgtagaggacgacgagacgaacccgatggtactcaccaatgcactgaacgaaaaccgacgacgaccggcggcggcggcggctcgggttgaccggcggcgacggcgctgcgacggtcggcggcgaaggggaggaggcggccgggctcccttaccgccgtgcgaacgcaaaggaggcaacggcaagtggcggcgacggcggatgcggcgcggcggcgcggctagagtccggccggcggcggcagcgggctagagctcgtggcggcggctctacggatcacgggagaggacgggagagcgggcaaacgaaagaggaggactaggggatcctatttatagccttggattggagagatcggactcctcccgcaaggaatcgatccgggaaaaacgaaactcggttctggagataaacttgaaaacgagttcaattcgcattggctagagaagataccaaatctag

SEQ ID NO: 94293 - DNA, 1059 bp, Oryza sativa
  Clone ID: PAT_MRT4530_92596C.1
atggctgactctccgagcccacgcctggacgaggaggacgccttcggccgcgacttcaactcgtccccttcgcccacagccccacccgcccgctccggcgagaagaggccgttcggcgatctggacgacgatgacgaggacgttttcgcttccaagaagggaaagacaaaggtggaagaaagtgcgccaggtgctgccacgggaatgattctgtctcttcgcgagagagctactagaatcatttatattgtttgtttggaacatggtactgacttttctccccatcctgaagtttgcagaactgtaaagataatcttgcgtcatgtcaggtggaacgggaggctgccaaatcagaagttcaaaagtggcattcagcatttcagaacattccagctgtacctgctggaaccaatccagctggagaaagctaagaaaagagaggcggctttcattgtaacatttgcgaaacgtgaacaagaaattgcagaactgaagtctgcagttagggatttgaaaactcaattaaggccaccatcgatgcagacaaggagattattgcttgatccagcaatccacgaggaatttacacgattaaagaatcttgtggaggagaaggagaaaaagatcaaggaactacaggacaatgttgctgctgtcaattttactccatccagtaaacatgggaaaatgctaatggccaagtgtagaacattgcaagaggaaaatgaagagattggggcgatggcttctgaaggaaaaatccatgaacttggaatgaaaattgcagttttgaagactcggaacaatgaactcaggaatcagttcaatgagctgtataaacacatggatggtctaacaaatgacgttgaaagatcaaatgaaatggtggccattcttcaagatgagttagaaacaaaagatgtagagctgagaagattgaaggagatgcttgcccagaaagaagcaactgatgagaacaaaatacctcaagaaaatgacgtcgctggagatgatatagttgctgccgccgagagtcagccaataaaagtagaaacataa

SEQ ID NO: 94294 - DNA, 210 bp, Oryza sativa
  Clone ID: PAT_MRT4530_92597C.1
atggggtggaagggggcacagaggtggcacggaactgctagatctggcgggcccgacatcacccagcggaggaagatgttgctgcggccaacacgcgcggggagatcaagtgggcggatgcttgaggaagataatgacgacgcgtcggattcctgggtcggctgggccgagcccactcgggaggaagacgccgagagggaggagacgtag

SEQ ID NO: 94295 - DNA, 113 bp, Oryza sativa
  Clone ID: PAT_MRT4530_92599C.1
atggattgtatgcgttgggcttgccagccggcggagaagctgtacctgttggtgaactgccgaacggaggaggtcctatgcccacggctgccggtggaggccctgcccctcag

SEQ ID NO: 94296 - DNA, 266 bp, Oryza sativa
  Clone ID: PAT_MRT4530_9259C.1
ctcttccccgagctgaccggaagctcgagcagcctagcgtgaaggtaaagcgtccagtcgcctgcgagtccccctcccgccctgtagctctcactcgaagtcgaacccggtgccatattccacgcgtaaatgctaggccattaaaggcaaacaacttctaccttggagagttggaggcttggagcccatttgcgagaccccctctccggttaaccgtttcgccgtcacatcgggcgcacagcttaacacgacgtacttggtcataa

SEQ ID NO: 94297 - DNA, 525 bp, Oryza sativa
  Clone ID: PAT_MRT4530_925C.1
gttgttccggatatcgccgataggtaaaaggttcaatgaccgtaggaggccagctagaaaaaccactaaacagatagggtggcaataaagccgttgttccaattcagcttacgcgacatttgcttacaggattaccaaaagcctactaccggtgacagggattacatcctctaaaaagcacaagttaagcattattgcgataacttttgtcggtacccgaactatggctcgcttgatagcctatcccacctagaaccctaatgtgcatacgaacgatgtacattcgtgtcttgaggctccaccaaaagcacatcagatcttgaagaactcgccgggaaggctctgataggcaccctctacgaccacagcatgactctgggatgtaccatgggtatcctgaaacttgtccttgtacctgacgataaagagccttggcgccttcaccacgttctctcgtgttgccgcccaaggtcttgatcgtgctctgttggagagcacggtcgattgaaaaggacagagcccacg

SEQ ID NO: 94298 - DNA, 218 bp, Oryza sativa
  Clone ID: PAT_MRT4530_92600C.1
accacgtgagacctcacgcgtgacgactgatactgtgacacattgagcctgggagggatgactgcactgtcgtgcaatttgacaaaggaaggctagcacctcttttgtgaacttgacataagactacaatggcatatcgtgcccatacgacatgagtgcgttattgcacaaaaccactatctctaacgagtgcaacaccgtacagagaagctacctat

SEQ ID NO: 94299 - DNA, 2430 bp, Oryza sativa
  Clone ID: PAT_MRT4530_92601C.1
cgagggtttgcaacaggtgtccaccttccatctcaagcaagcacctttcaaccacctcccctctcttcctcccttctccacacgatctgaattgcacaacagtgaacgaatctgaactatctgaccgaggagatagcaaatttcagttcttgatcggtgattgattcagtgattattcccaaatttccagtagctggcaaaggggaggagaagtcagcggccatgctgctgcgtaccatgaagctcccgctccccgccatggccgccgtcgtggcgctctgcgccgcctcctacctcctcgccgtgtggacgcaccctgccccgccgctccccgcctcctccctcgccgccgtcccgtgcaacacgcggcagccaccggcgcccgcggcctcgaagaacgacaccgccctcgacttctcgatccaccacggcgcgtccgaggaggacgcggccgaggcgggggcgccgccatcgcgccgcgtcccggcgtgcgacgcggggtactcggagcacaccccgtgcgaggggcagcggtggtcgctgcgccagccgcggcggcggttcgcgtacagggagaggcactgccccccgccggccgagcggcggcggtgcctcgtcccggcgccgcggggctaccgcgcgccgctccggtggccgcggagccgcgacgcggcgtggtacgcgaacgcgccgcacgaggagctggtgacggagaagggcgtgcagaactggatcaggcgggacggcgacgtgctccgcttccccggcggcgggaccatgttcccgcacggcgccgaccggtacatcgacgacatcgccgcggcggccggcatcacgctgggcggcggcggcgcggtcaggacggcgctggacaccggctgcggggtcgcgagctggggagcgtacctgctgtcgcgcgacgtgctgacgatgtcgttcgcgcccaaggacacgcacgaggcgcaggtgctcttcgccctggagcgcggcgtcccggccatgctcggcatcatggccaccaagcgccttccttacccggctcgcgccttcgacatggcgcactgctcccgctgcctcatcccctggagcaagtacaacgggctctacatgattgaggtggaccgggttctccggcccggcgggtactgggtcctgtcagggccgccggtgaactgggagagacatttcaaggggtggaagaggacgccggaggacttgagctccgagcaatcggccattgaggccattgccaagagcctttgctggaccaaggtgcagcagatgggtgacattgctgtttggcagaaacaaatcaaccatgtcagctgcaaggctagcagaaatgagcttggtggtcttggtttctgcaattccaaccaagatcctgatgctggctggtatgtgaacatggaagagtgcatcactcccctaccggaggtgtccgggcccggagacgtcgccggaggggaggtcaagagatggccggagaggcttacatcgccgccgccgaggatcgccggcggcagccttggaagcagcgtcacggtggacacctttatcaaggattctgagatgtggaggagacgagtcgatcgctacaagggcgtcagcggcgggctggccgagaaaggccggtaccggaatctgctggacatgaacgccggcctcggcggcttcgcggcggcgctcgtcgacgatcctgtctgggtgatgaacgtcgtgccgacggccgccgttgccaacacgctcggcgtgatctacgagcgagggctcatcggaacgtaccaagattggtgtgaggcgatgtcaacttatcctaggacgtatgatctgatccatgcgtactccctgttcacaatgtacaaagacagatgtgaaatggaggacattttgctggagatggaccgtgtgctgaggccagaaggcacggtaatattcagagacgatgttgatgtcctggtgaagatcaagaacatcgcagacgggatgagatgggagagcaggatcgttgatcatgaggatgggccgatgcagagggagaagatccttgtgtctgtcaagtcttactggacagcctaagggttcgcaaaaatggcattcatcatgctgatgatcattttgagctatagattggaacattggaggcagatttatagaaacagatagtttcagttgtcccccctcttctagtacagatagtttcagttttctcctgtcttctttccatatataggttctttattttcttaaaattctctcatattgttttagttttatcctttccatttcatgccatatggagtagcttttttttatttacattttcgttttctcctttctctttccttccatatatgtcttttcttattattttatctgtcaatttatctgacgtaaacggatattaaagaaataggcaccatttttgtt

SEQ ID NO: 94300 - DNA, 391 bp, Oryza sativa
  Clone ID: PAT_MRT4530_92602C.1
agctagtgggaatagaaagctggattctgcttattgcttggtccaaagaaaaagaagactgtggcccggtttttctatttttctgggttaatggcagtggtcacttctgtggtgtagctgagaatgattgcacccgtcgattttgacaaaagtgtcccttattgaccccatgacaagtggtgtggccagttccctgtgacggggcacattattaaggatgcccctgacaacctgctgctgcacatcattcttgagaacaatgacaacaaacctgcaactaatagcagggacacccatgaggtgaagctggcacatggtctgccaacgttatctatcttgaaggaccatgaaccggagacgaacattcttgaagactttgacttctatgaac

SEQ ID NO: 94301 - DNA, 312 bp, Oryza sativa
  Clone ID: PAT_MRT4530_92603C.1
aaaacgaacaaacgcaaactgtttttttcacaaggtttgccgatgacaatggaaagggtaatctaggtccaagcggatcattgacgggggagacaaaacattggttggcccacaaaacccaccagtggggccaacaaggagggctatccgttattggacgggagaaaaagtaaaacctgacggggggaagggaaactgaataattttaggagaccatgatgatgatgatggataggcttcttaggacgcccgccgcccttaggggtttggtgctcccatcttggccactggaagggtcactcggaataggtt

SEQ ID NO: 94302 - DNA, 427 bp, Oryza sativa
  Clone ID: PAT_MRT4530_92604C.1
tttaatagttctgaatttgtaattaataaatacattctatattcgcctacacccggtctccttccccacctccacatgttgccgccgccgccgacacaccgtcagccccttcggttgtgatggcctgccaaccatcaccgcaacaggcgccaccgtcgccagccgccaccgccaccgccaccgtcgccatccgccaccgtcagctgccaccatcgccagacccgccgacgtcgtcgccatatccgccaccagtgccgccgccgccacaaccgccaccagcgccgccaccaccaccgtcagcccccgccaccccgccgccacctccgccgcctggcaattccccatcgccgccgccgccgcccgtacccacagcccaccacctcgccggcgtcaccaatggctcccttcgacgaagaggaggaggagg

SEQ ID NO: 94303 - DNA, 187 bp, Oryza sativa
  Clone ID: PAT_MRT4530_92605C.1
caccgaaactgttcacttccacaaatggtttaaatcattcacaatagtcgttcaaatccatttcccaacagttttacattttttttttaacaatggccttggtgggggttcacagcagcaggggaaaaattggccgaggaatcaaggaatcattccatcacaacaggatctccaaattggccattta

SEQ ID NO: 94304 - DNA, 895 bp, Oryza sativa
  Clone ID: PAT_MRT4530_92606C.1
ttttctctctcttttcattcaagaatgtaatggtagaaattgatgtcaggtagattcctaatcatattgatattagtagaaaacaagtgggggaaaagaatatagaaagtcaattgagatgaaatggctatgctgttcttaactactatagccgcaaccacaagctcagctgcagctcccacgccgccggcgacgacgacctcctcctcctcctcctcttcgtcgaagggagccattggtgacgccggcgaggtggtgggctgtgggtacgggcggcggcggcggcgatggggaattgccaggcggcggaggtggcggcggtggtgatccagcacccgggcggcaaggtggagcggctttactggccggccaccgcggcggacgtcatgcgcagcaacccaggccactacgtcgccctcgtgttgctccgtgtctccgcctcctcgtccggtggtggcggtggcggcaaggccgaacactccgccgtcggagcggccgtcggcgacgagtccggaggggcggcgggctcggaggccgggggagctgtccgtggcggctgcggtggtggccagatccgtgctgtgtccggctagatctgccagggaggtggccgggtggcgggggctgacggtggtggtggcggcgctggtggcggttgtggcggcggcggcactggtggcggatatggcggcgacggtggcggtggcggtggcggctggcgacggtggcgcctgttgcggtgatggttggcaggccatcacaaccgaaggggctgacggtgtgtcggcggcggcggcaacatgtggaggtggggaaggagaccgggtgtaggcgcaacgtcgacggcgggaagatatgtggcagtggcctaggccggatcgctgaagggacaatg

SEQ ID NO: 94305 - DNA, 425 bp, Oryza sativa
  Clone ID: PAT_MRT4530_92607C.1
cccacgcgtccgcccacgcgtccgaaaaaaaaaaaaaaaaaaaaaaaaaaaaaaaaaaaaaaaaaaaaaaaaaaaaaaaaaaaaaaaaaaaaaaaaaaaaaaaaaaaaaaaaaaaaaaaaaaaaaaaaaaaaaaaaaaaaaaaaaaaaagaaaaaaaattggggaactaatataggaagtaaagtaaaatggggccgccacatttaaagacaaaagagttcgataatcgtacgataaaacaaataaatagaggttgcaaacacataaattaaaagggaaaaaaccaaaaaaaaacaaatgtgggcggccaatccaataggacacaattttacaaacgcgaaagggaaacgaaatagctcttttataagggtatttaaaaaaagttgactgacaggaaacctaaaagaaaacgtctcgaaaaacca

SEQ ID NO: 94306 - DNA, 479 bp, Oryza sativa
  Clone ID: PAT_MRT4530_92608C.1
ctattttttacctccacttctgctggttgaaggcctttgggtccctcctccctcgcgtcgtgcccggcggccggccgggcgtcattctcgtctctcggccaccatgacgacgatggacaagggccgggcgctgcccaagtttggggagtgggacgtgaagaatccggcgtcggcggagggcttcacggtgatattccagaaggctcgcgacgacaagaagacgaccggccccgggaacgccagggtggggataccgccggccttccggagcaccgacgacgacggcggctacaggcccgaattcaagcccgccgagagctaccagcaacacacgccgcccaagcgcgtcaagaagaagtgggcattctgcgccgggtgttgattatctggcttctgctgctgctttttcggatgaggcggatcgcaattattcacaattgccgcaccagaagtattcctgatgggagcaagagcaaaat

SEQ ID NO: 94307 - DNA, 430 bp, Oryza sativa
  Clone ID: PAT_MRT4530_92609C.1
attatagaggtgctacgacgtatgctcccctccttcggcatggtagcctcctatagagcgccccttcttttttttttttttttttttagcttggttgctttatgtaactaactaacaaccaagttagctaattacaaggaggaatcagtgaatgttaatcatgcaggcatacactccacgagtggctaatagaattgaggtatggcgagtgccatatcttgccataccggaagctcctccactagatttgtctgtacaaaaaccattttgaggcaagaactcgagctctgaatccttgcatcaaacaatcgaagcatccaaataattttgggcatccatacattatcactatgtccaattggagacatcaagatcctttccatgatggtgtcggcactgctgttgaagcccagacacccaaaatgtagag

SEQ ID NO: 94308 - DNA, 662 bp, Oryza sativa
  Clone ID: PAT_MRT4530_9260C.1
acattagttatctgaagccttccatacgcaaagccaaataggtatggcgagttccgctttctctagcgtctctatacacattagtgttcatttattatgccatgcactgtatggcatcagcctgtttaacttcaactgacagaagcccagtggtcactaagtctctaaggcagggcgaagcttcctatggtgatgtagcaagagtttggatgagtagctacaaaagtcatctcagacgaccagcttctgcgagaagccgaggatgacgactgcttgtcggtcgcactgacccacttcgagtgatgaagcatatgaatacattgacacaagcgacggtctacttctggcgaccccacgtgccaattcacttctcatgggcttcttaccaccgttgatacaccaaagacgtactgacagcggactacatgatgcaaagcagaggggctatgaaggtaaccttccgcgacatgcacctgcgttttatcacgatgatgtactacaacatgtattgacctgcctaagtcagaagctaacggttgacgatgagcacgagatgatcctcaatgcaggccaggacacattggtgcgcttccacttcgacgagcacattgagtttacgatgcaggagatgcacctgatgttgccgtatctggtcatgacga

SEQ ID NO: 94309 - DNA, 1377 bp, Oryza sativa
  Clone ID: PAT_MRT4530_92610C.1
atggatcgagattggatgagtgaacccagaacatctgcttcctataaagatggtgtagcacatttcctatccattgcatttcgtgatgttccagatgatgccaaggtcctttgtccttgtgtgaattgtagaaacagaataacacagaattatgatagagttaaaacacatttgagatgtgctggaattcttcaaagctataccaagtggattcaccatggtgagaaatatgatgcaccgtcattagtattcgctcctgtatctggcaaccctaggaatattcctatttccggtgctcataagagcaatgttgtagaagttggggatggaagatcggataacatggaaggactactaaacactgcatttggcagggaagatagctttgagtctatatcgagtgcttctatcgatgatgatggtatttattttgagtctagctatgcagaacctaatatggttgaggatgagaataatacatttggagattgccataatgggggggaacaagatatgttcacaaggttgttgaaggatgcaaaaacaaaactatatcatgggtgtgataaattttcgaggttatcattcttagtcaatttgtataacctaaaatgcatacatggatggacacaagaatcttttacagcactacttggtttgcaatctgatgcacttcctcaagaggcagatttaccgaagaattgttatgaagcaaaaaaaatcatccgtggtttaggtcttggctatcagaaaatccatgcttgtcataaagattgtgtgctctttcgaggtgacaaagctaaccaagagtcttgcgatgtatgtggttcctcccgctggataactgataaaaatgggtatccagttgaatcaaaaggaaagaagaaaccagctaaagtgttgcgttatttcccattaataccaagaatccaaagactattttcaactgaacaaacttcaggagagatgcgatggcacgaggagggccatacaaaagatggattgctacggcaccctgctgatggtgaggcttggaatgatttaaatactcgttatcctggtttttctgctgatgcccgcaatgtgcggcttggtcttgcaagtgatggattcaaccctttcaggaatatgagttcaaagcatagtacttggccagtgatgcttattccttttaatctcccgccttggatttgcatgaaacaaacatcgttaattttgtccatgatcattcctggaccacattcacctgggaatgatatagatgtatatttggagcccttgttgatgagctcttgcaactatggcaaggtgtggaaacttatgatgcttctgcaaggaagaaattttctcttcgagctgcattattatggacattga

SEQ ID NO: 94310 - DNA, 234 bp, Oryza sativa
  Clone ID: PAT_MRT4530_92611C.1
atggggtcagcctgtcagcggctcggctccgccttcttcttcctcctctgctcttttgctcggctcggtctgggatggcgacgcaccgcggcagcgagtcccggctcagcgaccggcggtcggggaggcggcggcgaactccagcgaggcaccgccggcaacggcggcgctaggaggcgcggcgcagcggctctaggcggcggcgggcgacgaggtggcgagctggcagtctag

SEQ ID NO: 94311 - DNA, 120 bp, Oryza sativa
  Clone ID: PAT_MRT4530_92612C.1
gtgaattcaccgcgggaaacggtgaacggggcccattgccatctctactcgcgcgaggcggttgggagcggcgacggctgcccaccgcccggatctgacggcggggtgtccggatctagg

SEQ ID NO: 94312 - DNA, 171 bp, Oryza sativa
  Clone ID: PAT_MRT4530_92613C.1
atggacgtagacccagggccctggcttttgttgggctcgtgcagggtgtggccgtggccgtactgcccgtgggagacgcattcgatgacgtcgcgtggttctgctgcgcttgcggtgccatcttgcttctccggcaagggacgcggcgaggcgcgaggatgcgacggctag

SEQ ID NO: 94313 - DNA, 555 bp, Oryza sativa
  Clone ID: PAT_MRT4530_92614C.1
ctcatcatcaatcctcatgtaaactcccaatctcatttcctcaagttgccaaacaagccgttaagtcgtgcgtgtgccctcaacccttccctctcctcttttgcagcaccaaccatgtccttctttgcaggtttgtagcatatatatcatgtgatggttcaattttatggtatggccggcgttggttggaaatattttcagatgcccctgtcatatgtgaaacggaatggctgaatgaggatcatataataagcatgaatctttctatatccttcaaccctgttgttgtcatcaaatggtggctttttcatgttaagaacgaattcaaggtggactggtgtttttttataatccgtgagaactgaatatgcaggggaaagaggaatcaataattaaaatattgatatcgcaacatgcttcttgctggtgaataaacacttgaacaaatctagcagctaacttaggtgcggtcaatcacataatctttgttattgatcctataatttcttgcaaatattccttatttaagaatcaagcaaactaatagtgttgtaa

SEQ ID NO: 94314 - DNA, 1585 bp, Oryza sativa
  Clone ID: PAT_MRT4530_92615C.1
tcgctctcttctcattcaattccctgctcacctcgatcgagtagctgctgctgctgtgctagcttgctcgccggccggtgaggtcgacgatggagctgcacagatgctctctcctcgctctgctcctcgccgtgacatgctcggttgcagtggcgtatgatccgctggacccgaaggggaacatcacgataaagtgggacgtgatatcgtggacgcccgacgggtacgtggcgatggtgacgatgagcaactaccagatgtaccggcagatcctggcgcccgggtggacagtggggtggtcgtgggccaagaaggaggtcatctggtccatcgtgggggcccaggccaccgagcagggcgactgctccaagttcaagggcggcatcccccacagctgcaagcgcaccccggccatcgtcgacctcctccccggcgtcccctacaaccagcagatcgccaactgctgcaaggccggcgtcgtctccgcctacggccaggaccccgccggatccgtctccgccttccaggtctccgtcggcctcgccggcaccaccaacaagaccgtcaagctacccaccaacttcaccctcgccggcccgggacccgggtacacgtgtggcccggccaccatcgtcccttccaccgtctacctcaccccggaccggcgccgccgcacccaggcgctcatgacgtggaccgtcacctgcacctactcccagcagctggcgtcgcgctacccgacctgctgcgtctccttctcctccttctacaacagcaccatcgtgccgtgcgccaggtgcgcctgcgggtgcggcggcggcaccgagtgcatcatgggcgactcgaagcgggcgctgtcggcgggggtgaacacgccgcgcaaggacggggcgccgctgctgcagtgcacgtcgcacatgtgcccgatccgcgtgcactggcacgtcaagctcaactacaaggactactggcgcgccaagatcgccatcacaaacttcaactaccgcatgaactacacccagtggacgctcgtcgcccagcaccccaacctcaacaacgtcaccgaggtcttcagcttccagtacaagcccctcctcccctacggcaacatcaacgacaccggcatgttctacgggctcaagttctacaacgacctgctcatggaggcagggccgttcggcaacgtgcagtcggaggtgctgatgcgaaaggactacaacaccttcaccttcagccagggctgggcgttcccgcgcaagatctacttcaacggcgacgagtgcaagatgccgccgccggactcctacccctacctacccaactccgctccgatcgggccgccgcttttgggttgaaaatattactactttttttcctacaagcttggaaaccagtgtaggtaggggcattttggtctattcatactggatattcagtcaaagaggaaatctgtcatattgtgttaactttgaaattgcctgatagatctccataatgtacaacacaatcaggctggaagagttttggtcagtccccagttaggccagccctgagaaatcacgccccaaacttttctgcacaaaaa

SEQ ID NO: 94315 - DNA, 695 bp, Oryza sativa
  Clone ID: PAT_MRT4530_92616C.1
aatcagttagaaagcttaggaataagattaatacagcggtccacaataacatttgtaaagtatttgtaaaagaattttttgtacacgtatctttaccctattaatatgcttgtataaaagccttcccaaagaaccgtgccattactaatccaatgaacagaagaagaagaagaagaagctacatccatgtacaccgccgccgttgcccgtgtgaggtataagtacaagtcttgaagattcgaagtataatggagtgaacaaatacgatcatgagagcaaaacacaatggtaagggtgtaagaacgaaacaatgatagtactgtaattatagcagagttttcacttgatcactgcaccgtttctctgctttgttcctccagttcttcatgtgggtatagttaggctgaacatttatatccattcatatggtggatggtttaaaagagctcttcagagttgaatttgttccatgcctccttaagaatatcaaacaccttctctgcagtatatttctgctgaagatttgcacccttctgttgcaccttgtcaggatggatgcataatgttgcctttctgtactgctttttaacagcggcgccagtaatcaaatcagtcaaggatactgcttgccatccacattctggccaaagtatatattgtaaagttgataacaaagcacgtaagttgccctcttt

SEQ ID NO: 94316 - DNA, 460 bp, Oryza sativa
  Clone ID: PAT_MRT4530_92617C.1
tgtgtacacgtgtggcccggccaccatcgtcccttccaccgtctacctcaccccggaccggcgccgccgcacctaggcgctcatgacgtggaccgtcacctgcacctactcccagcagctggcgtcgcgctacccgacctgctgcgtctccttctcctccttctacaacagcaccatcgtgccgtgcgccaggtgcgcctgcgggtgcggccacgacggctaccgcggcaacggcggcggcgggaagaacgcccgcgccggcgacggacgcagcagaccacagcggcggcggcggagggcacagcggcggcaccgagtgcatcatgggcgactcgaagcgggcgctgtcggcgggggtgaacacgccgcgcaaggacggggcgccgctgctgcagtgcacgtcgcacatgtgcccgatccgcgtgcactggcacgtcaagctcaactacaaggactactg

SEQ ID NO: 94317 - DNA, 712 bp, Oryza sativa
  Clone ID: PAT_MRT4530_92618C.1
gaactacacccagtggacgctcgtcgcccagcaccccaacctcaacaacgtcaccgaggtcttcagcttccagtacaagcccctcctcccctacggcaacatcaacgacaccggcatgttctacgggctcaagttctacaacgacctgctcatggaggcagggccgttcggcaacgtgcagtcggaggtgctgatgcgaaaggactacaacaccttcaccttcagccagggctgggcgttcccgcgcaagatctacttcaacggcgacgagtgcaagatgccgccgccggactcctacccctacctacccaactccgctccgatcgggccgccgcgttccgtggccgccgccgcctcggcgatcttggtggtgctcctcctggtggcatgatcagaaaaatgtccccttttgctttgtcttcttgataattcccacatgtttggagagcagtgtaggtaggggcattttggtctattcatactggatattcagtcaaagaggaaatctgtgatattgtgttaactttgaaattgcctgatagatctccataatgtacaacacaatcaggctggaagagttttggtcagtccccagttaggccagccctgagaaatcacaccacaaacttttctgcaaattctgttgtgactacaaatatgtatgcaggtattgaccttgaattgagaggaaaaagaaacaatttcacatccg

SEQ ID NO: 94318 - DNA, 645 bp, Oryza sativa
  Clone ID: PAT_MRT4530_92619C.1
tataacggaatccgttttcgaacgggatgatcccgagtaggtatcaggtgtgatacctatcaggtatcagacgattctacacatgttttaggtgacacttgcaaagtatcatgtgatacttatcaggtatcatgcgatttctaccacgtatcgtgtaatactcgcgaggtatcatgtgatacctgtcaggtatcagacgatttctaccacgtatcgtgtgatactcgtgaggtatcatgtcaggtataagatgatttatacttatatatcgcgtgatacttaagagttatcggatgatacttaccagacgaggatggcgacggcgacggcaggggacgggcgcggcggcggcggcgagggacgacgacggtggcgggtgcgggcgtggcgacgactgtaggggacgggcgcggcggcggtgggggacggggacggcggcggcgggggacgggcgcggcggcgagggatgctgacggcggcggcagcggcggtaggggacaaggtacagttaaatgtacatgcaactcaggcttggtttattttctaatttttttttcctaaaaacatcacatttgaatctttgaatctctcttttgaacatttattttatttttgtaaaaacttatttatatttttaggtggcta

SEQ ID NO: 94319 - DNA, 779 bp, Oryza sativa
  Clone ID: PAT_MRT4530_9261C.1
ctactccccttcatcattgtcgaaatgaccaaatacccatgccaccggccgccacattgtctgcgccaccgccgtcctccacgctcgccgtcgtcgccgcatggggagggtgcggccgttgccgccaccaagtcgcgccgtcgccgcctccccactagctcccctggcgccggatctagcggaggggagctcgccgcctcccctcccgtcggatctggcggaggggagggtgctgccgccgccgtcgccaccacctctgccagccagccgccggccatgggaggggagcccgccgccaccacctctcgttaacaaatattgtgccttagtgttgccatcgtatttggatctcatacgacggctatgggcaggggagtgatggggagcggcatgggtggcggccgggcatgcgatggaggggacgccgccatagccaatggccgctcgtcgcacgtcgtcgctgagctccgcttttccactgccccgagctccgcctccgccattgcacaccttcttgctgagctcggcaggaatcgagatggacgaagctctcaacgatggcggaagaggctgaattggcgacgttgaggaggacagagatgagcggtgcgctgacccactctcatcggcggaagagagcgatgcaatggccgccattgagctcggcgactgtgccgctcgcctactattccgccactgctgactctctagctcccaccttctggcctgccaccaccgctccagctcccaccccccacagacagccaaaggagtggtga

SEQ ID NO: 94320 - DNA, 1497 bp, Oryza sativa
  Clone ID: PAT_MRT4530_92620C.1
atggcggcggcggcggtggcggcagatcagaaggtggtgacgatgacgagcctccgggagggctgcgcttgcgcggcgcctcctgctgcagctgcgccgccgatgccgaagatggcggcggcgcagagggtggtggcggagctgagagaagcgtgcgcgacgccggcggcgaggctggcggaggtggccgcggcgatggccggcgagatggaggccgggctggcggtggagggcggcagcagcgagatgaagatgatcgtgtcgtacgtcgacagcctccccaccggcggcgaggaggggtcgtactacgcgctcgacctcggcggcaccaacttccgcgtcctccgcgtgcggcttgccggcggcggcgtcgccgagcgcgtggcgagggaggtcccgatccctcccggcctcatgtccggcggcggcgccacctcggagtgcctcttcggcttcatcgcctccgcgctagccgagttcgtcggcgaggaggaagaagaaggcggcctcgacggcggcgagagggagcttgggttcaccttctccttccccgtgcaccaaacctccatcgcgtcggggacgctcatccggtggacgaaggcgttcgccgtcgacgacgcgatcggcgaggacgtcgtggcggcgctgcaggcggccatgtcggagcgggggctcgacatgcgcgtgtcggcgctcatcaacgacaccgtcgggacgctcgccgcgggcagctactacgacgaggacgtcgtggccgccgtcatcctcggcaccggcacgaacgccgcctacgtcgaggacgccaccgccatcgccaagctacacccatcgcagctgccagcatcgaacaccatggtgatcaacaccgagtggggcagcttcgcctcgccgtgcctcccattgacggagttcgacgaagcactcgatcaggagagcctcaaccccggcgagcagacctacgagaagctcatctccgggatgtacctcggcgagatcgtcaggagggtcctcctcaagatctcctcccggtgcccctccctcctcggcggcgccggcgagctcgcgacgccgttcgtcctcaggacacccgacgtgtccgcgatgcaccacgacgagacgcccgacctgagcatcgtcggcgagaagctggaacgcacgctgggcatccgcggcacgtcgccggaggcgaggaggatggtcgtcgaggtgtgcgacatcgtcgccacgagggccgcccggctggccgcggcggggatcgtcgggatcctgaagaagatcgggagggtcgacggcggcgaggggcggaggaggaggtcggtggtcgccgtggacggcgggctgttcgagcactacggcaagttccggcggtgcatggagagcgcggtgagggagctgctcggagaggcggcggcggagagggtggtcgtcaagctcgccagcgacggctccgggctcggcgccgccctggttgcagctgctcactcgcagagagcataa

SEQ ID NO: 94321 - DNA, 108 bp, Oryza sativa
  Clone ID: PAT_MRT4530_92621C.1
atggagcggaagtcccagtcccgaagcccctgcgaagatctgaagaatatcaccaaggattttcagctcatggacagaaggcttgacaaagatactcacatgacatga

SEQ ID NO: 94322 - DNA, 285 bp, Oryza sativa
  Clone ID: PAT_MRT4530_92622C.1
atgtcgcctatcactgaaagaataattagccgcaggcgagagcgagaggattcatggatctcccgaccaatgtaccctgattctcctctgatgatagccagcccagccagccagcgagccagccggatctcgcaacccccagaactagacgcaacacagggggagaaggggagagagagggggagagaacgtcaggcatgtgggccccacacctcggggggtggtgggcccggatcagtgacgccgggcgtggtggggccagcggcagatgagatcagaatctgg

SEQ ID NO: 94323 - DNA, 906 bp, Oryza sativa
  Clone ID: PAT_MRT4530_92623C.1
gcacgaggaaaccagttttgattctccaggaaaacgaggctgacttctcttcctcctcatctgttagtcgttgggatcgtaacctatatatacatcatcatctgccgcaacccagaagcctccagcagcgcatgctgtgaaccttacgggttgtacggacggcggccaagctgacggacgtagctcggaggcaagcggctaattcgccgaacccacatgatttctgccaagcaaaagtgccaaatggacgaggctctgctggagcagccggcgatcctgccggcgccggagccggagggcacctcgctgctgaccatcgtcgggttcgccttcctgaccttcaactcggcaatggcgatctacaggtcggacagggacgcgggtgctattgccttcgtgaccttctcctacttcgacctcctcctcctcttctacttcctccggctgttcgagaggacggagcacggctcgcggcgccgcgcgcagatcaaggccgccgtgtggctgctcaccaccatgctcaccgccgtcttctcctacaaggtcgccgccatcatgccgctgccggtgcaggtgctcgtctgggccatggccgccgccaccgtgctcggtggcttctacgccttcttcctccacagcgacaccaaagcatgataaggagggcgatttggcgggagctagcggcaaaacaaccaggcgatggtacgggatgcagctgcatgcgtacgcacgccggtaggcagatcgacgtgaagcgaggtcgccgccgcgccgcacgcgtgcagagctcgtcacgtcgaggctttcacccaaaacgcgcggccgtaggtcgggatccacacccacccgccggccgcgcgtcctacgagttattgcctgtttcccatcgggctggaataggcgcgg

SEQ ID NO: 94324 - DNA, 432 bp, Oryza sativa
  Clone ID: PAT_MRT4530_92624C.1
atggcgcatgtggccctcgatccagcagttggagatgaagagctgacagattcactggtggcccgtggccctcatgcccctagcaggacgccgtcagtggccctcatcgggcaagacatctatcgaagacgaagaggaagagaggcatatcggctggcaggcctggtcgaccattggatcgggccgctgttgtgcctaccattggaccatgccgtgccgggccagtccaccgtgccgacctcggtccgtgctgtgtcaggccagcccaccgtgccgaggcataggcccaagcatgacccaacagctagggcgtgccatgccttggccgggccaaaacctcgtgccttgggccgagccatcgggccctatagccaactataccccgtaccctatttttgtgagttccgaaaaactggatcaacatatatttaa

SEQ ID NO: 94325 - DNA, 357 bp, Oryza sativa
  Clone ID: PAT_MRT4530_92625C.1
atgtgtgtgacggccaccgcgctggccgccacgacgacggcgaccagcgaacaacctgacatggcgcggacatgtgcacgcaggcagcgcaggcaaaaaaagcctgcgccccccgcggagcagagtggagcaccggcgccggtgcagggctgtgcaggcagtgggcgttactggcgcccccatgcatccgggacggggggactccgtcggccggggtgtccaaacgcattgggaatttgcgactcggcgtgcgtggcggtatctggctgcgccgaatccctgtgtggcccgtctctatgggaatatccttcattctcatatgatcccaagaataaggaggagcaggggaggtcttag

SEQ ID NO: 94326 - DNA, 356 bp, Oryza sativa
  Clone ID: PAT_MRT4530_92626C.1
ttccgatgcgcgcggacgactcaccacctctggggggggaccttctactactcctaaaccctcactaaaccctagcctcctactgtgcgctctacctctacggggaggacgcgctgcaggatgctcatcgtaacttacgacgcattcgtcgtctcctcatggctccttatagtcgcctgcgtgaacctttgcgatggctctgggagaacctattcgaccggcactgctgcgactacatcggtgctagagcgccagggatttcaagattcatggtattcctaacgtggggcatggcgaccagcgtgggcatggcgtcaccgacactgggcgggccaatgctggggggaggacctctg

SEQ ID NO: 94327 - DNA, 279 bp, Oryza sativa
  Clone ID: PAT_MRT4530_92627C.1
atggctaccgtccattgcaagtcgtacggatacacaatacggaagccaggcagctccgccagctacattcatatgaggaatgagagcatgatcaagtacaaagacaaatctcaatccgggctctctgagcagtggccatgtccccatgagcctgggagaaacctttcttccaagcaattagttttaaaaattctcgcagcactgaaatcggtggagctagctcttcctgtgcactgttctgagcttgctgctgctgttgctggtgatggaatcgcttga

SEQ ID NO: 94328 - DNA, 487 bp, Oryza sativa
  Clone ID: PAT_MRT4530_92628C.1
tgtatcttgagacatgtacaaagtacaaacgccttttcctcaagcactgtaacaaaatcatcttcaatcaagttgccaagttctaattctaatcatgaactgagctcattgagctctccaactgaacatgtgattgctgatggaagtaaatcacttcagctcgtccctgcaagcaagattaatgaaagcgttctatttcagatttatttctgaacctcccttcattgcaaggattgaaacccagtagcccaaggaagcgaagaagaatatcagaatcaatggagagttggtctcctttgcaagcatattcatcagactcacaatcaagaacaagcctcacctacggaaatattctggctgaaagaaataattgtgtcccagcaactacatatgctttggtgctactacatgtcataagacactgttcattgtccattaaacatgctcaaataactgcccagatggattcttttgccattccatatgt

SEQ ID NO: 94329 - DNA, 195 bp, Oryza sativa
  Clone ID: PAT_MRT4530_92629C.1
atggaggagtatggtagtggtgggtgcagtgtgaagagcaagacgtggaatgagaggaagctgtgcaccaagcgtggaacctgccgcgccgaaggtttcgactacggctcctgctaccccaatcgaccacgaccttctttcatcggcagattctttcacgccgggtcatttgtcaatcagatcacccactgctga

SEQ ID NO: 94330 - DNA, 357 bp, Oryza sativa
  Clone ID: PAT_MRT4530_9262C.1
tcacggctctatatcggacgcgtgtacccgtggcagcggggaccatggctccgcattaccgattccgcgcttgcggaggaaccgctcgaagcgccgcgtctgagcccaggaagaacgaagccacggcccgaggccacgcggtggcagagcgccgccagatccggtgagcccgccaccgccaagctcgccatgccgtcggcgagctcgtccgcgccgtcgtgggaggaggaggacggcggcgtcgagcccgcgtccggatccgccgccgacgctcgcgaagaagggagggggagaggaactatcgcgttgtggccccgccgccagaaccagcgagcccgccaccgccaagctcgccat

SEQ ID NO: 94331 - DNA, 855 bp, Oryza sativa
  Clone ID: PAT_MRT4530_92630C.1
atgaagatgaaggctctcctccccgtagccgccatgctgctcctcgtctccggccagctcgccgccccggtcaccgccgacggctacgtcggccagctcgccgtgttctggggccgccacaaggaggagggctcgttgcgcgaggcctgcgacaccggccgttacaacatcgtcgtcatcaccttctacaacgtcttcggctaccagcgcggcaggtacggcctcgacttctccggccacccggtcgccgccgtcggcgccgacatcaagcactgccagtccaagggcgtccaggtcctcctctccatcggcggccagggcggcgagtactcgctcccgtcctcccagtcggcctccgacgtcgccgataacctctggaacgcctacctcggcggccgccgcgccggcgtgccccgccccttcggcgacgccgtcgtggacggcatcgacttcttcatcgaccagggcggcgccgaccactacgagcagcttgcccggcagctgcacggccgcggcgtgctgctgacggcgacggtgaggtgcgcgtacccggacagccggatggaggcggcgctggcgacgggggtgttcgcgcgcatccatgtccggatcttcggcgacgaccagtgcaccatgttccccaaggacgcgtgggagaagtgggcggcggcgtacccgcggtgcacggtgttcctgacggtggtggcgtcgccggagcaggacgaggggtacatgttccagaaggatctctactacggcgtgcagcagttcatcgacaaggagcccaactacggagggatcgccatctgggacaggtactacgacaagaaagccaactacagtggtgagggctaa

SEQ ID NO: 94332 - DNA, 5444 bp, Oryza sativa
  Clone ID: PAT_MRT4530_92631C.1
atggcggagggggagctggggcagcagacggtggagctgggcgcggtggtgcggcgggcggcggaggagtcgtacctctcgctgcgggagctcgtggagaagtcgcaggacgagggcgaggggaagggtggcgcctatggcgcgcggcagcggtccgactccgagaagaagatcgacctgctcaaattcatcgcccgcacccgccagcgcatgctccacctccatgtccttgccaaatggtgccaacaggttccattggttaattattgtcaacagcttggatcaactctctccagccatgaaacatgtttcacacaaacagctgattcgctgtactttatgcatgaggggttgcagcaagctcgagctcctatgtttgacatcccttctgctttagaagtcatgcttacaggaaactatcaaagattgccattatgtatagaagatataggaagccaaaataaactttctccggatgaagagaagcgtgctttacagaagttgaatgcaagcgtgcggtacaaagttcttgtgactccaagacccaaagaagtttctaatgtttcagtagctgatggaatagctgtttttcgtgtggatggagaatttaaagttcttcttacacttggttatcgtggccacttagatttatggaggattttgcatttagaggtacttgttggtgacaaaggcgggcctattaagctagaagagaggaggagatttgcacttggtgatgatatagaaagacgaatggcagtttctgagaatcccttcatggtgctgtatgccatacttcatgagttgtgcatctcacttgctatggacactatcattaggaagaccaatgttcttcggcagggaaggtggaaagatgcaataagatctgagcttgtcttagatagcaccacagggcaaactgggagtgctcctctaatgcagcttggtcaggatggggaatatgatttgagtggttctaggatacctggcctaaaaataaattactggcttgatgaaaaagctggtggctcagcagaatctgattcatcaccatttatcaaaattgaggccaggcaagacatgcagataaagtgccagcatagttcgtttatacttgatcctttgacggataaagaagccaatctttctcttgatctgtgttgcattgatgttgaacagctcattttgagagcaattgcttctaataggcacactcgtcttcttgatatccagagacagctgtccaaaaatgttcaaatttctcagtcaccaaaagatgttatcctcaaacgagatgttgaaatagcaaaggacccggtgaagaaaacagagcaaaaggattttgcagattgttgtggaaatgaggtgcttcaagtttatgagaagtctcaaggtactctaaagattccaaaggacatattgcatggttcagacctgatggtgatgggatttccacagtgtgcaaatgcctattatctattgatgcaacttgataaggacttcaggcctgtttttcatttgcttgagacacaatctgatgcaaatgataagacaaacacaaatgcatgcacaaaggaagctttgaggtttaataagattgatattggacagatacagattagtaaaagtgaatcgaatacaaatatgtttgatgcgaagctgcatgccctacagaatatagggaattgtgatgacgtaatggaaaatagactccccattcaaagtggcattgagcctcttccactgctgcctgcttgttcaccatcgttctcttctgttgttgatgaagtttttgaatatgaacacggggctcttgctgttccaaaccattctttgccgcaaactactttgcagtctacctctcatccaggttctctttctgttggttttcaaggagtaggtactagagctaatgcatcaattgaaggggcctcatcagcttacagtggatcaaaattttctcccggggttggtttgaacagttatttaccaagtaatttgagacatgtacaaagtacaaacgccttttcctcaagcactgtaacaaaatcatcttcaatcaagttgccaagttctaattctaatcatgaactgagctcattgagctctccaactgaacatgtgattgctgatggaagtaaatcacttcagctcgtccctgcaagcaagattaatggatcaatcaaccttatcactatgggctctgatggtgcatctagaaagcgttctatttcagatttatttctgaacctcccttcattgcaaggattgaaacccagtagcccaaggaagcgaagaagaatatcagaatcaatggagagttggtctcctttgcaagcatattcatcagactcacaatcaagaacaagcctcacctacggaaatattctggctgaaagaaataattgtgtcccagcaactacatatgcttcggtgctactacatgtcataagacactgttcattgtccattaaacatgctcaaataactgcccagatggattctcttgccattccatatgttgaagaagtgggcttacgatcaccatcctctaatctttggctaaggttaccttttgctcgggatgattcttggaaacacatatgcttacgcctcggcaaggctggaagtatgtcttgggatgttaggataaacgatccacattttagggaactctgggagctaagtacaggaagcaccacaacctcatggggtgttggtgttcgtgtcgcaaacacctctgagatggattcgcatatctcttttgatgcagaaggtgttattttaacttacagcaatgttgaaccagacagtgttcagaagcttgtgtcagatctacgaaggcttgcaaatgcccgttcatttgcccgtggaatgaggagattgattggtgtcaaacttaatgacaagctagatgatgatcagacatctacggatataaagtcgcagcctgttaataagggtaatagtgatgctgcagacaggctatctgaacaaatgagaaagactttcaggattgaagctgttggcttaatgagcttgtggttcagttatggcacaatgcctatggtacactttgttgttgagtgggaaagtgctaagggaggctgcacaatgcatgtttctcctgatcagctttggccacacacaaagtttttggaggatttcgtgaacggtggtgaggtagcatccttcctggactgcattcggctgacagcagggcctttgcttgcccttgggggtgcaattcgtccagcaagaatgcctgtaacggtttcttctggatacaactccatgccaaagcagatgaacaacatccccacccagggaccattagcaaatggttcatcatcaacaaccatgcatcacgcaccttcccccgcaaatgttgctgccacccatttgggaagtcataatctccacactgctgcgatgctttccgctgctggacggggtgggcctggacttgttcctagttctttgctgccctttgatgtttctgttgtgctccgtgggccatactggatacgcattatatatcggaagaaattttctgttgacatgcgctgtttcgctggggatcaggtttggctacaaccagcaactcctcctaaaggaggacctctggttggtggatcgttgccgtgcccacaatttcgaccattcataatggaacatgttgctcagggtctaaatgctcttgaacccagtttcatgaatgctacacaggccggtgcgcatttaaatagcagtgctggaactctgcaacctgcacccaatgcaaatcgtgtaaacgcgactcaaggtattggtatgtccaggcctgcttctggagttgctaaccatgtagcagccaatttgagtcgagcaggtaatgccatgttggcctcttcaggacttgcttcagggattggtggggcctctgtgcgactaacatctggagctaacctccctgttcatgtgaaaggagagctgaatacagctttcattgggcttggggatgatggtggctacggtggtggttgggttcctttggcagctctcaagaaggttttaagagggatcctcaagtaccttggagttctatggttgtttgcacaattgcctgaacttctgaaagagatactggggtcgattttgaaggaaaatgagggtgctctcttgaatttggatcaagagcaacctgcactccggttctatgtgggaggttatgtatttgcagttagtgttcatcgggttcaattgcttctacaagttttaagcgtcaagcgattccatcaccagcaacagcagcagcaagctcagaacagtgcacaggaagagctagctccacctgaaatcaacgagatatgtgattatttcagcaggcgtgttgcctctgaaccatatgatgcttccagagttgcttcatttatcactttgcttacactaccgatttcagtgctgcgagaatttttaaaactaattgcttggaagaaaggtttctcccaggctcatggggacatggccactgctcagagagcccggattgagatttgtctggaaaatcattcagggtcagtttcagatgatatcacagaaagcactttggctaagagcaatgttaagtatgatagagcccacagttctctagagtttgctctgacctttgtacttgatcatgctctcattcctcatatgaatgtagctggcggagctgcctggcttccgtattgtgtatccgtacgactaaagtattcttttggggaaagcaaccatatagcataccttgcaatggacggtagccatggtggcagagcttgctggttgcaatacgaggactgggaaagatgtaagcagaaggtcgccagggcagtggagactgtgaatggctctgttgcggttggagaatcaggccaaggaagattgcgaatggtcgccgagatgatccaaaagcaacttcagctctgtcttcagcagctgagagatggtcctctttctgctggctcaactgcatcatgagcagacaagtctgttgggggaatttagtggccaggttagagaattttgtcgcaacagtttgtctcattgagtgctggggatagtctcagcgccaaaggctcttattgttatgaatgttttgtacagtaaaggtgtgaagcccttgtgttgcttaacctagccccttcctgtaacatagaaaatgtgggtaataatgcacctaggtgtggttgctcatggacttcagcagtgcaaattcagcatagatctgtccatacagaatttgttattccttttatcagaagggagctggtgtttttgttgctgttaatttagacattttatcaggtttgagcagtgtagtgtacattatatataatatactggacttggactagcattctgtttgtaaaattagtactcccagtaaaactaggctttttgtgctgtaaaaaaaaaaaaaa

SEQ ID NO: 94333 - DNA, 608 bp, Oryza sativa
  Clone ID: PAT_MRT4530_92632C.1
caccaatgcatctgccttggacatcttaagaatgatccagatcatttctccggaagttctttctccaaacgtggcagttcagatactgaaactctaaagattgtatcttggtgatgataccaacagcaagcataggcaattcaattcataagctcttcagatttttaatcgcaactgaatgcagcgatacagttcgtcttttgtaggacagccattgaaaacaatgacttttgagaatcatcttctggacattcattcatgctttgctcaaaagctggagtctactgctttggatcagtcactgtatttgcaagtgaagtcaaatatgaagtgaccctgctgactacacagtaaacactcaaaacaaggtgtaattctgtcttaagttctcttgctcctagaagtagctgctcttccgttcagaagccatatgtaaatttaatctatgtaaattgtttgctgttgattcgaaaatctttggtgttcactggtcaggagaactgtcaaattaggtacagcattgtaactgaaagaacatcattactcagttcagtgaactgaagtgtacatgcactatgttgtgacttgtgagtaataaaaaaaaaaaa

SEQ ID NO: 94334 - DNA, 357 bp, Oryza sativa
  Clone ID: PAT_MRT4530_92633C.1
atggctaccactgatacaaccattactcatatcatggatcaacaagaagtcatcaaggtcaagttctccaagcgttggaatccgattcagccacctgcttcactgttgacttcaaacagccaccaaatctacgtacgagctccattttcatgccgtgagtacttgatggaaaactctcgaagtcttctttctaatggatccaccctcatctccgaattccatctcatttggccgcaatcacagaatcaaggtgttgcgccacctataatgggcctttggggttgtaacttcgtttggaataatgttgatctgtaccggcaagatcaacaacccacggagaggtgtatcgatctctaa

SEQ ID NO: 94335 - DNA, 579 bp, Oryza sativa
  Clone ID: PAT_MRT4530_92634C.1
atggaggtgcgcggctggaggcgacaggcggtggtggagctcgggatgtggctgaacgacgccgacgagcagcggaggttggtggcgcggtggggcggctttccggtggctattggggaaaatggagcggctgcagggttgcggcagagagcggcgaacgcggtagcgcaagcggcgtggcgcggggacgtcaggagcggcagcagcggccgaccgaagagctcccgcgagcggcggcgcacggcctcaaggggaggagggggttccgggcatgggggagcttgggagagagggggaaacggaggaggggagcccggggatcttttttatgggcgcgggggagggagatcatggctgagaggggtggaatcaggcggcaaccgaccggcgacgtgggcgacatcgtgggtgaagtggagctcaaattggcgccaaaaattggggaaaagtgggggaaaatgtgtaggagatggtggggagccgatttcatgtggtttgggtgcgagggcgcgggcgggagaacccggaatcggcggcgacgtgggcggcaacggccgtccatggcagcttctgctctag

SEQ ID NO: 94336 - DNA, 452 bp, Oryza sativa
  Clone ID: PAT_MRT4530_92635C.1
cggtgcgccaccggacagtcactatagacggttcggttccgatctccttggcttttctggcgcagacgaccgttgcagctccggggcagttggcgcaccggacactgtccggtgacccctgccgaccgttggagcgggccacgcatcgcccgcggattgcgcggccgaccgttgcgctcgcgaccgttggctcactagacagtccggtgcaccaccggacagtccggtgaattatagccgtacgccgacaatttttcccgagagcaaccttttcaccggagtccagcctggcgcaccggacggtccagtgtgccaaatagagctgaactcggctgcacacagccaagtccgttgcacttcttttctttttgtcagggaccataattaggggtgccctcaagacgcctaattctcagctggccaccccggtgaggttaaagctgcgcaggcct

SEQ ID NO: 94337 - DNA, 3999 bp, Oryza sativa
  Clone ID: PAT_MRT4530_92636C.1
atgtcgagtgaagacggaaatccacggtacaccccgccggggcggcgtggagccgccggcggaagcggcagctcaggcgccggcaatgacgggcagattgtgatgcagcaggcaccgcgagagacatgcgtgccactgcgttaccccgtgctgacgagaaccaactatgccgactgggcgttgttgatgcgtgtgaatttgcaggcgcaaggcctgtgggcggctgttgatccaggctacgccgagttcagggaggaccggcaagcgatggctgctcttcttcaggcagtccccaaggagatgctgcgccctttgtccaagaaggatacagccaaggaggtgtgggacgcgatcaagacgatgcgcgtcggcgtggatcgtgtccgggaagcgcgcgagcaggcgttgcggtctcagtatgaggccatccagttcaaggacggcgagacggtggaggatttcgcccttcgtctgcatgcactcgtcatcgatatccgtgacatgggtggcacccttaccgacgaacacatgttgaagaaactgttgcgagttgtaccattccactatcatcagcttgctttgtcgattgagcagatgcttgatctcaagaccatgccactggaggagctggtcgggcgccttgccgccatcgaatcctataagcctgaatggactgctcgcatgaagaagaaggagccgcaggacacctctcctggtaaaaagggtgctggctcatcgtccagctcaaagaagcagtggcgcggcaagcgcggaggacaagggtgctccggtgagggcagctccggcaaggatggtggcgcgccggcggcgtcgcgtgatagatcatcggagtgccgcaaaccacggcgtgagcgtcgccaagaggcgcatgttgctgaggctcaggaggagcctgttctgctgctggcgaccgcgagtgcgatggtcaccacggccgcgccagggacgatcgtgctggatgaaccgcacgcccaactgcatgttggccgccatgaacagttgtccccggatcgctggttcctagacaccggcgcaagcaatcacatgtcgggtcaccgagaattcttcaccgacctcgatgacacggtgcgcggtgtcgtgcgcttcggcgacggctccgtcatcgacatttgcggcttcggcgacgtgaccctggaatgctacaacggggcacaccgtatcgtgtctggggtgtattacatcccaaaactcaagagcaacttgatcagtcttggccagcttgatgagaacggctgcgcaatccacattgacgatggtgtgatgacgatccgggacagggcgcgcgctctagttgcgaaggtgacgaggactgaagggcgctcgtacctgttggatttgaaggtggctcagcctgtatgcttggtggcgagctgtgaagaggtgccgtggttgtggcatgcacgctacgggcatctcaatttcgactccttgcgtcggctggctcagggcgctatggtgcgtggtctgcctgacatcgaacaggtggatcgcatttgcgattgctgtcagatcgcgaagcagcggcgtgcgccgttcccgtcggaggcgaaataccgagcaacggagccgctcgaactcgtccatggtgatctctgtggaccaatcagcccagccacgccaggtggtaaacgccatttactgttgcttgttgatgatatgtcaagatatatgtgggttgtcctactgggaaccaaagaccaagctccggcggccatcagggacatccaggcgaagggcgtggcgtgcgacgtcacctcaccgttgccctattcaccgcagcagaatggtgttgttgaacggcgaaatcagacgatcgtggcaatggcgcggagtctgttgaaggcaaaggagatgcctggtcgtttttggggtgaggtcgtcgtcaccgcagtgcacatcctgaaccggtcgccgacgagggcgctcgacggcctgacaccctatgaagcttggtatggcaggcgcccgaatgtgcattattttcgcacttttggctgtgtggcgtatgtgaagaatgtgagaccacacttgtcgaagctggaggacagaagcaaggcgatggtgttccttggttatgaggacggaagtaaggcttacagggtgttcgacctggtgactaaccgcgttcatgtgagcagagatgtggtgttcgacgaagaagcgaagtgggactgggcggcaaccgggaccggtgatgatgaagctgaccctgctgatatattttctatctcgtacacttttcactctgtcctagatgatgaacagtgctctggagcacgccctgacgcagacgagccacaagatgctgttacaccggcgccacgacgctatcgcacacttgcaaacatcaacgagactaccagtcctgtccgagagtttcagtactccgggctgtgccttctggcggccgatgagccagtaagcttcacggaagctgaagtgcaggcctgctggcgcaaggctatgattgatgaggtgaagagcatcgaggaaaacaagacgtggagtctagttccactgcctgctgaacatcgaccgataggtctgaaatgggtgtacaagatcaagcgtgatcttgttggcagcattgtgaagtacaaggccagattggtagctaagggttatgtgcaacaacatggcattgattttgaggaagtgtttgctccagtggcaaggattgaaaccgttaggtcgttactagcactggctgctcaagagggatggcaggtgcatcatatggatgttaaatctgcatttctcaatggtgatttggaagaggaggtgtatgtctcacagccattgggctttgaagtgactggtgaagaagctaaggtgtatcgtctgcacaaagctctgtatggtcttcgtcaagctccaagagcatggtatgctaagttagatgccacactaattaagatgggttttgaagggagcacttctgatccagcagtatacaagagaaacagtgagcactctacactgattgtgggggtgtatgtggatgatctggtcattataggctcacaggtttcagtcatccaaggtttcaaggttgaaatgcaaaaagaattcaagatgagtgatttggggttgctgagtttctatctggggattcaggtgaagcaaacagcgactggaattgctttaaaccagtctgcatatgctctgaatatcttgaagaaaaatggcatggatggatgcaatccgtgtcaggttccaatggaggcaagattgaggttgagtaaagaaagtaccaattctcttgtagatgctacacagtatagaagtctcattggaagtttgagatacctagcgaacaccaggctagatttagcttatgcagttgggtatttgagtcgtttcatggagaagcctgctacagatcacctcgctgctgcaaaacatttgctaagatatgttgccggtacagttggatggggctgctggtatggaagaaagcagagtaatattgtgccactgacaggctattgtgatagtgatatgggtggagatgttgatgataggaagagcactacaggagtggtgtttgcattgggtgaaaatatcatcacatggcagtcacagaaacagaaggtggtggcattatcatcctgtgaagctgagtatatagctgtaaccacagcagcctgccaaggaatttggcttgctcgtttgatttcagaaatcacaggtgatgagaagaagtgtgttgttctgaaggtggacaacaaatcagcaatttccttgtgcaaaaatcctttactgaatgacagaagtaagcacattgacacgcggttccatttcatccgaggttatgttgagaagaaggagattgaagtggagtacgtgagaactgaagaacaagttgctgatattctgacaaagtcacttggaagagttaagtttcaggagctgcaaggcagacttggaatgcttgagatacagccacaatattag

SEQ ID NO: 94338 - DNA, 1906 bp, Oryza sativa
  Clone ID: PAT_MRT4530_92637C.1
atgaggccgtttggcatgctctttctggtccttgacgtcgagctgctgcgcagcgcgggtgtccgcggcggcggtggcgagggagcaggcggagagtgcggcacagcacaacgagaaggtggagctggagcgacgctgcgtgacggcgcgacggagaaggacagtgcgcgcgagaaaagagcaccgcggccgggcggcacgatgcgggtgcgcagagaccatgcctgggtgaggagggggttgccggcgctggattcgggtgcaggcacggccgactacgggcccgtgcgcggcgtggtgcggaagcggcgcgattgcggtgtggctggcgacgacggccttgctgcgacgcaggcacggtggtcggcgtcatgcggggctgctcggctaggtagtgcactggccgtgcgagatggcgccgcgccgggtgtgcagcagcttgcggcaactcgtggccgcgatggggcgcgtgggtgcaggcagcggctagcggccagcagctcgcggtgcagtgccgtgcaaggcacagccgatgggcagcagttcttcgtcgtcatgtggcccgcccaaagttgtgtctgctccgttcatgcaacggagacgaaccgcgtgacggcgaggcgtgcgtcggtgcggcggagaaggacggcgtcggcggcgctgcagcacgccgtcatccgcatcggcacatcctcctcaccaaaaatgccaccacccatggccatggcgacccccgccgcctccgccaccctcaccctcctcctccccgcctcgccgccaatgcggctgcgcgcgcggcggccgccggcaaggacgagcaggagcaggcccctcctcctccgcgcgtcgtgcgcctacgcgctccgggaggggcagtcgcagcggttccaccgcctgccctgcggcctcgacctcgaggttatcgcccagcagccgcctgccccggccacgggcggtggcggcgccgccgcgaggccgccgctggtgttcgtgcacgggagcttccacgcggcgtggtgctgggcggagcactggctccccttcttctccagcgccgggttcccctgctacgcgctcagcctccgcgcccagggtgaaagtagcgttccgccagaaaaagtggctggcacacttgagggaatgagtggtagtggtactgaacttctgcatccaaagcttgctggtgctgttcttgtatgctctgtgcctccctcaggaaatagtgggttggtgtggcgttaccttttgaccaaaccagttgctgccatcaagtcgactgctattgatatcacaattatggtcatccacacccagaagtgtatatgcctcctcatgctgtaccaagggctaatgaaggacagctcaaagttaccactatttgacctaaggaagctcaatgcatcattgcctgtagcttctgtgccaaataatacagtaaacatcctcgttgtgggcgccagcagtgacttcattgtttgccaaaaaaaaaatggctccaagaaacgccgcgtgtcgatcattctcctcgccgtcgccgtcgccgtggttcctctcgccgccgccgtcgcaggtaataacaacatgcaaatcgtaccaactaccagtgaccagccggccggcggcgagagcaccgccgtcgtcgccgaggcgttgatcatcagtcggccaccatgggaaggcggcggggtggccggcggcgcgcaggcgatgagcgagtgcatggagaagacgctgtacacggggccgtgcctggaggcgctgtgcacggcggcgtgcatcctggagctcaacaacggcggccactgccgaggcggcttcttgtttttcaagaaatgcagctgcttcttgtgcttctagtgaacaaaaaaaaaaaaaaaaaactcgagactagttctctccctcgtgc

SEQ ID NO: 94339 - DNA, 177 bp, Oryza sativa
  Clone ID: PAT_MRT4530_92638C.1
atggtccagtacagtcaaaggatgctgtatagaaggcatgtggggtggcagaaggggctgaacaggggccttgaatcccttggcggcggggtttcggagtcggccacgaggagtcctccccgcgccagcggtggttcgacggaggcggtggcagcggcgaggcgagcagtggggtag

SEQ ID NO: 94340 - DNA, 212 bp, Oryza sativa
  Clone ID: PAT_MRT4530_92639C.1
gtcaaaccattcttaaattactctttgagcgggtggcttataaggagcaattaattaactaattaattaatatttcaaagttcagggactagaaggtgcacaagattaacttgagaaggtaccctctgaagaacagggagaaaacaatttgtgttacaaaagaaggaccctaatcaccaacaccaaaacagatttacatcatacacaacacc

SEQ ID NO: 94341 - DNA, 588 bp, Oryza sativa
  Clone ID: PAT_MRT4530_9263C.1
atggctccgcattaccgattccgcgcttgcggaggaaccgctcgaagcgccgcgtctgagcccaggaagaacgaagccacggcccgaggccacgcggtggcagagctggagccccatccgccgccaccgctacttcccgacgctgacgctcgcgaagaagggagggggagaggaaccgccgccagatccggtgagcccgccaccgccaagctcgccatgccgtcggcgagctcgtccgcgccgtcgtgggaggaggaggacggcggcgtcgagcccgcgtccggatccgccgccgacgctcgcgaagaagggagggggagaggaactatcgcgttgtggccccgccgccagaaccagcgagcccgccaccgccaagctcgccatgccgtcggcgagctcgtccgcaccgtcgtgggggaggaggacggcagcgtcgagcccgcgtccggatccgccgtcgagaacccggatccgccaccgagatggggagctcgccggcaaatatggcaaatgagagagggagagagatggctcaagagagagagggggaaagagggagagagaattaaaaagagagggggaagaggc

SEQ ID NO: 94342 - DNA, 1068 bp, Oryza sativa
  Clone ID: PAT_MRT4530_92640C.1
atggaaggagctataattttacatgagaccttacatgagatgcataaaagaaagaaggatggtgttattcttaagcttgattttgagaaagcctatgataaggttgattggaagtttctacaacaaactttaagaatgaagggctttgagcctaggtggtgtaagtggattgatcaagtggtaagaggtggcagtgtagcggtgaaagttaatgatgagataggaaacttctttcaaacaaaaaagggactgaggcagggggatcccctctcccctttacttttcaacttggtggcagacatgctggcagtgttaattcagagaacaagcgagcatgatgacacgatacattttatggagcatgacctagaggatgctaaaaatcttaaacttgtactaagtgctttcaaaagattttgggaagactgttggcttggaaaccaatctttagagaaaagatacccatcgttgtacaatcttgtaagaaataagaatgtggtggtggctaaggtgttggagagggttcctttgaacgtctcctttaggagagccataataggagataatttgaaagcatggcatgagattgtagctaacgtggttgatataaaccttagagggcaaaaggataggtttacttgggatgctagtaaaaatggaactttcacagtcaactcgatgtataaaaaactcatgtttggaaatgtgataccaaggcaatcttttatttggaagctaagacttctgttgaaaataaagatcttcttgtggtatttaaaagagggggtcattttaaccaaggataatttagctaagaggaggtggaaaggtagccttagatgttgcttttgtaggtctcatgagataatacaacacctcttctttgattgccccatggtaattttcagagggacacactgggcaagactttggtctttgttgcttaaggaagaggatggcaacatgttgaaaaattattgcaaggtgttagagatgagggtcttagaattcttctctaattatggctggaatttcagagggagaattgaagcttacactgttgtttaa

SEQ ID NO: 94343 - DNA, 1248 bp, Oryza sativa
  Clone ID: PAT_MRT4530_92641C.1
atggaaggagctataattttacatgagaccttacatgagatgcataaaagaaagaaggatggtgttattcttaagcttgattttgagaaagcctatgataaggttgattggaagtttctacaacaaactttaagaatgaagggctttgagcctaggtggtgtaagtggattgatcaagtggtaagaggtggcagtgtagcggtgaaagttaatgatgagataggaaacttctttcaaacaaaaaagggactgaggcagggggatcccctctcccctttacttttcaacttggtggcagacatgctggcagtgttaattcagagaacaagcgagcatgatgacacgatactttttatggagcatgacctagaggatgctaaaaatcttaaacttgtactaagtgctttcgaaagagggggtctggcaaaacttgtctggcaaaacttattgaggaaaaaatatcttgccaagaagactataatgcaggtccaaaagcaaaggggggactcccacttttggacaggtctaatgggagtgaaggatacctttagctcttttggctcgtttaaacttcaggatggtttacaaatcagattttgggaagactgttggcttggaaaccaatctttagagaaaatatacccatcgttgtacaatcttgtaagaaataagaatgtggtggtggctaaggtgttggagagggttcctttgaacgtctcctttaggagagccataataggagataatttgaaagcatggcatgagattgtagctaacgtggttgatataaaccttagagggcaaaaggataggtttacttgggatgctagtaaaaatggaactttcacagtcaactcgatgtataaaaaactcatgtttggaaatgtgataccaaggcaatcttttatttggaagctaagacttccgttgaaaataaagatcttcttgtggtatttaaaagagggggtcattttaaccaaggataatttagctaagaggaggtggaaaggtagccttagatgttgcttttgtaggtctcatgagacaatacaatacctcttctttgattgccccatggtaattttcagagggacacactgggcaagactttggtctttgttgcttaaggaagaggatggcaacatgttgaaaaattattgcaaggtgttagagatgagggtcttagaattcttctctaattatggctggaatttcagagggagaattgaagcttacactgttgtttaa

SEQ ID NO: 94344 - DNA, 1782 bp, Oryza sativa
  Clone ID: PAT_MRT4530_92642C.1
atggaaggagctataattttacatgagaccttacatgagatgcataaaagaaagaaggatggtgttattcttaagcttgattttgagaaagcctatgataaggttgattggaagtttctacaacaaactttaagaatgaagggctttgagcctaggtggtgtaagtggattgatcaagtggtaagaggtggcagtgtagcggtgaaagttaatgatgagataggaaacttctttcaaacaaaaaagggactgaggcagggggatcccctctcccctttacttttcaacttggtggcagacatgctggcagtgttaattcagagaacaagcgagcatggtaagattcatggagtgattccacatttagtagacgatggtctttccattcttcaatacgcagatgacacgatactttttatggagcatgacctagaggatgctaaaaatcttaaacttgtactaagtgctttcgaaaggttatctggcttgaagattaattttcataagagtgaattgttgtgttttggcaaagctatagaggttgaaagagagtatgctctcctctttgggtgcaaaactggttcatatacactaaagtacttgggcctcccgatgcattacagaaagttgtctaataaagattggaaggaagtagaagaaagatttcagaaaagattaggtagttggaaaggcaagctactttcggttggaggtcgtctcgtgctcatcaactcagtgttgagcagccttgcaatgtatatgttatccttctttgaagtgcctaaaggcataatcaaaaagctggactattatagatccagatttttttggcaaagtgatgaacacaagaagaagtacagattggctagatggagtgttctatgtaaacccaaggaatgtgggggcttagggattcagaatcttgaggttcaaaataagtgcttgttgaggggtctggcaaaacttgtctggcaaaacttattgaggaaaaaatatcttgccaagaagactataatgcaggtccaaaagcaaaggggggactcccacttttggacaggtctaatgggagtgaaggatacctttagctcttttggctcgtttaaacttcaggatggtttacaaatcagattttgggaagactgttggcttggaaaccaatctttagagaaaatatacccatcgttgtacaatcttgtaagaaataagaatgtggtggtggctaaggtgttggagagggttcctttgaacgtctcctttaggagagccataataggagataatttgaaagcatggcatgagattgtagctaacgtggttgatataaaccttagagggcaaaaggataggtttacttgggatgctagtaaaaatggaactttcacagtcaactcgatgtataaaaaactcatgtttggaaatgtgataccaaggcaatcttttatttggaagctaagacttccgttgaaaataaagatcttcttgtggtatttaaaagagggggtcattttaaccaaggataatttagctaagaggaggtggaaaggtagccttagatgttgcttttgtaggtctcatgagacaatacaatacctcttctttgattgccccatggtaattttcagagggacacactgggcaagactttggtctttgttgcttaaggaagaggatggcaacatgttgaaaaattattgcaaggtgttagagatgagggtcttagaattcttctctaattatggctggaatttcagagggagaattgaagcttacactgttgtttaa

SEQ ID NO: 94345 - DNA, 397 bp, Oryza sativa
  Clone ID: PAT_MRT4530_92643C.1
gggcaaaaactttttaataaaaaaaaacaccctttttttgggccggtttttttttaaacacacaaattgccctaagggttttttgggcattgaaaaaaaacaattacggggccagcgcgaaaacaattggccctttttttccaaatttataaaacgataaccggaacaaagccggcaaaagaaaaaaaatgtttctcccccaaaaacccatttttggggacccattccctaacgaggcatgtttgcatacaaaaagcttggggggggtaattttttttttttttcccccccccatttttttttttttttttttggggaaaaccacccctcgatccccatttttgaccaacccaaacaaccacctgttctttttattcattaagccccccagaccctt

SEQ ID NO: 94346 - DNA, 4299 bp, Oryza sativa
  Clone ID: PAT_MRT4530_92644C.1
atggatgagaatagaaaattatctgatgacatgtccaagaaaatggaacctattcactctaatggagaggcaggggaagataaaactataattattgaacctgaaagtgatgcaaataaacttgaagtggaaactgacgcaagacatggtatctgtgaggcgcacaaggcgcatgaatatggaacaatggaaaatgatttgcatgaggaagcatccaccaccgatgatgattcagagaatgactcatatgaataccttcttcgggaatcggataatgagcaaacttcagagtctgatgctggtgagggagacaatgaggcacctctcactgatgaagaagttgaaacattaattaccgaattccttgacgctgagagcaaggctgctcaagcgcaagaatcacttgaaaaggagtcactggaaaagattgaatctgaagtaaggttggagctatcggagagtctccaaggaaatgagttagagtcagccgtttctactgagatgaagcaatacaagaaggaatgggaatctgaacttgatgatttggagactcacattgctgttctcttggagcaacttgatgctgctggtgtcgaacttcccagcctctacaagtctatagaaagccaagttccaaatgtttgtgaaactgaagcatggaagaacagggctcactgggctggttatcaagtgcctgaggaagctaataaatcaatcagaaaagctgatgaatacctccaatcttgtagacctgtaaggagaaaacatgggaggttgctggaggaaggtgctagtggctttcttgctggaaagattcctgttggggatgatggatctgcacaatgccatgagaaaagttggaatgcattcaatgaacttaccaaatctaaggaatatgctgaaagttctttcggaagtagtaactgggcatcagtttatctggccagtaccccacaagaagcggctgctttaggtctccaatttccaggagttgatgaggtagaggagatagctgaagttgagggtgctgttagtgacataaaaggtgtcgatgaaatagagctttctgaagtacagagaagaaaatacagaaaggtaccagaagaggatgatgcaaagatgacaaaacgtctgcagcgccatttgaaagaaagaaggacaagacatttgcataaggagaacattggtttggcgtcatcatcaaatggatgcttttctgttgagctagcgaagcgcacacgtgaagatgatgttgagtttgacaataagaggtcaaaaactgtaattattgaaagtgatgatgacatgcagactgatagcaagccagattcagcaccaagtgaaaatgcggatgagattattgatcttgatatcttcccatcacaaagccctaaacttggtgataaagttcggcctaaacctttcaagtgcactatttgcactgaaatgttgaatgtccctgaagtgcaccgccacccagtattggatgttataatttgtggatcttgcagatttctagtgatagagaagaatcgtctcgaggatcctgtgtctggtggttattgcacctggtgtgtaaaaagtgaacagcttcaaagttgcagctcttgtaaactgcttttctgcagaaattgcttgtcaaagaattttggtgaagaaggcttatcggaagctagagtagctggttggcaatgttgctgctgcctacccagtcaactggaacatttaatttctgactgtgacaaggccctaggtggtgttgagtcttctgatcctgagaatgactttgcagagctttctgtattagagagcaatggtccttttagcaagcataaaatgaaaaagaggataagaagaatcatggatgacgaagaacttggagaggaaacaaagcttaaaattgcaatggagaaggctaggcaagaacatctgaagtccatgcaagagcagtctgccagcaagttaaagagcaacaatatcggaatttccttggaagcaccatctgaggtttctgaatatgttggggatggacatatagtaaaccttgcccgcgaggaagatgaagcacctgttagaattccaagcagcatatctgctaaactgaaacctcatcagtatcgcatcaccatcacactggtcatgatttctgtacagttgtacctatactgttacaggaagctaaaatatatcatgatatttcaggtatcaggaataagatttatgtgggaaaatgtgatccaatctgtcaagaaggtcaaatctggggataaaggttttggttgcattttggctcacaacatgggccttgggaaaacttttcaggttattacattcctgtatactgttatgagatgcatccagttgggactgcgcacggcgcttatagttacccccgttaatgttttgcataactggaagaaagagttcatcaaatggtgtccagcagaacttaagccacttcgtgtgtatatgttggaggatgttccaaggtgcagggcaaacattcagtatttactaaaaaagtggcgaataaaaggtggcgtgcttctgattggttattcatcatttagaaacctttcccttggaaggagtgcgagggacaaaactgttgcaaacgagatcaccaatgctttgcagatgtgggttttgatacagtccatttacatatgtcacaatcagtgtgggccagatattcttgtatgtgatgaagcacatataattaagaacaggagagctgacactacacaagctttgaaacaaatggttgattttgttagggaaggttatcttggaagtagccatgagttccgtaacaggttccagaaccccattgaaaatgggcagcacacgaattctacatcagatgatgtcaagatcatgaaccaacggtcacatattctgtatgaacaactgaagggatttgtccagcgaatggacatgaacgtggtgaagaatgatctaccagaaaagaaggtttttgttgttactgttaaactctctcaactacaaaggaagctgtacagaagattcttggacgtgaatggtttctcaagcagtgctgcttcagaaaaatcttttcagcggagtggcttctttgccaagtaccaaacgttagcgctgatatggaaccatcctggtcttctccagatggctaaacagaaaggaaatttgcgccaagaagatgtcgagtcctttctgatggatgagagctctagtgatgataatattgaaaattacttgccaaatggagagaagctgagaagcagaaatgatcagctatccaagaaaagttctgatgttgtaaatgaggaaagtaactggtgggagaatcttttagatgaaaatgcttataaggaagcagattatagtggcaaaatggttttactccttgatatcctgtcatcatgttctgaattgggtgacaaggcattagtgttcagccagagcttgagcactctggatttggtggaattttatctatctaagttgcaagttaatggaaaagagggcaaatattggaaacaaggcaaggattggtacaggattgatgggagcactccatcttctgagcgacaaaatcttgtggagaggtatggccagaccaagcctgtgtatgcttaccgcctaatggctcatgcaacaatggaagagaaaatatataaacggcaggtgacaaaagaagggcttgcagcaagggtggtggatagacagcaagtgtctagaacaatctctaaagaagagatgttgcatcttttcgagtttggtgatgaggaactactggagcagagcggttctaccatgaatggtcacagtaaagttgggactgagaagccacctactcccaactccagtgaaaccactgaacatttacctttggacaggctcatggtgaacctacttcatgaccactcccggtggatcgcaagttaccatgaacatgaaacccttctgcaagaaaatgaagaagaaaggcttaccaaggaggagcaagatatggcatggttaagctacaacaagttgctagaagttgccccgaggaaagctacacatgacgccgagagaaaaccaagtactgttccaacagagagcagccttatacaaccacctaaagctacttcaagaagccggcaaccccagcagcctaagatcacttcaaacaaccaaaagaagtgtaacaacctgagccacttgcttactctgagaagccaaggcaccaagcctggatgcagcacgagttgcaaagaatgtggccaggatattagttgggagacgctaaacagagacggtagatcaaggtga

SEQ ID NO: 94347 - DNA, 267 bp, Oryza sativa
  unsure (1)..(267): unsure at all n locations
  Clone ID: PAT_MRT4530_92645C.1
gggggggaatttcattcgatagcaaagcatgcaaatcagcccccaatttcaaacaaaaggggtttgatcccccccaaatgataagccggtctttttttcccgcccaaaaaccaaatttaaatttagcccctgatagcatccactagctggtggatttaacaaaacagatccttttgtcccggnnnttnantttttcttttccttttttggcttagaagcccttttttggggggccccaaaaaggcgctgggtcatcctctcaaaacg

SEQ ID NO: 94348 - DNA, 297 bp, Oryza sativa
  Clone ID: PAT_MRT4530_92646C.1
cgctccagcgcagcaaagggggagaggaaggggagagagagagagagaggggggaaggaccggagatggccaccacatctaccgccctcgttggccctcgcccacccgctcgccgatggtcgccgccgccgtccccactgcccgctgatggttgtcgccgccgtccagcacgagcctgtcgatggccgccgcatcgccgtccccgccgccgccgctactcccgagtcccgaccgccagacgccaccgccatccccactgccgcttcggtggtgaaaagaggctgggggagagaatga

SEQ ID NO: 94349 - DNA, 845 bp, Oryza sativa
  Clone ID: PAT_MRT4530_92647C.1
tctcctactcagtgcacaacagaatgctagtggggtgccccaacagtttttagatgcaaaggaagctgagattcagcagaaaaaggcagaggaaagtagaattgctcaggagatccagaagaaacgggagaaagatggaagggagcaggaactagagaaacaaaaattgatggacggggatgccggtaattctagattaggtcctgatcgtgctgatgctgaggaggaaaaagaactggattctaagcatagctcaagaacaaagagccgggaaagccttaggtccaggagcatctccttgtcgcctcgcggtaggcggcgatctgattctcctaggaggcgttctgcatctacttccagaaattccatttcttttgggagacaagaacgatcttcaaggcgctcagtttcacctaggcgttctttttctccacgaaagcgttctccaagaagtaccccttcgatgtcgaggcggagatcaccgtattccagaagatcaccttcagtaccaagacatcgatctccgtcacctcatcgtagatctcatattcgcaggaaatctccaccttttgtgcgtcagagatcaccatctccacaccatcgccggtctccaggtcgtgcaccaagatcaccatctcctgcacgtcatagatctcctcggcgcaggtcatctctagacaggcattggtctccatctccaggaagacgtaggcctcggtccccttcacccggacgacgtaggccacggtccccttcacccggacgacgtaggccacggtccccttcaccaggaagacgtaggccacggtccccttcaccaggaagacgtaggccacggtctccat

SEQ ID NO: 94350 - DNA, 1461 bp, Oryza sativa
  Clone ID: PAT_MRT4530_92648C.1
atccccgggctgcaggaatcggcacgaggtaatgctgcattacttgcaatgtccattgcatccctgaagtaacactcgtccttggaagtaatgcagcattaggtgttcaagtgacattttctttgagaaatgggaggaaattatacaagacacaatggcttctgccgtttgttgtcgtgggatagcatctgagtttcttctctctatattctcccaaatccctctttagagagcattctggtttaaaggttgcaggctacctatgtgtatgaaaacctcagcaacttgattgtgtgacttttgtatttgatgacggacagtctccccaatatcatgtgctgcactgacacttaagaaaggatatacctcaatgtgtacatcaagatataaggaggtcccagcttttcttcccctcaaccgatggcatccctttacaccatcaacctgcaaaattgtttccttgattggttgtagaagcgatggatccacagctgcatcaactagttccagcacactctcatatccagtatgaacaccagctttaagaatcatgcccgagacaacaagtccagctagtggatcaagataaggaactccaagaatggagccacctacccctaatagggcaacaacagaagaaatagcatctgagcgatggtgccatgcattagctttcatcagcccgctcccttccttttctccagctctttttgtgatccaatagagcccttctttgacagatattgcaaaagctgtcacactcaatgcaaggattggatgttccaaatctattccatggtgatgcccactgctaccatggctatgatgagcatgcgatacattgccaataatatctggagcagaagacataactccctgaagaacgtcaaaagcatgccaggcaatcccacctgcagtaactaataacatacttgaaattccaagagctcctaaactctcaaactttccatgaccatacggatgctccttgtctctgggagccttggccgccttgtacgacagcagagccaccccgctcagcacaatgtcggagagggagtgagcggcgtcggcggcgatcgcggtgctgccggagaggtagccggtgacggccttcccgacggtgaggacgacgtcggccgcgagccccagccggaagatcctctccgacgcctcgccccccacctcctcgccgtggtggtggtggtgggagtggcccacgtggccgcgggaggggacgagccagtgcggctggccgccgccgctcggctcccacggcgaggcgaggagaggggcgacgagcgcggaggcggcggggcgtggcccccggaggcgggaggaggaggccgcggcgcgggccacgcaggcggcgaggtgggcgaggcggaagcccatcggcgttcggggggaagcgaaggctgatctctccagattcttcggcctcgtgccgaattcctgcag

SEQ ID NO: 94351 - DNA, 920 bp, Oryza sativa
  unsure (1)..(920): unsure at all n locations
  Clone ID: PAT_MRT4530_92649C.1
ccacgcgtccggatatccactagtggccacgccgcgccaccccctacccctcgccacgccgcgccacgccacgcctcgcccatctcctccctataaacccccccgcgcccccagctgctcgggcggcggcggcggcggcgcgaactcgaatctcttctgtccccttccaccaccgtccccccacaggagatgctgcgctgccacacgccgccgcaatgccgcctcggcgcgggcggcgcgggcgcgggggtgctgctgaggcagcggagcgaggtggcggtgcggtgccgcgcgcagcaggtgtccggggtcgaggcggcggcggggacaccggcggcgcgggcggcggtggagggtggggagaggacgagcctggcggagcggctgcggctggggagcctgctggaggacgggctgtcgtacaaggagagcttcatcgtgcggtgctacgaggtgggcatcaacaagacggccaccgtcgagaccatcgccaacctcctccaggaggtagggtgtaaccatgcacaaagtgttgggttctccactgatggttttgccacaactaccacaatgagaaaacttggtctaatttgggtgaccaaccgaatgcacattgagatctacaagtacccagcatggggtgatgttgtggagattgaaacttggtgccaagaagatggaaagatcggtactcgtcgtgattggatccttaaggatctggctaatggtgaagttatcggcagagctaccagcaagtgggtcatgatgaaccaaaatacacgcagacttcaaagagtgagtgatgacgtgagggatgagggttttgtacactgtccaaagactncaagattagcattccncgaggaaaataatggcagtttgaaaaagatttcagtttttactgatcctgcacagcactc

SEQ ID NO: 94352 - DNA, 349 bp, Oryza sativa
  Clone ID: PAT_MRT4530_9264C.1
gatctaaatatttcaaggggggatattatatatctacgggggataaggggaacttgcttttcctatcttttttaaacccacatagggaagaacacgttatgtaacacagctactgggcttgcttgcagctataaaaagccatacaccctgacacttcatctgccatacctactttacaatcctttaatgtacaaaatttcagctgtatcacgctatgtctttatagcagcacaaggcagcataaaaattttcaaggcgtttttcaagccaaaaatacttatcccaacggcaccgagcgaaattacggcaccctttttcttaaacatgaatggaaagcagataatcgctg

SEQ ID NO: 94353 - DNA, 1649 bp, Oryza sativa
  Clone ID: PAT_MRT4530_92650C.1
gcacgagggcgccacgccacgcctcgcccatctcctccctataaacccccccgcgcccccagcagctcgggcggcggcggcggcggcgcgaactcgaatctcttctgtccccttccaccaccgtccccccacaggagatgctgcgctgccacacgccgccgcaatgccgcctcggcgcgggcggcgcgggcgcgggggtgctgctgaggcagcggagcgaggtggcggtgcggtgccgcgcgcagcaggtgtccggggtcgaggcggcggcggggacaccggcggcgcgggcggcggtggagggtggggagaggacgagcctggcggagcggctgcggctggggagcctgctggaggacgggctgtcgtacaaggagagcttcatcgtgcggtgctacgaggtgggcatcaacaagacggccaccgtcgagaccatcgccaacctcctccaggtgcgccccccaccacccatgccgggattcctccccgtctcccaaagctactcttcgctggtcagattcgtgctctccgtggctcgatttggggtggagtcctctcggattgcgaaatgtgctgcggccacggaggtagggtgtaaccatgcacaaagtgttgggttctccactgatggttttgccacaactaccacaatgagaaaacttggtctaatttgggtgaccaaccgaatgcacattgagatctacaagtacccagcatggggtgatgttgtggagattgaaacttggtgccaagaagatggaaagatcggtactcgtcgtgattggatccttaaggatctggctaatggtgaagttatcggcagagctaccagcaagtgggtcatgatgaaccaaaatacacgcagacttcaaagagtgagtgatgacgtgagggatgaggtttttgtacactgtccaaagactccaagattagcattccccgaggaaaataatggcagtttgaaaaagattccagttcttactgatcctgcacagcactcaagactaggcctagtgccaagaagagctgatctggacatgaaccaacatgtcaataatgtcacttacattggttgggtacttgaaagtatacctcaagatattattgatacacatgagttacaaacaatcactcttgactacagaagagagtgccaacatgatgacatagtagattcacttacttatatcgaggaaggagaggagaagagttccaatggatccgcatttgctgcaccgcacccagaagagcagcgacagttcttgcactgcttaagatttgctgggaacgggaacgagatcaaccgtgggcgcaccgtgtggaggaagctagctagatgaattccctagttttgatcatacagtcatatgtattctgatccttccatttgttccatcattttgctcttggtgtctggcatagccctttcagagaatcggttgtaccccaaattttgtgttaatttgttacctttgtaatgtaccgtggtaacaattacagtttgtgacattcgtcttacctgaagttgtgcgttgctgtatactttgtactagtagaatcagtgtttatgaatcttcaaataattctatcggcaacagatagcaatggcatgccaagtttggttcttcctgtaaaaaaaaaaaaaaaaa

SEQ ID NO: 94354 - DNA, 681 bp, Oryza sativa
  Clone ID: PAT_MRT4530_92651C.1
gaagatctccaaaagccaaaaaaaaaaaagaaaagaaaaaaagaagatcaaaccactccccagtccccacactgaatagggtttggttacttttgtcgttctgtaggcgagtagatagctccgcccgccgttcgccggcgccgtcgccgtcgccgtcgccggtgcgaatttgagttcaaaaccgaaccgcaaattggcaggagaggagaagaggagagatctgaaggagggggaaacggaagtgatttctcggtcagatccgagggaggaagggggtatcttcgtgagctcgtctttggggatgttggcgccgaaccggctcatgtcccagcggcgcggccggcggcggcgtcggcatcgccggccgcaaatccgagcccgctcagctgggtttattgcctcaacgggtaaaagaaagatatcaccgtgtgaacatgatggcgatggtcattctcaagctggcaaaatgatgagaaattcaatcccatatcttcctgaggacatattgtctcgtatacattcctttatgtcaatgcgtgaagctgctcgtgctgcttgcgtatctcgtgcttttctacgttcctggaggtgtcatcccaatcttatctttaataaagacacgattggcttgaagagaaatgtctttggagagaatttccacggaaaaattgggcgcattct

SEQ ID NO: 94355 - DNA, 385 bp, Oryza sativa
  Clone ID: PAT_MRT4530_92652C.1
gataaaccataatccgaaaataaacaacgatgcacaaactgacagtttttaaaattcctacgagtatacaaactaaactcataagacccacaaaagaacgtgaaaccacatcgcccgcgatctggctgttgaccatgactacttacggcaactcaagatcagtacattactcacacacacagattatgatacctacgcagagatgcacatatcagctgcacttacatataaatatgcacgtaagaacgtctgtatcatacatgtactaggatacatacgtacatcgatgtatgatgtatagatatggaactaggaaagtatgctgagtccgttatgattaaacaggaaatattaacggataacctaggactggtaatagatccac

SEQ ID NO: 94356 - DNA, 324 bp, Oryza sativa
  Clone ID: PAT_MRT4530_92653C.1
atggagccgtcgccagcatcgtcatcgagccgccggcccattgctgcttatcgtgtccagattcgtgtgctaaaagcagcgatcaatcacacattgtccccaccaaagtataatattttgacatcttcaagaagaaactcaccaagttggtttaagaaacacgataattgccaaatcaatgacctgccgaccatcatctcgccgtttcttccgtacatgcatggccgtggctcgatcgttaagtcggcatcagctggacaattggacgaattcaaagacgctacatttgacatgatactccgatacttcgatcagtttgatgag

SEQ ID NO: 94357 - DNA, 1515 bp, Oryza sativa
  Clone ID: PAT_MRT4530_92654C.1
atggaggaggagaagaggttggaaaggattattaaggagattgacagtccaattagcccaggaggaggagcagctttattagcagaagatgatgatctggtgtttccagggtttcgatttcatccgacggatcaagagctcgtggggttttatctgacaaggaaggtggagaagaagcctttcagtattgacatcatcaaggagatcgatatctacaagcatgatccctgggatcttccaaaggtgagccatggcgcggtggcgctgcagggctcgtcgtcgtcgtcgtcgttgtcgacggcggcggcggcggagaaggagtgcggctatttcttctgccttcgagggaggaagtacaggaacagcatccgccccaaccgcgtcaccggctccggcttctggaaggccaccggcatcgacaagccaatctactcttcctcactcgccgccgccgccgccgccgccggtgccggcgactgcattggcctcaagaagtctctcgtctactaccgcggcagcgccggtaaaggcaccaagacagattggatgatgcacgagttccgactcccctcctccatctccgactccgatcacctccaagacgcatcagagacatggacgatttgccggatcttcaagaggagcatgacctacaccaagggcagggcggcggcggcagcagcatccatgaacaagcgaattagccatgagcttcagcacattcatcatcatcagcagcagcaattctactaccacgaggtagtccatgacggccatggccaccaccatcgtcgccacctgcagcactacgccggcagcgcttccatggcagcggcggcggccaacatcgtcgacgtcatcgatcactcgtcggacgccgagacgacgacgaggtctcactctcactctcagtctcacctcgtcgctgacattcgtcatcgtcagtcgccgttcatgctcgacttccatgctgggacggcgtcgtcgtcgtcgtcgacggcggcggggtggagcgaggtgatgagcttcagtagggatggcgggagcagcagcggcagtagctgggacgagctggggaggatcatggatatctctaccaattctgctaataataattactacttcgcgccgccgccttctcccgccggagccgctcgactcctcctagagcgcgccagcccgctgccgccgcctcccgccggagctgctcgcctcctcctcgcgcgcacccgccggagccgcctcaccctacccgccgctgcctgcttccctgctcgcgccgcgccgcgccgcaggtgacggggagtcgtgccaggaggagagggggccattggaggagggctggaggtcgctgcgcatggcccgtcagcatcggcgaggttggctgggcaagaggcgagcgccaacagaggtgccggggaggagcaggccgccggcgcggtcgtaggagagggggcccgctggagcgagggcacaggactagggccgttggacatcattcatgctagcagataa

SEQ ID NO: 94358 - DNA, 443 bp, Oryza sativa
  Clone ID: PAT_MRT4530_92655C.1
tctttcgcgggggggtactttgtcttcgtgcaggcgaactcggctgccgccggctaggcggcccacacgcggccgattagcagccgtgccgaccgtaagcgcgaccggcggttaggagaccttactaggcgtagagagagacaccacccagccggctgttgtctttaagaccgagttatacactctgactggtgtgccacctgaaagggaaaaaactatcgcgaagggtggaaaggcggaagatgatacagattgaggtactgtgggagtgaaagatggtgcaagaactgatgaggatcggcgcagctgatgagattgcgaaagcttcagagtacggaccagaccttgaagaggatataccagaggaagagcacgtggctgcacagggaacatacgctgtgcttcatacagtgacaaaaacaattaaaactcaattgttcttc

SEQ ID NO: 94359 - DNA, 359 bp, Oryza sativa
  Clone ID: PAT_MRT4530_92656C.1
ataaatgggagttattttaagattttttaaaaagactcattttaaaataaacatagacgtaaaaaaaatattgtatcaattaaaacaatttatatttaggtaagcaacttacctccatgtgatgctccaaaataactgggcactatataaatataatataattttacctcaaaaagaacagatgatcacttgacatctatcaacataagacagatgtcaacaagggttttccacattacttacagctcataaaaatagtatgctttgcctgccaaacccttgatcttgaaaatttcattgtagtgagccataatactattaactgtacttttgagattattattaacagcgtgttcata

SEQ ID NO: 94360 - DNA, 468 bp, Oryza sativa
  Clone ID: PAT_MRT4530_92657C.1
atgaattctaggccctcctcatctacggagtacgagtgtggtctttgtcaaggcaagaagaacaatgtcttcgaggagaatcacgccatgcttgccaacaaggtagaagctggtggcgcctaccgccacaccccgaacgcatggcgcttcgcctaccagccaccgtccctgcaggttaccggcgaccagccagccactagcactgcaccgcaaccggagaaacaaataaccatcaaggacgacaacgacgacgaccaccacatcaacaacgtaaacatcgccctgaactcctacaactacaacatggccaatgagagtatcttcaacagtggcctcctgcaccctaacactcaagactacatttcgggttgcaaggacctttggtatggtccatatgaagacgatgagaagaaggattggctttcatcatttgagctattggttgatgagctgtggaaaaataaatga

SEQ ID NO: 94361 - DNA, 389 bp, Oryza sativa
  unsure (1)..(389): unsure at all n locations
  Clone ID: PAT_MRT4530_92658C.1
tgttgtagacgcgcttttcgtctggctncgcgctcgtttgtacccataggccccgccttgcgagagggttcatcgcatcgggcgaaggacgagaccacaagaaaatgggtggtgtaaacctcactgcgtatacctggacaactgctagcattcagacgtgaaaattgccacggagggtccttcgttggattttcgatcgactgatccncataagcaatccaactttttttttaatttctctctttgtttctttaataagctgttgttgtagcangatgttttagaagcctgaactctatgagaaatgagtcaagagagggctgaaaaaaaaagagaatatccctccatgcttacccncaaaaanctaataaaaaaaaaaaaaaaaaaaa

SEQ ID NO: 94362 - DNA, 537 bp, Oryza sativa
  Clone ID: PAT_MRT4530_92659C.1
tttttttttttttttgaaaaaaaaggagtaatcatcatcagttgaaaatttattgagatatacagctacagtcgccctatatagtccatgttgttatgtgtaggaaattaaatggagggagggcatgcatggattggaatgaatcaagtaaggtgggggaggtggatgtggagtgggacgccgggcgttgggtggagcagctgagcctccgggagcgtgtcggccagcatgtccttgaaggcctccaccgtaccctcggtggcgacgacggcggtgaggaggcccttggcgtccacgtcgccgttgctcattgggaccacgtaccttgcccgcagcaggctggccagctccacggcgtcctcctgcccggcgacgagggtgaagttggccgggaggagctgttcacgacgggcgtgattaccacgtcggcacgcagcgcctccttctccaggaaggaccggtcgtacacgcagtgcggctcgtagtacacaagccccttgggtcttcctcttcttcctggaggaggaacatgatgta

SEQ ID NO: 94363 - DNA, 238 bp, Oryza sativa
  Clone ID: PAT_MRT4530_9265C.1
ttgtttgcccttctcttctttttctttcggggggtgaaagcaactcctctgtacattgcacattaatgataatacgacattatttaaatcgcttctctttatgagaatttagtgcataactacggatcaatccttttgtctttagcactactggcatatgaacccattcagtgtccagagttaaccattcacgacaagccaatagttctaatttttccgctgatgcctcatgtcccaa

SEQ ID NO: 94364 - DNA, 506 bp, Oryza sativa
  unsure (1)..(506): unsure at all n locations
  Clone ID: PAT_MRT4530_92660C.1
aagctttccggtacgtggcggctcctctggaccaccgagcatgagcagctcttcatcgtgcgcaacgcccccttcttccgcaccgccgccggtgatgtgttccaggtaatcgacgtccccggtggcgccctcaacaacgtgatcaccttcccgccctctggcgcgttcgtcgtgaacggctccatcgagatccagccgccccagcgagtcaattttaggtttacacgcgctatgttgagagggagcaattgggaggtcccgtttccgccctttgggaaaggatggtttgacactgtctatttggatgatgacatccgcgtagcanaggacatacgaggggactatttagttgttgaacgcgctccatattcatggaatggatagttgttaaaattcaaagttgattgaatgcatagccagtcttgtgatgtgccttgtgaatataagaagcagattgtcagagccttgtgctttctcagcanagtgttaaccatcgtgctatgaca

SEQ ID NO: 94365 - DNA, 567 bp, Oryza sativa
  unsure (1)..(567): unsure at all n locations
  Clone ID: PAT_MRT4530_92661C.1
cggacgcgtgggcggacgcgtgggcggactcgtgggttacaactcagcgcgcctatggactccaccattctagggttcctggatataagaaaaccttctctcctcccgaactccttcccgacgcgtccgcccacgcgtccgcgccgctgctccgaccggtcgaagatggcggttccattgctgacgaagaagatcgtgaagaagcgggtgaagcagttcaagaggccgcacagcgaccgctacattggcctcaagacaagctggcgcagaccaaagggtattgactcacgtgtcaggaggaagttcaagggatgcacattgatgcccaatattggatatggttcggacaagaagaccaggcattacctgcccaacaagttcaagaagtttgtggtgcacaacgtctcagagctggagctgcttatgatgcacaacaggatgtactgtgctngaaatgctcataatgtgtccacgaagaaacgcanggagatagtggagcgcgctgctcagcttgacattgtcgtcaccaacaagcttgccaggctacgcagccaggaggatgagtag

SEQ ID NO: 94366 - DNA, 197 bp, Oryza sativa
  Clone ID: PAT_MRT4530_92662C.1
tcgtttttacctaccacgcggggttacgactttgtgttaactcttccacctcggggggcgatttcgacccgggaacgggcattgatacttacacaactgcgtactccaagcccaaaccgagctctacatgcacgattgtttggatggagaggcaccggcttgttctggatccaatagctctaagccaggatgggaca

SEQ ID NO: 94367 - DNA, 420 bp, Oryza sativa
  Clone ID: PAT_MRT4530_92663C.1
atggcgtcgtccagggctttacttgtgttcgctctgctgctcgccgctgccttcctcgtcaactgcgctcgacaagaacctcagcccaacgagggaccggcagctgaccccaacgccggcggcggcggcggaggcggcggcgacggatcatcgggctacgacgacggcaaagtgtccaagtccggccaccggccgcaggcgaagtactataatggccaccggccgcaggggaagtatggtggccatcgtccgcaggggaaatactacgggtacagcgaatgcggtggcggcggtgacgacggcgactgcggcggtccatgcgagcatcgtcgctgtgagtacggctgctgcgagggcgggtacggcggcgaccgcggccaccggtgctgcgatcacggcgagttcggcggccgccactag

SEQ ID NO: 94368 - DNA, 662 bp, Oryza sativa
  Clone ID: PAT_MRT4530_92664C.1
atggcggcgctcttcgaggccgcggagacggcggccatcgtggctgcgctgacgcgcgtcattgccgacggcgggcgtggaggcggcggcgccgtctgcgtgccgccgcccgcgccgtcgttggtcgtgccgccgcgggcgggaacgggcggcgggcggcgcgtcgacgttgcgcgggaggaggagatggtcggcgtcgtctccgcgggagatcacgccggcggggcaagcgtggccgaggcggcggcggcggtggtggtggcggcgccggcgacagcgcgcaggtaccgcggggtgaggcggcgcccgtggggcaagtgggcggcggagatcagggacccgaggaaggcggcgcgcgtctggctgggcaccttccgcaccaccgaggacgcggcgcgcgcctacgacgccgccgtgctccgcttccgccgggcgcccgcgccaagctcaacttccccgaggaggcgtcccgcccgcgccgcccgtggaagggtcacgacgtcgatcacatgtcctgctcgccaccatcgatcgcgaacgctcgctttctgggttcgtggatcttcggacctccgccgccgtcgcggtccgtcgcggcggcgacaacgactctgcttggtgggagccatggaagcaacggagcagataatgggagggaatag

SEQ ID NO: 94369 - DNA, 198 bp, Oryza sativa
  Clone ID: PAT_MRT4530_92665C.1
atgggaggcgaggcgaggcgagatcgcgcgctggagcgcagccgggcggcggtcgacggtttggccgcgtcgtcctctgctcatacgccaccgatgtcggtgggacgcgacagcggcatcccggcggcgaagccccagtgggagtgggacggcgaggaggcggagggcggcgacggcgaggtgcccagcttgtacaag

SEQ ID NO: 94370 - DNA, 1083 bp, Oryza sativa
  Clone ID: PAT_MRT4530_92666C.1
atggcacgggttcccgtctctcgccaccttcgcgtcgcgctgcttgctctcctcgtggtcgccgtcgccgccgcggcggcggcgcgcggggatcagccgcgtcgcgggcatagcatggccgcgcggcacgagcggtggatggctaggttcgggcgcgcgtacgcggacgccgccgagaaggcgcggcggatggaggtgttcgcggccaacgcggagcgcgtcgacgccgccaaccgcgcgggcggcgaccgcacctacacgctcggcctcaaccagttctccgacctcaccgacgacgagttcgcgcagacgcacctcgggtacagctgggcgccgccgccgccgtcgcaccggcatggccaccgcgccgagaatggcaccgccgcggcggcggcggatgacacggacgtgccggacagcgtcgactggagggctcgcggcgccgtcaccgaggtcaagaaccaacgcagctgcgggagttgctgggcgttcgcggcggtggcggcgacggaggggctcgtccagctcgccacgggcaacctcgtgtcgctctcggagcagcaggtgctcgactgcaccggcggcgccaacacctgcagcggcggcgacgtgtccgcggcgctccgctacatcgccgcgagcggcgggctgcagacggaggcggcctacgcgtacggcgggcagcagggcgcgtgccgcgccggcgggttcgccgcgccgaactcggcggcagccgtcggcggcgcccggtgggcgcgcctgtacggcgacgagggcgcgctgcaggcgctcgccgccgggcagccggtggtcgtggtcgtggaggcctccgagccggacttccggcactacaggagcggggtctacgccgggagcgccgcgtgcgggcggcggctcaaccacgccgtcacggtggtgggctacggcgcggcggcggacggcggcggggagtactggctggtgaagaaccagtgggggacgtggtggggcgagggcggctacatgcgcgtcgcgcgcggcggcgccgccggcggcaactgcggcatcgccacctacgccttctacccgaccatggacagctag

SEQ ID NO: 94371 - DNA, 633 bp, Oryza sativa
  Clone ID: PAT_MRT4530_92667C.1
atggcggcggcggcggaggaggccggcctcggccacccgtcgaggtacgtgcagctgacgagggaccaggacgcgcccgccgacgaggacatccgccccggcgagctcaacctgccggcccacttcccgcagctggagcagaggaggtgctgcgagtgcgggcagcagctgccggagagctacgaggcgccggcggacgagccgtggaccaccggcatctgcggatgcgccgaggacaccgagagctgctggactggatcattcttcccttgtgtgctgtttggacataatgttgaggccctaagagaagatatcccatggactacaccttgcacttgccatgctgtttgtgttgaaggtggcattgcattagcaatcctaacagtgatatttcctggtattgatccaagcacatcaatcttgattggtgaaggactggattcaccgtgtgatccttgcctggtccattgctgcctgcactggtgcgcgaactgtcaggagcatcgagaaaggaagggccgtcttgcagataacaacgctaatcggaacaccatcgtcaaccccccaccgatgcaagaaatgagcgtggtcgggaatcatcccagcattacaccagagaatggagcagcatga

SEQ ID NO: 94372 - DNA, 363 bp, Oryza sativa
  Clone ID: PAT_MRT4530_92668C.1
aaaaaaaaaggcattttcattggcatttacaactgatattaaatttgaatggtccttcttaagggtgggtaaccaaggggggagggaaacgcgaaaggaattgctggtggggtgtgacgcctcctttaatttcctgaagaatatgaagatggggcggtggaattggaaaaaatttttccgtgtgctttttgacctaattgacggaccaattgattgagaatttactgcctgggttttttcaaagcttggcattggcctgaaatgaatgtacagaggggacttaagtgggggaaaattcttgggtttttttcatgaaaatgtagttgggtcttttaattaaaaaaaaaactcggataaaggggg

SEQ ID NO: 94373 - DNA, 836 bp, Oryza sativa
  Clone ID: PAT_MRT4530_92669C.1
agggatgggtaagaaactggatttcagcaccgcttatcaccccagacagatggcaaacataacgaatccatcatatccttgaagacatgcttcggacttgtgtccttgattttgagaaaacttgggataagagtctcccttatgcggaattttcgtacagcagcagttatcagtccagtctacaaatggcaccatacgaagctttctacgtctgaaagtgcagaacatagctcctttgggatcagacaggggaacatcatgtctttgggaccgatattcttacagaagcaaaggacaaagttaagattatctagaagaaccaaaaggtggcccaaaatagacaaaaaagctatgcagacaattgtcgtcaagatcttgctttcgaaggcggtgattatatgtatttgtaagtcactccgcttaggggagtcagaaggttcaacacgaaagggaagcttgcaccgagatatgttggcccatacaaaatcttgagtagaaaaggagaagttgcctatcagctcgacttgccagcttcattgggaagtgtccacgacgtgttccatgtctcccaactcaagatatgtctctgagtgccgacagagcaaacatatcctacacagatcgagatccaagaagatttgacttatgttgataatcctatcaaaatcctagacaccttagagagacatacacgcggtcgggtcatccgcttttccaaggttcagtggagaaaccactccgaagaagaagccacttgggagcgcgaagacgagttgaagttagcacatccccatcttttcgtcagtgcttccgaatctcagggtcgagattctctg

SEQ ID NO: 94374 - DNA, 393 bp, Oryza sativa
  Clone ID: PAT_MRT4530_9266C.1
atgtccatccaccgtgtgacatctcgtatccaacttcgtcacccgagccaattgttcatcacaaatattaatcatgacaatgatttcacaaccatcagcaagctagcttacgacttcggtgtgttcaagtcgcatcgttataaggaaagatcaatatgtgaagacagggagagccaattgttcatcacaaatattaatcatgacaatgatttcacaaccatcagcaagctagcttacgacttcggtgtgttcaagtcgcatcgttataaggaaagatcaatatgtgaagacagggaggcggtaagccccgtctcaatcgggcacggcgtccgtaacagtctagaagtcactgatatgaaaaataatctcaatcaggcaaacggccgtcactga

SEQ ID NO: 94375 - DNA, 342 bp, Oryza sativa
  Clone ID: PAT_MRT4530_92670C.1
atggggtcgttggcccagaccgatccatccgtcgttttggcacgagaaaacgtgagccgctcagccgcgcgagcgcggataagccggggaatagatatccatatcccggtgcggggggcgcctcgcgcgtgcgggtgcaggggccgccgcgtcacggctttgggagaggatttccgcgcgcggatgagcagccgggatatatgcggtgacggtgagccggtgcgggtgcgcgcctctatcgcacgggcacggtgcgtgcaggggctcacggtcacggtattggccgcggtggaggcgcagcctcgcataacacggtgccattcacgaaagcgtaccgagtaa

SEQ ID NO: 94376 - DNA, 792 bp, Oryza sativa
  Clone ID: PAT_MRT4530_92671C.1
cactcctaacaaatcctcaaaaacggcgacgccagttaaagaccacatatggcattccgaatggatggactccagaaccacaaaaactgaggagagaacggagtcgaaaaccctagagtttcgctcatacagttgccaagagaccaggagcaccaaggagtcgaagctgtcacggaggtgctcaggtaagcaggccctggaggacggccaccagtcctggaaccagctgccacgggggagagagggcagcccagctaggaggcgacaacactcaaagccagatttgccgagcgaacacgtggtcgaggaggatgtggttcgccgtctcgagatcctgggcgcaaaaggggaaggccgagtgactatcgatgccacgtttctggaggagatcagccgtccaggagcactgttggaatgcaaatcaaaggaagaacttgcatttggcaggattctttgcgtgctagagaagatcagcacaagtaaaggaatgctggccatagaagaatgcctggtacgcctaacgcgctgagtagcgctggtcagccgtctagcgccaaacgagacgaacacccggtgagagctgtacgtgaagcaccgtatcccaaataaagagaaactagaaaatgacaggacaacgaggacaccgtggatattaaagacccataagttgttcgtcaggcccgcagccactggcacagaggaccggttggccggcgctcgcctgctgctccgacgacatcttgatgatattggcgcgtagaacgatcgtctctcttgctctcgggaggaaga

SEQ ID NO: 94377 - DNA, 359 bp, Oryza sativa
  unsure (1)..(359): unsure at all n locations
  Clone ID: PAT_MRT4530_92672C.1
nctcttttttttcaaatactancaaaaaaagcncccccagaccacgagccagtcagtgacctatctggcgcccgatgcgcgcgtgaggcatcctcagccagagccagctagtgtgtttgtgtgtgtcactgtggtggtctgtggcctgtcacctcacctgagccagcacaagcgcgaggaggctaacgcgatgctgcagctcttgggcatcagtgaccacaccactaaagaaacctatccggagcgcttggcctttgccaacaccatcccctcatngacctaacntaatgtgtttgctaccgctaggatcttcttgagggagctggagctcatggacggtaccgcgttcgagaagatct

SEQ ID NO: 94378 - DNA, 635 bp, Oryza sativa
  unsure (1)..(635): unsure at all n locations
  Clone ID: PAT_MRT4530_92673C.1
caaaatatgcccaaaacggcaactccgatgcttctccagcccatctccggcgccggcgccggcgctcgccggagctccgccgagggactctcccctcctcctaccgctcgcctccgccgccgcgtcctctgcgcgatccgcgccgacgcgccgcccccgatccacctctccgcggcggccccctcgcggccggcgaagccgcccgtctgcaccgccgacgagctccaccacgcgcccgtctccggcgccgggtggcgtctcgcgctctggcggtacaggccgccgcctcatgcgccggcgaggaaccacccgctgatgcttctgtcgggagtcgggacgaacgccatcgggttcgatctctcccccggggcctcattcgcccgtcacatgtctaaccagggatttgatacatggattgtcgaagtgagaggttctggtctgagcatacgtgatcatgataattctgcttcatctccatcaggcgctntcgatgatatatctaatggcacattggctcttgataaatcaagcacattggaggttgcttcagttcaaagttctggtttctctggtattgattatgatgaccttggaatagttgcgttggatgacccacctttactgatggagatgac

SEQ ID NO: 94379 - DNA, 2307 bp, Oryza sativa
  Clone ID: PAT_MRT4530_92674C.1
accttccccccccccccccccccctcccccttgcacaatgaagcattccattacctccagaactgttcattacaaatgcagacagcgctacatgccaacagtatatcccagtacatatcagtccatttcattttgttacaacaacagaagccaagtatttgaaggatcaacatcaactaaggaaacaaggtcaaagaatgagttcagcatacaatttcttttgaatttgttatatttctaggggcacatgtaatatacctatatttataggttttgtataacaagtggtgcactgacgcatggtacacctgtttacaaggatacatcctacgagttctgtgggtttacctatattttgcgcagctggccatgtcacatggccaaccttggaaagtttgttcagctcaactcaaaaaccatctgaggtgaacatatattgtatcattgactccgcatcgtattgaaatttcaggagcttcactgttacataaactactgatcatggtgagaaaggaactctatgatgcatgggtaaacttcatccgttgccagtcgacctccaactaagtcatagtgtgcataatgagggccttctggctttccaaaaaccccatatttcaccatgtgctgaggtatgagcttgacagtttcataaacggcttcaggaggacagatgagatctttatctccagctagtgctaggacaggggtctgacaatatcgcaaatgatctttgtatgagaaagtttcagttctattgcatagccccccttcccgaaaagctgttgtaagttgaaggacaacctttgcaggcactgtacagaagttgttaaaaacaagcttggacaacaactccgggtgcatcatatcctgtgctgatatttgatgattaagccaggaaaaaagataaggtggaccagatgcccagggatatgctgccgctaataatgtacccaatggaacagcagggacattaagggcttgcgcaggatgaacaagtggcagtaacatcttcagtgatgaattggatgtcgtgtagtcaacagaggaagccaaagtaacaatagccgctaagtttgatggaactccttcgaaaccatattttgacagcattgcatataacaaaattcctcccattgagtgtccaatggcaagcagcttcccatcttttactctactatgttgtctaatatattccacctgtagtaacgcagtaggtatatcctcctccaagtaatggtcgaagtcccaattatattcagaatttagattcatctgagttgccacaaagtgttcccatgagtcaatctgctcttgaaagttcttcagaagacgcagactttcttctctcattggaccaataacggcagagctttctaccatttcagatagaaccgaaatcttatctgtgatctcatgaaaatttttatttaaactagcctcttccagaagttttgaaattcgatcaaagaaactagtcatctccatcagtaaaggtgggtcatccaacgcaactattccaaggtcatcataatcaataccagagaaaccagaactttgaactgaagcaacctccaatgtgcttgatttatcaagagccaatgtgccattagatatatcatcgaaagcgcctgatggagatgaagcagaattatcatgatcacgtatgctcagaccagaacctctcacttcgacaatccatgtatcaaatccctggttagacatgtgacgggcgaatgaggccatgacttgtaacctatagttcttttgcaacttgaaccgcattttactttcaataatatgagttagatgcaacataacttcatttatttttatgattccaagactctggccaccacttcctaccatctcagtgtttagtttcaggcgaggaaattctacatcagcagaaaaagagttgcagtgagagaaatctctgctcaccccgggggagagatcgaacccgatggcgttcgtcccgactcccgacagaagcatcagcgggtggttcctcgccggcgcatgaggcggcggcctgtaccgccagagcgcgagacgccacccggcgccggagacgggcgcgtggtggagctcgtcggcggtgcagacgggcggcttcgccggccgcgagggggccgccgcggagaggtggatcgggggcggcgcgtcggcgcggatcgcgcagaggacgcggcggcggaggcgagcggtaggaggaggggagagtccctcggcggagctccggcgagcgccggcgccggcgccggagatgggctggagaagcatcggagttgccgttttgggcat

SEQ ID NO: 94380 - DNA, 255 bp, Oryza sativa
  Clone ID: PAT_MRT4530_92675C.1
atggctgtgaatcggagaagtcggggggagagatgcggcgcggggcgacaggggctaggcagtggcgaaggatcaaccgatcaggcacccgcggtggtgcttatcaaaagcagcggcagtgatgctccaatggggagaggaggctgtgttcggtggcgagcagaggaagttgcagcccaaggaaaacagagaagggaggagtcagatcgtgggttcgaagtgggctggtgggccgcgcgcaaggcgcaatggtga

SEQ ID NO: 94381 - DNA, 660 bp, Oryza sativa
  Clone ID: PAT_MRT4530_92676C.1
aacaatgggacctataaatcctgctgccggactggaacattatgtggagtctctaatgaaaagagcggatgtggagtttaatgtggttgtcacccaaatgaatgggaatgattactcatcgaactctgtccatgcatttcatatcggaaaaatgagaataaagcttcgaaaaggatggtctacaaaagcaagagagtcatactcgaccacaatgaagttgtgtgggagccgtggtgggggtaatgctgcagctacggcagttttctggcaggcaaggaaaggcctgtcctacaccttagcttttgaaacggacagggataggaacgcagcaatcatgcttgctcgtaaatttgcctcaaattgcaatattacgctcactggtccaggtgatgaagttcatgctggtagctgaatttacagtgttcacggtgtgacagcaggagtatacatgtaggctgtgaattgtgtactgtgtcagtttgtgttttcgagagtagaggttgtacactaggctttcctctttcagcatacattctcaaggcaattctttttatttgcctgccagcagctgtttgtggtgttcgtcaaacatgctgtgcaaaatgatgattattcttgagcattatatctattaacgttcgaagaaaggccggccgccca

SEQ ID NO: 94382 - DNA, 160 bp, Oryza sativa
  Clone ID: PAT_MRT4530_92677C.1
gggaccatgcgtttaagatggatcggatatccccacggagacctcgacacacgaggggaccgccccgaagaagaagggtggtgcatccacgtggatgttgtaggggaggcttccacgtgggtgtctaaatatggttgccacgacgggcctgaatgctgtg

SEQ ID NO: 94383 - DNA, 1731 bp, Oryza sativa
  Clone ID: PAT_MRT4530_92678C.1
atggagttgaaaggatgtagacaagacaccagtgttgagtcattggtgccggtggcaccttggatgcgtgtcgaacatgccctgcaccacctgattaagccaaacgggcagaagcgaggctgtggcattgtttcagacagcccggctacttttatgtatcttttgaaggactgctacctatatggaactgacaaagcaaccccaaagttcaagatccttcagctgcaggttaaaagggtattaaataatgatcctcagccaggcccattcacgtatgttgttcaatgcatgtatattgtgccactgctggggaaaacccatgctgaaggcttcagccatatgttgatctcttctctaaggcatttgaaatctgtggaatctgtacagaaagatttcttagatgcaaagcatcttgctgcgcgacttattcttgatattgttgcttctattgtgccccatgaggaacgcatactgataaagcttctcgaggcatatgatatcgagttgagagatatggctgatgcattatatggttcagagttgggtgatgaagatctagtgaaagcaaaagaacatctcaaacagtatgtacaatgcttaatggaatcagaatcttatgtgaccgctgtgaacctgataacacgattttctattcaatgttatgatgagtcctttcttacaaaactgattgaaaataatcacttggaggcagcagagaagtgggcagttttcatggggaatgaaatgatatgtttgatcatccaaacgtatctggatataaaaatgctaaagagggcaaatgagttggtaaaacaacatgaccttacagaaaagttcccagatgttaactatttgtataaagagagtgtactgaagaagctggctgagaaagggtgctgggatattgcagaggttcgggccaagaaggaaacaaaattgatggaatacctggtatacctagctatggaagctgggtacatggagaaagttgaagaactttgccaaagatactctcttgaaggctatgtcaattctttgggtaatcataaacaccaacgttatttatcatacattaatatctgtagtcctgcagttccagaggagatttgttgtgggtctgactacttagatcttaaagaactgattttggaagacattatctgggttgatgagattgatggacttcttaattcaataagttatattgaagcttgtaaaattattggtgtggattgtgaatggaagcctaattttgagaaaggtagcaaacctaataaggtctctattatccaaattgcgtcagataagaaagcttttatttttgatctgatcaagctgtatgaagatgacccaaaagtgttggatagctgcttcaggcgaattatgtgttcttcaaacatactaaagctagaattgaaatgtttccagtcctatgaaatgctgcttgatatccagaagctcttcaaagggactactggtggtctatctgggctgtccaagaaaatattaggagctggtttgaacaagacgcgacggaatagcaactgggaacagcgccctctcacccagaatcagaaagagtatgctgcccttgatgctgtggtccttgttcatatattccatcacgtcaagggacagcctcagtttggtgtcaccgagggatgcaaagtggaatggaagtcccatattgtttctcgggtgaagaattcacggagtacattacgcttctaa

SEQ ID NO: 94384 - DNA, 444 bp, Oryza sativa
  Clone ID: PAT_MRT4530_92679C.1
atggtgccggccggggcggaggattattacgggccgtactaccacggcggcggccggcacggcggtggcggcgggccgccgcacgcgctgctgctgatggcggtggtgctggcgctggcggtcgcggggccgcgggtgctcggcgagggcgccggggaggcgatcaccgcggccttgaccgacatgctcagccccgtggggctcctgctgcttcccgtcagcctcgtcttcgtcatccgcatcctctccgacgaccgcagcgccgccgtgctcgccaacgtcctcgccttcggcgccggcgcgcccgacgccgtccaccgcgtcgggggttcgccggtgggggtcgtggtcgtgctgttcctcgtactgatgatggtttactaccggccgtcgtggctgctccgcggcggcgccggcgccggcggcgagggcgacggcgagtag

SEQ ID NO: 94385 - DNA, 289 bp, Oryza sativa
  Clone ID: PAT_MRT4530_9267C.1
gctcactggaggctatgcactctctttttgccatgaagaaacatctcatcctttctgcgcagggcctcctgctggggtgcgtccaaaagatcctctacttctaatggctattcacgccctcgcagcatttcaacgcctgctacatggaaagccatctcatcccttaccaacgacctcgcaagcaatacgaatgctactgcctggaactgcctgatggacatctatggcaagtgtggccacattgacagttgcccgatcgtttatgagactatcatcctctaggatcaag

SEQ ID NO: 94386 - DNA, 972 bp, Oryza sativa
  Clone ID: PAT_MRT4530_92680C.1
atgtgtggaggaggccccgacaatcaccacgccatcaccgtcgccgccgacctgccgccgccgccgccgtcggtggtggcggtggagatggcgccgccgcgcggccaccgccccgggaaggaggtggagtacaatgaggaggaggaggacgacgacgacgagtacgacggccgtgagttcgaggaggagttcctcaggttcagcatgatggtggatgaggaagacgacgacggcgacgacgacgacgaggtggaggtggagatcatcgccgtcgtctcgccgccgcaccggcctctcgtcggagctagaggtactacatcagctgttgaatctgtcacaaaccttcaggcaagaacatcacctctcccaaatccggtggtgcctcagaccggcactaaagccagcaagcgcggcgacagcggggcaaaggcgaagccggcggcggcgaagaagaggaggagcaagcacgggttcctgggcgtccaccagcgcacgtatgggcgatggtcggccgagatccgggacaatgtcatcaagggctcccgcttctggatcggcaccttcgacaccgcgctcgacgccgccctcgcctacgacgccgtctcccgcaggctctacggcctcaacgccaagaccaacttccccgctgccgccggcgaagacgacctccctccgccgccgccgccggcgaagccctgcagctccaccaagcggccaaagaaatgcaacaccagtggcgatcttggcgccgccgcggcgccgccgcaagccgtggatactccggcggcggcagcagctggcgtggagctgacaagcctactgtgcagcgtggcggcgcaggcgcaggaggtgagcgacgggtgggagttcatccaggagctcctcctcctcggcggcggcgtttcgccgctggactacctcaacggccaggagctcgccggcgccgccgtcggcgatctctggagcttctga

SEQ ID NO: 94387 - DNA, 705 bp, Oryza sativa
  Clone ID: PAT_MRT4530_92681C.1
atgtctaagattattcatattaatataatccatattcgctatgatatgctatcttcctatggtatcagttctatttttctgtgttctgtacctgctgaagctgaaaaggaaggtggtgtcccaacaccgaaacatgtcgattggtcgggcaagaatcgacttattattgggcgcgattcggaagtcgataaacttttcaacctgataaaggatcgatctcacaccaacacacctcacgtggtctccgtttggggaattcctggtactgggaggacagctttggttagcaatgtctactaccgctgctactacgacacgcagtttgatcgtcagacgacagtcaatatgccccagccatacaatctcaggggcttttgccggtgcttgctagtatctggtttggattcaggattatcactgatccaacgacgcgaagatcccatccaacaatgccgggagatcctgcatagggacaggtgccttgtcattattgatgaggtgcactctaaggaagactgggactcaattacagatgctaacttgataactgcaacaagtaaaagttgcatcgttgtgattacgactcaagaaagcgtcgccgtgcactgcgcaggggcaaacggtctagtgtgcagcattacatgtctccaagctacggcagcctctgatctctttcagcagtactccttctatcccacaatataa

SEQ ID NO: 94388 - DNA, 192 bp, Oryza sativa
  Clone ID: PAT_MRT4530_92682C.1
atgagggtgcttgaggaccgatgccgcgacgccctcggcgactgccgcccgcacctagctcctcccccagctattgaggaccagtgccgcgacgccctcggatgctggcgccaccgtgctccccccgtcctctttgctctgtccccgcgggattggttcacggagtccgtaatcagattccaactaaactaa

SEQ ID NO: 94389 - DNA, 1623 bp, Oryza sativa
  Clone ID: PAT_MRT4530_92683C.1
atggcgatggcggcggcggagctcggggtggggatggcaaaggcggcggctctccacaacgacgacttggcgaggcgacgacgacggcgaggaagatgcagccacgacagcacatgggcagggatggcactggaggcacatggcggccacggcgacggagtcgagggagaggcgcgggaagccgcaaggggtggccctctgctcctcgccggccttgcctggtcctccgccgccttgtcgccgtggctccgctggttccgggaggcaggggcgagagagaggagggagggacacgccgacgacgacatgccaacccaccggcggtgggccgacctccacgccggcctcgtctcgcgcgtcgccgacctctgcgcgctccggggctacgcctcctgccgcgccgtctgcgcctcgtggcgcgcggcgctcccgccgccgacctcgcggccgctcgcccccgtcgccgacacggcgagccgccacgggccactgtcgctggccgtctgctccgtccacgcgcagcgctggtcccgcctcctcggcctccgccagccgtcggggctagccaacgccaccggcgccagccgctgcgtcggcgcgcgcgacgggtgggtcgtcctcgccgccgccaacgcgaagggcgccgccgccgccgccgcgagcgtcgtcctgctgttcaacccggtcaccggagtggagatcccgctgcacgcgtcgctgtacgatcccaactgcgagcgcgcgccggcggcgtcgacgtcgccggcgccgaaggtcgtgttctcgccgtgccccacagcgcgtgacctcgccgcggtgagcatctgccggccgaacaggctcgccgtccagaggacaaccgacgggcactcctccgccctcgtcctggacaccgccgcgctcatggacagcgacgacctcgccgacgtcgccttcgacggcaacggcagggtggcgtactgcctgacgaggcacggcgccgtgcacgtgctccgcctcaaccgccgccgccaccgcggcaggctgcgacccatcgagatcgagccactcgtggccggcgccgtcttcccctcgccgtacgacaccatcgcccggttcacggacgccaagaacctggtgctctgcggcggcgcgctgtaccaggtgtggaggcggccgagcggcgcgggctccgccgtcgcgccggccgggatctgcgaccagcagctgctcctcatcccggagggcgccgtcttcgtcctgaggtacgagccgccggcgtcggcggcggcgggggggagccgccggccgccgtgctggtcggagtcgaaggatctcggcggccacgcggtgttcctcggggcgaacgacgccgcggcggcggcgcgctgcggcgacggcgcggcggagctgatgagaggcgactgcttgtactactgggccagccgcgcagagggggactacgaggccttcgtgtacagcatggcggacaggatgtccacgcggttgccgccggcgaccggtggcgtgtcgagcccgctttggtacttcttgccggccggcgcggcgaacgtgcaagcaacgacgacgaccgctatggaagctgcatcagaggaagtgagcgtcgcagttattacagtataa

SEQ ID NO: 94390 - DNA, 559 bp, Oryza sativa
  Clone ID: PAT_MRT4530_92684C.1
gcacgaggcttctgcttgccatgatcgctgaggtcggggagctgtcggagctgttcatgtggaaaggggaggtggccaagggcctgcccgggtggaaggagtcggagaaggagcacctcggcgaggagctctccgacgtgctgctctacctgatccggctctccgacatgtgcggcgtcgacctcggcgacgccgccaccaggaagatcgtcaagaacgccgtcaagtacccagcgccgtcgaagagcacttgaatgaactgaattctggtacctgcatgaactgattctgcaactctacgagtgtttatcttcgcgagagaagctcagaagatatgtttttgttgtgtactgttttcttttctttctttcaaaaaagtgaggggtgtgttgaaagtatcggttcttgtctacagacattatagcttgatatattctcttctggttttcctgttcgtcgcttttggatgttttgtagtttggaaagggtggaccttgatagttctgaataaccccattggtagtgtaactaaccatttatgaaagggataagtccattt

SEQ ID NO: 94391 - DNA, 296 bp, Oryza sativa
  Clone ID: PAT_MRT4530_92685C.1
aggggaggaattaaccattaacaactccattttttcatatcggaaataagtttacagaatttccaaaacaacacctgtaaagagacgattatctttatacaagacagttaccgaggcgtgtttgtgaatgaaggagaaggagaagatcaggtccccttgacggggtccaagatgggaactgggaccacggggcccccaaaggggatgagtaccaccccccccgacacaatgtttagggggaagtttttgggcgacggactgaggcttaccttggggggcttcccgacatggggggg

SEQ ID NO: 94392 - DNA, 389 bp, Oryza sativa
  Clone ID: PAT_MRT4530_92686C.1
ttttaagatagaaagtaacaactgcagtggatacttaaatatatttgtagagcatctgtgcatgacttctatattactaaatcacatgcaaacctaaatattttttttaaaaaaaaaaactatgtcgatcctttttacctcttgatccaccctaacctaatccaggtggtatagatattactgaatgcccccttatcttttctcctatttcttcttatccagttgaaggtgcccttgcacatccttacctggcatcactgcatgacataagtgatgagccagtctgctcatcacccttcagctttgacttcgagcagcatgcattgtccgaggaacaaatgaaggatctaatctaccaagaaggccttgcgttcaaccctgattaccag

SEQ ID NO: 94393 - DNA, 354 bp, Oryza sativa
  Clone ID: PAT_MRT4530_92687C.1
atggaggggatgtggaggaaggccaagaaggcgctgggcgccggcctctgcgttcgcctccccgccgtcgccggcgactgggaggacggcgtcagcgagcgccgcgcgtcggatgcgctctcccacgacgcgtcttcggcggcggcggcgcatgtgtcggcgccgaatacgccggccgcggcgttgccgggagcaggcccgctccggaggtccaagtccgggaccaagtccgccaagattagtggagatatctatgcagatcttggagttgattcagaatttgagatcggcttctgtcatagtatggcaaactctaggcagggcttaattctgtacagtggaattgatctgtga

SEQ ID NO: 94394 - DNA, 580 bp, Oryza sativa
  unsure (1)..(580): unsure at all n locations
  Clone ID: PAT_MRT4530_92688C.1
ggcacaagcaaatccgccgcagcttcgggctctgcacccaccggcggcaagcaggggagggagaagaggagaagatgggtgggggcatggaggtgcacaagaaccggtggatcgaggagtggaacgccggccgcgagaacctcgagttcaacttccgctggacgcgccgcagcctcgccgtcgtcggcctcttcggcctcgccgtccccatcctcgtctacaagggcatcgtccgtgaattccacatgcaagatgaggatgctggaagaccaccgaggaagttcttgtaagttgtaaccagccagaatcatgctagttttgttttaagaaataaatgcctttaccacacggcacaccctggcgattccaatctgagaaacatggtgacactcagttctgcacttctggcttgtaagcttttagctgctgtgctctgctccaagttttgttctgaggtatacctatgtaaccaccgttatatcaagaactactctcttccgcatttaagccaatccaaacactatcttaatcgtgctgccgtgctggtgagttactggttcttcanaaaaaaaaaaaaaaa

SEQ ID NO: 94395 - DNA, 1615 bp, Oryza sativa
  Clone ID: PAT_MRT4530_92689C.1
ctgcaggctggatactagagaatcaatgggacgatggatcatggagtattgacgggtccatatccacagccaacaaagatgtcctatcatctacgctagcatgtgttctggcactcaacaaatggaatgttggtagggagcacatcaggagaggactaagtttcattggaagaaatttctcgattgcgatggatgatcaagcagttgctcctataggtttcggcatcactttcccagctatgctaacccttgccaatgggtccggcttggaagtccccgtcagacaaaacgatattgatagtcttaatcaccttcgggagatgaaaatacaaagagaggccgggaaccattctcgtggaagaaaggcctatatggcctatctggcagaggggttccccggcctgctggagtgggatgaaatcatgatgttccagaggaagaacgggtcattgttcaactgtccttcttcaactgctggcgcattagccaattaccacgacgataaagctctccaatacttgcaatctctagtcaataaatttgacggtgtagtgccaacactgtatccactaaacatatattgtcagctttcaatggtggatgcgcttgaaaacatgggaatatctcagtattttgccagtgaaataaagagcatccttgacatgacatacagttcctggttagggagagatgaggaaatcatgttagacgtaacaacgtgcgcaatggcatttcgccttttaagaatgaacggttacgatgtttcctcagatgagctatctcatgttgctggagcttcaggcttccgtgattcgcttcaagggtatctaaacgatagaaaatctgtactggaagtatacaagacctcgaaacacagtatatcagaaaatgatttgatcttagatagcataggctcttggtcaggcagcctattgaaggaaatgctgtgctctaatgggatccaaggaactccaggccgtgaagagatcgagtttgctctgaagtatcccttctacagcacattggaacgtctagtccacaggaagaacattgtgcttttcgacgctaagggctcccagatgctgaaaacagagtgcatgcctgttcttcaccgtcaagattctctagctttggctgtcgatgatttctgcatctcgcaacctaattcccagagtgacctgaattatctcgaaagttgggtgaaagacaacagactcgaccagctacatttcgcacggcagaagttcacatattgctatctctctggtgctgccaccacatccctcccccaagcgggcctcgcccgcgccgcgcgggcaagaaccgcttggttgacggctgttatcgacgatcttttcgatgttggtggattagaacaagaacaagaaaacctcctagcattaatggagaagtaattaattaatatgtcttcttttttctcaaaaatgttgccatgttttatatctctagcgagctagctagctaatttatcttctctgccatgcaaaaaatggttgtcatatataggtgggaagagcctggtgaagatgagtactactctgaggatgtaaagatcgtgttcccggctctttataatacggtgaacgagattgcc

SEQ ID NO: 94396 - DNA, 195 bp, Oryza sativa
  Clone ID: PAT_MRT4530_9268C.1
atgtctccggatactatcaggagaaacgaaagcgctatctctgatctcgccgggcacggattcgaggaggaaggctaccttgttgtcgactacgagtcagatcgcttgtctctcccgatcactgacaaggtcgaggtcagtgtcattcaggagtcgtcgcggagcttcggcgtcttgcatcgagacatcggctga

SEQ ID NO: 94397 - DNA, 803 bp, Oryza sativa
  Clone ID: PAT_MRT4530_92690C.1
atggctcgcccgtcgcagctctacctcctctcctacaactccgtccaggccctcggatggttcgtcgccttgctccgcctgctgccctgcctcgcccctccctcctccgtccactcgtcatacgccgtcgccggcgacctcacgtgggcgattcttgaaacgatccatgccgccatcggtcatcagatactcacattatgctctgacaaccttaaaagtttgtccaccatggctaacatatctcagtactactgttgcttaccagtccctagttttaccgcgctgcttatggtcttttttccaggtgactgctgttctcctgatcagagactaattaaccctttctacttatttgcaccatgtaggtacactgcctttataccgctgtatccaattggagtaggcccaggagaaatgtggactatgtaccaagctctcccatttgtgaaggagaggaaactctactctggcttctttgggaagttctccatgagctaccattccttcctagtggctgtgctggcagtctacccgtttctgtggatgaagctgtacctgcatgtgttcaagcagcgcaggtcgaagctggggaaatcgggaggcgccaagaaacgagcctgaagaaaccagctccgtctcgatgctcatacatagtagtacatgatccctttttgaaatttctctttgtttatttatttacgagaaagcatgtactcatgattctgattgtaatggctaaaacttaagcgcgatatgataatggtaaagctgcttggtttttttaaaaaaaaaaaaaaaaaaaa

SEQ ID NO: 94398 - DNA, 824 bp, Oryza sativa
  Clone ID: PAT_MRT4530_92691C.1
cggacgcgtgggaaaatgaatcaccatgcatgtcatttttatatccaggttcatctaatattgttcctactccaaaatcgccagtacatcgctgctatgttgattttgtttctttacatgatataataatggatcacaatgtttaactgcagtactactgttgcttaccagtccctagttttaccgcgctgcttatggtcttttttccaggtgactgctgttctcctgatcagagactaattaaccctttctacttatttgcaccatgtaggtacactgcctttataccgctgtatccaattggagtaggcccaggagaaatgtggactatgtaccaagctctcccatttgtgaaggagaggaaactctactctggcttctttgggaagttctccatgagctaccattccttcctagtggtaggtcaagccatagcctgtgaatgtctgatgaaactgaaacatttttttcagataatgtgatgaaactgaagcatgcaacactgctgatggaaatgcaattcgatcgctagctgaccttcctcatgctgcaggctgtgctggcagtctacccgtttctgtggatgaagctgtacctgcatgtgttcaagcagcgcaggtcgaagctggggaaatcgggaggcgccaagaaacgagcctgaagaaaccagctccgtctcgatgctcatacatagtagtacatgatccctttttgaaatttctctttgtttatttatttacgagaaagcatgtactcatgattctgattataatggctaaaacattaagcgcgatatgataatggtaaagctgcttggttttttt

SEQ ID NO: 94399 - DNA, 414 bp, Oryza sativa
  Clone ID: PAT_MRT4530_92692C.1
atgaacgccggacctcctaaccgcgtccaagtccagggggtacagtattgtaccacccatggatggacggcggtggcctctcccggtggcgagctttgcaccctcccactggagatggagtcgtcgccggctccgttcgtcgctgtctccgacatccccgacaccgcccccacgacgacgctgattcccaactcccacgccaccggtagccgctcagccacctccactgccaccacgccgaagtcgcttccccactcccgagccgccgggctacggccggaccgggacacttgccatgcgcaggggggaaccgccgctcttcactcctccttcgtcgcgcccatacgccggtgccgccgctgcgcgccgtcccgtcctccgcgccacgattgtcgttccccacggatctcctag

SEQ ID NO: 94400 - DNA, 474 bp, Oryza sativa
  Clone ID: PAT_MRT4530_92693C.1
cccacgcgtccgcccgtttcgattcgattcgattcgattcgatgcttgtgccctccgccccgggagagactcgccggaattcgattgcttcttgctggtagggggagccatgggagagctggcttcctcgccgccgcccgcggcggtgctgcccgtcgtcttcgtcgacggcgaccagaccgtcgacctcggcaccgtcaccgtccagccctccctcggcgtccgcaagctgcaggccgtcgtcgcgcccgctgcgccgacgcaggagaggactatcctcaagcgcctccccgcgatggatctggcctccctggcctcgaccccctcgccggcggcggcggccatgttcggcgtctgggactacgaggcgcagctccaggagctgcagcggcagcgcgagtggtacctcatgcacacggcggcggcggatccgtacttcccgctggcgccggagcgcgaggacccgcccttctg

SEQ ID NO: 94401 - DNA, 487 bp, Oryza sativa
  Clone ID: PAT_MRT4530_92694C.1
ggcggccctggttttttttttttttttttttttttttttttttttttttttttttttttttttttttttttttttttttttaaaaaaggtgggaccctttttttatttttgttttttaacaaaataccccccaggggtaaatctttggggggggttttattttaactccagcggggaaacctggtgttttaatttgccattactgtggaaggggggttttgggactaatttaaaaaggcggggtagaaggcgaaccaaaatctaggacggaaggccccgggcttttccccccgggggcaatggaggtttagggcttggtccctggggaggcgatcccaattaccagatataaaaagggggagggcacggaaaactgattttttcctggaagggggggtaacaaaggcatacccgtaggcttggattggaatttttgggaatcctgaacccttggtttttttaaaaacaggaaagggggggggaagga

SEQ ID NO: 94402 - DNA, 855 bp, Oryza sativa
  Clone ID: PAT_MRT4530_92695C.1
atgaacaagcacgggttcccacgcgtcttccgcttcgtgcccgacgacctggagctcctaaacatcctcgacgacaagctccgcggcgtccctatcgaccgtgctgacgacgccgtcgacttccacgaaacgcggatcctcgacttccaccgcccgacaagctatcgttgtcccttcttcttctccggagacggtctgcgtgctcctggggattgcatgcgcatatgcggacatctacttcttcagcacgaggaagaggaaggtggaaggggatcgctccttcggcggatttctcgtctcgccgcgtcccggccgcaatcggccccaactccgactaccagctcggtctccggagccgccgcgcgcgtcagtacagccgacagggtgttggacagaatgaagctggtgcgcgcggcgcggagcggccggtggaagagcctaggctcctgcaagaaggttggcgtgcggcgtcgccgtcggccagaagaacacgtgttcgacggcgacaagaaccccgttgtgctcgaacgagggcatggcggcaccggaagacgggtacgacaagatgcggtcggagcgcgcggctcagagcggccagtggaaagtcttcggcaactgcagctgccgttggccggaatctcaccatgccgttctacgaacacatgcggcggccatggcgctgccatcgcccaccgcgcgccggcgcgggggcggggccctgtaacgatgatgttcatggcgaatcaggcgaacgtggcacctcacaggacgcaatcaagcatgtcggaactccatcaggaatggcaccagaccaccagtacgccaacgatgccccgtggcggcgccgagttctag

SEQ ID NO: 94403 - DNA, 963 bp, Oryza sativa
  Clone ID: PAT_MRT4530_92696C.1
ttagactgttacactttcttgcgttgcctttgggttttcccaaactctcgcagttttttgacccactgctagcgcttgactttggattctttttctggcttgtgcgctcaaagtagcaagcaaactcatatctattatactccttggtgacattgctttttttttgcttgaaatctttgttccgaaaccccagttctttgcataacgattgtagtaatcttgagcttctttttctgaaaagaactccataccaacagtagggactgcaggttgagattggaccccctcgtctttagtctctccatcttcacgtccaaagtcatcttgtatttcaaacccatcacctgtatcaatctgatcaatgctcatggcacctgtaaacagcccagtttcaagcagtacttccctcaacatatcatcatcatgacttgcttccctcaacacatcatcatcatgacttgatacttgctccatctctctttcaacacaaacatcatccttgtcactctgttgctctttcatacttctttcaccaaggacatcactcccctcatttggtacctcttccataattcttccagcagatccaactgaggaattcattctgcaggtaagaagaagggtcagtaccatattctgactgaagaccgaagatgcatcatttctataattctgttttctgtggacagtgtatgtcctacataactgtgtgcgggatgcaggacgaaatccggcgatggaggtcggtgcctgtgtcggatttttgccggggattgctgcggataggtgcacgtgctgccgccggcgaggtatcacgcgcagaagtgctagatttggggggaagggagcacttctgctcgttgttgttgcaggcgccgccgggccaagccctagttgagggaaggagcacctgccggcgaggtatcgcgcgcggaggcgcgcgataccgagccgggttctcat

SEQ ID NO: 94404 - DNA, 489 bp, Oryza sativa
  Clone ID: PAT_MRT4530_92697C.1
atgtgggctccatctctacggatgcttggtttacttgcctacttgggtggcttcaacttctgggctagtccgttctacttctgggcttatttcattggacccaacactgcgtcggcggtgtcgccgcggagctgcgagggcaacgactacggtggctgcgtcgagctgcgagggccgcggctgttgcgtcgagctgctagggccgcggcggctgcgacgtcggcatcggcggtggcggggagaagtccttatcactctcctcttaccgatgtcaagcaaaaagagaagagcaaaatacttcccagattgtacaccaagaccaatgcacgtcgttgcttccaccacgcgtcgagctgcttcttccctgctaagccaaatccaagggcgcgtgcggcgatgacgcccggaccttctgttgatgactacgcgcagaggcttccaccggcgaccgtccgcgcaatcggggcagcgccaccgccctcacagtag

SEQ ID NO: 94405 - DNA, 499 bp, Oryza sativa
  Clone ID: PAT_MRT4530_92698C.1
atgatgtgcactaggtttcccgatcttctgaaaggtttttgataaaaaacgattttggcggagtcgcgacacaaatcgacccggcttcttgaacgcgcactctcttgagccccgcaatcgcagcaccacgtctcctctggttatcacccgtgtcgaaacggcccaaaggccaaaatacggtgatgcagcaccgggacagattctgggcgtcaaattgttcggtcgattcccattgactcggaaagaatttggacgtgggagcaaaaccattggaaatgttataaagaacgtcccaatctgagcacgtatgaacgtcctctcttggccacgtccatgtgtccagtgccagcgcatgtgccatgctgtgtaaccattcccggcctacaccagccatgcgcaccatgcctgcgcaactgcgacacacgcgcccgtgaaaccgcgagagtcggctctgataccattttgtcacgtcccgccttcccccaagccgggcccactt

SEQ ID NO: 94406 - DNA, 172 bp, Oryza sativa
  Clone ID: PAT_MRT4530_92699C.1
gcaacgcgggtgcgtcgccggtgagcaagcagccttccagcgctgggactcctaccgggcgcgcgcgctctatgacgcaggggtctgttcctgcgctgcggatgcctcaccgccgcgcctgctctccggcgaggaggcgcctcgctgctcgccggcttgactccggcgatgc

SEQ ID NO: 94407 - DNA, 1299 bp, Oryza sativa
  Clone ID: PAT_MRT4530_9269C.1
atgtcgacgttacgctgctacttctcgctcttcctctcgctgatcctattggcgttgttgccacggacgctagccagtgatgcgttccaagcaccaaggccaatacttgtccggatcaccaaggacacctccacctcgctctacaccatgtccatcaggaccggctcgcgcctcgtcctcgacctcggcggcccgctcctctggtcgacgtgcctcgccgcgcacagcaccgtcccgtgccgctccgacgtgtgcgccgccgcggccgtccaggacaacccgtggaactgcagctcgagcaccgacggccgcggcagcgatggcggcggcggcaggggcctgtgcgcgtgctccgcctacccgtacaacccgctcaacggccagtgcgcgcgtggggacgtcacgacgacgccgatgctggcgaacgtcaccgacggcgtgaacccgctgtaccccgtggcgttcccggtgcacgcggcttgcgcgccgggcgcgctcctggggtcgctcccgtcgggcgccgtcggcgtcgctgggctgtccggtgctcccctgtcgctgccgtcgcaggtggcggcgtcgctcaaggtggagaggaagttcgcgctgtgcctccccggcggcggcggcaccggcgcggccatcttcggcggcgggccgttccacctcctggtggtgccggaagagttcggcatggtctcgaacgggctcagctacatcagctacctcaggaaccccaagaacggcggcttctacctcgacgtcgtcggcatcgccgtgaaccaccgcggagcggacgtgcccccggactccctcgccctcgacgccggcaccggccacggcggcgtgatgctgagcacggtggcgccgtacaccgcgctccggccggacatctaccgcgccgtgatcgaggcgatcgacgcggagctacgcctcatcgcgcgcgcgccgccgtcgtggccgttcgagcggtgctaccagaggtcggcgatgtggtggacgcgcgtggggcctccgctcgccaccgtcgacctgatgctccggagcggtggtaactggacgttcttcggctccaacatgatcgtgcaggtgaacgaggagacgctgtgcttcgcgatcgtcgagatggggccgacgccggcgatggacgagtcgccggcggtgatcatcggagggtttcagcttgaagacaacctgctggtgttcgatctggagaaggggaggctgggatcgactggcctgctttactggatccggactacgtgcagcaacttcaacttcagctgggggactccgtag

SEQ ID NO: 94408 - DNA, 639 bp, Oryza sativa
  Clone ID: PAT_MRT4530_926C.1
atgccactgaaatttctgcaaattggatccatgccaccccgttgcattttccgtccttcccctgttaatttcctaactccgtgccgtctttctacttcgccgttgaaagcgccgccgaactcgacgaccagcgcctctcgggggatggtctctggcctcgacttcggcctcctcaactcgtcccgccccggcccaatccgccgcggcgccgccgtcaagaccggcacgcgcgtgtttgcggactcgaggacctcgaccccgccgccttcgagtcgccgtctgccgaggaggacgcggccaaatcgacgacgaggttgctacttgatgcagcttgacgagggatgcttgtggctggcatgccggcagctatgggacgacggactgggatggaaattggatatgactggttgctgttgcttcaagatgaatgggccgacgacagagaatgacgccggcgacagcccggcgcagaaaaatggtactttccctgacctcaagatcgacattgaccttgttgaaccccaccacccgcttgtcgccgtgccacctggggccaccgtcaccacaatgaccgaggctatgatgttggaggtgatggcgctcggtgctaggcgagctcgagctggcggctcttattag

SEQ ID NO: 94409 - DNA, 215 bp, Oryza sativa
  unsure (1)..(215): unsure at all n locations
  Clone ID: PAT_MRT4530_92700C.1
caagttaagctgaagacattgttttttaggatcaaacatttctattaccacanctttttctaggatggactcgagtatcaatacttccaccccaaaatgcagttagcgacatatctaagaaaagccgcttgtttttccgcctggctggcaagctgatcagagcanntaacacaaagaacacgagatcactataaaccaaacggcaaccaacgaag

SEQ ID NO: 94410 - DNA, 709 bp, Oryza sativa
  Clone ID: PAT_MRT4530_92701C.1
gcaggcgatgtctaggaagttgagaaatcaatttgtgtcaaggctctcgatgatggctgaagatcagttgctccaactagggcttttactccaagatcagatcttgacatcacaattagatatcagggacatgaatggagcaacaggtctgctgcagaccaaacaaatttactacgccgtgtgcgatgacatagacctgtgcagctgtgcaacaactggaagttcatttgggagaataaagcaccttcgaaagtgcagctcttcgcatggctcctagccaaggaaagactccctaccaagctaaacctcaacaagaagaaaatagtacaattgccactatgtgacctttgcaatggggcagatgagacagtttaacacattatgtatccagtgcccctttacaattgctctctgtagactgatcagtgttcagatcaacattttgactgtcaagaacatggcggatttgctgctcccactgcaaattccgatcaaacactactgggtcttcttccttctatgcttttggggcctttggaaccatcgacatgatgtggtactccgtggaaaaataacatatctacgcaggttgatcgtgaggtgcatcgacgacgctactctttggactgagcggctaatcgtggaggatatgaatgctttttcagcttggaaagaaatcatctcttcctccctttgatctcttgatttg

SEQ ID NO: 94411 - DNA, 1500 bp, Oryza sativa
  Clone ID: PAT_MRT4530_92702C.1
tcatcctctcttcctctctctcactcttcctctctctctcaaaccggtcggcgacggcgtgcgggggaggacgcggcggcggcgggcggcgccggacaggcccacttcgccgcccaacccacctggatcgccaccggcttgtccaccgccccctgcgaccccgccaggcaggcctacaccttccgcctccgcaccatggtctgcctccccctcgccaccggtgtcctcgagctcggttccaccgacgtcctcttccagaccggggatagcatccccaggatccgcgccctcttcaacctcagcgcagctgcttcctcctggcccccccaccccgacgccgccgccgatccctccgtgctctggctcaccgacgcgccccagcacgctcacggagaatcccagccggtctgtcggtgcacgccccaacgccctcgcagccggccgcgttggcaggatgtggaagtcctcgctttcgaagtctatctgctgtctagtatctgacgtctcccatctccagtgcagcgaatcctcctggtccgagagctgtatagacttcatcactggccagaggctaagatactcgagaatagcctgcattcccagggcaccagttatgtcttgaatccatcttttgttgagaagtgcttctgcaactgtcctgtgattgcgaaatctcgcaggaaccgcatcatagatggaaggcgccaacgtttccgagtatgccattccgattccattttcgagaaaataaaatgaaaatggaaatggtagagggtttttccgaccgtttccgaccgttttcatccctacaccgaggatcagcttcagtgccctcgaggcaacagagcgaagggactcttcgtactccaggacagagacgcctccagatgaaagcttgaaattctcttgccatgcccttctggctgtctgctgctcaattgcggatcttctgattccagggtgtacgcttgcttcagttctatgtgaatttgcttgcttcaggattaatttcagcttctgtacaaaattccttaagccgattccatttccgttgacagcctcgatgaaatcggtctcacagagaagtttgctgaactgcaaaacaaggccaagaaaggcctccatgtcctcccctataagattgtctgtctgatacatagttctaagtgccatcgagatgttgtctacagaaaatttctgcatggagtattggcagtcactgtctggtttggcataggcacataggtttttcagaatgttctgcaccacaactctatgaaatctaccgtgctgaccagaaaccatgctcttgaaggcctctagaactcctatgacagcagtaccaagtgttttgtccacgcacctatcgccgagctcctcgtcgtcgcctcgaccccgcggcggtggggcgacggcgacggggacaacggcgggcactggctccgacgagcgtcctccacgcccaacgcgccaccccgcacagctagccaccatcgtcat

SEQ ID NO: 94412 - DNA, 274 bp, Oryza sativa
  unsure (1)..(274): unsure at all n locations
  Clone ID: PAT_MRT4530_92703C.1
cggacntgnccgngacgcttgggtaactccctntccctcaacaattcttnatgtcctctccacccctcccctatggatcacctcctctcctccctcccaatccgatcggaggaggggagcaacggcagtgcggngntccccctctttccctccccactggaggagggggagcgacggtnacagcagcnatgcagacatgggggacgcggcggcggcgtggacggcgacgtctgcatggatgggccgacgacggcggtggtggcggctccccctn

SEQ ID NO: 94413 - DNA, 2037 bp, Oryza sativa
  Clone ID: PAT_MRT4530_92704C.1
atgtccaagaagctgcttccgatcatggcgaccaagagcgcgaaggatttggttggcgactccaaggccttggtcgcagccagtgacgtcgtcaccagcagcgccatcgcggagtcctacaacgaccagatccgccctctcctcgacgccgtcgaccggctgcgccacctcaaggtgacgcaggaggggatccagctgccgaccatcgtcgtggtgggcgaccagtccagcggcaagtcgagcgtgctcgagtcgctcgccggcatcagcctcccgcgaggccagggcatctgcacccgcgtgccgctcgtcatgcggctccaggacgacccctccgccgactcgcccaagctgcagctggagtacagcaacggccgcgtggtgaccacctcggaggccaaggtcgcggacgccatcaacgccgccacggccgagatcgccgggagcggcaagggcatctccgacgcgcccatcaccctcgtcgtgcggaagcgcggcgtccccgacctcacactcgtcgacctccccggcatcacgcgcgtccccgtccagggccagcccgacgacatctacgaccagatcgccaagatcatcaaggagtatatcgcgccgaaggagagcatcatcctcaacgtgctctccgccaccgtcgacttcccgacgtgcgagtccatccgcatgtcgcagcaggttgaccgcaccggggagcgcacgctcgccgtcgtcaccaaggcggacaaggcccctgagggcctgctcgagaaggtgaccatggacgacgtcaacatcggcctcggctacgtctgcgtccgcaaccgcattggcgaggagacgtacgaccaggcgcgcatcgaggaggagcggctgttcaagtatcatcccctcctctccaagatcgacaagtccatggtcggcatcccggtgctcgcgcagaggctgatgcagattcaggcgaccatcatcgccaaatgcctcccggacatcgtcaagcagatcaacgaccgcctcagtcgccacagcagcgagctggaccagatgccgccggacctcaacaacgtcgccgacgcggtgagggcgttctttcacatcgtcaagcaggtgtgcgcctcgctcgagaaggtgctcgtccgaggcgagttcgacgagttccccgacgaccgccatttccacggcaccgcacgcatcgccgagaagatggacggctacaagaggaggcttcccgcggagtgcccgaagagcagcgacgacgacgccatgttcctgatggaggaggtgcgcgtcctggaggagaccaaggggatcaacctccccaacttcctcccgaggtccgcgttcctcgtcttgctcaagaagaaggtggagaccgtcatgcacgtgccgcacgagctcgtgaacgaggtgtggggttacgtggaggatgtggtgatgaacatccttctcaagcactccgagaacttcccccaggtgcagccgtcgtgccgccgcgccgtgcagacactgatggacaaggcgcgggcgcggtcggcgcagcacgtcaaggagctgatcgagatggagctcgtctccgactacacggcgaacccggattacatgaggacgtggacggagatcatggagggccacgatagtttcatggaggccgtggaggacggctccaagcccgcgaggatcaccctggagggctttggggaggtggacgtttcgcacctgagggcgcacgccggcttggccgggcaggcgttcgacctgagggcgcggctcaccgcgtactggaggagcatcgtgctccgcctcgtcgacgggctggcgctgcacgtgcttcgggtcgtcaagcgcctcgtggagcacgaccttgaggcggagctcgcggatgagctcctgggcaacaagatggccggcgtggagaggatgctggcgccgtcgccgagcaccggcgccaagcgcgagcgcctgaagaagagcatcgtcctgctgcggcagtccaaggaggttgtcgcgaacatcatggacaggatcagcgccgcaggtgaagtttag

SEQ ID NO: 94414 - DNA, 198 bp, Oryza sativa
  Clone ID: PAT_MRT4530_92705C.1
gccgccctttttttttttttcgggtgacaaaacacctgcggtgatacttcactgtcatctgaactcctaagcgtgtggtgcgatactgggactgatgaccccttccccatctggggtaatctatgcccttcatgggtttagcctggccacaggattatacttctaccataactgccctagtttgggcaaccacatccc

SEQ ID NO: 94415 - DNA, 289 bp, Oryza sativa
  Clone ID: PAT_MRT4530_92706C.1
gccactcgtgatgcagaaaaataaaacaccctgtccatttcattcggggcttgaccaatatatagagagtgtctgttactgggtgatggcctaattcatttgccttcttacatagttcccactattcccaatactataactatgagaaagaggctccacattatgacaagacaaaaatcttaaactggattagctattaaaaaatacaagggtttaaaaataatgtaatacctcccatccattcttaaatccatgactaagacctccctcaaacaattaactaacaccc

SEQ ID NO: 94416 - DNA, 243 bp, Oryza sativa
  unsure (1)..(243): unsure at all n locations
  Clone ID: PAT_MRT4530_92708C.1
agatgaggatgacccagccagtttatattgtgaatnccctagtccaatcatttggtccagaattgcagcttccataaatggctctgtatgatggttcttgagtctgacaagaagcttggatctctgtgtcaaagtttccaaaatatttgnctgcttcagactgcatatcccaagaaaagggcatgctgcaaggtcagtaggcnccttttcatctggagacggacatgtgttcacctgggatat

SEQ ID NO: 94417 - DNA, 388 bp, Oryza sativa
  unsure (1)..(388): unsure at all n locations
  Clone ID: PAT_MRT4530_9270C.1
aactcggccccctngtttgcagctagctggatcgttcgttcggnatcgattcgaggagttggtgatgagctgaggaggctnagagcttgagctccgatccgaggatttttcgagtgctctgcgagcttttgtgcgatcttgcgatgctttgttgagtttgtgtgctccgatgtgtgtgggtgtgtttgtctctgttcgcttgtgtgggaccgatggagggagagagagatgaaaataaatatgcaatgcaagcgtggatatgtacccatgttgagttgtctcatcataaataaaaaaaaaaaaaaaaaaaaaaaaggcagagacagacaccagcagnntaggagtanacagntnntannannntnnatgaaaaaaaaaaaaaaaaaaa

SEQ ID NO: 94418 - DNA, 582 bp, Oryza sativa
  Clone ID: PAT_MRT4530_92710C.1
taatctctgcaaaggggtacactttacccacatgacattactaacctaggtcacctagcccacatttccaaagccggcacagggtcaccatatgccaacgagaggggtctcagaccaacagcaggttaggtcccagaccatgctgtgccaggaagcctaggggttctccctgacaccaccccgacgaatccacttgtcccttggcatcaaggtttccctggcctagctagttactcagccaggggtgttccatttcacctatatggtcgcacttgttatatgctcggatgtaattccaaaggaatcaatccttcaaagcgaccgcatcaaggcgtttctcagattttaagtttgagggcgaccgtcgatactcacacagagtgcacgaataccgaggcacaacacaggtggattcaaggaaacatggtggcttgccttgctcaaggtcttgagcttcacgaatcttcaagaaatccatgcttagaagtaaatccggtaactgcaactatacgcaaacaatcaaaacctaaacaagggacaaaaaaaaagatcatattaaaactaattactagtgccattaaa

SEQ ID NO: 94419 - DNA, 726 bp, Oryza sativa
  unsure (1)..(726): unsure at all n locations
  Clone ID: PAT_MRT4530_92711C.1
gcatatcctggccgtccaataaatctctttacctagttcggcttgggcctcgcaccgactccgactccgaccccgactccgactcgccgccgcccttgcgccgcctccgcggagccctcccctccccgccggcggcggctgcgaagcgactggattggatggcatcgagggttccgtctccaccgtgcgcggcggcgcggtccggttgggctgtcccgatggtctccgtccggccggcgagatccggcgtggcgagaggacgtgctgtggtgtgcgccgttatcttcaggccgtgtatcgatattcataaggggaaagttaaacagattgttggctctactcttcgggattcatcaaacgatggcacggcacttgttacaaattttgaatcagacaaacctccagcagaatttgcaaatatatataaagaggatgaacttattggtggacatgtaatcatgcttggtgcagatcctgctagtcaagctgctgccatggaagcactacatgcatatcctgtatgtgtttagtgaaggcaaaatgaacattgaacggctgaagcaacttgtcgatctggttgggaaacataggcttgttttggaccttagttgtagaaaaaggatggaagatatgccatcgtgactgacagatggcagaaattcagtgatgntctttgtggatgagccaacattaaaacatnctgctgcctatgcagatgaatttttg

SEQ ID NO: 94420 - DNA, 930 bp, Oryza sativa
  unsure (1)..(930): unsure at all n locations
  Clone ID: PAT_MRT4530_92712C.1
ctccgactcgccgccgcccttgcgccgcctccgcggagccctcccctccccgccggcggcggctgcgaagcgactggattggatggcatcgagggttccgtctccaccgtgcgcggcggcgcggtccggttgggctgtcccgatggtctccgtccggccggcgagatccggcgtggcgagaggacgtgctgtggtgtgcgccgttatcttcaggccgtgtatcgatattcataaggggaaagttaaacagattgttggctctactcttcgggattcatcaaacgatggcacggcacttgttacaaattttgaatcagacaaacctccagcagaatttgcaaatatatataaagaggatgaacttattggtggacatgtaatcatgcttggtgcagatcctgctagtcaagctgctgccatggaagcactacatgcatatcctgggtggtttgcaangttggaggtggaataaatttggagaatgcgatatcttaccttaatgaaggtgccagtcacgtgattgttacgtcccattcttgtagtgaaggcaaaatgaacattgaacggctgtccacttgtgcgaggtcgttggacgacgcactggtacttgccggtaaggtgacgtagcccgtggcgctccctgatgtgactgacagatgacatctccacccncgtgatcgccaccacgaacccatgccgcccgctgcaggtgccctcgacgtccttgatgagcttggagacgagcttgtcgcggaggtgcgggccgaagtgccgcgggtgcagctgcatgttccgctccagcacgatgtggaagaacatctcgccccctcctcgtccgcgccgccggcgagcgagcgagcgagcgagcgattcctcaacagttcgaccggacgcgtgggcggacgcgggcgacccgggaatccggccgga

SEQ ID NO: 94421 - DNA, 2132 bp, Oryza sativa
  unsure (1)..(2132): unsure at all n locations
  Clone ID: PAT_MRT4530_92713C.1
tggagcattagaaaaaagcagctccaagcaatgcaggcactcacatggttggacacgaagatctgcacaggcccagcctccgcgaagaaccccatctgcagaaccaacacgaaaacgaattgtgtgcgccgttatcttcaggccgtgtatcgatattcataaggggaaagttaaacagattgttggctctactcttcgggattcatcaaacgatggcacggcacttgttacaaattttgaatcagacaaacctccagcagaatttgcaaatatatataaagaggatgaacttattggtggacatgtaatcatgcttggtgcagatcctgctagtcaagctgctgccatggaagcactacatgcatatcctggtggtttgcaagttggaggtggaataaatttggagaatgcgatatcttaccttaatgaaggtgccagtcacgtgattgttacttcttatgtgtttagtgaaggcaaaatgaacattgaacggctgaagcaacttgtcgatctggttgggaaacataggcttgttttggaccttagttgtagaaaaaaggatggaagatatgccatcgtgactgacagatggcagaaattcagtgatgtctttgtggatgatttttttttttttttgtacagtccgtaaaaaggtcagagtttgattagttaaatgactgcttgaaagttgaatcccacaacacactcaagcaacagtgccaacttggtaaagcgccatttatagtgatgaaaatacaggttccaacccacttacagccccttccagtggggcttccatattttaacactacaattcatcggaatattcccgttcaagagcatgaagaggcgtaatcttgtcaccggataatttacactgccgcaccaggatcactgataacgcccaggaagtcatcttttattgtgccaatgcaaaaaatttctgttgcatcaacacgtgtcccaataatcttcaaccgaacctcactatctttctgaattttcaccgatccatcagaagtagtataatttggcacatccccagattggaactccatatcatcaggaatcaaatggttggacacgaagatctgcacaggcccagcctccgcgaagaaccccatcttgttgaccatggtgacgacggcctccaggatctcgcccttgaaggggcggaagacgacgcactggtacttgaccgggaaggtgacgtagcccgtgccctccctgatgagccccttgccgacatcctccacccccgtgatcgccaccacgaacccatgccgcccgctgcaggtgccctcgacgtccttgatgagcttggagacgagcttgtcgcggaggtgcgggccgaagtgccgcgggtgcagctgcatgttccgctccagcacgatgtggaagaacatctcgccccctcctcgtccgcgccgccggcgagcgagcgagcgagcgagcgattcctcaacagttcgactcaactggcttttttttattttttgtataatgcttaacctgttccatcagctcgattgttatgcacagacctccagggtttagaagtaatgctaatgcattttctcaagtgttgtactgcgaataattcgatgggtcttctgtggtataagttcaagctgaagggttcgattttgttcggatctggaactaggctttacattgaggactggccgagctgtttatcaagcgactgcactatatgtttttgagattaaaaccctgttaacatgatatgtaagcacatctactgagttagcccgtctgatggtgaaacataatgggggcctccactagtccacagctcattaatcatactcaacatttggcgtaccaagctgcagtggttacagtgtgttttctttggaagtgggccgagggatttatgccccacttaaaatgtggtcatttnccccaattctcctgcagagtcatgtgaaatccctactgacaagtactacctatgtgcgnnacagaaccccaaatgtggccatgtggcctgtgggtctattggcgacgtttggctgtggagtactgctcagtaatggattaagtaaaacatctcaaagcaccatttgcaacttctcagcagttcataatgcaagagctgatttgtttgg

SEQ ID NO: 94422 - DNA, 1639 bp, Oryza sativa
  Clone ID: PAT_MRT4530_92714C.1
ccatgcgttttttttggcatgggcgcgagcgccgcgccaccgtgacactcacagccacgatgtgaggatgggctgagcgccaagtccagaggactggaagaaagcctaggagcctaacgaagcgcgatggctgttcgctatggtggcgacaatcgcggtactgacgtgcatggcgtaccggaggaagcatgggatccagaggtcggccaccttcgtggaggaccaccgccagcagccgccgcagccgggggacacctcctcgccggccatcgcgtcgccgcgcgccacccggttcgccgacgacagccgccgccccgaccgctccctcgccgccgcctcctcgtctccccagcccgacggctccaccccggatcctgtcactcagctgtacacatcggcgcgcggcgcgaagggaaatgagacgaagcacggattctggggagtgttggcacagcaagccatagtgatgctcgacgaaaacggcggcacggatgataatcactctgtgacatcgcaatctcgttggtcctacgaccgggtccggaagcccgagaaccctcccttggacattggatgcaagatcaagaccgccctcgaggagggcctgacgaaggtggagggtagcagcaggacgggcgacggcgtccatggccggaagctgcacatcaggaggaaggcttgcagcatggacctccgcaacagcagcatgggattgtccagcccggaggccatgtcgccgacgatgtcggacacggagtcgccgcagatcaaggcttctcgcgacgtggcgagcgccatggcggccaaggtgaagctgctgcagcgggagctgaagacagtgaaggccgacatggccttctccagggagcggtgcgcgcagctggaggaggagaaccgcatgctccgggacggcaagcacgacgccgacgaggacctgatacggcagcagctggagacgctgctggcggagaaggcgcggctggcgaacgagaacacggtgtacgccagggagaaccggttcctccgggagatcgtcgagttccaccagctcaacatgcaggacgtggtcgacctcgacgacgaggacatggccggcgacggcgacggcgaggagggagacgacgaccatcagcagtacgggtgtcatctccgggcgcacgaggcggcgcacggcttgtgggccggcggcggcctgggcacgccgccgcagtcgccgttgggccacgccggcaggatggggatgtcgaggtcgaacagccgcgccgccgagtcgcccaccatgcgccggagcttgaaggaagaaaacgtcgatgagccggagacgccgcccactcgccggagcctgaaggaaaaagccgacgttgatgcgccgccagagacgccacccactcgccggagcttgaaggaagccgacgtcgacgagccagatacgccgcccactcgacggagcataaaagaagatgccgatgatgcgccagagacgccgacgaccaagcaagacattggttcgccggagacggcgacgacgcctgcacgccggagctccaatgacgatcttggtgcagcagagacgacgaccccaactcgccggagcttcaaggacgataatggcgtgacagagatgaagaacgagcattga

SEQ ID NO: 94423 - DNA, 238 bp, Oryza sativa
  Clone ID: PAT_MRT4530_92715C.1
atggggcccaaaaaaaatatggtgccttcatattgaaagaaacaggtttacaaatcccgttacacaacaacctgaaaaaaaaaaagaacaagacaaactgattgagcaaactgcaaagccttcttgcaattttagctgactcaaaaaaatgaaaaaagggtaaaacccccaaaaattctgaacactaaaactttggctgctacacctatattacccgacccgtggtttcacccgggaa

SEQ ID NO: 94424 - DNA, 457 bp, Oryza sativa
  unsure (1)..(457): unsure at all n locations
  Clone ID: PAT_MRT4530_92716C.1
tagggcctgtttatcaaggggagtttgactttatcaaaaaaaccttattttcatttctccccttctgcaatgttgccctttgatttcaccctgtttttctatgagaggattgaggtttttcaaacccaaataccaacctttgctggnatctcatacactatcctatcacacactgttcccaaacccaaaaggcttcaaattgtggagaaaatggtgccttccttttttcagctctgaggtggacttttgcaagctcttgattcagaagtngtgtagggtgtgtgtctctcttctcttttttagggtnatacaagctggccccagcttgattgcaccctttgcttgtngtctcctttgtgggttttgttgtaacaggatcaagatgtagctgttccctcttgtttacacaagtataaaaataaataaatgtgcttgttgttaaaaaaaaaaaaaaaaa

SEQ ID NO: 94425 - DNA, 558 bp, Oryza sativa
  Clone ID: PAT_MRT4530_92717C.1
tggtatccacaaggttttgaagcctgaaggcatatttgtatcaattacctttggacagccacatttccgtcgtcgattttttgaagcacctgggtttacatggtctgttgagtggagcacctttggtgatggcttccattatttcctttagattcttaaaaagggcaagaggttgttggattccaacggtaaccaacatacacagcctgctgctccaagcattaatatgttccatgaagagcttgagagtgaggactacatattccgaacaaatgttgatgagttgtaactggcaatttaacaagtgcatcatcggcttgggtgggagttttgatgaagctactacacatcaagagagacgtcccgtccagcatcaacttggtagatgaatgatcttggacagatgcatggaaagatcttgcttggtgctggaccattgccctggctagggatttctgtgccagctgaattgactagaaaacaggtacccttattattgttccagattttaagtaacctttcaagaagttccttttgttgtcaacatgcattttttgt

SEQ ID NO: 94426 - DNA, 126 bp, Oryza sativa
  Clone ID: PAT_MRT4530_92718C.1
acaaaattgcacctgaaaaatgggaaggtcttactgcagatcgtgatgctttacttcggagttcaattttcctcagtgaaaataggtggctttgtaggctatattttggtgaagcaggaccataat

SEQ ID NO: 94427 - DNA, 2681 bp, Oryza sativa
  Clone ID: PAT_MRT4530_92719C.1
atggctcccttcggcgatggcggcggcggcggaggggaggaggagaagagggagggggatgcggggtgggggtgggacccgatgaggagcggcagcgcgccgccgaccatggagggcgccgcggcggcggcggcttcggcggtggcgcagcaggaggtggagggggtttacgggggcggcggaggcggcggcggcgggtcgttcttctccgggatggatgggttcggcgcgaggctcgacgaggtcggccggcggcgcggcgccgccgcgcaggatcattttggaaattctgagtcattatctaatggagcaccaggcctccaccttaatggtacgagagagtttaatggacagcaatttggaccaacccgggttcatagtgttggcgctatgctggatcactctgcagttaatgttggttccccatggatacagaccaaaacagatgatgctgactttcataggcatgccgagaatcgcttcatgccaaacatgggaaagatgaatgcttttgctagaagggaccttcagtccacctatctctctgactctgatctttcaaatgctttatctagggtgaacttgtctaatcatttagaatatgatgaaaggggccttgccaaagacctgcttgatgaaatggaaatgcgtaatcacgacaggcatttttcctctaagattgccaatgactgccgttctcctttatctggcaatgctttgtgtacgcttggttgtgagcacttggatgttcattcactaccttcatatggagatggtcttctacgcaggcagaacagtattatggatagtccctatgtttcaaggaataataaccatcacatgaagaatgtggatcgcctatctcttgctgatcaactagctttgatgcagctaagcaatcttgacgagaataattaccatagcaatgcagatatggtaaatataatcaaccccttgagaaacagacgcaacatcacagacttggacttaatcaggagtaggaaccatttccttgaagaacttattgcacagcgttgtttgcaggaagataatgtctttcagtcaaaatctggtccctcatataatgacaacatactatatcatgatggacctcgttttccatattcaagaatgcaaagatcagggtcccatgcttattcacatttgaggggcattccatatcttggtgatcagcaatcgcggatgttatcctctagtaggaggacacctggtagaaatatgggatcacaaatctaccaagataatcctgtagcaaactgcctggatctgtcttctttggatcttgcaaatagaagtggtgcttgtcccttggagcttgttaatgtagtgggccatgttatggaagttagtatggatcaatttggaagtcgttttattcaacaaaaactagaggttgcctcagctgatgacagggaaaaaatctttccagagatactgaccaatgctattgctctgacaactgatgtatttggcaattatgtgattcagaagttttttgagtttgctacagaaagccagttaagccagttagcagatcagctcagaggtcactttttgcaactcagctttcagatgtatggttgcagagttgttcagaaggtcattgatgtggttgacttggagagaaagatatctattgttggtgagcttaagaattctgttctcagatgtatttctgatcagaatggtaaccacgtaatccagaagtgcatagagtgtgttccagaagatcacattccatttgtaattgaggatatacttcagaaaatttatccgctttgcactcaccaatatggctgcagagttattcagagagttttggagcattgccataatccagcaactcaaagtgctgtgatggatgaaattgtcgaacgtgcttttgatttgacagaagataaatttggaaactatgttgttcaacacgtcttagaacatggtaggccagaggagcggtcatccattattcaaaagctttctgggcaagtggtgaacttgagccagcagaagtatgcttctaatgttgtggaaaagtgtctatcttttggaactcctgatgaacgtgaaggccttataagagagattgtatcctctggccaaacattccagggactgatgaaggatcagtttggcaattatgttgtacagagaatccttcagacatgtgatgacaaattcctagttgtgatcctctcaagcatcaagatgcatttgaacgaactgaagaactacactttcgggaagcatatagttgcgcgtgtggagaagttaatcattacaggagaaaaccgagtgcggatggggtccaagactagccaatgtcagcagtcactaagctgtacagatgttgacgctaatcctttttaagcattggcatcaataagcaaatctggtgaattgacaaatgtggagatttttgttttgagatacactgtaatagccaataggggtgtcctggtggagactggatgtgttctcttcttttttactgtggcctgtatagatctctccgggtacttaaaaggtaattagatgagtgttaggtatcgccgctgtaaatctgttttttggccatgtacaagtttactgatgggtatcagctgtacatttgtttgagctgtcagttggcaaagcgtgtcgtttaaaaaaaaaaaaaaaaa

SEQ ID NO: 94428 - DNA, 214 bp, Oryza sativa
  Clone ID: PAT_MRT4530_9271C.1
gttggagccattgactctgatcaactggggggggctattatcgtgcttgcggctggtctaccaccgcatgttgacagctattgcatgactcattggtatctagaccagaaacctgtttatctctacggagaccaacagatggaggcaaataactgcggagcagatcgtgttgaaacactccggtggtaaatgaaccaaggtcgcaacgatcgcg

SEQ ID NO: 94429 - DNA, 408 bp, Oryza sativa
  unsure (1)..(408): unsure at all n locations
  Clone ID: PAT_MRT4530_92720C.1
caccccaccagcagcagcagcagtagctgagcttgaagcagcagaganggtagacattgccgccgcaccattgccctctcgtcccctgcgctngcccanagcgccngcgaaggtgttcngcgaggggcgcatcaccattcgaaggtcggcggcgaancatngccctncgcgtcgggagcccgtggtacggcgccgaccgcgtgctctacctcggcccgctctccggcnagccgcangnctacctgaccggcgagttccccggcgactacgggtgggacacgcggggctctccgccgancctgagacgttcgncaagaaccgggagctggaggtgatccacttcaggtgggcgatnctcggcgcgctgggntcgtgttccngagctccttgccgaacgggttaaagttc

SEQ ID NO: 94430 - DNA, 216 bp, Oryza sativa
  Clone ID: PAT_MRT4530_92721C.1
atgtcccgtcgcctccgctggggatcaacaggggaaatttccccaaacacgaacagagaggaggaagaccaccagatggggctcctccggtcttacgcgcacaagtggcagttacttctaccctcgtcgcaaggggcccggtactggaaccttccaggggcccacagcgggaaggagtgggacacccccccgcggcccttagggaaaggagattaa

SEQ ID NO: 94431 - DNA, 331 bp, Oryza sativa
  Clone ID: PAT_MRT4530_92722C.1
tcgggcggccttactttctttttttcctttttttaactcataaacatgataaactctatagaaagcattgtgcagatccgggcgatcccagctaactattcagaagatctgcccttgacacaggctaagatggtcacgatccacaactacatagctgattaccttgttggctagccaaacgcgcaagataataggtgataatctctactcgccagccaggacctcctgcccggccatggcctcatgttctggaggcctatcaagcttgctaccgatgtcctccttgggatgaacaccatgcacctccatgagcttccccagaagaaatttc

SEQ ID NO: 94432 - DNA, 3249 bp, Oryza sativa
  unsure (1)..(3249): unsure at all n locations
  Clone ID: PAT_MRT4530_92723C.1
atgcgggttccggcgacgaatctcgacggaggagcggcggacgaggtggagttcggcctcgcgaacccgacggcagcgacggcgcggggcgggaaggtcgggaacggcctaggtgctcccgatttcgccggcgacgtgggaggtttcataagcattgactgcggcctggaggcagacagcagctacctgggcgacctgaccggcctcacttacgtcccagacggcccgtacatcgacggcggcgagaatcagaaggtgaccaccgtataccgcaatcgctggtggggccctgacacacgtactctccacacggtcaggagcttcccatctgccaagggtcagcgcaactgctactcgctgcccacccatatcgggtcgaagtacttggtcaggctggatttcttgtatggcaactacgacggcatggacaacccatcgctaaaattcaaccttacccttggtgtgaaacactgggacaccggcacgccgttcgtgtccacggtggagttgaggcctctcggtatcttgccctacccggctgtcatgggcaatgtgtcactctccctctatgttcggagcaacgtgggatctagccctgacgatgacaatttaagacaagtggtcactgatgactacacctcacttttgacgggtgaaagcccgtcactggtaaaggccgcggacgctggatccgcgtcccccgaccttgtggaggccggatatggtgttcatcggtcggcggcggaggaggcggcgtccggtagtcggggaagaggttgtggaggtggcgaaggtgttggtggccggatccgcggtggcgtcggcggctgggaggcgagggaaggcgccggcggccagatccggcttcccggaggccaaacttggcgacatcggcagccaggaggcgaggaaaggcgccggtggccagatccggcttcccggtggccagatctggcgaccggcggtcaggaggcggcgacggcgtgggcgttaaaagccggtgggaggcggaggctggaggcgtcgccggcagaggcggcagagatggagaccgctgccgccgggggccttagccgcctccccaccccccgggggccgccaccgcgccccggttccagagccgtcttgtgcgatcccgccgttcctgtcccatgcgggtgtnagttggcggttgtttggggggtgggtggagagtgcgggaaagccattgtgccgagtggcaactccatgaaactagttttcttttccggccaagtagacgtccttcttcgtaaccacttcgtgatcctgcatttcgctgacttccagaacaacaagtcccgggaatttacagtttccatcgacaacggcgtgcatagcagcccatacagtacaccgtacctaaatggtttgtcagtcaccggcagctggtccagcgattctgaaggcaagtataacttcaccattgctgcaactgccatatcagctctgccccccatcctcaacgcttacgaggtctacggtcgtattgtccatgacaatccaacaacgttctcccaagattttgatgcgatcatggctattaaatatgagtatggaataaagaagaactggatgggtgatccttgttttccacatgaatatgtttgggatggtgtgaaatgcagcgatgcagagctggtaattctctatgtaccacagtatccaaagctgaacataaaaactcttgcttcttcaactgatcttgccatggtaccagaactcaggggtgctcctggacatatcacaaatcattgggaccatttacaagaacctgaaaatcgccgattcacgtatcaggagctagagaagtttactgataacttcaaacatttaattgggcatggaggcttcgggcatgtgtactacggttgtttagaagacagtactgaggttgctatcaagatgcggtctgaattgtcttcgcatgggcttgatcaatttttagctgaggttcagagcttgaccaaggtgcatcacagaaatcttgtttgtttggttgggtactgctgggagaaggaacatttagcacttgtctacgagtatatgtctagaggcaatctttgtgattatctaagaggcctggattatctccataagggttgcaacttgccaataattcatggggatatgaagacgaacaacattctgttgggtcaaaattttaaagcaaaaatagcagattttggaactcatatttcagccgttgcagctggatctatgggttatattgactctgagtactacaccactggtaggctcaccgagagcagcgacgtttacagcttcggcattgttttactagagataacaactggcgagcctcctataatacctgaaaaaggtcacattgttcaacgtgtgaagaaaaagattgtcagtggtaacattagctcagttgcagacgcacatcttggaggtgcctacaatgttagctccatgtggaaagttgttaacatcgccatgatgtgcacaacagatatagctactcaaaggccaaagatggctgacgtggttgttcagctgaaggaaagcctagacttggtggaagttcaaggggacagaggagacaaggaaaacctagcaaaggtaactatcggtgaacttcccataatacctggaaatggccacatcattcagcacatgatgcagattgtcactggtaacatcacctcagttgccgatgaacgtctaggaggttcctatattttcaactccatgtggaaggttctagatgccatgatgatgtgcataacagatattgcttctcaaaggctaatgatgtccgccgtggtcttgcaattgaaggaaaaccatgaattggaggaagctcatggggatggggagatgcaggggaagcattgcttggactgcatcaacaacggcaagctcctgctgatgttggacgagcccaccggagtcttgcttcttctggcctacgcctcatcgccgtctcacggcagtccaagattctgctcccaccgctgcgactgccgaccaaatatgtgggagcgtttgggcgtcaacggcgccaccaaccttcgcggtggctcggactctctaggcggcgacgcttctcctgctggtggctatggctcagctgctcccggacccagcgactcgatgtcgggttctggaggcaacaacagtcgccatttgcaagtctggtacctcacaatgaatcatgctataaaaatagtccagtcatcgctcatgctggcttgtggttag

SEQ ID NO: 94433 - DNA, 1506 bp, Oryza sativa
  Clone ID: PAT_MRT4530_92724C.1
atggagaggaagaggaggggatggctcgagcgcatcaagaggctcttcgtctccgagccgaagcagaagcccaagccggacaagaaggtgaagagcaagaggtggatgttcgcgggcaagctcaagacgcagcactcgttcgcgctgccggcgccggcgccggcggtggaggaggagcagatcaggcaggcggaggacgagcagagcaagcacgcgatggcggtcgcgctcgccaccgcggcggccgcagaggccgccgtcgccgccgcgcacgccgccgccgaggtggtccgcctcaccgggaagacggccgcattggctccggcgccggcgacgacgacgacgccgacgccgtacggccacgaacacgccgcccttatgatccaatccgtctaccgtggatacctcgcgaggagggcgttgcgagcgttgaaggggttggtgcggctgcaggcgctgatccgggggcaggcggtgcggcggcagacggcggcgacgctgcgcggcctcgagtcgctcatgaagatccaggcgcggcagcgcgccagggcctcatccgccgccgccgccggcggcgaccacaacgccgctaattcgccggcgcccgacggcatggacgcgctgctccggcgaggccgggagctgtactacgccgccgccgccgccgtccacgaacagcagctgagcaaggggtgggacagcagcacactgtcgaaggaggagatgagcgccatgagccggagcagggaggaggccgccctcaagcgcgtccgcgcgctccagtacgcctcgctccaccagagcgagaaggtcggggtcaggaggcagccgatgagccgggaggagatggagacgctgaaccagcggtggagctggctggaggaatgggtcgggtcgcagccgccgttcgataaggacatccccgtcgcgcaccaatctccaagcagggacgccgccggcgccgccatgaacgacgacgaacgcccgccgccgccgccggtgctccggtccaggtccagggccgacaggctcgcctgcgtcggcggcgacgacgacgacgccgacaggcagctcgggtactcggcgaggcggtcattcacccgcgccgggaggcgcacgccggcgagggacgacgacggcggcggcgcggcggcgttcccggggtacatggcgtcgacggcgtcggccaaggccaagttccggtccatgagcacgcccaaggagcgctccggcgccggcgcggcggacgcctactcggagcagtgcttcccgttcgccgaccgcctcctgtcgccgatcccctccatgtcgccgatcccgtccatcgccagcgacatcgtcttcgcgaggtccagccggccggcggcggcgcagcggtcgccgcgggtgaaggggcccatgacgccgacgaggtcccggtcccggaggtcgccgggacgccacagcttcggctccgaggccgcgctgcaccagctgcagatggagcagtacacccctatccggtga

SEQ ID NO: 94434 - DNA, 537 bp, Oryza sativa
  Clone ID: PAT_MRT4530_92725C.1
atggagagctcgggagaggccggcggcaaaaggaaaagcgaggaggaggacgcggggatggattttataggggcgggaaggtggagattaaaaattttttatggcatttctctttgggcaataggtttcataagcattgactgcggcctggaggcagacagcagctacctgggcgacctgaccggcctcacttacgtcccagacggcccgtacatcgacggcggcgagaatcagaaggtgaccaccgtataccgcaatcgctggtggggccctgacacacgtactctccacacggtcaggagcttcccatctgccaagggtcagcgcaactgctactcgctgcccacccatatcgggtcgaagtacttggtcaggctggatttcttgtatggcaactacgacggcatggacaacccatcgctaaaattcaaccttacccttggtgtgaaacactgggacaccgtgagtatagacaccaccgacggaaatgatggttataatgttcacgaagcggtgttcgtggcatgggcgagctag

SEQ ID NO: 94435 - DNA, 2304 bp, Oryza sativa
  Clone ID: PAT_MRT4530_92726C.1
atgacgacatcccgtatgacccgtcagaggtaccctgatgatcagtacgatcggttctggtccacagatgaagcccatcccttgtcgacaaacatttccacccaaactaccatccaacctagcaccgaatttgcggtgccctcgcctgttctccagaaagccattgtgccgagtggcaactccatgaaactagttttcttttccggccaagtagacgtccttcttcgtaaccacttcgtgatcctgcatttcgctgacttccagaacaacaagtcccgggaatttacagtttccatcgacaacggcgtgcatagcagcccatacagtacaccgtacctaaatggtttgtcagtcaccggcagctggtccagcgattctgaaggcaagtataacttcaccattgctgcaactgccatatcagctctgccccccatcctcaacgcttacgaggtctacggtcgtattgtccatgacaatccaacaacgttctcccaagattttgatgcgatcatggctattaaatatgagtatggaataaagaagaactggatgggtgatccttgttttccacatgaatatgtttgggatggtgtgaaatgcagcgatgcagtgatctttccaacagcgaattgcatgggtcgatatccaattctttcacattgtttactgccctcaagtacttcttcttcaactgatcttgccatggtaccagaactcaggggtgctcctggacatatcacaaatcattgggaccatttacaagaacctgaaaatcgccgattcacgtatcaggagctagagaagtttactgataacttcaaacatttaattgggcatggaggcttcgggcatgtgtactacggttgtttagaagacagtactgaggttgctatcaagatgcggtctgaattgtcttcgcatgggcttgatcaatttttagctgaggttcagagcttgaccaaggtgcatcacagaaatcttgtttgtttggttgggtactgctgggagaaggaacatttagcacttgtctacgagtatatgtctagaggcaatctttgtgattatctaagagggaaaattggtatgggagaaaatttgaattggaagacacgcgtaagagttgcacttgaagctgcacaaggcctggattatctccataagggttgcaacttgccaataattcatggggatatgaagacgaacaacattctgttgggtcaaaattttaaagcaaaaatagcagattttggaactcatatttcagccgttgcagctggatctatgggttatattgactctgagtactacaccactggtaggctcaccgagagcagcgacgtttacagcttcggcattgttttactagagataacaactggcgagcctcctataatacctgaaaaaggtcacattgttcaacgtgtgaagaaaaagattgtcagtggtaacattagctcagttgcagacgcacatcttggaggtgcctacaatgttagctccatgtggaaagttgttaacatcgccatgatgtgcacaacagatatagctactcaaaggccaaagatggctgacgtggttgttcagctgaaggaaagcctagacttggtggaagttcaaggggacagaggagacaaggaaaacctagcaaaggtaactatcggtgaacttcccataatacctggaaatggccacatcattcagcacatgatgcagattgtcactggtaacatcacctcagttgccgatgaacgtctaggaggttcctatattttcaactccatgtggaaggttctagatgccatgatgatgtgcataacagatattgcttctcaaaggctaatgatgtccgccgtggtcttgcaattgaaggaaaaccatgaattggaggaagctcatggggatgggttacttggaaaatgtatactgattatggtaattaatgctgattacgggggtggggattgcgcagcgcgagttgagcagctggcgcttgcgcgcccactaggaagccccagcttcctttgtacgtcaacactagggttccattgctcccatgtccgcctaaccgtgtcgtccaaaacccttcaacgccgtcgtcggtggctctactttgttgcctgcgtcgaagacttagctgttcccggagtcagcgtcaacggcgccaccaaccttcgcggtggctcggactctctaggcggcgacgcttctcctgctggtggctatggctcagctgctcccggacccagcgactcgatgtcgggttctggaggcaacaacagtcgccatttgcaaggtccaatataa

SEQ ID NO: 94436 - DNA, 3227 bp, Oryza sativa
  unsure (1)..(3227): unsure at all n locations
  Clone ID: PAT_MRT4530_92727C.1
atgggtggaagaacacagcccaagtccggctcgcatacacctttgacgctgcaaccgcagctgccgccgatgagcgcaagggccatgctggcgccgagccgccgatgctccgccacacaccgcgcttggggtgagcgcaacacggactacctcctgattcatttcgagcagggcaccgcagaacacaggctattgttgtcggtctctgtaacatgccagcggttcgagccgacggccagacaggtggagattaaaacttttctatgccatttctctttggtgcacacaataggtttcctaagtatcgactgcggcctggaggcagatgacagctacccagacgatctcaccggcatcacttacgtcccagatggccattacaccgacgccggcgagaatcacaaggtgaccaccgtataccgcaatgcttggtggggccctgaccgtactctctacacggtcaggagcttcccatctgccgagggtcagcgcaactgctactcgctacccaacgacgtccggtccaagtacttggtcaggctgaagttcttgtatggcaactacgacggcttggacagctcgtcgctaaaattcaaccttacccttggtgtcaaacactgggacaccgtgagtatagacaccaccgacggaaatgatggttataatgttcacgaagcggtgttcgtggcatgggcgagctgggcgccggtttgcctcatcaacatcggccaaggcacgccgttcatgtccatggtggagttgaggcctctcggtatcttgccctacccggctgtcatgggcaatgtgtcactctccctctatgttcggagcaacgtgggatcgagccctgatgatgacaaattagtaaggtaccctgatgatcagtacgatcggttctggtccacagatgaagcccatcccttgtcgacaaacatttccacccaaactaccatccaagctagcaccgaatttgcggtgccctcgcctgttctccagaaagccattgtgccgagtggcaactccatgaaactagttttcttttccgaccaagtagacgtccttcttcataaccacttcgtgatcctgcatttcgctgacttccagaacaacaagtcccgggaatttacagtttccatagacaatggtgtgcagagcagcccatacagcacaccgtacctaaaaggtttgtctgtcaccggcggctggtccagcaattctgaaggaaagtataacttcaccattgctgcaactgccacatcagctctgcccccgatccttaatgcttatgaggtctacggtcgcatcatccatgataatccaacaacgttctcccaggattttgatgcgatcatggctataaaatatgagtatggaataaagaagaactggatgggtgatccatgttttccacctgaatttgtttgggatggtgtgaaatgcagcgatgcaggtgataaaatcatgaggataatatctcttgatctctccaacagcaaattgaatgggtcgatatctaattttttcacattgtttactgccctcaagtacttaaacttatcatgcaatcaacttaatgggacaattccagattccctcctcaaaaacaacggatcaattgatttcagttatgagtctgatggaaatatgtgcaaaacacatgctactccatccctgtcaagaaataccttagctgtttcagtagtggccccagtgctggtactggccatacttgttctggcatatttgatctggagagccaaaagaaagctcaatacttcttcaactgatcttgccatggtaccagaactcatgggtgctcctggacatatcacaaatcattgggaccatctacaaaaacctgaaaatcgccgattcacatatcaggagctagagaagtttactgagaacttcaaacatttaattgggcatggaggcttcgggcatgtgtactacggttgtttagaagacagtactgaggttgctgtgaagatgcggtctaaattatcttcgcatgggcttaatgagtttttagctgaggttcagagcttgaccaaggtgcatcacagaaatcttgtttgtttggttggatactgctgggagaaggaacatttggcacttgtctatgagtacatgtctagaggcaatctttgtgattatctaagagggaaaactggtatgggtgaaattttgaattggaagacacgtgtaagagttgcacttgaagctgcacaaggcctggattatctacataagggttgcaacctaccaataattcatggggatgtgaagacgaacaacattttattgggtcaaaattttaaagcaaagatagcagattttggactatcgaaaacatatcatagtgactcccagactcatatatcagccgctgcagctggatctatgggttatattgaccctgagtactacaccactggtaggctcaccgagagcagtgatgtttacagcttcggcgttgttttactagagataacaactggcgagcctcctataatacctgaaaatggtcacattgttcaacgtgtgaagcaaaagattgtcagcggtaacattagctcagttgcagacgcacatcttggaggtgcctacaatgttagctccatgtggaaggttgttaacatcgccatgatgtgcacaacagatatagctactcaaaggccaaagatgggtgacgtggttgtgcagctgaaggaaagcctagacttggtggaagttcatggggacaggggagacatggaaaacctagcaagtgacaccatgtcttcgatgtcgacatttggtccatcggcaaggcgcgcgtgtgggtacgctgcttcccctgccggtgccggtcccggactccccggggcgccccggcgcctccgctagtccgatacgatgtgcatgcacagacgtatttgttttgttaatgtcaataattgatacagccggtataaaacatagatgtcatggtaggctcatgataggtgtgtatatggcccataatatgaaagtttgcgtctacatatgtgtgtgaacttttactcacattagcttcgatattcttctgagtactacaactgcccnttaatccatagccaagattgtttgctcatttccttattgcttcgtatgtcctatttcacatgaatctatcattagtacttttgtgctcccacactagnacagatctagacatttgtgatgaaaaaaaaaaaaaaaaaaaa

SEQ ID NO: 94437 - DNA, 164 bp, Oryza sativa
  Clone ID: PAT_MRT4530_92728C.1
atggccatcatcgcaaacgacgtctctcatttcggtttcctggcgatcctgtccgtgtcatcggttgctggagcagcatggatgttctgccagtggctgggaaattctacagatgagcagagggtactcttcatatttgatccccatttccaagttgaaccaat

SEQ ID NO: 94438 - DNA, 1077 bp, Oryza sativa
  Clone ID: PAT_MRT4530_92729C.1
atggcgagctcccgcgccgccaagcgccccaaggtggatccctcttcctcctcctccgcgccgccgccgccgcccccgcccccgcagcgtggggacgacgactacgtgccgggcaacatcgtggagatcgagctctgcaacttcatgacctacgaccacctcacctgccgccccggtccccgcctcaacctcgtcgtcggccccaacggctccggcaagagctccctcgtctgcgccatcgccctcgccctcgccgccgaccccgccattctcgggagggcatccagcgtcgctgccttcgtcaagaggggagaggactccggccatgtcaagatttccctccgcggcaatacacccgaccacaagctctgcatcactaggaaggtcgataccaacaacaagtctgagtggcagctcgatggcaccactgtccccaaaaaggaagtcattgatctcatcaagaaattcaatattcaagtcaacaacttgacccagtttcttcctcaagaccgagtatgtgaatttgcgaagttgacacctatccaattactggaagagactgaaaaggctgttggagatcctaatctacctatccagcaccgtcagcttatagacaggagtaaggaattgaagattcttcaagtggctgtaaagcaaaaggagcagactttgaataatctaaaggccctcaatgctgaactagaaaaagatgttgaacgtgtccggcagagagacagacttctgaaaaaggctgaattaatgaagaagaagctcccatggctaaaatatgacatgaagaagaaagaatacaaagaagcacaggagaaggagaaaactgagaagaaaaaaatggaggaagtggcaaaaatctgggaagattctaaaggccctgtcgagtatgtttcatgctcaactggcttcaatttttcattcatttataaactcatctctagaggtatctttgaactacgtgggctaggcatttgttctgatgttcttcgttatgaagatttcctttcaaagcccttcaatctgaatggatacattcacgtacagccaagaggacagttctattaa

SEQ ID NO: 94439 - DNA, 1329 bp, Oryza sativa
  Clone ID: PAT_MRT4530_9272C.1
atggcactccatctccagtatgtagctgttcttctttctgttctgactctattccttgcgacatcggatgcagtcttgaattgctcgactacggctggcaacaactccagtactttcactgtggatccaagacggaaatctcagaataatgtttatcaaacgccttcgccgtcttcgtcgccgccgaggtcgaacaaccaagcaccttttgtgcctgcgggtaaccaacaaggttctggcttcaatactaaaagttttagtacaaaggtagtagctggatctatcactgcagcaatagcagtggtggctggcgtggttgtcttattggtttgctttatgcgtaagcgggccaggttcaaccaccaccgcctcaatagaaaaacagagatattaatcgagatgcctatggaagaagaagtgcacaacacacgacgattctcatatgcacacttgttagctgcaaccgagaacttctcggacagccgtaagatcggtcagggtgcatttggtgctgtctacaaggctcagctaatgaattggacaactcccgtggctgtgaaaaggattatgagggttgcagatcatgaacgagcggcacgagattatgataatgagatcaaagtgatcagcaaactgagccatcccaatcttgttccctttgtgggttcgtgtgatgaaaatggggaacttctccttgtctacgaactaatacacaatggcacccttgattatcatcttcactatgcaaatacaatactaagttggagtagaaggtataagatagcacttggcatggcctcagctctcaactatatgcatgggaatcatccgcgcgtcctgcacagggatattaagcctggcaacgtgatgctagatgaagaattcaatgctaaagttggtgactttgggctggtgaggcaagtccccattgacaaaacttcttgcccaatgaccatatttgggtcttcaagatatatagaccctcaatattgtagcacaggctgtatcagtccggcgtctgatatttacggcttcggtgtggtgcttctggagattgcttccggtgaaatacctcagtgtctcaagggtaatggtctcgttgagaagtttaggagattgtattacagcaattcactgcttgatgcagtcgatcgacgcctaaacggtgactttgatgaggagcagatgaaacgtgttatactcattgggcttctctgcgtccaattcgatcgtcacatgcggccatcaagtaaggaagttttgggctatttagaaggtcagctaccagtgcctcaactacatatcaaaacatgcaaacaagcaaaataa

SEQ ID NO: 94440 - DNA, 461 bp, Oryza sativa
  Clone ID: PAT_MRT4530_92730C.1
gtcgggacccttgggaggaggactggaacctggaaagacgtgttgacgctccggaaaggccaaatcaaggggaaaagggttgctaacccaagtttggccaacgcaagtgatgggagctaatggttcgatgggatgacaagcccacaatgatgatgaacccagaggaatgggtgcaccaagtgggtggatgctgttatgactggaggaaagacagggttgttcgctctgggccaggcactctgttgctgggaatgtgctgctgggctgggtgctgcttgctgtgtctgcacacaatgactgagtcccttgggcttgcttcgaagcttgttttggaagaaaaccaacttgattcgtgagtgcccatccaagttttaacaatgattcctgagaatgggatgctggtgtacagctatgttcctagaatgaacttcggagtgaataaactatgtaagtaatgttct

SEQ ID NO: 94441 - DNA, 882 bp, Oryza sativa
  Clone ID: PAT_MRT4530_92731C.1
aatcgcccacacgagtatacaagacaagacgagacccgatcgaggggaaagcccccacactgtataggacggggacgcgccggccgccgggagtctcatgcgccacgagaggaaagcgcaccggcaacgcaacggtcagaatattattattgtaaaatcaaaatgtgtttgattcatattatgtgatgaagaattgacatatgagattattggttttgatttttggaagatttttggcgaagtgattttggagatgattggatttacaggtgatgaacatgaactctgataatctggaccgatcagaccgggcaggtgttgctagtcagaatcaatgcatgtggttggtgaagattccatatggcatacgatggagatactgtgtgcatatgggacacgaagtcgaatttggagggagtccaaatttagtacaattgaagtttgtaaagtttatttcttgtacagaaaggtttcctaggggattaggacttcttgtacaaggttggttcgtggctttaggctgcttacctcggatataaatagagagggagtgtcagactgacaatatcgcaccattcaaaccggcgggtatacggcggtcagaccgacgacactgacagtaggcagaggtgatcgctcggcggttcgatcaggagatcaacaccggtcaaaccggcagcataggtgtggtcagaccagcggatcaactccggtcagaccgccgtgcgaggcagtggcggttgccggcgaggccaccaccccgagaagagaagaatcgccaacatcttaacaatatccttttctggtaaagaaccgacaagtcacagaagcagcagctaccaagaagagaacagaggagtagtagtagctaggaacacaaag

SEQ ID NO: 94442 - DNA, 358 bp, Oryza sativa
  unsure (1)..(358): unsure at all n locations
  Clone ID: PAT_MRT4530_92732C.1
tggcggcggacctggccttcgaggcgaccgagctccggctcggcctgcngggnggcggcggtgatggagacgccgcgnngncggggcgaaggagctcctccgggaagaggggcttcgccgagaccatcgacctcaagctgaagctggagccggccgccgccgccncnnngcnactgaagcgctcgcccagccagagcagcntngtnaccnccnncccncnacccnnanaanncaacgnactncncaagnnacagcntcgttnnctttgcccncacctccccgtcaatacnncgaacgaaccatccctngccntcnannncnaccaaaggccaaagnangnntncnncattgggcncta

SEQ ID NO: 94443 - DNA, 573 bp, Oryza sativa
  Clone ID: PAT_MRT4530_92733C.1
atggccgccgccgccgccacgccgcgccaccatcaccgcctccttctgctgctgttcatcctcttcctcgccgccggcgccgccgtgccggtctccggcgcctgggacgccaaggggaagacgctgtgctccggccgcctcctcggcctcaccgactgcggcgacgaggagccgagcgcgtacgagatgctggagaggttcgggttcccgcgcggcatcctgccggagggggtgacggggtacacgctccggccgtcggacggcgagttcgcggtgtacctcgggacgggggagtgcgagttcgaggtcgacggcgggtaccggctcacctaccaggggaggatcaccggcagggtggccggcggcagcatcaccggcctccgcggcgtcacggtgagggtcttcatgatgaactggggcatcgaccgcgtcgtcgtggccgacgccgaccacctcgtgttctacgtcggcccgctctcccaggcgttcccggtggacggattcgaggaatcgccgcagtgccggtgccgccacggcggcggcgccgccgtctccggcgtcgcggcgatgtag

SEQ ID NO: 94444 - DNA, 309 bp, Oryza sativa
  Clone ID: PAT_MRT4530_92734C.1
gggggggccactgcaaacggggcaagggcagttggagcattaaaaaaaaaccgggtttttttttaggggggaaaaatttacgggtttaaaaaaataaaaaaacggacccgggttttactaaaaaccaggggcatttttaaaggggaaaaaaaaagggatacagccccggttaaaggggggaaaaaaaaggttaaatattttaaagttccccccaacgggaaaaaaagcacaattattttgggggccaaaaatttaggggaaacctttgggaaaaccttgatttggaaaccaaaggcgggtttcctaaaa

SEQ ID NO: 94445 - DNA, 255 bp, Oryza sativa
  Clone ID: PAT_MRT4530_92735C.1
atgaacaacgtcgccgactgtccgcttattagcgcggttgctgcccgcggcggcgtcggccgcgccgatgctgcccgtggcggcgtcggctgcgccgttgcaatccgcgacgtcgtcgatggtgcagatgtttacagtccgagctcctcagattcaacgatgaactccgtggaaatattttgcggagtccggaagcgtgctcatgagatacgaggggagatttttgccgactctgctgtgccgaacagagcatag

SEQ ID NO: 94446 - DNA, 589 bp, Oryza sativa
  Clone ID: PAT_MRT4530_92736C.1
gcctcatgaaacaatccatatattttgccacaacgtataattatcagagcagtatgaatctccttctgaacagtaccaacctatagttttgcataaggttttactaacttagacatcaaatactgtagaacataggaggttcaaacatgtaaggaaaaaaaactagcaacatattgttcctatcatccctccgattcttcatatggataactgaatttcatacttttccatcataacctttggtagcaccaacataattacataattgatcaccattagttggaggttcagcatagtgtcaccacccacattccatttcatcaagcaccatgttcagcaggattcaagaacgatggcggccaaggcatcgcatacgggtaaatcgacgccgacgagcaatcttcatcggacaacttcctcagcttcatggtttccagatcaatggagagcaggcaattccagtgacgcaagaacaggacgccggtaacgacgccgacgacatccaatccatggtggtaacatctccaccgaatcatggtgagatcgccatcgctgtggaaacctcaccgatttcaaccgggcaagttag

SEQ ID NO: 94447 - DNA, 155 bp, Oryza sativa
  Clone ID: PAT_MRT4530_92737C.1
ggcaacaaaacaactttattttgaattttatccacaaggacagaaaaaatgcaaattattacaatctaccaatatccaagagtttaaagcccacatagaaagttatgaaatacagatggttcaataagaatttacgcggaaaaacaaacccccta

SEQ ID NO: 94448 - DNA, 1248 bp, Oryza sativa
  Clone ID: PAT_MRT4530_92738C.1
tcagccatcgacaaggtacaaaagcttgatttgttgcatgctttcttccagtaaatagcaacatatgatgttctctgtttctgctggtgatgtattgggattgggagcagattcctttgctagatcgcaaactagccgatctagaggtgtggtgccggaaattatgttagaggtgacagtggccagcgacaaggtcaacctggcggtgtagaagtctgtctcgaggacaacgcgctcattgcggccatgggtggccatcggcactgcttctccatgcaggcatgcaccaacaacactggcatccttccggcacaatgcacaaatctgtctatgcttccagctgcagctacatgtccctgcaacctgcatatttgcatagtccaggcactctgcaagattgtgttgatcaatgatcaatataatgtgttgttgatattctgctagaggttcaatttgatttgtttgtacatcatagatagggcaaggtattctaggatggacccttttctcggtgccagcatcattagcgttgtcatattggatgacggcgccaatgaagtcgaggacaaataggtcattgacaccaatgacattggagtcgtcatcttgatcatggcaccaatcacactggcgccgtgaaaaggagccactcctgaaataagtttttctacgagtcatcacggacaacaaggtcaacatagacagtttcatgccaatgaaccttaggaagaaaactttgatctccatccagttaaacttagtcttcttcatcatcgttgtttgtgacccggtgaacactttctggccatgcaagctatacttctcccactccatcctttgctcattaagcttgacgacatggaccatcttcccatgtcgttcaatcaatacaaccatcaactcaccttggttggactcgagcaagtagctatcttcgcctttgaacccaaaactattaagcttgtcaagaatcttaaatccttcatcgtgcctacaaggatcataaaccgctataacctcccattttgatcttatattggcggtgccgatgtcagcggtgttgagcaggagtggggtgatccatgccgggtagaagggcgacagcgacacagcggagcgccattgctggcacactaacacgacgctcgggtgagtcgaccaccgcatgcgctccaggatcaagacaagcacgtccgttgggagagacgaccagtcccgggcctgcaacatcgatgcggtggcctccat

SEQ ID NO: 94449 - DNA, 639 bp, Oryza sativa
  Clone ID: PAT_MRT4530_92739C.1
taattttcgctggcggttatacgcgaaaaccgctactaaaaatgtaacgaggggtgaggggttacggaccgccagcgaaaatcggttttcactgggggccacgctaagaggtccatcattaaaaatagctctattttcactagcggctacgctaagaggcctaccataaaaaattaggatcgctggcagccgattttcgctggcggcagctaacttgcaccgactcctgtcctcctccagcctctcctcctcctcctgttggcgtaggaaaccacggcggattagcgacggtgacgacggcgaccgggaggggcgccgtgatccacggccgggaagggcacgggcacgggtgcaggcgtggtggatccggccaccgcagagccgcggggggcggatctggccgccggagggccacggggagcggatccgagcgcgggcggcggcgcgcggctgatctgggcacgggcggctgctctcggacgccggcggcggtgcgcggcggatccaggcgcatctttcgtcggtcggccgatttccacaatagtcccggatgcaataaaaaccggggctaaagatgatctttagtcccggttcaaaagggtaacgggcatatttgatctttagtcccggtaagatcat

SEQ ID NO: 94450 - DNA, 2378 bp, Oryza sativa
  Clone ID: PAT_MRT4530_9273C.1
atggagtgggggaaagtggagagggggtggggtatttatagggaagagggggagaaggagaggggaaagggcggcggcttaatggcgacgcgacagcggcgcacggggctcgggacgacggcgacgcgcgggcggcgacgcgatggccgcgcgggcggcgacgcgatggcggcgcggggcttggagcggcgatgcaacgggcggcggtgcggggctcgagacgggcgacgcgatgggtggcgtggggctcgacgcggcgacggcgacacgcgtggcgcggaagggagggctcgagacgatgcgaccgacgacggcgacggtgatgtgggcggtgatgcgacggcgatgggacggcgcggggctcaaggatgttacacggcggctagcggcggccggagtaacggaaacggcggcggcgggtggttgcacggcgcgggagcgatggggagcacgagggagttcggcgagatggggaaaaagcgagagggggcgacggggaagcctcccgtcttgtcggggttggagctagacaacgggataatcttgatggcgccgtctagttttggcgtcttgttgggcttggtcactttcttgggatgctcagttgtgatgggtgggttaggagtatgctcgaccatgtcgaggctccgcttgtcacattgtacagccaacttagcatttccttggatagtgattgtcccttttggtcctggcattttcagtacctgataagcgtagtgagatgctgccataaacttcgcgagtgcacttctcctaatgatggcattgtatgcggtgtcaaactccgcaacatcaaaggtgatttgctctgtttggaagttgttggcctgtccaaaagtaacggacaacgtgattttgctcaatggtttagatgacgattctggggtgattccatggaagggctgatctgtgggcgtcagctcgcttcgaggtatccccatcgcgtccaaggtgctggcaaagagtaggttgattgagctcccgccatcaacaaggactcttgccaccttgatgttccgaatcgtgggttcgaccacgatcggatacatgccaggtgtggtcgcgatcttggggtagtcggccgaaagcgagcccttgtcgccgccgttccggcctccttccccatctccttcgctggccgaccacttccccgggtgcgcgtcgctcgggaacactaccggtcgccggcgtcgccacgatgtagagccgccaaaaatgtgagagatgtggaggtcgtactccgggaaatcagagtcggagtcattggtggcggcttcttcagccgtttcaacaacacgaactcgcttccctctctcgatcgccagttgttttgcaagctcctttttgaagacgaaacaatcttccgtggcgtgattgttggtcttgtgtattggacaccattgcttgcgtgagtcgtcgctctgggggttggggcgcctaggtgggtccgttttctcagcggcgaggacctctcccgaggatttcagcttctcgcttttacgacttctctttttgcttgactctggtgcgtccttgttggtcgatttcttctcctcacccgccttgctatttccctccttgcgccatagggcgtcatctgcatgagcgcacatgtcgatgatctcgaacagctttcgggcagatgtgattcgtcgtgtcgccaattcctggttggtgtgtcgatctcggacgcctgatttaaatgcacgaatgacagaagcatcggtgatctcggggatcatatttctgcactcattgaagtgccgaatatagtccctcaatgattcgcctgcgttctgagttaaagcatgcaggtcatcttcgatcgtgtggcgcttgtaggttcccagcgtgttatcatctgcgtcagcgacatagaggatcgtggagtagacttggaaaaattcttctcggtttgtgcttccatcgtacttctctattgctcctggtcggaacttctcaggccatcgcacatctcggagctcgggtgtgaatgccctcctgaggtgattggtcaccagagaaacgtgctccattgggattttctccgtctgcgccttcggcagtcggccctccgttcccacattgttccgggtcgacttagtgttgccgacagcgttcacatctcgtggtgactccgaagaggattcgtagtcttccaagaggtgtagcacagatggctcatttggattagtttcccccgtgagctcgctgaggtctcccatcgtctgcctccctgcgacctcgagctctagatccacagccgcagccgcatcattgagcttcctgatgccactgctgcccgtgccgcttgggagcttggttatatcgcccacgctgctctcttccatctccat

SEQ ID NO: 94451 - DNA, 1071 bp, Oryza sativa
  Clone ID: PAT_MRT4530_92740C.1
atggcaaagaagaagaagcgcaccggcggcggcgagcagccgaagcctgcgtccgacgtcgcggaggacaagcccgccgaggacacctcgcccgatgtgcagcagccgcacctcaacgccgccaccaccacggcggcgccggggacggacgacaaggacgcctccaccaaggccgacgaccccaagaaggacgccaaggagaaggagaagaagccggcggcgcttcccgtggtcaccgccgtgctcaatgtcgacatgcactgcgacggctgcgccaaacgcatccgcgcctccatccgccactacccaggtgtggagggcgtggcgatggaggtggacaagggcaccatgacggtggtcggccgcttcgacgccaagaagctccgcgatcgcgtcgccaacaagaccaagaagaaggtcgacctcctccccaacaacaaaaaggctggagacgacaacgacaacaagaacaacaaggccaacgaatgcgacggcaagccggcggacaagaagcagcagcagcaggaggacgacggcgacgaggcggggaaggaagacaagaagaagaagaaggagaaggaggagcaagacgatcagaagaagaagaaggccaaggacaacaagaaacccgtcgtgccggtgcctgggacggtggtgctcaagatcggcgccgtcggcctccactgcgacggctgcatgaaccgcatccgcaccaagctcttccacatccaaggagtggagcaggtggccatggagatggccaagaaccaggtgacggtgaccgggaccatggacatcaaggccctgccggagaagctccgcaagaagctgcgccgccccgtcgacgtcgtgccgccgggcaagcagaaggacaaggacggcggcaaggacaaggacaaggagaagcaggacggtggcaaggacggcggcggcggcggcaaggacgcggcggcgaaggcgctgacggcggagaaggaggcgtggaaggcggcgttctacgaccagcaggcgctgctcgccaccgagttcatgctcagcgacgagaaccccaatgcctgctccatcgcctga

SEQ ID NO: 94452 - DNA, 1380 bp, Oryza sativa
  Clone ID: PAT_MRT4530_92741C.1
atggcgtcgtggcggaggacggccgaggagagctcgtgggtggtggaggtggagaaggctgtgcgcagcggcggcggcaccgacggcgacccgtcggcggaggaggcggcgtggtggcggcgccactccatctaccgcgtcccggcgtgcatcaaggacctcaaccgccgcgcctaccagccgcaggtggtgtccctcggccccttccaccacggcgacccgaacctcctccccatggaggaccacaagcgccgcgccctcctccacttcctccgccgcgccgccccgcgccggcggccgctcgccgagttcgccgccgccgtcgccgacgccgccgagcagctggtcggcacgtaccagggcctcgccgacgagtggcggcgcggcgagcctgagaaggagaagagggaggcgttcttggagatgatggtgaccgacgggtgcttcctgctggaggtgatgaggacggcggcggggtgggaggtgagcgactacgccgacgacgacccggtgttcagcgcccacgggctgctctacaccgtgccctacatccgccgcgacatgatcatgatcgagaaccagctgcccctcctcgtcctcgacaagctcgtcgccgtcgagagcggcatacaacagcagaacgaggactacatcaacaggttagtgcataacttcctgtcgccgacggcgtggcctccggtgaccggcgtcgggctggcgctccacccgctcgacatcctccgccggagcctcctattcggcccggcgccgtctccccgcgcgccggcgccggagacggcgcccaccgacgacatcatccggtcggcggaggagctgtacgaggccggcatccggttccgccgcagcccgacgagcagcctcctcgacatccgtttccaccgcggcgtgctcagcctccccgccatcgccgtcgacgacaccaccgagtacatgctcctcaacctcatggcgttcgagcgcctccacgccggcggctgcggcggcggcggaggcaacgacgtgacggcgtacgtgttcttcatggacaacatgatcgactcgccgcgcgacgtggcgctgctggcggcgcggcgcgtggtgcacaacacgctggggagcgacaaggcggtggcgaggatgttcagcgggctgtcgcgcgacgtggtgctggagccgcggagcgcgctggacggcgtgcaccgggaggtgaacgcctactgccggcggcggtggcaccggtggcgcgccaacctggtgcacacctacttccggagcccctggtcgctcatgtcgctcgccgccgccgtcttcctcctcgtcttgaccgtcatgcagaccgtctacaccgtcctgccattctaccagggtggcaataattga

SEQ ID NO: 94453 - DNA, 890 bp, Oryza sativa
  Clone ID: PAT_MRT4530_92742C.1
cccacgcgtccgcccacgcgtccggcctttcttggcggaagcagccagagcgtgtgtcagtgtgtgtgtgtgggagagagagagagacagcagaggctccatcggccatggcgctcctccgctccctggcttgcttcctcttcctcctctgctcgtccttcaccttcgaggccgtaaatgggaggatgtacgggggaggcgacgtggtggaggaggaggaagacgatagcagtacggtcgccgacggcgctcgcggcggcgcgggtgggtggcccgggtacctctacaccagggccgtcgggagatgcacgccccaattctggagcagtggagctgagcaatggcccaacatcatccctcaggaagcggcggtgtcgaaggtgttcggctcaaggtccatcgacaggtacgggccacggctcaccgtgctggaggccaccacgaggaccgacgacaatggcagcagcagcgccttcgccaagctcgtcaagcaaggcagcgcggctctgctcaacgcctacgcgcgcaagggcttccccttggactcgtgggaggtgaaggcgctgctgctggaggcgctcgtgtccgaggacgccgcggccgcgcaggccgaccggttcgagcaggccaacgaatcctgcatctgaatcctggatcctaatagcgtgtttgtagtaggtcacctcttctgtgactacctccagcgatcctgaagaaaaatgttggcaccgccgcaccggtgtttaaggtgcaatgtgtgtagtagtagtagattgtatccgtgtccttgtacgcgattgttccttcgatgtgttctggtgccgtgtaggcaacgcgtcgtgtatgttgcttgttagagtgatgtccagccaggcctgctgggccttctc

SEQ ID NO: 94454 - DNA, 437 bp, Oryza sativa
  unsure (1)..(437): unsure at all n locations
  Clone ID: PAT_MRT4530_92743C.1
ggaaaaccaacaaagaggaacatccgtccctcattttatttctttttattatcattagcccaaacatagaaaaccactttccaaacatgatactgttagctagtccttgcaaacattgataattaattaaccaaaggcctaattaattaattagagccctaatgaaaaaattaatctaacccatgcccccaccaaactttaggcagtaaaaggacccggccctgtgctacaggttgcaccggccgtagtcctacaacccaagtagaaatcccggaagacgncgaggagaccccccccggggccggttgctgggaaataaatcagaaaacccggtccccctcctcgtagaccaccccgggcaccaacacccttagcgcgtagaaccggccctgtatatgcccggggggaaactcccggaaaacggtttcaaaaacccc

SEQ ID NO: 94455 - DNA, 693 bp, Oryza sativa
  Clone ID: PAT_MRT4530_92744C.1
atggggcaagtggagacggggggagaagtggcgaagacgaccacgaaggggacagtgactgacaaggcgaagcgtcgaaggtacggcttggcaatggagaaagcggcccgagcggcggggaaagtggagggctcggctcctgatgcgggcgcgcgccggcgtgggctgtctgtcaaccagttcgtgctgcgggatggtaacgggctgcacccgtcgggtgtgaccaccccgtacccatccccgcagcagaaaaaatcgaacgtcaccatccccatccccgcatacgggggcaagataatggacccgcacccgctccacccgacgggcgtaccaatcatccagagcaagcaacatgtgatgaaggatcctctcgctggacgccgccgcctccccgatccacgccgccgccgccacagatccgcgccgccgtccccgatccgcgcctccgccgccgatcctcgcggcgtggcctcccccactacccgcgccgcgccctccctccaaccgcgccgccgccaaccccgagccgcgctgcctccgaccatccgcgtcgccgcctccaccgatctgcgccgccggccacgcatggacgaagacggcttcgacgacctcagcgcgtgggcttcgcagccgtcggcgagtggccctgccaccgcttcctctgccggcgtcggcttcgacctcaactcatag

SEQ ID NO: 94456 - DNA, 1375 bp, Oryza sativa
  Clone ID: PAT_MRT4530_92745C.1
aggcaggctagcttataatacgactcactatagggacactttgtacaagaaagctgggtacgcgtaagcttgggcccctcgagggatactctagagcggccgcagcgcgagctctctctctctctctcgcggtgggcggcgggatgaaggtgtccgtcgtgtcccggagcggccgggaggtggtcaggggcggcgtcgagctcaaggactcggctaaggtcgcggatctgcaggatgccatctatgccaagactaagaagtattaccctgctaggcagcggctcaccctccctatccaacctggaaaatcaggaaagccagttgtccttagtgcaaaggccagcctatcagaatactgcgaaaagggttctggatccctgacagtggtctttaaggatttaggcccacaggtcttctacagcacgctgttcttctttgaatacttgggtcctcttcttatctaccccatgttctattacttgcctgtctacaaatatttcggatacgagggagagcgggtcatgcatcctgtccagacttacgccatgtactattggtgtttccactacttcaagaggatcatggagacgttcttgttcatcgcttcagccacgcgacttctcctgtatcaaatgtcttcaggaactgtgcctactactggacctttggagcttacattgcttacatacgtgcaacgagcgcgctttacacccctgatgagtgaattgcagatgaagattgggtttggatttgggattctctgccaaattgcaaacttttattgccatatcctgctgaggaacctcagaagtccgagtggtaacggtggctatcagattcctcgtggcttcctgttcaacatagtgacatgcgcaaactataccactgagatctaccaatggcttgggttcaacattgccacacagactgtggcaggttacatcttccttgttgtggcagcgagtatcatgaccaactgggcacttggaaagcaccgccgtctaaagaagttgttcgatggcaaggaagggaggccgaagtatcctcggcgatgggtgattcttccaccattcctgtaaggagttggtgtcagcacgatggccacatgggattgaatctttggtctggtctcagtgttcggaagttgaagccttcagtgtaccacttctattctatgatctaaaatatctagtccacaatggaatccctcttagctattgttgaacttctctttgagtttgcattggccctgttgtaatggttaaatacaatacaagtttcatctgatatcagcttattgacttcttgtccatttgtccaagcagtagtaatgcgatcataatttcattttgacgccaaaaaaaaaaaaaaaaaa

SEQ ID NO: 94457 - DNA, 342 bp, Oryza sativa
  Clone ID: PAT_MRT4530_92746C.1
ttttggtttttttatatgtttttgtttttaaaccaaaacataggaggttgcatttgttcttctaaaaggagggaagcatctttccttctttcaccattacataggcttaagcaatcacagataacaaatctctcctcctcctctagggaaaatattcaaacacaatacccttatacgtacttatttttaggaaaggagcgcgcatgggcataaatggcatcggggggcaggtttaagaatcacaatggctgagccgggaggaaacaaaaacccctaatgggacagagcaaaagcctcccaaagggagcttttagggggaagggttcttccccttgggggggt

SEQ ID NO: 94458 - DNA, 1011 bp, Oryza sativa
  Clone ID: PAT_MRT4530_92747C.1
atgaaggtgtccgtcgtgtcccggagcggccgggaggtggtcaggggcggcgtcgagctcaaggactcgccttgtaggggggagggtttggagttttggttcttgggtggggggggggggttaagatctcgtggaaaggctaaggtcgcggatctgcaggatgccatctatgccaagactaagaagtattaccctgctaggcagcggctcaccctccctatccaacctggaaaatcaggaaagccagttgtccttagtgcaaaggccagcctatcagaatactgcgaaaagggttctggatccctgacagtggtctttaaggatttaggcccacaggtcttctacagcacgctgttcttctttgaatacttgggtcctcttcttatctaccccatgttctattacttgcctgtctacaaatatttcggatacgagggagagcgggtcatgcatcctgtccagacttacgccatgtactattggtgtttccactacttcaagaggatcatggagacgttctttgttcaccgcttcagccacgcgacttctcctgtatcaaatgtcttcaggaactgtgcctactactggacctttggagcttacattgcttactactgcaaccacccgctttacacccctgtgagtgaattgcagatgaagattgggtttggatttgggattctctgccaaattgcaaacttttattgccatatcctgctgaggaacctcagaagtccgagtggtaacggtggctatcagattcctcgtggcttcctgttcaacatagtgacatgcgcaaactataccactgagatctaccaatggcttgggttcaacattgccacacagactgtggcaggttacatcttccttgttgtggcagcgagtatcatgaccaactgggcacttggaaagcaccgccgtctaaagaaggcaagcacgttgttcgatggcaaggaagggaggccgaagtatcctcggcgatgggtgattcttccaccattcctgtaa

SEQ ID NO: 94459 - DNA, 255 bp, Oryza sativa
  Clone ID: PAT_MRT4530_92748C.1
atggcgcccatgggagccatgggcgtggagattgaggatgggacagagagcctcgtttcagagattttcagaacagaacacggccagcaacaacaatgcctgtgttctgtatggaggcacccgatggtggggaaccagctgcgccacaccacaccgaggctcggcatcgccatcgtcgccttcgggatctacctcgtcaacgtggccacatacaaccgcctctaccgcccatctggcgaccaccaccaccactag

SEQ ID NO: 94460 - DNA, 405 bp, Oryza sativa
  Clone ID: PAT_MRT4530_92749C.1
atggagctcatcaccgcgtgcgcgcttctcctcatcgccgtccatattgcgattgtcatctcctgcccggagccactcgcggccgttgcattagtcgacgtgcccctcctctacctctgccgctacctcctcatcatacgccgcggtgtgatcatcgtctccggcgccggcgccggcggcggcaggttgcgccgcttccgcctcggggcagccatggcgatcatctacatggccatgtcgaccctcttcttcctccgcattgctcctctcacgccatggtggggcgccctcgccgcctgggtcatgatcctgctcatcgtcgaggccatcttcgccttcttcttcccctaccgctgctgcttcaacgaaaccgaaggcgatgtccagaataatccccatgtctga

SEQ ID NO: 94461 - DNA, 1440 bp, Oryza sativa
  Clone ID: PAT_MRT4530_9274C.1
atgtctcgccggaagacatccatagccctcatcgcgaacccgcagacgcgcgctacgacctacaagaagcggaaggcggggctgatcaagaaggccggggagctcgccacgctgtgcgacatccccgtcgccgtcgtgtgcgccgggcccgacggcggcgcgccgaccgtgtgggtgtcgccggagggcggcgacgccatcgagaggtaccgcgcgctgccggcggagaagcgggcgaggcacacgcacgtggcttacctccaggaggagctcgacaaggagagggccaagctcgccaggctgcggcagaagggccgccccggcgagctcgacccgccggacgccgtgctggacgggatgtcccaggacgagctgcagcagctgctcgcgtccatcgacgccacgctgctggctacggccaagaggcgggaggcgctcgggttgctgcccggcgccgacgacgacgcggacggcggcggccggcggcgcgacgccgacgtcgccggaaccaactccgtcggcgtacacggctaccagcaccaggaggtgcatgcaccggcgacatgtgaccccttccatccgtacaacgccggcgtgacgctgatgcagccagggtacaacaacgcccagtacatgggcggccatggcgccgtggacatgagcggctaccagctgcagatgcagatgccgggcaatggcagcaacaaccacagccggctcgcgtggggaggcttccagccatgcaacgccaccttcgtccagcccgtgtacggcaacctccaatgctggtacaacaatgtcgtcgacggcaacggcgagccctgcgacgccatcgtgccatcagctggtgacccctacatggacatcgccggcaacgacgtctacggcaaccagatgcagccggcaccggcggccaacggcgggtggcacgatccgggcacgtggggctacgacggcggcgagccgtgcaaagccatcgtgccatcatttggtgacccctacatgggcattggcgtctacggcaaccaaatgcagccggcgccggcgccggcggccaacggctgctggcacaatccggccggcacatggggcaacgacggcgagccgtgcaacgccatcgtgccatcagctggtcacccctacatcgacatcgagtgcgacatcgacggcaactacatcgacacaaccgtgttcgattaccaaaccaccagcaccagcgacaacttcatggacgcgcccgtccagttcatcgccacgggcagtgacgagagcatcgtcacgaacgtggccggctgcgacgagacggagttctccattgacgatctcctccagtgctccgacgcctcccagcattcttccggcctcgaggagctgcattatctcagtgatctggccgatggcttcgactttggatgcaacttcgacgtgctattggactga

SEQ ID NO: 94462 - DNA, 183 bp, Oryza sativa
  Clone ID: PAT_MRT4530_92750C.1
atggcgcgcccgcacccggactcctccttccccgctaccagaccctttccccgcctccacataccaccgctgacgacgacgcaccccgccaccgtcagccatcatcgccaccgccaccgccacggacacccccgtccagccgccaccgtcgctagccagcgtcgccagacgccagccatctag

SEQ ID NO: 94463 - DNA, 242 bp, Oryza sativa
  Clone ID: PAT_MRT4530_92751C.1
tctgggctcgcagggtctggaggtctcagagcgcaggggctgggatgcatgggcatgtccgccttctacggcccgtccaagccagagcccgacataggtggcgctcatccaccacgccgtacccggcgaagcgaccgttgtggacaccttcgacatcgacggtccccacaccaacgagcttctccttggcaaggcgctgcagggccggctgcgtgataaggttgagctggccaccatgttta

SEQ ID NO: 94464 - DNA, 768 bp, Oryza sativa
  Clone ID: PAT_MRT4530_92752C.1
aaaaatgaactaagaagccagaagctgggtttcagagcttttccagattctcagaagctggctaccaaacaactgcttctcagaatataaaactccaccaaacagacccattaacgaaccattatatgttcaccggatgagcagctacctttttggaagggaacggaaagttgcagacatccccatagatcatccctcctgcagtaaacaacatgcagttcttcaatatagacttgtagagaaggagcagccagatggcatgatgtcaaagcaagtgaggccttatctgatggatcttggtagtaccaatggaactttcattaatgagaatcgtattgagcccagccgttattatgaactctttgaaaaggataccattaagtttggcaatagtagccgggagtatgttttgcttcatgaaaactcgaaagattgaggattgaaattgctggaaactttgctccattgttacctgagattttgacgtccctctgctgcttgttgtttgtactatggtttcagtcgcctgaatatttttcaagaatgcctgaaggaacatggcagaggccggtaatcttccgttacatttataggattctagagcctagacttgttttattatccagtggttgatctagtaccgctactgacttcatggttttgtcaaatataatgtcatattgtcactgccatatcataattataatctgcaatttgtgactagtgaaatgttggcactaaaaaaaaaaaaaaaaaggagggccgccc

SEQ ID NO: 94465 - DNA, 434 bp, Oryza sativa
  Clone ID: PAT_MRT4530_92753C.1
atgtaattggttttattattagactacgtttaatatttcaaatgtgtgtgcgtataaaaaaaattgggcgtgaaactaaacacggccaattttcataaatcaacaagctcaagttgcatcatctgacacgcttctttgtcctggccaatttaagagctaatttccagttcattaagtgcttcgcctgtgactgcaccaaagaaaatcaacaagaaacagcaataattgcatttttcaatcaacaagaacaagtcatgattgtcagtaactagcacaaagaaagacaggcgtttaaagcaagaaacaattactagtatccaggttgctttcgtcgaatatattattattgaagttaaaatccagacggactttttctatcataaacgcaaaaccccaatatcatgtaccataaaatgccgcttatggcaagaaca

SEQ ID NO: 94466 - DNA, 3003 bp, Oryza sativa
  Clone ID: PAT_MRT4530_92754C.1
atggagtccgcggtggcgagcgcattcttgaaggccgtgatggggaggctgttcatggcgctggagaaggagtacagcaagcacaagggcctcgcgcaagaagcccagtccctccagctcgacctccgcatgatcgccgccgtcatggacgaccagctccgcgccatggggagggcgacgacggccgacgcccgcacggccgtcgcgcggctccacgccgaggagatgctcgacctcgcgcacgacgtcgaggagtgcgtcgaccgcttcctgcaccgcctcacctgcaggcagcaccgcggcggcgccggcgccggagcgtcgtcgtcgtccttggtgcggcggatggcgcacgagctcagcaaggtccagagccggtcgagcttcgccgacgagatccagaggctcaagacgcgcgtcagggaagcgcagcagcggatcatccgcatgaaacctactttggatgtcctcgccggcggtggcggtggcggcggccaactcacaggcgctgccggcacatcgtcgacggcgccgtcgtgccgcgcgtcgcgcatcccggtgggcatcgcggagcccgtggaggagctcctgtcgatgctggacgaggtggacggcgagccggagcagatgagggtcatctccgtcgtcggattcggtggctccgggaagaccaccctcgtgaaggcggtctacgatgatcctcgcgcaaaggacagattctcccgccgcgcgtgggtcaccgtcggtagctcgccgtcgccggagaccagcaatgggatgaaggggatcctgcgtgctgtattccagcaggttcttcccaaagacgccatggatgctgacggacagcatcttgaaacctcgctcaaagaatacctgaaggacaagaggtatttaattatcatcgatgacatcgggatggatcaatggaacatcataagatcgacctttgaagacaatggtacaagcagcaggataatactgaccacaaccatccagtctgtggcaaatatgtgcagccatggcaatggctatgtgtatcaaatgaacacacttggtgaagaagactctaaggaactcgcttttccagggtttagatcacctgagttggagcaaggttcagcatcattattggggaaatgtgatggtcttcctcttgctctggtcagtgtctccgattatctgaagagctcaaatgagcccacaggagagctgtgcgcaaagctgtgccgcaaccttggttctcatctgaaagagcaggatggccattacagcttttcagaactcagaaaggtgctccttgacaactatgacagtttttctggctatcctttgagctgcttgctgtatcttggaatatttccaaacaatcgaccactcaagaagaaagttgtaatcaggcggtggttagccgaaggatatgcacgaaccgactctcttcgtagcgaagaggatattgctgatgagaatttcagtaagcttattgaccggaatatcattcagcctgttgacacaagaaacaattctgaagtgaaaacctgcaaaactcatggaattatgcacgagtttttgctgaacaagtccttgtcacagatattcatcgcgaaatcgtctcgtgatcatccaagactaggtgtcaatactaatgcgtgccacctttcttttcattctggtgaactgacagagtgtgtggcatctgatgaagagttatctcgtgtccggtctctgacagtctttgggcatgcaggtgatgcaatttgttatgttcgcaggtgcaaactgatacgagtcttggatctacaggaatgcagtgatttggatgacgatcatctgaaatacatatgcaaattatggcatctgaaatacctgagctttgggagcaatatcagtgagcttccaaggagcattgatggactgcattgtttagagacactggatttaaggaggacccagataaagtttttgcccattgaagcaatcatgctgccccacttagctcacctgtttggaaagtttatgcttcatgaagatgatgtgaagagtgtgaacaagatgagtaaactacaaaaattcttttcttccaaaaagagcaatctgcaaactttagcaggatttatcactgacgaaagcaaaggttttctgcaacatattggtcatatgaacaagctgaggaaggttaagatatggttcaaacatgtcgaaggcagcaacaattacatcgctgatctttcacgggccattcaggaattcaccaaggctcccattgacagggatactgaccgttctctctcacttgattctgaagaatgccctgaaaatttcctgagttcacttgatttggagacatgctctgaaggttccaaatatgctctgaggtcgctaaagttaaatggcgaacttcacaagttgcctccatttgttaatttgttgtcaggtctcactgagctttgcatttcatcacctatgctgacacaggttcatctatcaacgctgatcaatctgaacagactgctctacctcaaactggttgcatataagctcgagaatttcgaaataaaacatggagcattcccgagcttgcgacgcctgtgctttgtagtgaaaagtgtcacttcagctctgcccacaatcaagcatggagctctcccaaatatcatatcacttcagctgctctgtcaaggtccagttggtctttctggcatcgagatcagacacatgaaacatctcaaggaaatcacaattaactctggagtggttgtacaatgggaacaggcagcaaagaaccacccaaataggcctaaagttttgttcctcagaaaggttgatccaatggaaagcgaggaacggggaagaccttgtgccataagggagcagatgaaaattactgtagctcaaccaactagttcaggtgatggactgaactctagcctcaataagatcagactttcagagcctccttcttcacgacttgagatgcctgttcgtcatatggtggatggccactga

SEQ ID NO: 94467 - DNA, 459 bp, Oryza sativa
  Clone ID: PAT_MRT4530_92755C.1
gttgatgtgagacgattagtggctcttacctgggcgtgggtctggaattcagtgtgctgacctacgggctggggattgaacgagagaggacctggtagctcgctactcaagctgggaagggatcatgacctgctctaccttcagtgtgtagaaataaccaccgggtcgggaatggaggggcaggaaagaatgcactcggcatcagcaaggagaggcactaatatccgcgaagatgatggcactggtgggcgtaacgacattcgcaggttctcaaggaggaagtgtcatcagtgcgcaggactctgggcgtggaatgactgttactgccagcagacgaatgctaggatatgatgacatgaggtgtactgcgtgcactctggggtgtctaactggctgcagtacaaggtgacggtgcaggggttcgtggagccgacaaggtggtgaagcgggtgcaggcga

SEQ ID NO: 94468 - DNA, 250 bp, Oryza sativa
  unsure (1)..(250): unsure at all n locations
  Clone ID: PAT_MRT4530_92756C.1
agttgtgtgtggcgtcaagtggaataagtgggggtattcntcctgtaccagagagtacagtagtaggtccaagagtaaaagggtacaagtgtgtcaccgtatgtgtttcgtactttgtcagcgaccgactagtgatgggaaggagtaatggagtgccacgntaccnggtgtttttctttttttttattagtatctaaaagtctggnaaattatttattcatattattttacagacccnntctaaaaaaaa

SEQ ID NO: 94469 - DNA, 2724 bp, Oryza sativa
  Clone ID: PAT_MRT4530_92757C.1
atgacaagtcgtgaatggatgtatagtggttggacacgtggcaaagctcccactaatgaatggattgataatacaacacagttcttaaaccgtgcattttctatgcaagaagttgttaaagatggtactattaagtgtccatgcgcccaatgtcggaattattttaggcacaaaagggatacaatagagttgcacttgtgcaaatacggatataaagagaactatggaatatggacatcacatggtgagagaccagtgataaatgacaatgatcctgggccttcattaatagatcatgagggatttggtgaatctgataggatggataatatgttggttgacttagccagtgcacaaccaccagaaagtagtgaagaacctgcatattatgctaaagcattctataggatggttgctagtgctgatgaattgatccatgagaatacaacacactcatgtctctcagctgtagctcgtttgctagctatgaagtcacagtataacatgtcagttgcacattatgatgatgttttagggataatccatgaattcttacctcctaagtctaagttggctaaggacttttaccgttcaaaaaaattgctagaaggtcttggtatgccatatgttaaaattgatgtttgttacaacaactgcatgctttactacaaggaagatgagcataaaaagaagtgtgatttctgtggtacttctcgttatgagaatgtccaaaacaaaaccccacgtaaagttttgcactacctgcctattaaggatagattacaaaggttatatgcacatgaggagatagcaagattacggcagtcccatagtcgctcacaatctggtaacatggttcacccatgtgatggcgaggcatggcaacaatttgataaggactttcaagattttgcacaagatccaagaaatgttcgtcttgctttagcaactgatgggtttactccatatagtttaggtgctgctccatactcttgctggccagtatttataactcccttaaattttcctcccggagaagaaattaaagaagaaatgtacgcgtgtgtggatgatatggaaaactttggtaaaacacaccattggactcatataagctgtttttggcaacttccatactttgataagctgaagctgcggcacaatattgatttgatgcacaatgagaaaaatgtagctgaatctatatggaacacatgctttgacatacaagataatacaaaggataatgtgaaggcaaggaaagatttggctgaaatttgtagtcgtccattactgcaattagtgtcgaagggtaatggaaaatggcataaaccaagggcatcattttgtattgataggaatgacaagacaacaattctcaaatggtttcaagaactaaagcttcctgatggatatgctgccaatattaggcgtggggttaacctactacaaagaaaattttttggcctaaaaagtcatgactaccatgttttcatggaacgtttgctacctgttgcattccgtggatttattccagagagtgtttggaagtgtttggcagagctcagtttcttttataggcagttatgtgcaaaagaactaaacaaggataccatccgctctttagaagagaatgtagctgttcttatttgtaaattggaaaaaatattcccacctggtttctttaatccaatgcaacatctcatcatacatcttccctatgaagctcgacttggaggtcctgtccaatttcgttggaattatccatatgagagtaaatatgataaggaacaatggaagagccgaatttcaccaacaccaaatcagttgcgagacttgcgattaaatggatggaaatctggtcgtggcattagaaatgggcctaatttctttgattggttcagaactgaatgcatgaagtcatctagtatacacaatgctttgcgtcaaatgtcttatggttttcgaagtacagtttccacttatggagtttatgatatcaatggatataggtttcgttcagagaagtatgagagcaagaaatcagggttaacaacaaccaacagtggggtgtgtgtgtcttgtgttggcgaaaacaatgatgtgctagagtactatagtattattaaagacatactcaagattagttgggaaggcagcatgaaccttgaattggttttgtttgactgttattggtttgacccaacatctaccggtgtttggcgtactgccaatatgggtttagttgaaattaagcacatgtctaggctttcaaattttgaaccatttgtgatggctagtcaagttacacaagtatattatttgccttacccatgcactacaagacgtgatctatcagaatggtgggttgtacatcatgtcaatccacggggttatgtccagaaagttgagaacacaaataatgattctaacccaaatgatgatcaaacccaagatgtatcattctatcaagaagatggattggaaggcacttttattattgaccttggggctgacttaggaaatatgactccacctattttggatgagataaccaatgcaaaagacttagaattcctagaaaagcaaacgcaggctgaagataattacgatgaagatgacaatgaagaagaagaagaagaagaagaagaagaagaagaagaagaagaagatgaagaagatgaagggacacagcccccagcttatgatccaaatgatttttag

SEQ ID NO: 94470 - DNA, 1528 bp, Oryza sativa
  Clone ID: PAT_MRT4530_92758C.1
ccaaaatacattttttttctttgtgaggaatattttttaactttagaaagagggtattaagctggtacggggaacggaataagactgggaaaaaccccccttacattaaagcattgcccttccgggggggaaacaaaatttaccattcctgataaattattctcaatttatatgaaaaaaaaagagttccttggacaaaatagcaaggataaaataatgttatacttttacaccataaaaaactaaccgattttgagaaaagaaaaatcatgaggggaaaattatagttgtaaaggaaaaacgtgcagaatcttgtactcttcggtgtatactgtgagtggaaacaactcttcaactataccattcaatatccatgctgcattttgctgcctcaaaaaaaaaaaacttgcattttgctctggagacgccatccactctaactcgaatcatcttttattttggcttcaagattctttacaacattagtaagagatcttacatcccgagatttagccagtttaccatcattgtcatgcttttccagcagtagagcatggtccttgagcccctcatctgtaaaacctttcttatgaatagccttgaggagtttatggaggtgtgcctgaagaaactcagaacagtgctgctcaagattacgctcaggaaaggaggaatcacagccaaaagggcatttcatgggcctcatggggcacacagtcacgcagtgcctatccatatcacgcctcagaagccgcttctcacagttctgctcacatgtaaggattttaaacaggcaagctgaatcatggtcttgcatgcagcgaacagaaactttcgctcggcatccatcattggggcaggtaacaggtctgaagctacactgggccttatgatcagcgagacgttcttcattttcatatttctcagggcagtggtacttggttttcaggtctacattcttgaggaggacctcagcaataacttctctcctttccagcggccagaagcgggtcatctccatttcttggacaaagtcatcaatcttatcttcgcggctgtcgctcatcaaccacccagagacatggccgataatgttcctcttcgtgctactaaaatcatccatgaagatggacacgatctcaaaagggtcctccggcatctcgttctcttgatcctgacttgcttctgattcgataagcgaatcggatatgaatgtctcgcttctctgcgtgacgtagtccaccatttccttcctcatgtcaacggcgacaactgatggcttcctgaagagatcgcctgtcgtgcagtcaatgcataccgcagccaagccggggagcaagaactgcgcgagtttgtgcattgcctctgaatcacaatagggacactgcagaagcaatccttcagccctcaccggcccaggatcagcaactgggagctccatttcacaaaacaccggatccggtggaggggagaccgccgccgccgcccgtcgcccgccacgatgcgccgccgcctcccctccagccat

SEQ ID NO: 94471 - DNA, 3006 bp, Oryza sativa
  Clone ID: PAT_MRT4530_92759C.1
atgacaagtcgtgaatggatgtatagtggttggacacgtggcaaagctctcactaatgaatggattgataatacaacacagttcttaaaccgtgcattttctatgcaagaagttgttaaagatggtactattaagtgtccatgcgcccaatgtcggaattattttaggcacaaaagggatacaatagagttgcacttgtgcaaatacggatataaagagaactatggaatatggacatcacatggtgagagatcggtgataaatgacaatgatcctgggccttcattaatagatcatgagggatttggtgaatctgataggatggataatatgttggttgacttagccagtgcacagccaccagaaagtagtgaagaacctgcacattatgctaaagcattctataggatggttgctagtgctgatgaattgatccatgagaatacaacacattcatgtctctcagctgtagctcgtttgctagctatgaagtcacagtataacatgtcagttgcacattatgatgatgttttagggataatccatgaattcttacctcctgagtctaagttggttttggacttttaccgttcaaaaaaattgctagaaggtcttggtatgccatatgttaaaattgatgtttgttacaacaactgcatgctttattacaaggaagatgagcataaagagaagtgtgatttctgtggtacttctcgttatgagaatggccaaaacaaaaccccacgtaaagttttgcgctacctgcctattaaagatagattacaaaggttatatgcacatgaggagatagcaagattattgcagtcccatagtcgctcacaatctggtaacatggttcacccatgtgatggcgaggcatggcaacaatttgatgaggactttcaagattttgcacaagatccaagaaatgttcgtcttgctttagcaactgatgggtttactccatatagtttaggtgctgctccatactattgctggccagtatttataactcccttaaatttccctcccggtgtgtgtatgaggcccgagtacacattccttacccttgtcatccctggaccagagcatccagggaaaaaaataagtgttctaatgcaacctttagttgatgaacttctgaagttatgggagggggtagaaacctgggatgcttcacgcaagcaaaactttacaatgaaggcaatatttctatggtcaatccatgactttcctgcctatgggatgtttgctgggtggagcacccatggtcgtttggcatgtccaatttgtatgggtgattctcaatcttttcagctccgtaatggtagaaagccttgttggtttgattgtcatagacgctttctacccaacgaacatgaattcagaactcaactaaatgcatttagaaagaacacatttatgcttgatgagccaccaaggattctgacaggagaagaaattaaagaagaaatgtacgcgtgtgtggatgatacggaaaactttggtaaaacacaccattggactcatataagctgtttttggcaacttccatactttgataagctgaagctgcggcacaatattgatttgatgcacaatgagaaaaatgtagctgaatctatatggaacacatgctttgacatacaagataaaacaaaggataatgtgaaggcaaggaaagttttggttgaaatttgtagtcgtccattactgcaattagtgtcagagggtaatggaaaatggcataaaccagaggcatcattttgtattgatagggatgacaaaacaacaattctcaaatggtttcaagaactaaagtttcctgatggatatgctgccaatattaggcgtggggttaacctactacaaagaaaaatttttggcctaaaaagtcatgactaccatgctttcatggaacgtttgctacttgttgcattccgtggatttattccagagagtgtttggaagtgtttggcagagctcagttttttttataggcagttatgtgcaaaagaactaaacaaggataccatccgctctttagaagagaatgtagctgttcttatttgcaagttggaaaaaatattcccacctggtttctttaatccaatgcaacatctcatcatacatcttccctatgaagctcgacttggaggtcctgtccaatttcgttggaattatccatatgagaggtttatccaaaaacttagaaagaaagtgcgaaataaagctcgagttgagggttccattgttgaggcctacctagttgaggaaacatctaattttctttcactctatttcaatcctaaagttcggtctgctagaaacaagatgcctcgatatgatgatgtttccacttatggagtttatgatatcaatggatataggtttcgttcagagaagtatgagagcaagaaatcagggttaacaacaaccaatagtggggtgtgtgtgtcttgtgttggcgaaaacaatgatgtgctagagtactatggtattattagttgggaaggcagcatgaaccttgaattggttttgtttgactgttattggtttgacccaacatctaccggtgttcgacgtactgacaatttgggtttagttgaaattaagcacacgtctaggctttcaacttttgaaccatttgtgatggctagtcaagttacacaaaaagctgagaacacaaataatgattccaacccaaatgatgatcaaacccaagatgtatcattctatcaagaagatggattggaaggcacttttattattgaccttggggctgacttaggaaatatgactccacctattttggatgagataaccaatgcaaaagacttagaattcctagaaaagcaaatgcaggctgaagataattacgatgaagatgacaatgaagatgaagaagaggaagaagaagaagaagaagaagaagaagaagaaaaagaaaatgatgaagaagatgaagggccacagcccccagcttatgatccaaatgatttttag

SEQ ID NO: 94472 - DNA, 508 bp, Oryza sativa
  Clone ID: PAT_MRT4530_9275C.1
ctagatcgcgagctgccgtccttttttttttttttttttttaagccacaaaaagaaacaattcattccatgatattcattagaagttctggcttacatcaacttctgtagaatacaaccaccatctcatactaaataaagagagatgtgaaggaaggacagggaaaaaaacaaccagagacccatcatgataaccctaaacaaagagcaacagcaattcagaactcttaatctttcacctaaagttagttttgaccggagactatcaccaaccaaaagcacactggactgctaaaatcagaataaaatcactctcaattgccagagaagaaacccttcttcctcgctgggctccgataaattagtatcgctataagagaaagaacagcaccaccaccatgatcccttaccatgtggttgggtgcaggatgagaaacacccctcctggttttttcacaaggcaccgacataaaaaaacgccagatgttactaacaactacctactacca

SEQ ID NO: 94473 - DNA, 637 bp, Oryza sativa
  unsure (1)..(637): unsure at all n locations
  Clone ID: PAT_MRT4530_92760C.1
tgcatngatatgatgatggcagctcacaatttgatagtacatacaacctagaaatatttcagtaccctggccggtgtattagcccacggggctgccaacagtacaaggctgctaccttatacatattgacaaacacaccagaaatggttgatttcttcaataaatatgataaggaacagtggaagagccgaatttcaccaacaccaaatcagttgcgagacttgcgattaaatggatggaaatctggtcgtggcattagaaatgggcctaatttctttgattggttcagaactgaatgcatgaagtcatctagtatacacaatgctttgtgtcaaatatcttatggttttcgaagtacagtttccacttatggagtttatgatatcaatggatataggtttcgttcagagaagtatgagagcaagaaatcagggttaacaacaaccaacagtggggtgtgtgtcttgtgttggcgaaaacaatgatgtgctagagtactatggtattataaaagacatactcaagattagttgggaaggcaacatgaaccttggattggttttgtttgactggtattggtttgacccaacttctaccggggttcggggtcctgacaatttggggtttagttgaaatt

SEQ ID NO: 94474 - DNA, 650 bp, Oryza sativa
  unsure (1)..(650): unsure at all n locations
  Clone ID: PAT_MRT4530_92761C.1
atgaagtatggagcacgaaccacagaagcggcaacctttcggttgaagtttcttggccagacggaagcggaagcctcaatctgaacatagcatcaggtacaagtttgcacacctgcatggttctccagaagcatgttgagagttgatcgatcaaggaatctagctgctctgtgtaagtttctaacatcactcaagaattcacgagtgttctacagcgtgtaccaaagaatcagcttatagcacatcattgcagtgaccatttatatattcatttctagtactagaagtctagaacagctaaatacaaacatacttgcaaattaaagaccactcaaacctggtgctcaggggttgagggcatgatactaaagtagcagatttagttgctagaattaatttagtgcttaatccacttataaattgcaatcaccaaccaagaagtaatgtggtgatgatcagttaggtttgtcacgggttgcccttttgccagaagtgagctcaccatataacaagaaggacttgagagctaactctgtgcccccactgtactgtttgttttgctctcaatcangtaatcacagaaaaactattttttggactgattgatctcatgtaatccaacttactntcaaaaaaaaaaaaaaaaaaaa

SEQ ID NO: 94475 - DNA, 1043 bp, Oryza sativa
  Clone ID: PAT_MRT4530_92762C.1
tttgtttagcacaattgcagttttccttgattccaatttccaatgaatgagacaaaacaagacggcgtgtacacagttcacgcaacaacacttaaaattaaatcttacagctaatcgcaagcagcgacatgagaaacgacatgaatttttatagcaagctagaagggctgctggtgctcgcagtcgaggttgggcccgacgtcgacgccgagcacctggcagtagcgccggtagaagccgatgcggttgttcacccgggcgtcgcctgcccggttgcactcgagcccgccgttgacgatgttggtgaccagcccgaagcccgccgtgcggttagccgccacgtcggccgggccgggccggtactccccgaccatcacctggtggcacgacggcttggtgtccctcggcgtcatccagaaccacagcgccgtctggaacgctatgtccgagcagttggccacgatctccgggttgcgcagaccatcgaagcccagggcctggcccgccggcccgtagttgaagttccatgagatttggatggggcctcggccatggtaggacttgccggggtagcacggccactgcttgtcggtggcgtcgcagtagctgctctgcgggttgatctcctccttgtagcagaggccccaggcgtaggggccgtcgggcgcggtggcccagccgccggtggtctcgtgggagatctgcgcgaggaaggcggcgacctcgcgcttgcgggcgtcggcgcagcccgtggcggcgaaccgggggaacctcgtcgcggccctgacgaaggacgcgtaggtgtagaaccccctcgccgggcaggccgcgtcgtccttgtgcaggaacagggaggcgtacagctgctcgctgacgatcgacgacaccgggctggggctggggctgtacccgccgccgccgccgccgccgtaccaccgcgcctccgcgccggaggccgcgacgacgacgatggagagcacggcggcgaggaggaatggtgtggcgcgaggagcaggagtgggcttcgccatggctgcaactga

SEQ ID NO: 94476 - DNA, 762 bp, Oryza sativa
  unsure (1)..(762): unsure at all n locations
  Clone ID: PAT_MRT4530_92763C.1
atggtcatgactgctctacggagctgggaattggcaattgaaggatatcactgtgacctgctcccttcgctgcccacgtcgccacgggactgcaccaagccgcctcctctcgccgcccaactcgccgttgggatggggagacccggaaccgcgaggcccacggggccacgggccaccgaatgccgcccgcacggcgggagctccgccgaccttgctcgtctccgccgccgccaacaaagtctgcaccgtccccttgccgactcgagggcagagagctcctccgcgccgctgacctccttaacgcctccccgcggaggtccaccccccagatcagcccagcgccgcctcgttgtcggagaggtcccacgcctcgtactacctctcggcnccatcctcaccggcaacccgnccaccatcaccatcaccggaaactcctccttctcggccttcatacgaacctgcagcggtgacggcgcacaggaagggggcggcggcgcagcacaacgnaaagaaggtggaagncggcgcgcgggggnacggcgacagcacgcgagggagggggcggcagcgcagcacancgggnaggaggtggaagncggccgggaggcgacgggcgagnagatgncggcggcgcgcggggagggggccgcggcgcagcacagcgaggaggagttgggaggcggccgggcggcgacgagcgagaagggggtgncggcgcgcggggaggggccggcgaagctccacgtccttcgatctgcgtga

SEQ ID NO: 94477 - DNA, 1188 bp, Oryza sativa
  Clone ID: PAT_MRT4530_92764C.1
ttggcccacgtaaagcaatgtttgtggcgacgatttgttttagccttgggtttgttgttgcagcaatcggtgtgtatcaacacaatttatggttactctatttgggtaacgggggttttaggtggtattggtttagggttaggttatattgggccggtatctactttgatgaaatggttcccagataagccgggaatggccacaggtttagccattatgggcttcggtggtggggcaatgttagcttcgcctatttccgttggtttgatgaatttctttagcagtgagacatcggttggtatagcagaaacctttttagtattaagtgttttctatttcatttttatgatgtttggtgttttcactattcgtttgcctcatccaacttggaaaccaaaaggatttgttgaacataaaaaagcagataagctagtcagtgcatacaatgttggtgtgaatcaagctatgaaaacgccacaattttggctactgttttcgattctttgtttgaatgtaacggcaggaattggagtattggggcaagcatcagtaatgattccagagcttttctctgaagtttcggttggaaaacaagctgcgattggtactttagccgcagcgggtttcgttggcttacttagtttatttaatatggcagggcgttttttctggtcaagtatttcagataaaattggccgtaaaaatctgtattccattttctttttgttaggtgccgtgctttattttatcattccatcgatcggtgaaagtggtaataaagtcctatttgttataggcttctgtgtaattatttcaatgtacggtggcggttttgccgcaattccagcttatttacgtgatttgtttggctcatatcaagttggtgcgattcatgggcgagtattattagcttggtcaactgcagccgtaattgaccggtattagttaattatattcgtcatatgcaaattgatagtggtgtgcctgcggcacaggcttatagtgtaacgatgtatattatggcgggcttattatttattggctttttctgtaatttaggtgtaaaagcggtcaatcagaaacatcatcatcaattaacgattaaagaagccgcgcatagtgctaaagcagcagatgaaacagtgatctcagatacgtatttagttgtggaagaagtagctcagggtg

SEQ ID NO: 94478 - DNA, 411 bp, Oryza sativa
  Clone ID: PAT_MRT4530_92765C.1
atgtcggctgcggggatgcttggagcgcgctccagagctcccgtagacgaggtcgcgttcccgtcgctgcagtggacgaaacatgatggagtcaaaagaggattttctcggcgtggaaagaagagtatggaacggaaaagagttgatgtcgaacgcggcttgacgtcgatggaagctttcatctttttcacggccggcgacgagttcttgggtgatggtgggtccagggcgatggttgctagatctgaattgatccaccatcccagcccacagatcggcgacacaccatggaggaggacgacgacaccgtggcagttgatggcggtggccggcaagcggcggccggcggcggttgaggcgaaggcattgcttcgggcctcgctgccggacgctgggcaacaccttaactag

SEQ ID NO: 94479 - DNA, 201 bp, Oryza sativa
  Clone ID: PAT_MRT4530_92766C.1
atggcgtggcctgtggttttgctgtgggcggctggcttcgcgccgcggtcctccttgcgtgctctccgcctcgctccgttgtccgtttttcgtttcgctgggggtctttctttggggcgccggctggctcgtcgtttttccggcccgcttgctggtggacgggcgggcggcgtgttcgtcacgttccgtatcggggcgtag

SEQ ID NO: 94480 - DNA, 4410 bp, Oryza sativa
  Clone ID: PAT_MRT4530_92767C.1
atggtgaagctggacaggagctccctcctcaggttcctcagggagctctctcaagatggcggcctcgctgcgtcatggcaggatggtacagattgctgcaaatgggatgggatcacctgcagccaagatagcacggtcactgatgtttccctggcctctaggagcctccagggacgcatctcaccgtctcttggtaatctccctggattgctgcgcctcaacttgtctcacaacctgctgtctggtgccctgccgaaggaactgttgtcttccagcagtctcatcaccattgacgtcagctttaaccgcctggatggagatcttgacgagttgccatcttcaacacctgcaaggccactgcaggtactgaatatctcaagtaatttgttagcaggacagtttccatcatccacatgggtagtgatgaaaaatatggttgcactcaatgtcagtaacaacagctttagtgggcatataccagctaatttctgcaccaactcgccatacttatctgtgcttgaactcagttataaccaattaagtgggagcattccccctggatttggaagttgctccaggctcagagtcctcaaggctggccacaacaaccttagtgggactatccctgatgaaatcttcaatgctacctcgttagagtgcctctcttttccaaacaatgattttcaagggacacttgaatgggcaaatgttgtcaaactcagtaagctggctacccttgacctcggagagaacaacttcagtggtaacatttcagagtctataggtcagctcaacagattggaggaactccatctgaacaacaacaaaatgtttgggagcataccatcaaacttgagtaactgcacaagtctgaaaatcatcgacctcaataacaacaatttcagtggagagctcatctatgtcaatttctccaacttacccaatctaaaaactttagatcttatgcggaacaacttcagtggtgaaattccagaaagcatatacacatgcagcaacctaactgctctgcgggtatcttccaataagctgcacggccactccagcaacctcaccacccttcttattggccacaacttcatgaatgaaagaatgcctgatggcagtattgatggttttgagaatcttcagcaaggcaaggaagcagaagacaagatcacattcactggcattatggaagctacaaataattttaacagggagcacatcattggatgcggaggttatggattagtctacagggcagagctacctgatggctcaaaacttgccataaagaagctcaatggtgaaatgtgcctgatggaaagggagttcagtgcagaggttgaaacgctctccatggcacaacatgacaatcttgtgccactcttgggttactgtatccagggaaactcgaggctcctcatatattcttacatggagaatggcagtctggatgattggcttcataacaaggacgatggtaccagcacaattctagattggccaagacggctcaaaatagcgaaaggagcaagccacggcctttcttacatccacaatatctgcaagcctcgtattgtccaccgtgacatcaaatctagcaacatccttctcgacaaagaattcaaagcttatattgcagattttggattatcacggttgatccttcccaacaaaactcatgtcacaaccgagctagtcggcactctcggttacatcccccctgagtatgggcaagcatgggttgctacattgaaaggtgacgtgtacagtttcggagtggtcctgcttgagcttctcactgggaggaggccagttccaatactatctacttcaaaggaacttgtcccatgggtacaggagatgatatcagagggaaagcagattgaggtgctggattcaacacttcaaggcacaggggaagggaagcgcctccactctgaccaggccagccctggcattgtcgtagaacagttcaagggcatcgcgggcgcgcggcagcggtccgggaggagcaatcccgcagccgccgccgtcgccggcggcggccgcggtgacctcccccgccggccgccgctactgccaagagaccaggagcaccagggagtcgaagcagcgccggagatgctcaggcagctccaactgaaacgtgctggtatatggtgtgaaccaggaagctgcacctgcagtggcttactggcaattgtgcacatcatcaacagtgtggatgagaggagctccctcctccagttcctctctggcctctccaacgatggcggtctcgcggtgtcatggcggaatgccgcagactgctgcaaatgggaaggggtcacctgcagtgcagatgggacggtcaccgatgtctcgctggcttccaagggccttgaggggcgtatctcgccgtcccttggcaacctcaccggcctgctgcgcctcaacctgtcccacaactcgctgtccggtggcttgccgctggagttgatggcgtccagcagcatcaccgtccttgacatcagcttcaaccacctcaagggagagatacatgagctgccgtcttccaccccggtccggcctctccaggtactgaacatctcgagcaactcgtttacaggacagtttccatctgccacatgggagatgatgaagaatctggttatgctgaatgccagcaacaacagcttcacgggacacataccgagtaatttctgcagcagctcagcatcccttacagcgcttgcactctgttataatcatcttagtggcagcatcccccctggttttggtaactgcttgaagctcagagtgctcaaagttggtcacaataacctcagcgggaatctcccgggtgatctcttcaacgctacctcattggagtacctctctttcccaaataatgagttgaatggagtaattaatggtacactcatagtgaacctcagaaatctgtcaactcttgatcttgaggggaataacattaccggatggattccagactctataggccagctcaaaaggctgcaagatctccatttgggtgataataacatatctggggagcttccatcagccctgagcaactgcacacatctcataacgattaacctcaagagaaacaacttcagcggcaatcttagcaatgtgaacttctccaacctgtccaatctaaaaactttagatctcatgggcaacaaatttgaaggtacagttccagaaagcatttactcttgcaccaatctggtcgcacttcggttatctagtaacaatttacaaggtcagctttcgccaaaaataagtaatttgaagtcccttactttcttatcggttggttgcaacaacttgacaaatatcacaaacatgctatggatcctcaaggattctaggaacctcaccacccttcttatcgggaccaacttctatggcgaagccatgccagaagataactcaattgatggttttcagaaccttaaggttctttccatagctaattgctcattgtctggaaatatacctttatggctgtcgaagctagaaaagttggagatcttctttaatggagatgccaatgctaataacaaagaagaataccacccgtttggatccaagggagaaattccacagcagctcggcaacctgacaaatttgcaggtgctagacttgtctagcaaccatctcacagaacaagcagcatccatttccacaaaaagtcacaacaagaaagccatttttgcaactgcattcggtgtcttctttggaggaattgctgttcttctatttctggcatatcttcttgccactgtaaagggtacagattgtataaccaacaacaggagtagcgagaatgcagatgtagacgcaacttcgcacaagtctgattcagagcaatcattagttatagtatcacaaaacaagggaggtaaaaacaagctcacctttgctgacattgtgaaggctacaaataacttcgacaaggagaatatcattgggtgtggaggctacgggctagtatacaaggccgatttacctgatggcaccaagctggccatcaagaagctttttggtgagatgtgcctgatggaaagagaattcactgcagaggttgaagcactttctatggcacagcatgacaatcttgtaccactgtggggttactgcatacagggaaattcaaggctccttatatattcttatatggagaatgggagcctagacgactggcttcacaacagggacgatgatgcgagtacatttcttgactggccgaagcggctcaaattgcccaaggagcaggccggggactttcttatatccatgatgcctgcaagccacatatcatccaccgtgatatcaagtccagcaatatcctacttgacaaagaatttaaagcttatgttgctgatttcgggctag

SEQ ID NO: 94481 - DNA, 291 bp, Oryza sativa
  Clone ID: PAT_MRT4530_92768C.1
ggagaagggacacgagacaatcaacaaacacggaacaacagaagccacaacatacaagccaacatacgccaagacaagacgccggatatcgacttcagggataagcacggctagtcccctacggtgtctccggatactgtcaggagagacgaaagcgttatctctgatcttgtcgggcacggattcgaggaggaagactaccctgttgtcgactacgagtcagaccttcagacagccatgtcgacaacagtttagataggctaccccaaatattgtactagtgtgataatg

SEQ ID NO: 94482 - DNA, 3070 bp, Oryza sativa
  Clone ID: PAT_MRT4530_92769C.1
aagaaacacagcaacaaatttcccatacctgttcttgcccttgcgctggtgctgctcatcaacctcgcctctctcaccagttcatgtacagagcaggacaggagctccctcctcaagttcatcagggagctctctcaggatggaggcctctctgcatcatggcaggacggcacagattgctgcaaatgggacgggatcgcctgcagccaagatgtgcaaatgggatgggatcacctgcagccaagatagcacggtcactgatgtttccctggcctctaggagcctccagggacgcatctcaccgtctcttggtaatctccctggattgctgcgcctcaacttgtctcacaacctgctgtctggtgccctgccgaaggaactgttgtcttccagcacactgcaggtactgaatatctcaagtaatttgttagcaggacagtttccatcatccacatgggtagtgatgaaaaatatggttgcactcaatgtcagtaacaacagctttagtgggcatataccagctaatttctgcaccaactcgccatacttatctgtgcttgaactcagttataaccaattaagtgggagcattccccctggatttggaagttgctccaggctcagagtcctcaaggctggccacaacaaccttagtgggactatccctgatgaaatcttcaatgctacctcgttagagtgcctctcttttccaaacaatgattttcaagggacacttgaatgggcaaatgttgtcaaactcagtaagctggctacccttgacctcggagagaacaacttcagtggtaacatttcagagtctataggtcagctcaacagattggaggaactccatctgaacaacaacaaaatgtttgggagcataccatcaaacttgagtaactgcacaagtctgaaaatcatcgacctcaataacaacaatttcagtggagagctcatctatgtcaatttctccaacttacccaatctaaaaactttagatcttatgcggaacaacttcagtggtgaaattccagaaagcatatacacatgcagcaacctaactgctctgcgggtatcttccaataagctgcacggccagttatcaaagggactaggcaatctgaaatccctctccttcctgtcactcgcaggaaactgtcttacaaacatagcaaatgcacttcagatattaagcagctccagcaacctcaccacccttcttattggccacaacttcatgaatgaaagaatgcctgatggcagtattgatggttttgagaatcttcaggttctatccctaagtgaatgctcattatctggaaaaatacctcgatggctatcgaaactctcaaggttggaggtgctagagttagacaacaatcgactaactggaccaataccagactggatcagtagcctaaacttcctcttctatctagatatatcaaataacagcctgacaggagaaattccgatgtccttattacagatgccaatgctaaggtcagacagggctgcagcacagttggaccgtagagcatttcaattacccatatatatatctgcatcactacttcaataccgcaaggccagtgcttttcccaaagtgctcaatctaggcaaaaatgaattcaccggtttgatccccccagagattggtctgttgaaagtgctcctttcactgaatttgagctttaacaaattatatggagatatcccccagtcgatctgcaacctcacagatctgcttgtgctggatttgtcaagcaacaatctaactggtacaatcccagctgcgctgaacaatctaaacttcctttccgaattcaacatctcatacaatgacctagaagggcctatcccaactggtggtcagcttgatacattcacaaattctagcttttatggcaatccaaagctgtgtggtcctatgcttgtacgccattgcagttcagctgatggacatttgatctcaaagaaacaacaaaacaagaaggtcatacttgcaattgtttttggtgtcttctttggagccattgtcattcttatgttgtcagggtatctcctttggtcgatcagtggtatgagtttcaggaccaaaaataggtgcagcaatgattacacggaagcattatcatccaacatcagttcagagcatttgttagtaatgttgcagcaaggcaaggaagcagaagacaagatcacattcactggcattatggaagctacaaataattttaacagggagcacatcattggatgcggaggttatggattagtctacagggcagagctacctgatggctcaaaacttgccataaagaagctcaatggtgaaatgtgcctgatggaaagggagttcagtgcagaggttgaaacgctctccatggcacaacatgacaatcttgtgccactcttgggttactgtatccagggaaactcgaggctcctcatatattcttacatggagaatggtagcctggacgattggcttcacaacagggacaacgatgccagttcatttcttgattggccaatgcgactcaagatcgcacaaggggcaagccagggccttgcttatatccatgatgtttgtaagccaaacatagtccaccgtgacatcaagtccagcaacattctacttgacaaagaattcaaagcttatgttgcagattttgggttatcaagattgatccttcccaacaaaacccatgtcacaactgaactagttggcactcttggttacgttcccccagagtatgggcaagggtggatggctacactgagaggtgacatgtacagttttggggttgtcctgcttgaactactcaccgggaggcgacccattccagtcttgtctgcatcaaaagaactcatcgagtgggtccaggagatgagatccaaaggaaagcagattgaggtcctggatccaacactccgaggcacaggacatgaagagcagatgctgaaggtacttgaagttgcatgccagtgtgtcaaccacaatcctggaatgagaccaactatacgagaggtagtctcctgcctagacatcataggcactgagctg

SEQ ID NO: 94483 - DNA, 676 bp, Oryza sativa
  Clone ID: PAT_MRT4530_9276C.1
agataaacagattaaatccatcatagtgaatttcatgttcaagacattaagaaaaccacatcaatccagataactaatctacaagatacttagaaaatgtttaaagggtacgttctgcccactaatatttattctaagcctacatctccttggttgttgaacggctatctaaagtgtcactagggcaaccagcctcgatgaaacccactagcccagtaggagcttttgaaatgttgtatgcgccatctgacgagatgatatgattgaagatgaatccacagagttgttcagcgaggccgaaacaagcatgtggcaacaatttacttgtcgggagctttaatttcttggcatccataatgttccagttgttgtcctccatgaaaatcgacataaatctcatcaggtagaacccacatgtactcgtgcccggatcctggcgtaagcaataagggtgggcccaaacccggaatgtatttgcacgcggagcgtgtcgaatacacttcttcttatacctcacaagtgccttattggagggtgtcaatgacagattggaacttggcttgtggggtcctcagtccatcgaagacaacaatcttggaatcgtttaaatggatcacaagaaggatccagtgaggcacatagtcgaccactgcttgttcagacttatcgcctaact

SEQ ID NO: 94484 - DNA, 201 bp, Oryza sativa
  Clone ID: PAT_MRT4530_92770C.1
atgggggaaacggtggaggacgtggaggggatcgtgcccacgtcgttggatgcgagcgggaggggcggggtggtgcggattttgcggcggagtgggcggcatcgggcggccatggtggttgcggccggccagccagaggaaggaggaggagctgacaagtggggcctcgggaatctcgtcccgagattctgggatggctag

SEQ ID NO: 94485 - DNA, 127 bp, Oryza sativa
  Clone ID: PAT_MRT4530_92771C.1
atctcgtccaacggcacactaacccaatcaccaggacccattgtaaacaaaggccgggttcccgacaatatctcgcatctcgtagtctacaacgaagacctccgccaatagccccaataagggcact

SEQ ID NO: 94486 - DNA, 292 bp, Oryza sativa
  Clone ID: PAT_MRT4530_92772C.1
atctcccacatttttaagcctgaaggattttaaagggaaaacccaaatcaagtccaagaattctgcaacaaaaggggaccggataaaaacccccctttaaccaccagttcttggaacggggcaaagaaccttggacccccactttaagaacccagaataaacccaagaacccttaggttcccccctggagaggacccccacaatgacccaaggctgccttttcttaacaaccaaacctacccgaccccaccaaaaatgtggtgatgggggataaaaataacctggccaaaaa

SEQ ID NO: 94487 - DNA, 536 bp, Oryza sativa
  Clone ID: PAT_MRT4530_92773C.1
tcaggaacgatggggaggatccaaacggggagaggattcgcgcggggtggattcggactgcaggatagcgccaacatctgacggccggcacgacttcatgcgaactccgatttgggcgtgcaagtacttcatggaaagcttatcaagtctactttcaaatggatccattcccatgtccatatctgatctggagcagctgcaatcatcattttactgtcgagtacttttctgtccacgatgttgcgtcacctcatttgggcccaatgtgctgtatatcaagttgggcccattaggggtgcgtcctagggttagagcacgacaccaacacccctgtggtcgttctccccctcttcttatacctttagccgccgccaagaacacttgggctttgtttagatcaaagtatagcgtcgctacttggccgagttaatcccatgaccagttagatccccggatttcttgttgctgaactccacttgtgctacttctgttgatctgatccatcatctttgattcgcaaattgagttgcttgttc

SEQ ID NO: 94488 - DNA, 284 bp, Oryza sativa
  Clone ID: PAT_MRT4530_92774C.1
atgaagttaagcatgaaacgacccccgtacaaccgcacttctcgtatggggatagggctctacggtgcgccagaactcctctcactgctagaaactgtgtacgcctagagtgcatgaggatgaaaagttcatggagcgggtactgccaatgcgaggttatcgaaaagctttgccgtgacgcgtctcatgtgttgggacgaggctcatgtgttgggtagttgcggagtgcaggtaaagtgtacatccactgcagtgtgactgtgttacaatcgtgcttgtcgact

SEQ ID NO: 94489 - DNA, 1878 bp, Oryza sativa
  Clone ID: PAT_MRT4530_92775C.1
atgattctcaccgtcctgctcatccttggctgctgcttcttcttcttgccgatgcctatggtcgccgcccagccctggatgatctgcggcagcagcaaatacacggcgaacagcatctaccaatccaacctcgacagccttctctcctcatcattccttgtcgtaagcggcgactccagcagcggcgccctattcgccaagggctcccgcggcgccgccccggacaccgtctacgccgtcgcgctctgccgcggcgacgcgaacgcctctgcctgcagcggctgcgtcgacgccgcgtacgcggccgcgacggcgcggctctgcccgctcagcaaggacgccgccgtcttctacgacgagtgcgccctccgcttctccgacgaggacatcctcaacatggacgccttcggccgtgtcaacacctcggccgcagttggcgtcgcgccgctcgtcctgatgaacatcacgtcggagcccatgttatccggctggaacaccaacatccaggggacaaaaaacttcacccaattcttcatcaagacgatgaattacatagtagcacaagctctctccacgacgaagcactacgctgcaatccgcgtggacatggatgatgccgatgcaagcaacaccgttacccttccaaggaggctcttctgcttggcacagtgtgctccagatttggttgaagatatctgctacaactgtcttcagaatttcagcgatctggcgacggccaacttcgccggtcggcaagggggacgtattcttgctctccggtgtaatcggtggtatcaccccgattcgtccttcgccggtaagacgaacgcggatgaagatgaagcactaatttgggggctacaaggaagaagttcagaattcactatttatgacttttcgcaagtattagaggccacagataatttctcagaagaaaataaacttgggcaaggaggctttggtcctgtatacaagggccgatttcctgatggggtggagatagcagttaagagacttgcttctcattcagggcaaggcttgacagagttcaaaaatgaaatccaactcatagctaagctccagcacacaaatcttgttaggctcttgggatgctgttaccagggacaggagaaaatactaatatatgaatatttgccaaattaaagcttggatttcttcatttttgatgaaacaagaagagctttgatagattggcataaacgcctagcgataatagatgggatagcacaaggacttctgtatttgcataagcattctcggttgcgtgtcatacacagagatctcaaagcaggcaatattctcttggaccgtgaaatgaaccctaaaattgcagattttgggcttgcaaaaatatttagcgtgaatgataatgaagggaatacaaaaaggatcgttggaacatatggttatatggctcctgagtatgcttctgagggccttttttcaatcaaatccgacgtattcagtttcggtgtgctaattcttgagattgtcagtgggaaaaagacatcaagttttcatcgatatggtgaatttattaatcttcttggccatgcatggcagatgtggaaagatgaaacatggcttcaactcgtagacccattgttacccaccgattctcatacaatagagataatgagatgtattaacattgctttgctttgtgtgcaagagaatgcggccgatcggcccaccacgtcagaggttgttgcaatgctaagcaacgagactatgaccctacctgagcctaagcaccctgcatttttcaacatgaggctgacgaacgaagaggcgtcaactgttattgcggcatctagtgttaacggtatcacattatctgctatagatggcagatag

SEQ ID NO: 94490 - DNA, 982 bp, Oryza sativa
  unsure (1)..(982): unsure at all n locations
  Clone ID: PAT_MRT4530_92776C.1
gtttggttgattacttgactattgatttgcgtctcacctgtagcggcggtactcctcccggcggccggacgactccgggtcgaagtagttcgccatcggcggcggcggaggcggcggcgggtccacctccatggcgaggcctcagggacggtggcagctagggtttgcgcctcccccctccctctccaatggccgccgcgagagctccaaacccccaaaccctagcgccgccgccctcctccccacggccttatcaaaaccctaaccctaaccctaaccctaatcctcctctccctccccccctaagccgctcagccgcctcccccaccccactctcgacgccgcctctccccctccccctctccccaccggcgccgcttcccctcccctccctccggcggcgccgctccctctccccntctcccgcctctccctccnccggcgccgctttccttcccttctcgccggctcggggcggcgncggcgggctgcggcggtggcgtcggggggctgccgtggcgggcggtttccgtggcggcgggggcttcccccccgcttgcggggggggggcccttgcgcccgctcgccgcggtggctccttcttcccgtctcgccgggttggcccccccccccgctgggtggcccgggccccgggcgcccccgtcccccctttcccctttcccccttccgggcggggntcncctgtttttgcccccccttcctctctctcttggccccnccccccccgtggttctcgccccccctgggngggggcctgcgtgcggtccccccctcccntgtttttcctttcgtgcngtttcgtgtgtgtttctttctgcccgcccgtccccctccccctttggctccgccgcccccgtttctttgtcgtcccttgttcctttcccgggccgcccttcctccccttttttgtccccntcctctcttctgcttgtccccccgctgtgtctttctcctttttccg

SEQ ID NO: 94491 - DNA, 589 bp, Oryza sativa
  Clone ID: PAT_MRT4530_92777C.1
aacttctttgtgacaatctgactctctggacctctgacaatgcgcaggattgtggggacggggtcaatgaagcggtgagttctgaatgtgacggccattaatctgttctgaatcctatttctgactccacttatcttatttctctgctggattactggatcataagtattattacgattaatcgttatgtgtttttataacatttcggttttgtacttctaaatgctgtctgttctatcacctcatgctcatccctttatctcattatattctttttgtgattcttctatcttctatcctttactcttccacctcttcctcgctcttctcccatttttttccttttcttcttccttactttctttttctcctcccttcattccttctttccctcttgccttcttccttcttctccactccccttccttttcttccctctttttcctaccttattccttttctctttccttcatcctttccttcctcccccttcactcctcttcccttcttctccctcttccctttttccttccacctctttttatctttcccttttttctcttcattcttttacttctcttcttcttcc

SEQ ID NO: 94492 - DNA, 255 bp, Oryza sativa
  Clone ID: PAT_MRT4530_92778C.1
atctggagaaaaaattttacttagtgattcaaccaatttttcagatttctgaccgaataaatggctgctggtacagctggacatcatggactcacccgagtcccggatcgtccacgtctcaaactacgtggagtacagtattactgtactactcctagctggcaactacgcacgcgctcgacgtcacacctaattagccacaccaaaaaaaaaaaaacaccctgctgctgctgctaatgaacgtgcgtgacgtgc

SEQ ID NO: 94493 - DNA, 208 bp, Oryza sativa
  Clone ID: PAT_MRT4530_92779C.1
gaagtaagcaaaagggggagagagacaagtctgacagggagatgaaagaaatcagacggcaaccttcttagcctcctcctctccactagcttcttttcccttgccatgagttccctagtagaccaggactagcaggcaagagcaagcagctggaagagtattagcagcatgcagctctagagaccacaggcacagaggaggggagagc

SEQ ID NO: 94494 - DNA, 418 bp, Oryza sativa
  Clone ID: PAT_MRT4530_9277C.1
tcaaatgttgaggtggagaaagcttgggggattttgtatcatacaatatacaattgcacagatggaattgcggatcataataacgattacatagttgaatttccagacatcagtccaaattcatttagctctgatgtttcgaaacgaaaggctatttcagaggtgaagaaacataggaggtttgtcttaagcgaggtgtctgcaagcctaccacatccacatctatggtattccacaaaggaggctatcaaagcccttgaattatttcttaatgctggaaacgatctttcaaaaagtttgacatataggtatgaccttgttgacctgacaaggcaatcactgtcgaaattagcaaatgaagtgtaccttgatgccatgaatgcttaccgaaagaaagattcaaatggtctaaactttt

SEQ ID NO: 94495 - DNA, 186 bp, Oryza sativa
  Clone ID: PAT_MRT4530_92780C.1
atggcggcgaagttcatggtcggcgctggggctgcggcggcggcgttcatggcgagcgcacgtgcacaaaccgaagcggcagcaagagttgggacacctgcaggtgggctggctactcggaagtctgcaaaaaaggctgctggacgtaacgtggggaatatatatagggaagatgtgttcaggtga

SEQ ID NO: 94496 - DNA, 1529 bp, Oryza sativa
  Clone ID: PAT_MRT4530_92781C.1
gagcgaaaaattgcatttcacaaaaagggccatcagagaaaagatacccacatactactatatgtcaatctatgtgagaatcaaacctctgagagcctgtttgtgtgaggactggtgataagttcgattttcaaattacatgacatcgaacaaatacccctttcatccataatagagccagtgttacatatggagttaaccatcaagtcgaattattagcatagtactttttctgaacaaaaaggaaaactgtggtggaacatgtccattgttccggtgtaaagcaaagaaacaatcggatgccaaacgtgtggcaactaaaatcagcagtcaagctcccacagaatctttgcggcatcttcaggaaaaactggattaatgtagcatccgcttccaatctcaaatccaccgattaaactcaactggggcactatctgaaggaaccaatgtgtgtaaggaagacaggatgatgagactccaaatggtgcgctgtgtatcataaagttgaatggagggtcgttgagctgcttagacaactttgccagcatggtcctcaataaagacccaagatccagtgccgtatccttgtctatttcatggaaataggaactatgctgtctgggaataatccatatctcaaaaggatacgatgctgcaaaagggacaattgcagaaaaattgtgtgtttcacggaccaaaatatccttggactggaactcacaaaggctgcacttccccaatctctcgaaaacctccttcatgcagttaagccgggtggtaacagagggagggacaaagggagttcctaacatctggctatgtgagtgtgccattgaggccccagcagatgcaccatggttcttaaataccattcctgtttcctctggtggtaagtaccaaccatccatgaggagggattcctcaaactttgcctcaatgactgggcatgcatggctgccagtttccaaaattaccatgttttccaggtcaggcaaggggctcttcaccgcagggtgctccatgagctgccgcacgcggcgcgcgtacgcgagcagcacgtcgccgaccccggccgcgtccaggtcccacagccgcacgtcgtggcgcggcgtctcgatgaccacgtcgtggaacccgaaccccaccacggcgcgctccccgggcgtcgcctccccctcccccgcctcctccggcgccggcggctcggcgtcgcgccgcagcgccgggtacaggttctcgatgacgcggatccgccagggcgacgcgtcgggcggcgccggcacgcggaagatctccggcgcgcactccgactcgcggccctggcagaaggggcaggacggcttgggggcgccggcggcggcgccggcgccggggctagggttggcgggggcgtgcgacttgaggtcggtggggcgccgcgagcgcgccggcgagaagacgacccagcggccgaacacggcgtcgcggcgcgcctccgatgttctcgaagcttccgccgccatcgccggacgcgtgggcggacgcgtggg

SEQ ID NO: 94497 - DNA, 370 bp, Oryza sativa
  Clone ID: PAT_MRT4530_92782C.1
atctaaaggcaaaaccaatatattgatgaaaacactggacggcaactcctgtgatgctcatacattctgaagctatcgtaatacacaatcgtgacatcctacatggcgcatacacatgagcatataagtgattgggctagtttacaaaatggcaatatcctcgacagaaagcgagtgaaaaacaaggaaacgaatcaacccaccccttgtccaacaacttgtatgacgactggcgcttcacatcccagttgaaagacgcgctgcctatcctttgcgcgccaagcttcgcctgagctgcctttgaccctcgacccctacctgatgaagctagaggtctagcttttggtgatgtgggggcgctcttatccct

SEQ ID NO: 94498 - DNA, 4774 bp, Oryza sativa
  Clone ID: PAT_MRT4530_92783C.1
atgtcgacggagctcgatcgtcgcggctcatcggatcggctccgcgagcgggtcaagttcaggttctccggcttccgcgccgttcaggttccagtagtatcagacaggctgatgctttcaatagttgcagtggacactggaaaaacaattgccaagtccactaaagccgctgcacttagtggagcctgtcaatggcctgattccatcctggaatcaatttggttttcccaagatcaagtgtctgaagaatttcaggagtgtcagtgcaggtttgttgtttccatgggatcaacaaacagtggtatcctcggggaagttttcctaaatctgactaactatcttagttcattagaatctactgctatctctttgccactgaagagatgcgattctggaacaattctacagcttaacattcaatgtcttggagcaaagtctaaaacaagtcgaaccaatgatgatacagagtgcacatcagatggctttgacagcatgctgaataggactactcattctttgtcaggaaatgacttaggtggttcttatcaagatgaagctggaaatagggttgcaagtttgtcagcatcaaggtcttattctggagatagtaccactgatagaacaaacatgcctcctagtgacaacttgaatgatgaattgaatacgcagaggcataattttgctagtccagatgccatccatgttagtgcagatcatgttgacgaggccagtagatcaaacaattcatcattcagttctcaaactccatctcgaaacatgctgcagggtaataatgcacaaccatctgcaagtgatctttctcagttatcatcaggggtatctcatgcatccaaagatgtccttgaaaatgctgaagagacaattgatgaactacgtggtgaggcaaaaatgtggcagaggaaaactcgcaaactcaaacaaggtctagagacattgaagaaagtaagtactgacaaatctaagcaacgttctgagcaagatctggaaaaaatgtggcagagaaaaactcgcaaactgaaacaaggtctagagacattgaagaaagaatgtgctgacaaatctaagcaacagtctgagctagagctggaactttctatttcaatttctgagcgagattccctaaggcaagaaattgaagaactgaaacgttctttggaagaggtaactgcacgccaaactatttcacgaagtcccagatctggggatgcgattgagctccagaaagaagtggaagatgatgtgcagtttctgaaagaatcgaatgcaagcttagcaacccaactgaataaggcccaagaggccaacatagagcttgtttctatccttcaagaattggaagaaacaatagaagttcagagagcggagatttctaacctttctcatacaagtgatttgatagatcatgaggtctccccaaataatctgttaattcaagaagatgtggaatgggctagaaaagtgtcactaaaagaagatgaaattctgatgttgagggaaaaaatagatcgtatgcttcatgtagaaaatccaaacggtgaaggttctggtgctatttatcttgaattggaaaaggaaaatgatttcttgaaggtcaaaatacaagaactcgagaaggactgttctgaattaactgatgaaaatctggagcttatatacaagttgaaagaagtaagtgaagtagccaaaggagaggatccttctgttcctaacagtgaggaagtgtccagtgagggtgatctttctgacagattgacatctaaggtaaaatatctagagacaaaatgtgctgatcttgagttgaagttgattagttttaggtctgagtcgagtgaactagaagaaaagctccaaaaaagccaagaggagctaaaagacagaattcttgaactatctgatctgagagataagcttagtggttttcacgccttggagatggaggaaggagacactgatagtgcaaaatcttacaaattgaaaagtgaaaaactcgatgaaaatgataacaaaaccgaattagatgctctgaggagtacagttctactaaaagaacaggaaatagagagcttgcagcattctaaaaaggaaatggagagcttcatatctgaaattatgaacgagaagaataaattggaggaacttttagaagaatcacttaaagaatgtagcatcactgcagcttgcttggatgaaatgcgagaagaactcctccttctcaccagcagcatagattcccatgtttccaccaacaacgttctcgaaacaaagattacggagcttgaaagctgcaaagttaatctagagttgcatatatcaaagctggaacatgaaaatgtagagctgtcagagttcatatctggactagagtctcagttgacctatctggcaaatgaaaaggagttaagcatgctacaaatggatgagtctagatcacttatcacaaaccttaaagatgaactagaacaagtggaagctcaaaaggtggaactgaagctacaaatggatgagtctagatcacttatcacaaaccttaaagacgaactagaacaagtggaagctcaaaaggtggaactgaagctacaaatggatgagtctagatcacttatcacaaaccttaaagatgaactagaacaagtggaagctcaaaaggtggaattgaaggaaaaccagctagaatcacacagaaggttgtcagaagtacaagaggattcagaggccctaagaaggtcaaatgcaaaactgcaggctacagttgatcatgttgttgaagaatgcaaatctctgcagactctgacagctgatctaaagaagcagaagctggaagtgcatgggtatgcttcacatctggagcaggaattggagcagtcaaaaagaaagaccatggatttctgcaaaacgttggagtccctagaggcaaaactttcttcacttcaggaagacatatctttgaaagagcaatcgttgctttcagagctggagaatatattccaagagcacaaggagcatgaagaaaggatagatcgtgtacatttacttttaaacaagattgagaaagaaaagactgttgaattacatttcccccgctttcttgagagggaggttattagtcttactgcacagttatcttcaacagaagaggagcgagaaagttccacattggataccatccgtgaggtttccatccttcgagcagacaaggctaaacttgaggctaatcttgaagatgtcaatgcacagatgatacattacgagtctcaattggaagatctgcgggagtctaaaaccaagattaaagacctagttgactcacttaatgcatccaaacagaatgaggaaatgctcactacagatgttgacaatatgagaagatcgatagaagctgctagatccaatgaagataacttaaggaaaactttgtgtgaactagaattgaaatccaaatccagtgattatgagaaacagcagataattgaagaaatttctgtactgaaaatccaggtccacaaaatagcaggcctccaagatgaagttcttacattacaaagttctcttgatgaagctaagtttgagaaagggaagttggaagggctgattcaatcattgtctgaagaatgtgaagaactaaaggcacaaaaggggatgttaacagacaaggtctcatgtatgcaggacactttgaatgctgccaatgaaggaaaacaaattgaaatctctgcacaaacaaagcttgtgatgctaggagatgaaccaccagttaaggaaacatcagatgtacttgaagctgagctaaaaagtgaactaagtattatcaggggagctaacagtgaataccaacaaaaaatatattctcttcaagaggaaaatgaggatctcacaaggagaaatcagcttatggagaaggagcttgacctgaagacaagccaaaacaaagatgaaaataccaataaacaggtgagcctccaagatgaagttcttatgttacaaagttctcttgatgaagctaagtttgaaaacgggaagttggaagggctacttcaatcattatctgaagaatgtgaagaactaaaggcacaaaaggggatgttaacagacaaggtctcatgtatgcaggacactttgaatgctgccaatgaaggaaaacaaattgaaatctctgcacaaacaaagcttgtgatgctaggagatgaaccaccagttaaggaaacatcagatgtacttgaagctgagctaaaaagtgaactaagtattatcaggggagctaacagtgaataccaacaaaaaatacattctcttcaaaaggaaaatgaggatctcacaaggagaaatcagcttatggagaaggagcttgacctgaagacaagccaaaacaaagatgaaaataccaataaacagggtaatgatgctaatgaaaatggagattctccagttaatgaggtcccagagcttcagtcaaagatccaattactggaaactaggcttgctgaggcactggaggaaaataaattgtatagaggacaactgaagagtccaatgccagaggggaaatctgctagtaaggatggcaaagagaatgatgatgccaagatatcacaactagagtcagagctgaaagatatgcaagaacggttactcaacgtgagcttgcagtatgcagaagtagaggcgcagcgtgaagaattagtaatggagctcagaacagcgaatgcaaaaaggggacggtggttctagtgagatagggaatcggtgggtgccataa

SEQ ID NO: 94499 - DNA, 1803 bp, Oryza sativa
  Clone ID: PAT_MRT4530_92784C.1
atggcagattcccaccattgctgctggttcttgctgctgctcctgctcctcgccgcgtggtgcgtgcgcggagaggccgaggtcgccaatggcggccaccaggatctccctccgctcctctccttcaaatcctacaacccagccgccgccgcgctggagagctgggtcggcggcgacccgtgctccggcgcatggatcggggtgaggtgcagcaggggcagggtggtcggggtgttcctcgacaacgcctcgctcgtcggcggcttggcccccctcctcgggctcgcccgcctcggcgtgctcgccgtcaggaggaactcgctgtccggtcgtctccctcctctcgacaactccaccagcccgaggctgaggcacctgctcgtctcacacaaccagctcaccggaggcctccgcgtctcgctgccttctctggtcaccctgagagcggagcacaacggcttccatggcgacctgcgagctctcagcgtcccgatggtgaggagcttcaatgtttcacggaacatgctggatggggagatctccggcgatctttccaggttcccgagctcgtcttttggcgggaatcttggcctctgtggcctgcctcttccgagatgtgttcatgcttacaatgcgttaggagatagtgtcggacaatctcctagtgcggcaatggaggaggctagtagtggtggtagtaatggaggcttgagtaagctcagtgtgacggcgctcatggcgaccggcattggcaacgcggcgctcatggtgatctctgtggctatctctgtagccatgttcgtctacatgagaaggaagctccggtcatggaagggtgcttccgatgcggcgctgagctttgaggaggaagacaaggtgaggaatcgggaggagaaggggcagaagagcaatggtggtggactcgtctgcttcgatggcggcgaggagctgaggctggagagcctgctcaaggcgtcggcggaggtgctcggcaagggcgtgtccgggagcacgtacaaggcggtgctggaggacggcatcgtggtggccgtcaagcgcctcagcgcgctgcagttccccggccggagcaaggcgttcgaccgccacatgcggctcgccggccggctccgccaccgccacgtcgtcagcctcaggggctactgcaactccaacggcgagcggctgctcgtctacgactacctccccaacggcagcctccagtccctcctgcacggcagcaacggaggcggcggcggcgggaggagcctggactgggcggcgaggaaggccatcctgttcggcgcggcgcaggggctgaactacatccacacgttcccggcgaggccggcgctggtgcacgcgaacgtgaagccgtccaacatcctcctggacgagcacggcgcggcgtgcgtctccgagtgcggggtcatgcgctacgccgccaacatccagcagtccatcccgcagccgccgcggtgcccgccggggctgttcctggaccgggcggcggcggcggcgggcggaggaggctggcacgggtacgcggcgccggagctggcgtccggcgccggcgccgcgggcgcgcgcgcgacgcaggagtccgacgtgtacagcttcgggatggtgctcctggaggtggtgaccgccgacaatgccggggacggcaacggcggcggcggcggcgatggcggggaggatgagacgatggggtgggtcaagatcggcatgctgtgcaccgccgaggcgccggaggagaggcccaggatggcgcaggtgctcgccatgatgggcgagttcatgtga

SEQ ID NO: 94500 - DNA, 3273 bp, Oryza sativa
  Clone ID: PAT_MRT4530_92785C.1
atgggagccaagaagcataccttgcaagtgcttccatggctactgctctttgcgcagcacactgcagccagtgcctgcgactgtgctaacaccacagacggggcagacagacagggtgcaatgaagctaaagctcattgccattgcatccatccttgcagctggggcggctggtgtcttggtgccagtgattggccgctccatggctgcgctgcgccctgatggtgacatcttctttgctgtcaaggcatttgcagccggcgtcatccttgccactggcatggtgcacattcttccagcggcgtttgatgcgctcacatctccatgcctcaaaaggggtggtggggataggaatcccttcccctttgcgggccttgtttcaatgtctgctgcagtgtccacaatggtggtggactcattggctgctggatactatcaccggtctcaattcaggaaggcacgcccagttgacaacatcaacgtacacaagcatgctggagacgagagggctgaacatgcacaacacataaatgcgcacacacatggaggacatacacattcacatggtgatatagtggtctgtggctcaccagaggagggttcagtagctgaatcaattcgacataaggttcttgagctgggaatcttggtgcattcagttatcattggagtatccttaggtgcatctgtgaggccatctactatcaggccactagttggtgccctcagcttccaccagttctttgaaggtgtaggtttgggtggttgcattgttcaggctaattttaaggtaagggcaaccgtcattatggcaatatttttctccctgactgcacctgtgggcatcgtgctaggaattgcaatttcatcgagctacaatgtgcatagctcaactgccttcgtcgttgaaggagtcttcaactcagcctcagcaggaattttgatctacatgtccctagttgaccttctagcaacagatttcaataacccgaagctacagattaatacaaagcttcagctcatggcataccttgcacttttcctaggtgctggactgattcgcagagagccccacggcggcggcagcgtcatcgcgatgctactccgcgtcggcctctcgcgccgccgcctcacgacggcggcgctgcccctctcgatcgccgcgcgggggcggcggctctcgacggggccttcgccgccgccgcctccgccggcggcggagtggaccgacacggtggactacctggacgagtcgggggaggtcctctcgtcggcgccgggggcgcgcgccgcggtgccgggcgccgacgcgaccatcctgtccggctcctcggcccacccgctcccgcgccccgcggcggcggcgcggctggcggcgctcgcgctccgcttccgctcggggccatccctctccgccgcgctctccgcgctgccgtcccagcccgatccggctctcctcctcctcgccgcgtcctccctccccgcctccgaccccaccccgctcctcgccctcgtcgcctgggcgcgcgtccagccatgggtcctggagacgcacgcctacaatgccctcctctcgctgctgctcaccaggggcctcgccttcaaggcctttgaggtgctcgacgaaatgtcatcgtcggggtgcgcgctcgacgagggaacctacgagctcgtggtgccagcccttgcgcgcgccgggaggatagatgccgcacgcaagatgtttgatgaaatgaggaagagggaggggattgggcgggcgtcggctgggatgtacggcgtgctggtggacgtgctggcaaaagcagggaggctcgatgctgctatggggatgtacagggagatggtggcggtggggcaccgtgcaagcccggcggtgagcacagccgtggtggaggggctggtgagggctgggaagttggatgcagggatggagctctgggaggagatgaggaggggagggctccgtccaagctttggtctgtacaccatggttgtcgaggcgaatgcacggtccgggaggttggatgttgccacacagttgtttggtgatatggagaagtccggcttcttccctacgccagcgacatacgcttgtctggttgagatgcatgcttctgcagggcaggtggatgctgctatgcggttgtaccactcgatggcaaatgctggacaacggccggggcttagcacatttacagcattgctgatgatgttggcgaataagaggatgctggatttggctgcaaaggtattgctggagatgaaggcatcagggttcccgatagaggtgaccgccagcgacctcctgatgatttacatcaaggaagggtcgacggagcttgcactccggtggcttcggttcatgggctccgctggcataaggaccaacaatttcatcataaggcagctattcgagtcatgtatgaagacggggctgtatgactcagcacggccattgctcgagacatatgtcgcgggggcagcaaaggtggacttgatactctacacttcgatccttgcacatttggtgcggtgccaggatgagggacgcgagcgggcaatcatggacatcctgagtgtaagcaagcacaaggcacatgacttcatgtgcgggctgttcaccgggcctgagcagcgcaagaagccagtgctctcgttcgtccgggagttcttccagggcatcgactacgacaatgaggagagtgcggcaaggtacttcgtgaatgtgcttctcaactatttagttctcatggggcagatgaaccgtgcccgctgtatctggaaggtcgcctacgagaataagctgtttgccaaggcgatcgtcttcgaccagcacatcgcctggtcactggacgtcagaaacctctccgttggcgcagcgctagtggcaaccgtgcacacgctgcaccggttcaggaagcgtatgctctactatggggtggtgccgcgccgcatcaagctagtgactggaccaacgctcaagatggtggtggcgcaggtgctggcgtcgctggagtccccctttgaggtgagcaaggtggtgctgcgggcgccaggtgactcggtgctcgagtggttcaagaagccgatcgtgcagcagttcctgctcaacgagataccatccaaggctgacgtcctgatgcacaggctcaacgtgatgttcccaagttcggcgccggagagtgagaacgttacccttgtccctgtgtacaagtacagtaatgctttattgcaaaatgcaaatggctcgttcttggataggagtcagtga

SEQ ID NO: 94501 - DNA, 497 bp, Oryza sativa
  Clone ID: PAT_MRT4530_92786C.1
tatgttgtgaagttagtataatgttttgatgtttctagatgtaactttatactgactgctcctctatatattagtttgttacttagtggaggatataggatataggacggatctaggacgccggtggaatgaccgatgaaccagctgtacatcagcctaggttgaaagagacctattgctggatttgctggttcagattatgatagcaaacgtcgtacccctccaccttctgttcatggaacttgattcaattagttttacgaacaattgagtccatgcccaataagctcaggtcttcggcgttttccacacttgctgcttgcttgattctacatgctcgacacaaggaatttcactgcgggaactgaggaaatggacaatcaacttaataaacattatttaaattttgtctacttatggtgctttgacctaaattccttatctgtagtgacaaaatgtgtgcaagctttctgagcttgtactccatattattatcg

SEQ ID NO: 94502 - DNA, 3270 bp, Oryza sativa
  Clone ID: PAT_MRT4530_92787C.1
ttactgactcctatccaagcaagctccattagcattttgtattaaagcattaatgtccttgagctcaggtacaaggttaatgttctcacccagctagcaaccgacaagccaaggcgacggcaatggcgccgacgacgagggccacggcggcggcgcatcacgatgagccacacagtgccatacgaggaaggcggtggggctcagcagcgcacgacgactccggccaccgaacacccatccgcctctcgcgcaggaaaactgggagggggcgacgccggtatcaagcgtgctgtgctgtgggtatttctctgtctgagcctagcacaccaccaacaatgagtggagaaacgctgtctgacccagttgtttccagggcacgcgatccccggggtcggcgccgaggtggcggaagaacgcgaccaggtccaagggcacggacggggccaaggggaatgcgcttggtcaacacttgcgccggtcgggcgacctgccaggtggtctgagaacattgacaggcactgccaggagtgcgttgcccccaaccccgtcgtcgtggaagccggtgccagctacgccggctgcctcccattgttgctggtgatgctcccgctcttcctaggcaacttgctggatgcgctgccctgcgacgtcgaagcgccggcactggacgccaccttccctgtgctcgcctccgctcaggaggtctgtgctcacccgctcgcgtccctattccggccaccgcggcaattgtgcaacgctgttagtgtagagtagcaagtccacatgtccttcacccgcgacgtgtcgctcgagaactggccgtgctgagtcatacagccccgtcttcatacatgactcgaatagctgccttatgatgaaattgttggtccttatgccagcggagcccatgaaccgaagccaccggagtgcaagctccgtcgacccttccttgatgtaaatcatcaggaggtcgctggcggtcacctctatcgggaaccctgatgccttcatctccagcaatacctttgcagccaaatccagcatcctcttattcgccaacatcatcagcaatgctgtaaatgtgctaagccccggccgttgtccagcatttgccatcgagtggtacaaccgcatagcagcatccacctgcccaaacaactgtgtggcaacatccaacctcccggaccgtgcattcgcctcgacaaccatggtgtacagaccaaagcttggacggagccctcccctcctcatctcctcccagagctccatccctgcatccaacttcccagccctcaccagcccctccaccacggctgtgctcaccgccgggcttgcacggtgccccaccgccaccatctccctgtacatccccatagcagcatcgagcctccctgcttttgccagcacgtccaccagcacgccgtacatcccagccgacgcccgcccaatcccctccctcttcctcatttcatcaaacatcttgcgtgcggcatctatcctcccggcgcgcgcaagggctggcaccacgagctcgtaggttccctcgtcgagcgcgcaccccgacgatgacatttcgtcgagcacctcaaaggccttgaaggcgaggcccctggtgagcagcagcgagaggagggcattgtaggcgtgcgtctccaggaccctgaaacccgcgtcgcggaggcgcttgaagcagaagaaggcgggctcgaggaggccatgggtggcgagcgcggagagaacggcgttgagggtcttggggaaggcggcggggtcggggagggcgagggtatcgtcgaagagggagaggagttcggaggagtgggtggccggggcgaggcgggcggcgaggagggaggagaggtcgtcggaggggacgaaccatggctggacgcgcgcccaggcgacgagggcgaggagcggggtggggtcggaggcggggagggaggacgcggcgaggaggaggagagccggatcgggctgggacggcagcgcggagagcgcggcggagagggatggccccgagcggaagcggagcgcgagcgccgccagccgcgccgccgccgcggggcgcgggagcgggtgggccgaggagccggacaggatggtcgcgtcggcgcccggcaccgcggcgcgcgcccccggcgccgacgagaggacctcccccgactcgtccaggtagtccaccgtgtcggtccactccgccgccggcggaggcggcggcggcgaaggccccgtcgagagccgccgcccccgcgcggcgatcgagaggggcagcgccgccgtcgtgaggcggcggcgcgagaggccgacgcggagtagcatcgcgatgacgctgccgccgccgtggggctctctgcgaatcagtccagcacctaggaaaagtgcaaggtatgccatgagctgaagctttgtattaatctgtagcttcgggttattgaaatctgttgctagaaggtcaactagggacatgtagatcaaaattcctgctgaggctgagttgaagactccttcaacgacgaaggcagttgagctatgcacattgtagctcgatgaaattgcaattcctagcacgatgcccacaggtgcagtcagggagaaaaatattgccataatgacggttgcccttaccttaaaattagcctgaacaatgcaaccacccaaacctacaccttcaaagaactggtggaagctgagggcaccaactagtggcctgatagtagatggcctcacagatgcacctaaggatactccaatgataactgaatgcaccaagattcccagctcaagaacgttgatgttgtcaactgggcgtgccttcctgaattgagaccggtgatagtatccagcagccaatgagtccaccaccattgtggacactgcagcagacattgaaacaaggcccgcaaaggggaagggattcctatccccaccaccccttttgaggcatggagatgtgagcgcatcaaacgccgctggaagaatgtgcaccatgccagtggcaaggatgacgccggctgcaaatgccttgacagcaaagaagatgtcaccatcagggcgcagcgcagccatggagcggccaatcactggcaccaagacaccagccgccccagctgcaaggatggatgcaatggcaatgagctttagcttcattgcaccctgtctgtctgccccgtctgtggtgttagcacagtcgcaggcactggctgcagtgtgctgcgcaaagagcagtagccatggaagcacttgcaaggtatgcttcttggctcccat

SEQ ID NO: 94503 - DNA, 466 bp, Oryza sativa
  Clone ID: PAT_MRT4530_92788C.1
tcggttctctgggaggagatgaggaggggagggctccgtccaagctttggtctgtacaccatggttgtcgaggcgaatgcacggtccgggaggttggatgttgccacacagttgtttggtgatatggagaagtccggcttcttccctacgccagcgacatacgcttgtctggttgagatgcatgcttctgcagggcaggtggatgctgctatgcggttgtaccactcgatggcaaatgctggacaacggccggggcttagcacatttacagcattgctgatgatgttggcgaataagaggatgctggatttggctgcaaaggtattgctggagatgaaggcatcagggttcccgatagaggtgaccgccagcgacctcctgatgatttacatcaaggaagggtcgacggagcttgcactccggtggcttcggttcatgggctccggtggcataaggaccaacaatt

SEQ ID NO: 94504 - DNA, 300 bp, Oryza sativa
  Clone ID: PAT_MRT4530_92789C.1
atggtcggcgatagatttgatcgatgcaggactacagagcctgaaatcgttggcatcttactccaaaagggcagtggaaaagagaaaagaacaagaccgcagctagatattgtcgcacaagtgcagcagagtcgaaaatccagcaagaaagcttgctatcaaggattcagtgaaaagctcctgtccaaatgtttggtggtagagttgttcttgtacagaaacagagaaaagacagacgacgttgtgatcgtttctgctcttaatcggaagccaatggaggagatagggatccctaattaa

SEQ ID NO: 94505 - DNA, 2559 bp, Oryza sativa
  Clone ID: PAT_MRT4530_9278C.1
ttatggcagtacattaatcatttcctgggagaggatatgtgagacgccaattaaggtgggcacacccacttttactatgatataaaacctgccatcaccgcttacagtaacaagtacaggttctttatgcaaccactgcatcgcattcaccccctgatcaccctcatcaacatggccgggcagttgacttgtatattctgcagtaggcatctgcttgccgtggctcaggcaatgcaaaggccggaaaaaacgcatgtctttacttcgtgaaacatccctgctttggtttaatggaactattcttgtgtcccaaaccagtgtgttgtttgatgtgctagaagccgaaaaataggtaccacagttgctaaatgaaacagatgtgacctcacaaccaggtcccactgacaaatgattaattgcagaacaagcacggatatcaaaaagaccaatagtcccatcaccagaacctgtgataatggtgttgccagcagggttggttttaagggaagtaatataagaatcactggcagagaaagataggtacgattctggagactcaatatcccacaattgtaccacagctgaacctccatattcacaatcacttccacatgctagaagattttcactacagaactccattgtatcaattgaaggatagaccatatcctgggacctcaagtttgaatttagatcagaagcgagttctcctctcaaagcattccacagtagaagcttaccatcaccttttgctccactagtgacaacaagacaggattgccatttattaacagccatagcattaattttttgagtatgtcccactgaattgtgatcgtcaccacctaaggtatagaggcaagaccctgtaatgcaatcccatacctttaatagattagaaccacaagatactatgcttgctcctttcaccgcaaatgcggtagcctggatcttggtattgtggcctctaagttgagtagctcttccagaaagaagattgaaaagcaacaattcattcggtgcctcattagagcaagagacaagctgaggcaacccttctggatgaaactttacatcaagaactttgcgtacaccttgcctgtcatgaggctgagcagaaggagcgcttgacgtataagcacatgaagtcggacaccaagataggtaactttgtttcacgacatgtacagcaggaccttcaaactggaccgcaggtgaattccatccttcaagaaaggggctccatctttcacaattccttccagcgtgacctccatttgaacaagtttgagaccagttggcaccagcttcacgcccttctagacagaacagtatgtttttcttaatggatctttgtggaaacgatggattaacatgtcccttccaaatatcataacttcttgcaccattgctatgtgaactagaattttgctcatgctgcaaagttcctgttgtagcttcactataacaccaagcaggtgttacaattatagggttcctttttctcttctggccaaattcattgtctgctgctccttggtttggctgttcgttgcaataaatcttcgtcacctctgtaggggttgatgtgcttgcagtagcagccccttcttgcatacttacattagtctctggcttctgaaaatctgtttctttaatagcaacagtgcggcgattctttaacaacacactggtcaactgattctgcaagtctgtcaaaagttcatatttaaggaaagcttccttttttttggatagtgacatcttcttgtcccttataggagcatcgccgcccacaaatctgcttgcactaacacctgtcactggaggtagagatttcctcacagttggtgtgctttcttgtggggtaactggagaagcactcgctgggaccgtggctctagccgcagaaagttgtagactcttcggtatcttccccctcttcttcagaagcttcaagtgcatcctctgggtgtagtgtatcaaatgatattttgaatgcttctcaaccaacctgtccattatctgtgggtttgatgtaagccactccgatatctcctttgatgtaactagcgactctagctcaagagattccaaccacttgtacacaggcttccaaagatcagtccgctggaacctatacgggaaagcactttggtctgcatctaaaacctggtcgccgcggagggcgaggaggcgctggtggagctgggagcgggggagggaggggagctcggggcggtggacgtcgatgtaggcgtcgacctcggcctcggtgggcgggcggccgtcggggaaggactcgagccaggcgcgcgcggcgatctcccatgggtgcgggggccgcgaggaggagaaggtgggcggcggcgcggcggggggagcgggcgggttggggggcgtggccggcgtggctgtggcggtggcgggcgtggcggtggcggtggcggtggcggcggcgggggtggacggggagtggaacggcgccgggagcgggggcgggagcggcgcgtccggcgggagcgcgcggagcgggaggatggcctgcggctccggcat

SEQ ID NO: 94506 - DNA, 213 bp, Oryza sativa
  Clone ID: PAT_MRT4530_92790C.1
atggaggcagaggacgggaagagtaggaagaagacgaagctgttttgtcttaatgagagccataggaaggtccgcatcacgggtggtggcggcgccgtggaggcgacggtggtggacgagtgcgactcccggcgcggctgcaaggacgacgtcgtcgactcgtcgccggccgtgtggcgcgcgatgggacgagtatactatgctattctctga

SEQ ID NO: 94507 - DNA, 656 bp, Oryza sativa
  Clone ID: PAT_MRT4530_92791C.1
gaattatcgacaggtcactggctgacattcttttatttctttcgttctacgaagtccactcgttaaatacattttacattcgttttactttttttctacaacatgcgtttctcttccactcttagtttggcgactctcgctacctctaccgccgcccaatccttcaactcagccaagtctgaccttgatggttcagtatggcaatctgttgcgtccgtccaaactcgatcttggagcagcatccctcgtaaccgtcccacaaagcgccagtccggatggaaccccccttcgaacctcgccggggctctcaaggaagtctgggaccacgaagtcaaaacttacagcgatgctttgggattcaagaactacggctgggatcaagttattgctggaaagggccagctcaacgtctgtgtccgatgggagtcgactgcttctgtaacagctgagcaacgtaccaaggttgccactgctctgcaggactcgtataccagctggatgaagtgggtttctggatgggacaactttccttacgaggacgtcaagatcaatgtcgtcggttgggctgtcaaggataagagtctcctccagggaccgaccaccggcctcgacatctacacagacaccgacgcagagggggatcccccaatgctctg

SEQ ID NO: 94508 - DNA, 804 bp, Oryza sativa
  Clone ID: PAT_MRT4530_92792C.1
atgacgcaggagtacccagcagtcttggcgacattcctcctcgtcttcttcacgacggtcggctgcaatctgattcggtctctgaccaagagaatcctgcgcaacgatccggtctggtacagctatgctgcggaactcatctccacgttccaactggtcgcaggcgtcatagagggcgacatcatattggaggagtacggcctctactggtacgctctctatctctggattctcttcgtgtctgagagccttacgttcgacggcgactccacagccaacacctgtatgatctggcagtccatgctcaaaggtgactttagccctggggcggcactatccaagatatgccttcaggtggtcggagggcaactagcatatccctacgtgcgcttcatgtggaaggtggtaccgaccaatcgtcatcagaggaaggtctcgcacctgctacaggtctactgtgcttctgcattgaacgtctctatcctggaaggtggctttgcagaagctttggccaccctgacctatttcatgaccctcaactttcagccaaaaggaaagtacagtggaatgtttgctgatgccgcaatccaggttttgatcatcgtcacaggtttggagtggactgggatgatgtttaaccctgccctggccgcaggaatcaccttgaactgtggtaaccaaagcctcttggagcacctcttggtctactgggctgcaccgctggcgaccgtccctctcgctagggccatagcaggcgccttcaacaggccaacaccagcggtaccccctaccaaagaggactaa

SEQ ID NO: 94509 - DNA, 207 bp, Oryza sativa
  Clone ID: PAT_MRT4530_92793C.1
atggcgaacgcgcatcccatggtcccgttggtgctccgcaacctcctcccgctcctccgcgacgtcgacaccgggcagttcgccctcgacgtcggccacgccggatgcgcgacaacgccgcccggtcttgttttgctgggggccctggctcgcgcgagccaggcgcctggtgccgggggcgttgacttcttgggcggccggggctga

SEQ ID NO: 94510 - DNA, 567 bp, Oryza sativa
  Clone ID: PAT_MRT4530_92794C.1
atgtcgtcgatcggcgccggcgcaggaggagccgtggtgggggcggccgtggcggcggtggcggtgggcggcggggcgccgccgcacgtcctcgccgtggacgacagctcggtcgaccgcgccgtcatcgccggcatcctccggagctcccggtttcgtgtgacggctgtggatagcgggaagagggccctggaactgctaggctcggttgcggtgatatgcagccgcaattttctcatgttcctttggctcgctcatcatcttgcaggaaccaaatgtgagcatgataatcacggactactggatgccggagatgacgggatacgagctcctgaagaaagtcaaggagtcatccaagctgaagaagatccccgtggtgatcatgtcctcggagaatgtgccaacaagaatcagcagattaccgagcacttaaccattgttcttccatctttgctctgttcgattggtttattaaccagatgccttgaggaaggcgcggaggatttcttggtgaagcccgtccggccatccgacgtgtcgcggctcttcagccgcgtgctaccatga

SEQ ID NO: 94511 - DNA, 1785 bp, Oryza sativa
  Clone ID: PAT_MRT4530_92795C.1
atccctccatctcaaacaatagagcgtatttttgttttgttaggacagggaatactctattatgatataattctcacaaaattaatatgctttgcacgactgatcattgttttacatggcattgatccacaagtaaagtatgtatgaagaaaagaagctatgtatcaacagctcattcatgtttctgtgcccactgagatcaccacctcaccgtcagtcccatgatcccatcctgaaacttggacaggcttaacaacagtcagtcagcagaaggcagtgacgtgaagccgtcaactgggcaagagaaaaatcaccatctagatcatggcgtccaagcaaggtagaccgcagacatctctcttcaaaactgatgccccgcacattcctggcggctacacactgaggagaacatcaccctcgtcgaccatgttcatatgcaaagagctcctagatctggtgcaactttagaatcgtgatcccggatggctggtgtttcatcttgttctttcttcttttgcttcttccccttctggcctttcccttggccacctttggtctttggaggttctctcgatggtgcagttgtttttggaggttctctcgatgctacagttgtggctaaattacaagaaggcttgtgcttcctagcagatccacaagagcattccttggtttttgactttccctttttagaatgtgaactgttgtgtttctgagctgtttcgcctttgctagaacagtccttttcttctttcttgtgttcatccagttgactctcatcctgcttcatgctaagctcatcctctatggtctgtacatactctgttgagctttctataacaccgttcatgcttcttggtactgttatcatattttgatgatcatcacatgcatagtccagataaggatctccatccgcatcatcagaacccagtattagttgctcagctaacatgtactctatagcagcatcaatgtcaccatccatgtctttcaaaacctgttcaactgcagcgatattagaacatccagttccagccatcaccaatttaaccgatatatgatcatactttgatctgtctgaagatttcttcaggtcctttgcttttgtttgagcattattgcttgtgctagctacattggcatctgccttgataataactggcattgcaggaccttgacatggatcttccctcagtctgacactattgtagtgctcaccctgatgatacgataaatgaatcatactggtagcttcacgatcagaaaagtttcttatgtaccatcgtggtgagttaagcatgtggatgcatatgttttttctcttgagaatagaagctgcttgcaactccatatgaccagcccaagtcccatcctcaagcatagagtcacaatatttctcaaacggttcctcgtcctcaatgaatggctcaaaatccacacggtgctccttaatgtattgcacaatcattgcacggtacttcatgtgctcttcctcgttgccttcgagctggtcgcccattgccctaaagaagcagttgccatccgcactaacttcgataatcttcaaccccagcgagtccagctgcgcccggaactccgtcatgtcggccttcttcgcgaacttcttctcctctgcatcacgcttcggcttccgggctttgggcgccgccacggctaccttcttcttgttccgagccattacgacacgtgcggtagtagtggagtctcgcctagatttccccgcggcggcggcggcggcgagggggagggaggcggaaccca

SEQ ID NO: 94512 - DNA, 180 bp, Oryza sativa
  Clone ID: PAT_MRT4530_92796C.1
atggcggccatgtcagcagataacctggtcatctatgtggcgacaacacagcgtggtggcggacaacaagaatgggacaagtggaatgagctagatatgaggacctcacctatctcaacaaccatggccggtgaagacagaagtaccatcaattttacatgagacaacaaggcatactga

SEQ ID NO: 94513 - DNA, 711 bp, Oryza sativa
  Clone ID: PAT_MRT4530_92797C.1
atgtcctctttcatgttttctcacctagttaatgttgttgctggtggcacaaggacctcatctggcttcaaggcagtccatctcaatgcatgtgctagggcggtcaatgaaaggttcaatagtactttcacgggtgagcaaattaagaaccatttgaagacacggcaaagaaagttttcaaagataaataggcttaggaaagatcacaaggctaatgcagattattttaacaaacctcttgcacactatggtgagatgcttacmatatttggtagcaccatggctacaggaaagtatgcaaaggactcaagttcagtcctaggaacagaggatgttcaagatgacaatgatgaagaaaatgatggtcctgccactactgatgatcgtgcggaggcatcatctgcaagtaagccaaagaaagcaaaaacmcaagagaatgaagatgmcgggctgattggtgcattcactagtgttggtgacaagcttgcctctgctatactaaaggtagccgagccggacaataagcttccagaaggtttatttgacatattgaaaacccttcctggttttgaggaggtccatagatcattttactatgctcatttggttgctaaccctcacattgctagagctttcgatggacttccatttgaaaacaagatgcattggtttgctatgttcattagtgaaaagttccctggatcaacatag

SEQ ID NO: 94514 - DNA, 4767 bp, Oryza sativa
  Clone ID: PAT_MRT4530_92798C.1
atgatgagcaacgtgaagagcaagttcatggattcttttcaggatcgcagaggaaccattgtacagaagtacaagctgaaggtggttgcagccgatgaggtcggcttgagttcatctcagggtgacaaaggtactacaactggctcaggtgataaaagtggcgttcctcaagatggtgcagttgaagaccttggtatagatggcaaccaagagccgttgcagttcaataattttcaagataggatcgactatgccgtgcaacatgccttgatgaatcaatctggagtattagttaataccttaaccaacatggtgaaaactgttgttgatggttcgatagccgagcaccaagcctcaggagcaagttgctgcaacgtttttgccaaatccatcgatagccgatccaacacagccgttgccgacccagcaagcacaaccgagacagcagacggttcagccgactcagcatcagaatttgcagcatgcatcggcaagccgaatcttcagaactatcaaggaggaaatctaggttatcaatatcagcctccgtcacctcatgttcagtatcagcagacagggtcgccccagcctcagtacgctcctcaattcaatcagtttgagccgatgcaacaacaaatgcaaggagtacctcagcatgcgtcattggctgatatgatcgcagatgtaatgagtgaacagtttgggctcaaaccaaaagacaatggaaatttgtatcggcatccttatcctgagtggtttgagagggttcaattgcctagccaatacaaagtacctgacttctccaaattctcagggcaggataatgtttcaacttatgaacatgtcagccgattcatagctcaatgtggtgtggcatcggctacaaatgccttgagagttagattgtttcctttatctctgtcaggatcagcatttacatggttttcttccttgacatataattctgttaatagttgggccgatttggaaaagcagtttcatagttatttttacagtggagttcacgagatgaaactgtccgatttgacagcaattaaacaaaggcacgatgagtctgtgcaagattacattcaaagatttagggagatgagaaacatgtgttacagtttatctttgacagattctcagctagccgatttggcttttcaggggttgatagcaccaatcaaagaaaagttttcggctcaagattttgagagtttgtcacatcttgcacaaaaggtgactctacatgagcaaaggtttattgaggccaagaagaacttcaagaaaatcaatcatgtatatccttacatgtatgattctgatgatgaggatgatgattccgaagtagcagcaaccgaatgggtcaagagcaagaaagtcataccatgccaatgggtgaggagctctggaaaagaggaaagatttgacttcgacatcactaaggctgacaagatttttgatttattacttcgggaaaaacagattcaacttcctgctgtgtttcggcagcagatccaggcggccatcaaggggggaaagatcaaatttgatgattcaaagaagctgatgaaggttgatggtatgaggctaccatcgattgaggattgccctggatgcaatgaagatgcagggaattcaagccgatccaataatagaggtaatcggctgagccagaagagagtatctgttcatcagaggttgggcccggtcaatcaagatggtgattatgatgaagatgaagataggaagacacaatggtgtcctacaggcattttcaccaagaatcagaagagaagggtgcaaaggttgaggaacagggagcgttttcaggaggtgcagcaagaaattaatcatcggctagggaaaacaaaaaccaggcaagaatggcgtgttaagcgcataattacaacagccgatgaagttgaggccgacaaagcaaaaagggtgctcaagggtaaggctgttgcatctgcatcggtgaacatggttttcatgctgccagccgaatttgaagccaagcaagtcgaagttattgacgttgaagaggcttcggctaagttagttttgtcaccagagcaagcaatctttgagaaaccggaagggacacaaaatcggcatctcaagccattgtatatcaatgggtttgtcaatgggaagctgatgtctaagatgattgttgatggaggagctgctgtgaatttgatgccatatgctacattcaggaagttgggcagaaatccacatgatctaatcaagaccaacatggttctcaaggattttggtggcaatccatcagagaccaaaggagttttgaatgtagagctaacagtcggcagtaaaactgttcctacaacgttttttgtcatcgatgggaagggttcctatagcctgttgctcggaagggattggattcatgctacttgttgtattccttcaaccatgcatcggtgcttgattcaatggcagggtgacaagattgagatcgtgccagctgacagtcgattgaagatcgagagcccaaattattattttgagggcgttgtggagggttcaaacgtctacaacaaggacacgcagccaccaaggaggtgtaaagccgatatgcttgaagctattaaggctgaggtaaagcatttgtatgatgctggttttattcgtccatgccgatatgctgaatgggtttcaaatatagttccagtcatcaagaagaatagcaaagttagggtgtgcattgattttcgaaatctaaacaaggctacgccaaaggacgagtacccaatgccaatagtcgatcagttggttgatgctgcttcaggatataagattttgagttttatggatggcaatgcaggttacaatcaaatttttatggccgaagaagacattcataagacagcttttagatgtcctggtgcaatcggcttgtttgagtgggttgtgatgactttccgcttgaaaagtgctagggccacatatcaaagagccatgaatcggctgtttttgggatttcttgttcatgagagggggattgaagtgactcaaaggggcattaatgcaattcagaagattcaacctctagaggacaagacaaagttgcaggagctgatcggcaagctgattaagggacaagctatagctgattttattgtggatcatcgtgatgactcaatcggttcagttgatattgtgccgtggactttattttttgatggatcagtgtgcactcatgattgtggtatccgcttggttatcatttcacctcgggggccaagtttcgagtttgcctatactattaagccctatgcaactaataatcaagctgaatatgaggcagttctcaaggggttgcaattgttgagagaagttgaagccgatgctatcgaaattatgggtgattccttactggttattagtcaattggcaggagaatatgaatgcaagaacgctacgttgatggtctataatgagaagtgccgaaggttaatggaaggatttcggctaataactttgaagcatgttcctcacgagaagaatatagaagctaatgatttggctcaaggggcatcaggatataagccgatgtggaaggatgttgagatcggagttgctacgatcacagccgatgattggagatatgatttgtttcaatatttgcacaatccatctcagtcggcttcgcggaaagtacgttataaggccttacaatacacctggttggataatgaactatattattggacgatcgatggggtgttgcttaagtgtttgagcgttgatcaagcaaaagttgcgataggtgaagtacatgaagggatttatggtactcatcaatcggctcacaagatgaagtggttgcttcggcgtgcaggatatttttggccgacaatgttggaagattgcttcaaatactataaaggatgccaagattgtcaaaagtttggggcaattcagagagcaccagcatcggctatgaatcctattatcaagccatggctgtttagaggatggggtatggacatgatcggccagattaatccatcttcaagtaagggacatacgtttatattggttgcgactgattatttcaccaagtgggtagaggctattcctttgaaaaaggttgattcaggagatgctatccaatttgttaaggaacacataatcaatcgatttggtattccgcagaccattacaaccgatcaaggctctatatttgtatctgatgaatttgttcaatttgccgatagcatcggtatcaggttagccgaagcattgtggtcttatcggatggcttgtcatgggtcgattcaagttcctccctacaagcttgtttatgggcatgaggcagttttaccatgggaagttagaatcggctcgagaagaacaaatttgcagaatgaattgacagccgatgaatattacaatctcatggccgatgaaagagaagatctggttcagtcaaggctgcgagctcttgcacaagttactaaggataaggaaagggttgctcggcattataacaacaaggtggtgcctaaatctttttatgaaggagagcttgtttggaagttgatcttgccgattgggactcgttataataaattcggcaaatggtcaccaactagggaaggaccatttcaaatacataacgttgtgtccaaaggagcttatatgttccaaggacttgatggagaagtttatggacgaccgcttaatggaatatacttgaagaaatattaccgcttaatggaatatacttga

SEQ ID NO: 94515 - DNA, 1983 bp, Oryza sativa
  unsure (1)..(1983): unsure at all n locations
  Clone ID: PAT_MRT4530_92799C.1
atggccatgattattcggtctaggaaaagaacgagaggtgcttggcgtgaagatgccatccacatgtgtattgaggaacaagtggctatgtttctgcatacggtgggacataaccttagaaataggttagtccgcactagttttcgtaggtctggagaaacagattgtattggagctatttgatggcacacatattagagcctcggttcgtaagaacgtggagtcctcttttcgtggtaggaagtcccatgccactcaaaatgtaatggcggccgtagattttgatcttcggtttacttatgtcctggctggttgggaggggacagcacatcatgctgtagttttaagagatgctttggaacgtgaaaatggcctccgtgtcccacaaggaaacaaattctatctagttgatgctggatatggagccaaacaaggattcttgcctccttttcgtgctgtccggtaccacctgaatgagtgggggaataatccggtgcaaaatgagaaggagttgttcaaccttagacactcatccctccgtgtgacggttgaacgtgcatttgggtcactaaagaggaggtcaaagtgcttcaaagtgcttgatgatgccactccattcttcccatttcgaactcaagtagatattgttgtagcttgttgtattattcataactgggtcataaatgacggaattgatgagcttgtagctccgtctgattggtcaagtgaggacattgatgaatcgccaaccggccaagcgaatgaccatgcattgatggaacatggacaacaccagtggcaagggaggaagcacccatgcttcatggacctcagctatgtcctctttcatgctgtctctccttgctaatcttgtggccggtggcacaaggacctcatctggcttcaaggcagtccatctcaacgcatgtgctagggcggtcaatgaaaggttcaacagtactctcacgggtgagcaaattaagaaccatttgaagacatggcaaagaaagttctcgaagataaataggcttaggaaagtgagtgctgctggttgggatgagaaaatcttcatcattactcttgatgatgagcactacaatggctatattgaggatcacaaggctgatgcggattattttaacaaacctcttgcgcactatggtgagatgcttacaatatttcgtagcaccatggctacaggaaagtatgcaaaggactcaagttcagtcctaggaacagaggatgtccaagctgacaatgatgaagaggaaaatgatggccctgccactactgatgatcgtgcggaggcatcatctgcaagcaagccaaagaaagctagaacacaagagattgaagatgacgggctgattggtgcattcaccagtgttggtgacaagcttgcctctgctatactaaaggtcgccgagccggacaataagctgccagatggtttatttgacaccttgaaaacccttcctgggtttgaggaggtccatggatctgtttactatgctcatttggttgccaaccctcacattgctagagctttcgacggacttcctttcgaaaacaagatgcattgggtcgccttgttcattaatgagaagtttcctggatcaacgtagattagnattnntttggccgagnaggtagnaattgtattcataggnatnnttgacatgatnnggctacagatnntcttcttccagttnnngccgcggctggctgtggcgtgggggtggcttttnntttttttcttgcactttgnntgtaagaattcnnnacgaagtaccnnatgtaaaagnntccccaagtgnnnatgtttgaannactctgggnnggttagcnnttctgagatnnagttgatgtagagcttgctttcattgagcgtnnctttacctgaattnngatgtgtgtcacangttattagtttggtgacttaatcattcagataatttagaggcaccaaatttgtataatttt

SEQ ID NO: 94516 - DNA, 201 bp, Oryza sativa
  Clone ID: PAT_MRT4530_9279C.1
atggccgaaggcggcggtagaggtggtgctcaccggagtgcgaggggatgcgggttccggcgacggacctcgatggaggaggggcggacgggcggaagcggcggcggcgggtggaagcacggcgcaggagcgatggggagcacgagggagttcggcgagatggggaaaaagagcgagggagtggcggtggagcttaaatag

SEQ ID NO: 94517 - DNA, 117 bp, Oryza sativa
  Clone ID: PAT_MRT4530_927C.1
atggtgacgtgtgcatcatgggcacatgatgacgcggtgacatgccggtggattgtgtcttgtggtgcttctgagctgaagatgaagttagaagaccaaggctcagaccccagttga

SEQ ID NO: 94518 - DNA, 2578 bp, Oryza sativa
  Clone ID: PAT_MRT4530_92800C.1
tctcctcttatccccacattaaagcagccaaggctaaggtcgaggtcaagatcacccccgccgccggttcctggagcccatgagacggcagcgatggcggtcgagagcggtggcatcggcggcttgcgaatcgcccgggtggtagaggaaggggcgatagaagggaatgcgggctgcggcggcgcttctccaccatacagccgccggcaggcctctcccctctttattgctgttgccgcctctccctcctcaaatcgacggacaaccgtcccgtatgccacgaagttgcggcaatgacggccggctccacgcctccaccccaggtcgaccgctcacagcggtctttggcggtgaaggacggaggtgtggcggaggatgcagcggatgacgacgtcgatggcgaccgtagcggaggacgacgctgcggcggtcagatccgcgtcccccaaacacatgggaggtcggatccggacgtcggcggccagaggcgatggccggcagcggcggcgtgagccggaggcggcgcgcccggcgacggccacgccaggcataggaggcagaggccaaggtggcagcgccagggggtggtagaggcggatgccgaggccgcggctctcggtgaccgggacgacgatggtgacagggtgagagcaggaaatggatggccatgattattaggtctagaaaaagaaagaggtgttcaaggagagaagtggggcataaccttagaaatagattagttcgtactaattttgataggtctggagaaacagttagccgttatttcaacaaagtccttcatgcaatcggtgagctacgagatgaactaatcaggcccccctcattggacactccaactaaaatagcaggaaaccctagatgggatccttactttaaggattgtattggagctattgatggcacacatattagagcctcggttcgtaagaatgtggagtcttcttttcgtggtaggaagtcccatgccactcaaaatgtaatggcagccgtagattttgatcttcggtttacttatgtcttggctggttgggaggggacagcacatgatgctgtagttttaagagatgctttggaacgtgaaaatggcctccgtgtcccacaaggtaatagattacaaggcaaatactatctagttgatgctggatatggagccaaacaaggattcttgcctccttttcgtgctgttcggtaccatctaaatgaatgggggaataatccggtacaaaatgagaaggagttgttcaaccttagacactcatccctccgtgtgacggttgaacgtgcatttgggtcactaaagaggaggttcaaagtgcttgatgatgccactccattcttcccatttcgaactcaagtagatattgttgtagcttgttgtattattcataattgggtcgtaaatgacggaattgatgagcttatagctccgcctgattggtcaagtgaggacattgatgaatcgttaaccggccaagcaaatgaccatgcattgatggttcagttcaggcagggcttagctgatcagatgtgggctgaccgtaatagccatcatggaattggcaagggaggaagcacccatgcttcatggacctcagctatgtcatctttcatgctcaaacaccttgccaatcttgtggccggaggcacaaggacctcatctggcttcaaggcagtgcatctctatgcatgtgctagggctgtgaatgaaaggtttaacagcactctcacgggtgagcaaattaagaatcatttgaagacatggcaaagaaagtttacaaagataaataggcttaggaaagtgagtgccgctggttgggatgagaaaaatctcatcattactcttgatgatgagcactacaatggctatattgaggatcacaaggctgatgctgattattttaacaaacctcttgcacactatggtgagatgcttacaatatttggtagcaccatggctacgggaaagtatgcaaaggactcaagttcagtcctaggaacagaggatgtccaaactgaaaatgatgaagaggaaaatgatggccctgccactactgatgatcgtgcggaggcatcatctgcaagcaagccaaagaaagccagaacacaagaaattgaagatgatgggctgattggtgcattcaccagtgttggtgacaagttagcttctgctatactaaaggtcgctgagccagacaataaactgccagatggtttatttcaaaccttgaaaagccttcctgggtttgaggagatccacgtatctgtttactatgctcatttggttgctaaccctcacattgctagagcttttgatggacttccttttgaaaacaagatacattgggtccacttgttcattaatgagaagtttcctggatcaatgtaggagatatctagttcttttgctattatgaatgtgctgccagtgggtgaacattacttgtaaggcttgaccttgtaaagaacttatgtgtggattatatgcttgcaatgccaataaggttgggatgctatgtgtaaaacttcaatgggctattatgtgatcaaccttcccctc

SEQ ID NO: 94519 - DNA, 484 bp, Oryza sativa
  Clone ID: PAT_MRT4530_92801C.1
atcaccgacccgatgattcagtacatccctatcattggcccgtaggatagctgcctgcagctgacggtgtacaggtggaaagagatgctgagaaggaattgcagatctcttcaagggccggagatcgaccactgcacggtggacaagatcagggatgccatcaaggatcagaaggagatcactgtgcacataatcagctacaccaagatcggaaagaatatctggaacttgatccatcttcaaccaatacgcgaccagacagaggagctacaatacttcattgcagtgcaagttgatggtagagatcatgttgaacccatcaggatccggctataacagaatactgacatacagatagccaagtaggtctaagatcctgcagaaaatgtcgatgatgcagtgagggagcttcctgatgccaatttgagaccacaagatgggcgggcaagtcactcaatgcgtgtttgtccaaaacatcacatac

SEQ ID NO: 94520 - DNA, 3328 bp, Oryza sativa
  Clone ID: PAT_MRT4530_92802C.1
atggtggtgcagctcgggcaggtttccattggggcgcagacgtccgagttgacgaacatcctgaataagcgggtcaatgccgatcgtcgtccagaattgctgggcaaaggggcaaaggaagcagatgtgacttgcaatttcagatgcagctccacaaatggagtcgactccaatcggtacatggtctcaggcgccacggaccacatcaccggtgaactggacaagctcacgcttagcgacaagtacaaggcgaacgagcaagtgcacactgccaatggagcagatgtctacgcacctgctcctatttctgttggtagacataaatattatgtgagtcttgtggatgattatatcgcccgcctaagagcagaaatagctttgcttccatcttaccttgtagcgcatgatctagggggcgagcaacagagtgatcatgttcttgattttcctaatactgctaatgaattttctggtagcaattcagatgattcgggtacagatgaaggtgtggacctagcatcaccaacaccggcgtttgaagcgcatggcgcaggagaaatcgcttctggatcggagcctaacgcgacacggcagacagcacagacactggcccagcagacgcacggcgcggctgctccactccactcaggcggctacacgtcgctgtttactttaccaagtccggcgccgcaccagaccacttctgtgccgagccatgatgagaccggtacgagagctgacactaagcatgtgtttggttgggaggatatcccgggatgggatgggatcgtcccatttttagtgggacataaccttagaaatagattagttcgcactagttttcataggtctggagaaacagttagccgttatttcaacaaagtccttcatgcaatcggtgaggtacgagatgaactaatcaggcccccctcattggacactccaactaaaatagcaggaaaccctagaagagatccttactttaagctatttgatggcacacatattagagtctcggttcgtaagaacgtggagtcttcttttcgtggtaggaagtcccatgccactcaaaatgtaatggcagccgtagattttgatcttcggtttacttatgtcttggctggttgggaggggacagcacatcatgctgtagttttaagagatgctttggaacgtgaaaatggcctccgtgtcccacaaggcaaatactatctagttgatgctggatatggagccaaacaaggattcttgcctccttttcgtgctgtccggtaccacctgaatgaatgggggaataatccggtacaaaatgagaaggagttgttcaaccttagacactcatccctccgtgtgatggttgaacgtgcatttgggtcactaaagaggagaaggacctcatctgacttcaaggcagtgcatctcaacacatgtgctagggctatgaatgaaaggttcaacagtactctcacgggtgagcaaattaagaatcatttgaagacatggcaaagaaagtttacaaagataaataggcttaggaaagtgagtgctgctggttgggatgagaaaattttcatcattactcttgatgatgagcactacaatggctatattgaggctgatgctgattattttaacaaacctcttgcgtactatggtgagatgcttacaatatttcgtagcaccatggctacaggaaagtatgcaaaagactcaagttcagtcctaggaacagaagatgtccaaactgaaaatgatgaagaggaaaatgatggccctgccactactgatgatcgtgcggaggcatcatctgcaagcaagccaaagaaagctagaacacaagaaattgaagatgatgggctgattggtgcattcaccagtcttgtccaatatgctgaaatcctaaagcttccactgttcttggctgtagtaatgaagctgctggagcttattttcaattatagtgatatgaaaggtgagccgagcaatttggaggaagcactaggaaacaaacagtggaaagatgcaatggatgcagagtactcagcattaatgaagaatagaacctggcaccttgttccttatcaagaagctgtgtccaggggttggagtctacaacaactggatgttcagaatgccttcttgtatggagtgatagaggaggaggtgtacatgagacaacccccagggtatgaaaattcttctaaaccaaactttatttgcaagttggataaagccttgtatggtttaaaacaagcaccaagggcttggtatgcaaggttaagtggaaaattgcaacagttaggctttaagccatctaaagcagatacatctttattctacttcaacaaaggcagtataaccatgtttatcttgatatatgtggatgatattatagttgctagttctactaaggatgcagtgtcagctcttctttgtgatctgaatgaagatttcgcgctgaaagatcttggagagcttcattatttccttggcattgaggttaacaaggtaaacaatggtctaatattgtcacagggcaagtatatatctgatttgttgaagagaacaaatatggttgattgcaaaccggtaaatacacctctgtcaactacagaaaaattgtctttgcatgaaggtgatcaattaggacctaatgatgctactcagtatagaagtatagcaggagctttgcagtatttgactttgactagaccagatatatcctttgctgttaataaggtttgtcaatttcttcagacacctaaaattgttcactgggcagcagtcaaaagaattttgagatatttgaaatacacagcaagtctgggtataaattttgatagatcagtatctacacttgttagtgcctttacagatgcaaattgggctaggtgtcttgatgaccggcggtccactggagggtttgctgtttatcttggctccaatcttgtgtcatggagtgcaaggaaacaagctacagtctccaggtccagtacagaagcagaatataaggctttagcaaatgctacaactgaggtaatgtggattcagacattgttggatgaactcgatgtccatgcaccgagatcagcaaagatttggtgtgacaatattaaagccaagcatttgtctgctaatccagtttttcatgctcgcactaagcatattgaagtggactaccactttgtcagagaacgggttctgaacaagtttacttgaggttgaatatatttcttctggagatcaggtagctgatggatttaccaagcctcttggagtgaaacagttagagatgtttagaaacaatctaaacttgagaagttcagat

SEQ ID NO: 94521 - DNA, 111 bp, Oryza sativa
  Clone ID: PAT_MRT4530_92803C.1
atggcgcgccgggagccggagctggcgcaccgggagctggtgcacagaacgacaacaccaacggaggcagttctgcccacaatccagcggagggactttcacagggtctag

SEQ ID NO: 94522 - DNA, 1861 bp, Oryza sativa
  Clone ID: PAT_MRT4530_92804C.1
atggaaaaacgtggggcgggggaggaaggccttagtgcagggttagggttagtggcggcggcggaagcgcacaaggcggcggcgcgagctgggggcaaggcggcgcctcacgagcagggcgaggcggcggcgtggcctgaggcggcgcgctaccagggcgacgcagcggcgtggccaaggcgactcggcggcgcgaggagggcgaggcggctgcgcgagctggggctagccggcggcgcgagctgggcaaagcggcggcacgagaaggcctcatcctctccatccctacccacaaactgcagagctcggtttccattgttcaagatggataagaggaccaagcttttagtttgtattgctgctacaaatttattgttatcaatgatggccatgattattcggtctagaaaaaagaacgagaggttcaaggagagaaggtctggagaaacagtaagtcgttatttcaacaaagtccttcatgcaattggtgagctacgagatgaacttatcagacccccctcattggacactccaactaaaatagcaggaaatcctagatgggatccttactttaaggattgtattggagctattgatggcacacatattagagcctctgttcgtaagaatgtggagtcctcttttcgtggtaggaagtcccatgccactcaaaatgtaatggcggccgtagattttgatcttcggtttacttatgtcctggctggttgggaggggacagcacatgatgctgtagttttaagagatgctttggaacgtgaaaatggcattcatgtcccacaaggaaaattctatctagttgatgctggatatggagccaaacaaggattcttgcctccttttcgtgctgtccggtaccacttgaaagagtgggggaataatccggtgcaaaatgaggagttgttcaaccttagacactcatccctccgtataacggttgaacgtgcatttgggtcactaaagaggaggttcaaagttctagatgatgccactccattcttcccatttcgaactcaagtaggaaatggacaacaacagtggcaagggaggtcagctatgtcctctttcatgctttctcacctagctaatattgttgctggtggcacaaggacctcatctggtttcaaggcagtccatctcaatgcatgtgctagggcggtcaataaaaggttcaatagtactctcacgggtgagcaaattaagaaccatttgaagacatggcaaagaaagttctcgaagataaataggcttaggaaagtgagtgctgctggttgggatgagaaaaacttcattattactctcgatgatgagcactataacggttatattgaggatcacaaggctgatgcggattattttaacaaacctcttgcacactatggtgagatgcttacaatatttggtagcaccatggctacagaaaagtatgcaaaggactcaagttcagtcctaggaacagaggatgtccaagatgacaatgatgaagaaaatgatggtcctgccactactgatgatcgtgcggaggcatcatctgcaagtaagccaaagaaagcaaaaacacaagagaatgaagatggtgggctgattggtgcattcactagtgttggtgacaagcttgcctatgctatactaaaggtcgccgagccggacaataagcttccagaaggtttatttgacacattgaaaacccttcctggttttgaggaggtccatagatcattttactatgctcatttggttgccaaccctcacattgctagagctttcgatagacttccatttgaaaacaagattggtttgctatgttcattagtgaaaagttccctggatcaacataggcttc

SEQ ID NO: 94523 - DNA, 1512 bp, Oryza sativa
  Clone ID: PAT_MRT4530_92805C.1
atggcttccctcttgctgctgcccactgcagctccagcgtggcctaccgcctcctgctggcagcgcatgtgggttcatcctggcccttcgtttcctcatcggatgatgatacgtcatccactgctgtcctccctgcacgccgcccgcctcatgccttgcaagtgcacagcgccgtcatctcccattgctaaacatcattttgaggagcagattaacaccactctaagaaatattcacagcattgaattctatagctctaacctccatgaggttgctcttcggtttcgcttgctgaggcaacaagggtattgggtttcaccagacgaattcaacaaattcaaatgtgaagatgggagcttcaagagtgacataaataatgacccgaagggcttgttaagtttgtaccatgcagcttaccttctaactcataatgagagggcactcaaagaagctatcttatttgcaacccatcacctggaattattaagtggtagccttgagttcccgctggctgaacaagtaaagcgtgccctccaaataccattaccaaggaccttgaagagagtagaggcgctaaattttatcttcgagtggtggaaggatgtttccagtgacattaacctagactacacccgcgatcgtgtggttgagtgttacttttgtgcttacattgtgtactatgagaaagagtacgcacgtgcacgcatgatgctcgccaagaaaattatgctaatttctctacttgatgatacctatgatgtgcatgcgacattggaagaggctcggaagttcaatgaagcactgcaaagatgggataagaatgctgtttcacttgtaccggaggggctgaagaggttctttctcagtattatgagcaactttagggactttgaagatgagttggaaccacatgagaaatatcgtaatgcttacaacattaaagcgtttcaaatattatccaacaattacctccaggaagctgagtggttccatcaaaaatacattccaagctttacagagcatgcgaccgtgtccctcgtaaccggaggtgctatagaattacctgtcagtataatcgtaggcatgggtgacatagctaccaaggatgcctttgattgggccttgtcttacgctgatgctggcagggcctttggagaggtgtcacgtttcatggatgatttggctgtatcacagaatgggagggagaagatggacgtggccaatgccgtggagtgttacatgaaggagcatggcgtgacaagcgatgtcgcggaggcggagataagtgaaatggtggaaggcgcatggagaaccctaaaccaggcgcgctttgaggaccgcgtgtacctcccgttcgtgcagcggatcgccaatgtgtccatgtccatcgccctcctcttccatggcaagagggacggctacaccaatagccacgagttgaaggatatgttcgagagtcatttcgtcaaccctattccccttgatcatttagatacaattgaagatatgtaa

SEQ ID NO: 94524 - DNA, 114 bp, Oryza sativa
  Clone ID: PAT_MRT4530_92806C.1
atcattccattaagaatttgaaggaaagacatccttccagggctcactcggggctagtgtctgattgatgaaatgccgacatagttgccatggattgcaatttcggaggtcgcc

SEQ ID NO: 94525 - DNA, 354 bp, Oryza sativa
  Clone ID: PAT_MRT4530_92807C.1
atgttcactcggtgcggcgggaacggcggcgcggcggggacggcgactgcatgcggcggcgcgaccagcggcggcggctcccctcgccccctccctcctagatctggccagaggagggagggggaggccggcgggagcgacggcggcgacgacggcgcggggtggccggcggtggctcacgtcgcccccttcctcctagatctggccagaggatggagggggaaggccgacgggggcgacggtggtgacgacggcgcggggcggcgcggcgggccgttgccccgactgcgaaaatcgatgattttcgcagtcgttgtggcgcaggtggacctccctcccgcctgcgaaaattag

SEQ ID NO: 94526 - DNA, 381 bp, Oryza sativa
  unsure (1)..(381): unsure at all n locations
  Clone ID: PAT_MRT4530_92808C.1
gttttgagttagctatagctaggattaatgctcactgatgtagtgatgtctactcctctgcttctataaccttcaaagaaagggaaaaagaaactcctctgctnttctaaccttccaaaaaaaaattcttctacttatcttaaagaatagtagtaccatcatagaactctatactttcagacaggttaaaagggctaattaaattgtatcttagttagcattgcctactgttgtnctctacttctcattggacatgatggtctagtgttcttgttacagtgattaatcacccacatatgtttgtgtcgtcatactaacaagttgtatctctgctttgttgatctcacctcagatgtctacaattgtgatgatggtggatct

SEQ ID NO: 94527 - DNA, 453 bp, Oryza sativa
  Clone ID: PAT_MRT4530_92809C.1
atgcgcctcgagatgtcacccgacaacctcctcttcttctgctccgtcgcggcgtcggcggccgctggattctgcctcttctcgctgtaccggcggctcgcgcggcggtgccaccaccaccacgcggcgcctgccggaggatcggaagaggaggaggaggagcgccggcggctgaccgcggtggcctccggcctcccggcgttcatgtacgaccggctggtccggcacagcggcaagggcgcgagctggacggagtgcgccgtctgcctcggcgtcatccatgtcggcgccatggtgaagctgctgccggcgtgcgcccacatctaccacgtcgactgcatcgacctgtggctgtcttcccacccgacgtgccccctctgccggtgcagggttgatcatcctgggcaggggcaggagacggccaggcagcttgcccagctttccccagcatag

SEQ ID NO: 94528 - DNA, 317 bp, Oryza sativa
  Clone ID: PAT_MRT4530_9280C.1
tgaggcccgtgccgctgtcggcgtagcggcccagccattgtacccgtacgccggtgaggagcgcatgcttttagcggcccccagcagcgccgccgcccccacctcctccccaccagcgccgccggccccgctccttgccgaccgtcaaccacgtcgccgccctcccccacttgagccaccaccggcccccaactgctcgatttgttttcttgtccatggagggtggtggcttcaatttcttctccgaagatccaaatccaagcgtctggccgtcgattcctattaccatactcgacaatttccattgcctagaaaaa

SEQ ID NO: 94529 - DNA, 1660 bp, Oryza sativa
  Clone ID: PAT_MRT4530_92810C.1
atggcgaggcgcgcgaggctccggctccggctcgtccgcgccctcgccacggcctccgcgtccggatcgcctgcggcgccgcggccggcgaggcaagcggcgccctacctggcggtgctccaccgccgcgggagggcggaggcggcggcgtgcctgaaccgccacctccgcctgctcccgctcggggaggcgacctcgctcctcgacgcgctcccgtccgtccgcgacgccgtctcctacaacaccgtgctcaccgcgctctgccgccgcggccaccacgaccgcgcgggcgcgctgctccgcgccatgtccctggagccccacccggcgtgccgccccaacgccgtctcctacaccgtcctcatgcgcgcgctctgcgccgaccgcctcgcggaccaggccgtcgggctgctgcggtccatgcggtccgccggcgtccgcgccgacgtggtcacctacggcaccctcatccgtgggctgtgcgacgccgcggaagtggacaaggccgtggagctgatgggcgagatgtgcgaaagtggcatcgagcctaacgtggtggtgtacagctctttgctccaagggtattgcaagtctgggcggtgggaggatgtaggcaaggtgttcgtggaaatgtccgagaagggaatagagccggatgtggtgatgtacactgggttgatcgatagcctttgtaaagtggggaaggcaaagaaggcgcacggggtgatggacatgatggtgaggagggggttggagccaaatgtggttacgtacaacgtgctcatcaattgcatgtgcaaggaaggttcagtgaaggaggcaatcggtgtgctgaagaagatgtccgagaagggagtggcgccggatgttgtgacatataacacactgatcaaggggctctcggatgtgctcgagatggatgaagcaatgtggttgcttgaggagatggttcgaggggacttgaaaactgcaaaagagttgcttaagagcatagttgatgagggactgactcctgatgctgttacatattctatagtaatcaatatgtttgctaaatctggagacatggaggcggcaaatggcggagcggcggcgtctccgggcgagcgcggctgcggcaggtggcggacgagcacgacggcgggcaagcggcggctccgagcgtgggtggtgcgcggccggagcaggcggagcggcggcgtcttcgggcgcgggcggagcagaggggcgggggacgcggcggcgaggcgtcgcctctttccccctctcccgccggcctcatctcccccagctccgcccggcttcctctccccctctccggcggggcgctgggagaagggcggtcactcgcgggtggcgtggacagggccgaccacccgactacccgagcccggagctccgtccgctcccgtcgctgcggcgcgccaccacgctgggctcctctgatgagtgcgacggcggcgggaaccagcggcgagaagaacagcacgcagagcgacctagggctaggagtagaggtgcatggcatacctgctctccactccacgtcgacggcgccgtcgatttggccatgctgagagagcgcatccccagctcgctgctcgccgccggtcttggggaagcggcggcgtcggggagagtggagagaggtcgggagtga

SEQ ID NO: 94530 - DNA, 134 bp, Oryza sativa
  Clone ID: PAT_MRT4530_92811C.1
aaagctacggagtacaaacgaggtgagggtgcacaggtgtacccaggcaccgacacgatgcgaaacgaagtttcagatcactccgaggactcaattaagcgggcgatcagttcatcctgcaacaagggacaaaa

SEQ ID NO: 94531 - DNA, 620 bp, Oryza sativa
  Clone ID: PAT_MRT4530_92812C.1
cggtgcaggcgagatggaaggatcaatgtccccatgctgttggcttgcttgctttgctgattgggcttggcaatggggagcgcactggtggcaggcaggtgttggatgggttgtttaaggctcaaaaatgttgatgagggctattaatcaagtctggcaagtgcatcctgctgcctggctgacaggcaaaccaatggttggctttgagccctattgatgaatggacggtttgcagtaagggcaacgcaagtatgggcatgagtcggcaagccccttattggcaaatgcaagctagcgttttgcaagactggaggaaaccaccaatgtcaagggcaaacagcttgaggctgggtgggcgcaaacaagtgctcactgatgcaagggatgattaaacgtgtggtgtagcaagagccataggccacgcaaggctgacaaactgccaagcaagtttggatggatgctgctgactttggatcggaatctagctcaagctccagctcaagctctgttggctttgaacttgccatctagatatggtatctaccctaggtactatagtcacctatgtaacgccccgattttcgttcgggaatttaaaaatcatttaataaaaaaaaaaa

SEQ ID NO: 94532 - DNA, 3082 bp, Oryza sativa
  Clone ID: PAT_MRT4530_92813C.1
ggagtagagagagagagagagaggggatgcaggtgcgggccactccctctccctactgtctccgccgccgacgccgccgtgcgccatggtggcgctcgcctccctctcgtccctctccccctgcgggctcgcgcgccgccgctcggcctcctcagccgcctctatctcatgctgcgcggccccgcccccgccctccgcgaaaggatctcaagaatccagaactccacgtagaagggtgaggaaaactgagggtgccaccaagagcctggaagattcagtcaagcgaaagatggagcagttttatgaaggattggatggtccacctctccgagtccttccaataggtggccttggagaaatcggcatgaattgcatgctcgtagggaactatgaccgttacatattgatagatgcaggggtcatgtttccagactttgatgagttcggtgtgcaaaagattatcccagacacaacattcatcaagaaatggagtcacaaaatcgaagctgttattataacgcatggccatgaagatcacatcggtgcgttgccctgggtaatcccagcgctggattcaagcacaccgattttcgcatcatcttttaccatggagctaataaagaggcgtttgaaggagtttggaatttttctctcgtccaggcttaaggtttttagagtaaggaagagatttcaggctgggccatttgaggtggagcccctccgtgtaactcattcaattccggactgctgtggcttagtgcttcgttgtgctgatggcataattttccatactggtgactggaaaattgacgaatcaccagtggatggaaaaatatttgatcggcaagcattggaagagctctccaaagaaggcgttacacttatgatgagtgattctacaaatgttctatcccctggaaggtccatcagcgaatctgttgttgctggttcattgttgcgacatatttcagaagcaaaaggaagagtaattaccacacagtttgcttccaatatacatcgtattgggagcatcaaagctgctgcagacttaactggtcgaaagctggtatttgttggaatgtcactcaggacttaccttgatgctgctttcagggatggaaagtcaccgattgatccatcaaccttggtgcacttaatagaatctaggttcttgctgaaggttaaggtagaggacatggatgcctatgccccaaatgatcttctagttgttactacaggttcacaagcagagccacgtgcagctctaaatcttgcatcttttggaggaagtcatgcccttaactatccaaagaggatgtccttctgtattctgctaaggttatccctggaaatgagtcacgtgtaatgaagatgttaaatcgccttactgagcttggtccaaaaattgtgatgggaaaggatgctggtctccatacctctgggcatgcctatcacgatgaacttgaggaagtcctacagattgtcaaaccacagcatttcttgcctgttcatggagaactcctgtttcttaaagaacatgaattacttggaagatctactggcataaggcacaccactgtaattaaaaatggagagatgcttggcgtgtcacatttaagaaacagaagagttttgtctaatgggtttgttgcattagggaaggaagatttgcggctaatgtatagtgatggcgataaagcttttggaacatccactgatctctgcattgatgagagattaaggattgcatctgatggcgttatttttgtcagcatggaaatcttccgacctcagaaggaacttgcttcatcacagtcaggattgaaagggaagttcaaaataacaacaagatgcctatggcttgataatggaagactattagatgcactttacaaagctgcatatgctgcattatcaagttgtccagtgaattgtccacttagtcacatggagaggatggtatctgaaatcttgaggaaaatggtaaggaagtatagtgggaagaggcctgatgtcattgcggttgctacagagaacacaacagtgagttttgtagaagactcagaaactaaatcatctggaaagtttggatctttctcagctcctaggcattcgagcaggagttcaggtaggagtcttgaagaaagtgataaatcatgcccagagaatacagagggagaggctaaagaaaatcttcctgatgtcctgagaacaacacgtgatgatgcaaccacaagctccaatggcgaagcatttttctcctcagatttgcataagcctaaaacactagagcatttttgggactcattcaaatcccctacagctgtaaaaattgcaagaattgtcaatggttcagctcaagggagtaaatcaaagattggcaagatcagcatagtgggtaaggactctagcgatccttcttctgctccagttaaatcttcaaaaaagaacaagtggaagcctgaggaaattaagagcttaattcagatgcgtggcgaaatgaatgagcaatttcagactgtgaaagggagaatggttctgtgggaagagatatcttctagcatgttgagccaggggataagtcgtacaccagcacagtgcaagtctctatggacatcattggttcagaaatatgaggagagcaagaaagatgaggaaagcgtaaagacgtggccgtatttcttggacatggacagggttttatcaagccaaggggaaatggcaacccaatgatcccaaggccgtagtttagtggttgtaattttggagagtgatggcataatcaatcaagtggcaggatgagatggctgcagcgtgttcttctccagagaatatacatgccataattcattccacgaaaagggaggcaggcacttggaatgactaagctgctacgtattcaccatgagtgtgctacagggctagggatagctgatattatttgatcaactatactagattaagtaattgaatagctaagttttgttgtgctattatttttggtgtaagaagacaccaaatgctaatccgaaggctttcaattgagctacccacataactataaaagaaaacctgcagcccg

SEQ ID NO: 94533 - DNA, 190 bp, Oryza sativa
  Clone ID: PAT_MRT4530_92814C.1
caagtgaagttctattctacaatgatcgcatgtgcggggtgctatgtgactcgagccgcttatgagatcagagcgtcctatgacaagatgtaatattcgaaatgattgtgctccaataccggatgaataggtaacgagttgtagtacattataggatcagagggtgatgaatagacaataagccttattg

SEQ ID NO: 94534 - DNA, 231 bp, Oryza sativa
  Clone ID: PAT_MRT4530_92815C.1
gattaaactaataaaatcattatttcaaaaacgtcattttcttattgatggtcttaccccacacatcaccaactttatcatcatttcttttcactaaacccattttccccaacctaaatacaactaactcttctcccacaaatctatccaaccacaattaaccactactaatctactctccctcactttactttctcttaacaaattttattacttactcccatactttat

SEQ ID NO: 94535 - DNA, 465 bp, Oryza sativa
  Clone ID: PAT_MRT4530_92816C.1
ggccagtgctgtttcactcaaaaaaaggctgccgagtaaggcagggcagcgcaaggaacggagcatgacttaatccctaagaggaaacgtgctgaatgaagttcgcaggctatgaccaccgcgttgccaccgaagtgccagccttcggcacgaaatgtcggaaaaaaacgtcggaatcggggtaatagcagccagaagatacacgttgccatgcattgatggacactaattgtgtgtatgcgccttgctaacggctgccggcgcattaagctgagcgccgtttttgcctatcggagtaccccatgtcccgtcgtttgccactgatcctgctgcttattgccctgccgctatggttggctgccagttatggcgcacgctacggttttatggaggatggccagtgggtgggtatctgcgttgatgaggccagtcgctgggaatgccagttgcgttcgaccttggggt

SEQ ID NO: 94536 - DNA, 577 bp, Oryza sativa
  Clone ID: PAT_MRT4530_92817C.1
aaacaaaaataacaacgaccgtagtgattatatatgagcttgcacacataaaatgcatcatacctacaagaaacagagcttcataagatattttgcatggaactgcaagattcagaaatgcaagggtcatctatagaaaaatatcaaaaaagaattccttacaaactcaaatatgtacattcccttgcaatatcacattttcatgcgatcttcaaaaaattctcaattgactggaatagtactacctggatcaacagaagccgttgctgccgttcggtaaaggagaatcaaattgatttttcaggagagattagagggtgaggacccaactacaatctgagtcattagatcaaataatggaagcaacgttcaatattcagtgcaaccagactgaatatatcaaaaatgttactccggaatgaatatgatctcagattaagagcattgctgatctgctgatcttcactaaaatgaatttgtcacaaatcatattctttaaatacctctcaattgctgtcaacaacttaacatcagaattcagaagtaggttgtcttgaatacatatctgcacatattc

SEQ ID NO: 94537 - DNA, 333 bp, Oryza sativa
  Clone ID: PAT_MRT4530_92818C.1
atggctacccatgcacttcttgaatctgcaagatgttacaagaagatcccagacagaggtgaaaaggaagctgcatctgctgcacttgcgctggagaaagccaccgagctgagcatggggaggaaaaaattggagtcagcggccacctgttgcaggcttctggccgagctgtacgaggagcagaaagagtggagcaaggctatgattcacttccaagatgccgcgtatagctatggtggctgtgcgagcgaggagtccgtgttctatgcccgccactgtatgctcaaggctagagaaattgctcagatcattgcagacgcaaaacacaattaa

SEQ ID NO: 94538 - DNA, 251 bp, Oryza sativa
  unsure (1)..(251): unsure at all n locations
  Clone ID: PAT_MRT4530_92819C.1
naaganttngccaaattagacaatattccaagaaaccaagtccttcacatagagctctcccgccgctctcacgngggcgnctcgggagcgaaaccctagccgcccgcgccgncccctcccaacgcctccagccacctngncgcctccagaacccgccgncggaaaccgtncggccngccggaaagncggcgtcgnggaaaacgtaccgncggcgtagantcccctcgncgtgggaggnagngcgatgcacg

SEQ ID NO: 94539 - DNA, 514 bp, Oryza sativa
  unsure (1)..(514): unsure at all n locations
  Clone ID: PAT_MRT4530_9281C.1
ctgagcaatgcgttcgttatgtgttactgcggagcgcatatcgcgtgcacgtgcgcgtgcacggtgagagagaatactagttatgctttgcccaaagggaccggaacagtctagtctgtagctacctagcttcggctatttcaagtgcctgctgagcttattccggatcaatcttagcagctgatcctacttagaatgaagccacattaagcttaatgtagactgagacagtaacaagatgctcatttgaaaggaatggttatatggaagaatttgagtatttggcagtagcatgtatacacactgttctggtggttccagcacatgccatcatatcattatttacttgttttcccaaacaggctgatgttgatggaaatggaaccattgactatgctgagttcatatcagcgacaatgcacatgaacagattggagaatgaagaccacatacttaaagcatntgagtattttgataaggaccacagcgggtacataacagtttatgagttgga

SEQ ID NO: 94540 - DNA, 399 bp, Oryza sativa
  Clone ID: PAT_MRT4530_92820C.1
atgaggaggggccgctcgcggcagccgggcatgaggaggggccgctcgcggcggccgggcgaggagggaggcggcgcttggcggtcgggcgaggagggagacggcgcgtggcggccaggcgagaggaggggcggtgggccgcggtcggacaaggagggaggcggcgcgcggcggctgggcgagaggaggggccgctcgcggaggtcgtccgggaagcagtggcggcggccttggatcccggcggcgaggttgctcagagcgaggcggccttggatccggggaagcagtggctgcgggcctcgggcgaagcagggcgcggcgactgatggcagaggagcggtgcgtggcggccaacgggagacgggagaggagggagcggcacgcggcggcaggcggtag

SEQ ID NO: 94541 - DNA, 1556 bp, Oryza sativa
  Clone ID: PAT_MRT4530_92821C.1
ctatagcctagggcctcttgatgtttccacaataactcgtttcctgcaaggctcaataacctcgaaattaacagttgaagggactttcccttcgatatatcttctaataacttgtggagccctatatgcttctattagatctgaatcagacatgagcaactctctgtctaactcagattccatccgatcgtccgtagtcatcataatgccacagtcccaggatatgaatctcctaatttcgtatttgaaaccatatattctagtgtccagcgtaaggaactcgagtgaaggcgtgttgtcaagaatgtgacttatcaactcaactagggtctttgatgacatcagtccagtgatctttacattcttcaggttactgtagttgcatttaggaagcttcctcaattccgaggaatcttcaagaatgcgatcattcttagtcccgacagagtccaaatgtaagacaaaagtttccaaggctggggaagcgtcaagaaaaaaaacaagagaaaaaaaatcatagcaggggggtgattcctttctcggtccaataaacaccatctccaagtacctgaggtagagaaatttattaggcaccatgggtgtgttgacatcctcatcacgagtcattagaaacagattttcaacattacgggcaatggttggaagcttggtacgggcataatggaacatgcggtgccaagggtagagcaatagatttacatcccttaattgtactgcatctccgagtgatattactgtcagtggccctcgataatgaaaactagagagcattggagcatttatctctatcatatctaacctatggctatgctgcacacgcagacagttgagcttttgcagcacacttgttgtcttgaggaaaccaatcttgcaacaggaagagatttccaaactctccaaattgaaagaattggagatgaagcatgccaattcctccccagtaatgtccacccaactcaaatgcacactcttcaagcttctcaagcactcaaactgaagtgttggatggagcgtgcaggaagataggtggaaagattgaactgaatttcctctacggttatcagaaagcaaatgtgaatatgggaaggtgtattctgtcttgttgcgtaggggaagctcaaaggcgaattccttgattttgagtgtgctagcagccttaagccagcgatcaagatgcgagggatgcactgcatagccaggaccaagttcaagcttgaatatcttcacaccaacgcccgagtggtttcgcataatgttgtccactatggcgatgaaatccacaggtgtctcattgtcattaacaccttttcggtttagcgctaggttttctgcattgaagatgaggtttggatagcatctccaggaatgtagaaatgcatgagatacgcatgcagcacgggcagcgtctcgcattggcacatgggaaagtatcatcagcaggagatcctgtgcaggcatgggaaatatatatctttgatattagaatgatagtagctcttgttgtaaaacaatgttaccagtaatggtcacttttt

SEQ ID NO: 94542 - DNA, 703 bp, Oryza sativa
  Clone ID: PAT_MRT4530_92822C.1
cccacgcgtccgcgccgtgtccctgatctgattgattgatgccggggcggccgtgatggcggcgggagcaggagcgggcggcgggggcggggagggcgacagcaacgggggaggcacctccccgggtggcgtgtcggcggcggcgccggcgatcgggccccaccacctcggggttgccgccgcggaagaagcaatgtggcaaatgactttaggaggaggagagtctatggagtccactccataccctgagcggataggagagccagactgcagttattatatgaggactggactatgtaggtttgggatgacctgcaaattcaatcaccccccaaatagaaaactggctgttgctgctgcaaggatgaatggagagtatccttatagagttggtcaacctgagtgtcaatactacttgaaaactggaacgtgcaagtttggtgcaacatgcaagtttcatcaccccagggagaaggctgcacttgcaaaccgtgtacaaatgagaaggaatgtgcttactacttaagaacagggcagtgtaaatttgcaagcacatgtaagtttcatcatccacagccctttaatacaatggttgctgtacggaactttatgtattcacctggacagtctgcaacctctcctggtcaacatacttattctggggccgtaacaaactggaccttgtcaagatctgcatcattta

SEQ ID NO: 94543 - DNA, 2152 bp, Oryza sativa
  Clone ID: PAT_MRT4530_92823C.1
ttttttttttttttttttttgtcgagaacaatgacccagatcgcgcagccatggccgattcttttattgaacaaataattcagttggtagaacataaattacaattattacaattaaggcagagcattatttccgttgttttcaacatgcacacttgcacaagcagcaagtcctgcgcttactccccaatgcctagaaaggaagaagagcaaaacgaaacagaatccccaatacagtcagtttggtaagctttgtccactgcaggccacctgtataactacaacagagggatcaaggcacatcattcgccgaaccgagtgtcaggaggtgagtgtatcttgtgtgtgtatatatggtagggataaataagaatggttgccccatttattttcacggggcatgcaggaattggggcggggaggggcaagcaagaacattttcctgcctgaatgtgatacatgatgaagcaccggtgtgtggtgattcagagaagcagaaaaaggatggacaaggacctgtacagcttcagctctttgaatttgttggagataattactgaagagtcaagaatgggaggtagcatgaggaaaggccgaggagggcttatgatgcctctctctcggcattcccatcgccagagggtatttgctgggaatcagactgaggaacccggtgagaccttccagagcctccatcaagcaatattcctggatgccctggtgagggtgacaactgataatgcatagatgacacatcacctcttggtgatgttgcacttccatacataagggttcccataggatggtcaaatttgcaattaggaccaaacttgcagatcccgtaacgagaatagaatgtgcagacaggttctcccgggcgtagtggaagaccaagtgaattcaatgcacagtttggagcaggtaccagtcgctccttggggtgatgaaacttgcaaacagcaccaaacttacagtctccagttttcatgtagaattgacactctggttgatcaggtctctcaggaaatatattttccccttgtactgtgtaaacaccgactggaacagagcctccttggtatgactgatacattccatgatctcccataccacctgtttcactctgacgtgagccatagtattgagtggttacaggtgttcgttgctggtcatctggagacgaagagcccatttgtgcagcataaggattccaccctggaacttgaacaaggccctggggaacgattacttgtgcatagcctgaatggccaggccacctggggcttgcaataaatgatgcagatcttgacaaggtccagtttgttacggccccaggataagtatgttgaccaggagaggttgcagactgtccaggtgaatacatagagttccgtacagcaaccattgtattagagggctgtggatgatgaaacttacatgtgcttgcaaatttacactgccctgttcttaagtagtaagcacattccttctcattcggacgcatcgggtagcctagaacatttaactgtacacggtttgcaagtgcagccttctccctggggtgatgaaacttgcatgttgcaccaaacttgcacgttccagttttcaagtagtattgacactcaggttgaccaactctataaggatactctccattcatccttgcagcagcaacagccagttttctatttggggggtgattgaatttgcaggtcatcccaaacctacatagtccagtcctcatataataactgcagtctggctctcctatccgctcagggtatggagtggactccatagactctcctcctcctaaagtcatttgccacattgcttcttccgcggcggcaaccccgaggtggtggggcccgatcgccggcgccgccgccgacacgccacccggggaggtgcctcccccgttgctgtcgccctccccgcccccgccgcccgctcctgctcccgccgccatcacggccgccccggcatcaatcaatcagatcagggacgcggcgaggtgcgcgtggagtggagtgggaggagtagggaagaagggaagggaagggaagggaagctaggcacgcgaggagaggaggcggcgaggaggagagaggaggagacaagcctccagcccgggggtgcagcacggcgtgccg

SEQ ID NO: 94544 - DNA, 454 bp, Oryza sativa
  Clone ID: PAT_MRT4530_92824C.1
atcctcttcccttctcttctccatcgcatctaccaccgagcgtgcaaggagggggggggggggggggggataaaatggattactcgacccagggccaggtcatcacctgcaaagcggtggtgagataggaggccaacaggccgatgacgatcgaggacgtgcaggtggtgccgacgtaggccggtgagggccagtgtaagatccttttcaccgcgctctgccacaccgaccactacgcctggagcggcaaggatcctgagggtctatatccttgcgttcttggacatgaagctgctggaattggtgaaagtgttggggaaagagtaattatggagcaggatgaagaccatgtcattgcttgataccaagcaaaatgcagagattgcacgttctacaagagtgaaaagaccaacctctgtcgcaaagttcaggctgccgcaggggtcggcgtcat

SEQ ID NO: 94545 - DNA, 324 bp, Oryza sativa
  Clone ID: PAT_MRT4530_92825C.1
atggcctccttccaatgtttatcatttactgcctcttctaaactccatggttcaccagaagatctatcacttgcgtcgactctgatcgactgcctgcttcagctgtcgcctagtcgaccgctgtcgaacttcacgcctcatcatgcgcagtcgtggtcggagacacaaacgacgtgctttgtggggtcgccggtgccataccccgagaacgagccagtggcccccgaggtagcgccagtattccctgataccgacgctgtcgcgctcaactggggtataagccaggactccacctatgacttcttcttcaaacaacttctttga

SEQ ID NO: 94546 - DNA, 417 bp, Oryza sativa
  Clone ID: PAT_MRT4530_92826C.1
atggaggagattgaaaaagccctgaaagagatgaagactaacataactctaggccctgatggtttgcctgtgagcttgtataaggaattttggaaacaaattagagagcagataaaggaaatggttgatcagctctatgaagggaccctagagctatggagactgaactatgaattgcctataagtgataggaaattattggcctcagaactagccactcctacagataagatagagaggagattagaatctggagctaatgatccatgctacagactacttagaaagaaatatatgagcagaggtgagggttctttcaatcatctgttgagtgggttcctagttttgaaaggcttccataaggtcaagaaatggatggatgtgggcagcaactatattctgggaaatggggaatga

SEQ ID NO: 94547 - DNA, 297 bp, Oryza sativa
  Clone ID: PAT_MRT4530_92827C.1
atggcctggatgtggttgacggtgttgactaagaatgagaggataggagcgggagagacagaggaagcaacaacaggagaagcatcgtcgaggcatggggcgaggtgcaggtggagcggcgcattgagaggctatggccccatgcgacgccctcacatcccatgcgtgacggcggcggttgctggcgaggccatcaccccgagtaggtgtgtcgtccctaaagtggtgccgctcgctagatctggcaaacccaaggtcggatctatcgagctcaacggggtggcggcggcggcctag

SEQ ID NO: 94548 - DNA, 1120 bp, Oryza sativa
  unsure (1)..(1120): unsure at all n locations
  Clone ID: PAT_MRT4530_92828C.1
gccgtcctgcctgtcgtggcgatgnacaccgatttttgccctgactacccaggtgcctgccacctgatggctcaccctgctgcccgtcctcttacccggcctgttaactatgcttgctatccctnttcgtgctgccttctttgcccgttctgtttgttcctcttgcctgctccctggttgctgcgttgtttggtggtgtttcttgtggtggtgggccgctgtggtctcctgggcggtggtggcgtggcggcggtcgcgtccgcgggtgcggcggttcctgcttctggctcggcttccgtctcgctgccgggttcgggttccgcgtgtctttcgtcgtgtggtctggtctctcgtcgcggtctgtgggtggtggcctggggagtggtggtcgcgtgtcctttggggtcggggccgcgggggcgcgcggcggccgggcgccgcggcccgggcgcgcgcgcgtcgtggctgtcggctgcggtgtcggtgtggttcgctgggtcgtgttgttgtggggcgttgtggcgcttgttcgttgtccgtcggtctctgttcgtgcggtgtcgtgccttgacgtctctgctgcgtgtggccgcggtcgtgtgtgtgcgtggggtgttgttcgcgggtggttgtgtgcggtgctgtctctgctgggtcgtgcggtcgttgttggctgcggtttggtgcggcgtggctgctgcgcgtccgtgctcgtcgtcggggcgcgtgcttgtggtgttgctgtttagtgttcgctgcgttgcgctgcgcctctgagtcgtgtctctcctgctatgtctctgctccttgcttgttacctcttccgtctggcgttgcgtcgtgtgtgctcgcatcgtcgctgcttctgtcgcgctctcttgcgtgtccgtctctccacgtgcgntgctgctgcttctggctcggttctgcgtcggtctgctcggcgtcgctcgtctccttatcttcttctcgttgctctcgtcttcgtcntggtctttctcgttattctttgtgtcgggcatctgctttttcgtcgtctgcggtcgcgctgttctcgtgtggtggtggctcgtgtctctcttccgcgcgttgttggtttcgcacggtgtactgctctgtn

SEQ ID NO: 94549 - DNA, 458 bp, Oryza sativa
  Clone ID: PAT_MRT4530_92829C.1
ttaatatgccatcacttagacctttattatgtatcaggtcataaaatctctcttcatgccctactcaaatatctctgctacttaacaggaattgtttatgcccacaccaattatcttccaaaattatttgcctctgtggcatgaggggtacaatcttatttctaagggtattgtcaacagctggaatatagatgtctttgcactctttgctgtattgtcagctaaatggtgatacaaagtacatattcggtgaagctattaataactccgtagaaagattcttttttgtttcgtttgaattaggcagctggagatgataattgtccattcgacaacaggagatggctcttccagagaagctgttgactgaaaacactttatcggacttgagataagcatgatagctgtctcaactggtgtcaagggaggactgaacggtgtatatctagaccatacat

SEQ ID NO: 94550 - DNA, 548 bp, Oryza sativa
  Clone ID: PAT_MRT4530_9282C.1
ccacgcgtccgctggtggctcgccggaacgcgtccgacgcgtcgctgcgcgcgctcgggtacgagaaggcgagcatcgacgacgtagtgaagatgacgtgggaggcgctggaggcggagatcgcgacgtggaccaaggcgttccggcacaccatcaacgtcggcctctccaccgagcacgacctctgcgcccgcgtgttcgccggccgccacgccgccgtcgggcggggcatgttcgccgacctcgcccgctgcgtcatgctccacatgctcaacttcacggaggcggtgaccatgacgaagcgcgccgcggagaagctcttcaaggtgctcgacatgtacgaggccacccgcgacgcgtccccggtcatcgacgccttcctcaccgccgacgacggcaacaacagcaccgccctgaccgacctcaagcacgagctcaactccgtccgctcccgcctcggcgagttcgccgccgccatcttccgcgagctcgagagctccatccgcgccgacgccggcaagcagcccgtccggcggggggccgggcac

SEQ ID NO: 94551 - DNA, 1858 bp, Oryza sativa
  Clone ID: PAT_MRT4530_92830C.1
aaggagaagcgtatcacgtgggtgagagaatttacaacctgccatggcttctctgatttggttatctaaaatggaatacttgacatacgtgttggaacaattttttgagttcagagatgctacttttttgaaaatgaatttcacatgaaagatgcacctagcacttctagtgaagaacccattttaccctttgattcttttgtgccgatagaacacgatgaacagacgcctgtgaaaaatcctgaggaaaataacactgtagccacttgaaggagcgagagacaaatgactgcaaagttttttagtgataactacattgtataccttgtggatgacactccaataaccattgaagagacattatgtgctgacgttgactattgaaggaagctttacagtgagatggattcaattatgtctagtgatacttggaaagtcgttgaacgtcttgacaggtgcaaagtaggatgcaaatgggttttcaagaaaaaaacttaggcctgatgctacaattgaaaagtacaaggcaagatttgtggccaagggttatacccaaaaagaatatgcggatttttcgatactaattcaccagttgctctgttgaccacgattcgaatactacttgctctagcaacctctcatggtcttcttttttaattagatgggcattaaaacatctttccttaatgaggagttggaggaggatatttacatggatcaactagacatgtttgtattagaaggtcaagaggaaatggtgtgcaagttgttctagtctttatatagccttaagcaaacaactaagcagtggcatgagaaagttcgacagaactctgacatccactatctaaactgacaaatgcgtgtactaccgctatggtgagggagaaggagtgatcttgtgcttatatttcaatggcatgctgatttttgggaccagtctcaatgtgattgaggaggtcaaggactttctatcccaaagctttgagatgacatatttggggccttttgatgttattcttaacattaagctactgaggggagatgatggtggggttacactcccacaatcccactatgtggacaaagtgttgagtctctttggttatagtgactgcaagccaactcctactccttttgatcctattgtgttattaaggaaaaaccgaagaataacaagagatcaattgagatactctcaaatcattggttcactaatgtatttggttagtgcaatgagacttgacatctcatttgctgtgagaaagttgagccagtttgtttcaaatccaggagatgatcactggcgtactctggaatgagtattgcgctatctaaaggcactgtgacctatgaaattcactatgctgggtatacaaaagtactggagggctatagtgattcaaattggatgtctgatgtggatgagataaaaaccacaagtgaatgtgtgttcacactaggaggtggcgctatttcctagaagtcttgcaaggagaccatcttaacgaggtcaacaatagaagcataactgacagcattagacactgccactgttgatgctgaatggcttcgtgagctcctgatggatttgctagcggttgaaataccagttccgactatcctaatgaactttgataatcaaacgttgattactaaggtgaacagttcgaaagacaacatgtaataatttaggcacgtaaagagacaactgaattctataagaaagctgaaaaactctagagtgatagcattggactatatctaaactgctaaaaatttggtagatcagtgcactaagggcatatcgcgtaatgtgatggacagtgcattgagtgagatgggcttgaaactcact

SEQ ID NO: 94552 - DNA, 347 bp, Oryza sativa
  Clone ID: PAT_MRT4530_92831C.1
ctaaacgtgactagaactcgaaacttgttgacagaaaacacgaggtaggtccaaaactcgccttcggatgtatgagcgtgccagttgatttgatcctacaatcaacaagaaacaaagacaaagaaaccgtagttaaatccataaatgatagccgatcggctaggactgtatccatgtacggcaatcatcttgaagcacatcaactcaaacccaatgttggatgcgagtcatattgttggaatcggctgtatcacctaacccagcctgattcagatttagccgatccagtcgtagctgatccggactccagccgattcttactctgtttccgcaacaatccctgtctc

SEQ ID NO: 94553 - DNA, 772 bp, Oryza sativa
  unsure (1)..(772): unsure at all n locations
  Clone ID: PAT_MRT4530_92832C.1
attccnatcccctttcgatcccccttggtcgatctactagggtttccgatccacgaatcaacccaccagagtcgcccggccatgccttgggtttatcatccgcaacttgaattgctggccgttccgcaacaacctgaatcgtgtcccatggctgcggcggttacgcagcctgaatcgccggccatggctggggttgatcgtctccgcttggacggtgccatgcccccctcgtatccctcctcctggtctgtgctgccgcgggaggtcgtggttgtcgacgagatcgacgacggggaggagctacgccggtggaacatcctgagatgcgatcgcagggccggctacggcgtctgcgaggcagtggtggagggcgtgaagctcggtgcgcgcatcgtctccgaccggggcttctccgccctgtgcatcatcgtgagcaaagccgcgcgggctgggacgagaggccaagtctgcgccgcggtgctggctatcaagaatcatgtcatcgtcctctccgtcgcctttcccagaagtgatttgttccactccctcaagtgntgcgtgttcatccttctacctggtctacgacgcctccgacgcgtccatcaccatgatccccgacctgcaattctcctttcacaccacaaagtgtcttctgctgtcaccaaggaacctctcccatcgcttgtggtgttgcacattacctcgtccctctaggccgtgccatgacgattaaggggnatggatcagcacatagaaagatcgtgtctgcctg

SEQ ID NO: 94554 - DNA, 903 bp, Oryza sativa
  unsure (1)..(903): unsure at all n locations
  Clone ID: PAT_MRT4530_92833C.1
acgagctcaaagatgcgtcctcctcctcctcctcctcctcctccgttagcaaccctggtcgcgagctacctaggtcagcgcgccaagaaccatgctcttgtctcctccagctccaccgccgctgaagccgcccgtccgcctgaatcgactcccgcagcggcagccgggaggcggcgtgcggttcttgctgccccggaggaggccaagagggccgcggtcctttggcgtggtggtgtgcatggcggagatggccagtgttgggaccgggtcctcgtgggaggagttgggcgtcccggaggagagcgacgcgatcctgggaggcggaggcggggacgggcaaagtgcggcaggcgaccaggtgggagctcgtcgaggccggcccgagcctcccgagtaaatggctggtcgcgggttgttatacttctgcagccatttggaagcatgatgctcttattatgtgggctatgattggtgctggtctaaactctatgttttcaaatcttcttaaacggatattcaaccatgaaaggcctgtgtctgctttgcggtctgatcctgggaatgncttcatcccacgcgcaatcttttctctagtctgcggtgtttctaattctttcatgtaagcactttgagatttactttgaaagttcaattatgatactgtatgtcagtataatcacctgagtttgggtagagatctcagttgttttcagcatttcatattaggtagtgttctcattcttttgttttggaacatgccaacatggtttttatatttcattgattaagtgaaatgagcgcaaagatggttttcctatctatctatcagcaaattcagtccatctgatccatattctaattctatcaaattgtaatgtccttttagaaatttataagcacttc

SEQ ID NO: 94555 - DNA, 2412 bp, Oryza sativa
  Clone ID: PAT_MRT4530_92834C.1
atgtacatgggcaacaataacaatgggtatcgtccacagggaggtcaggggtagaactaaccatgcccatactatcaaggaggtaacaacaacggtaacttttctaaccaatcctccttgaaagatttcgtctttgcgcaagctaaaaccactgatgctttaagcaaaagctagctgccaatgacaaggtcttagagaacattaatgtcaagctagatggcttcgcttttacttttcaaaactagctgagttttaataagataatagaaacacagctggctcaattggctgcattagtacctacaaatgaatctgggagggttccggggcagcccaactcatccattgaaaatgtcaaggcgatcacaacgaggggaggtaagtccacttgtgatccgccatatcctaaccctgcatggaaacggtatcaccaaggaagcgccatctggtaattcggctgacaaagaggtttagccagagaaggttgtgccgcatgagtattgcgacacacagttgttgccgtttcctcaaaggaacaggaaaccgtcagtggacgaatagttcactcgttttgttgaagtgatccagaaaatccacatcaacgtgccattgttggacgctatgaaagtgccaacatacgcacgttacctcaaggacatcctcaacaacaagagaccactcccaacaacggaggtggtcaagctgacgtagcagtgcagcaatgtcatactccacaagctcccgtagaagcagaaagattcggggtgtcctacgatcacctactcgatcggggcacagcagttcgaccaagccttttgtgatcttggagcaagtgccagcgtcatgcccaaggacgtctttaacaagcttaacttcacggaagagaagtttgagttccagccaaggaccgaacaatgctccatggtcagaatcaaaatttcctgctaaaggaaacaacgtttccaaggaaccgttattggaagatgcgggtgaaacccattacaccgatcaaaaagctagagcagccggctcagaagaagccgtctcctgcaccaaaaccaaagaaggtatggaaggaaaagccaaagacgcctgctccatcacctccggagacgggtggaaaattcgcgaactaaaattgaaagactttgctcacaaattaattcaagctttgatagtttccctcaaattcaaatacttagttgcatacatataagtcgctttggtgaaactaaccggcggaatgaggaggcgattgtcttgtttgttcaaggggtctggctcttcatcaagtcatcatgacgagtctagcgctctttcatcagccgatgtctcgatggaggaaaccgacgttccgcaacgtctcttgagcgacgccgacctcgaccttgtcaacgatcgggaaagacaagcctactacatgttgagtgaccgggagtatgctcacatgcgagaatactctccggcactgctgaaaaagataggtatggatactgattttcgtgctatttggaaagctattggttggcagagatttgctgtggtagatgagcctggttctcgttttcttactttgcaatttctgtgcactttgaaagaaaacagaagatggaatttcctttcgctttttccataaggaatacacactttcatcgaaaggattaagtacatttcttggttttcacgattcctgtaaaatggatctccagaaaggaatttctgggttcgagaaaaatagattttgggaagacatttctggtgctccaatttgcaagaaacctaggacgaataatatccataatcctacacttaggtttatgcacaaatggattgctatgactttgtttcctagaggtgatcttagacccattaggagggatgaattaataatcatgtttgccatgaccataaaagaatcccgtgtaggtggaacatacagggagacacgcaacacggcaaggaatgaacaggaaggttcatcttcctcaacacccatgcagatgtatgaggcaggttgcgagccgactggggatgcacccggatggacccaagctccacgccacagcatcggagtctcaagccgggtaagtgccagtgaggaccggtggcgtgcacctcatgacatacagacgggagagatccaatacaatctcgaagaacacatatcacagacgcaagaatggcaacagactgctgatgctcagttcgccaacatcaacaacatgatgcaacaacagcacgatgaccttcaggcgtacttccgctttaaggtgttcaatccttaccaaggaccctaagcaaaagccaagcttgggtgggggggagacatctcttcccccactaaggtaacttgtatcacattgcatattttcctttccaattgcatcttataaacctgaaaacaatataaaa

SEQ ID NO: 94556 - DNA, 236 bp, Oryza sativa
  Clone ID: PAT_MRT4530_92835C.1
ttgattttgttggagttttggggggatttgttcaggtgttgttctattctacacttctacttgtcggtggttctttttctttttttgttctttgatgtttctcagtttctgcttggttcatccattggtatgtttggaacttggaagaagagatctttctgtttggttcttccattttctaggaaagatcagcattgcatgtaggagtacacgctacttttgttatggtttgtgaa

SEQ ID NO: 94557 - DNA, 1271 bp, Oryza sativa
  Clone ID: PAT_MRT4530_92836C.1
catagtcgaatccctttcccctcgcctccacgaacaagcgaaagtaaacgcgacggagaagaaccttccccacgttgggttggattggtcaaggcggcaacgaaccgaaggaaggaagggaagcatctgggctacaggtccacgcgatcgattgttcgatcgatctcggattgatcgctttgtgattgtgattaatctcgcggcgacatggcgacgtcgtgggctgcgccgccgccggggtacccgtacgcgcagggtcagggcggcgcccagccgccgcacccgccgcagtccacggccgtcgccgtcactccggtcagcaacggcgtggggaacccctacgtgatcgtcaccccggccagcgcgtccccctccacctgccagtcactaaggaaggcgctggagcggtacggcaggaagctggaggacggcacccgcaaggccgccgacaccaccggcaacatctggcaccaccttcggacggcgccgaacatggcggacgcggcggtggcgaggctggcgcaggggacgaaggtgtacgcggagggcggccacgacagggtgttcacgcaggcgttcggcgtcgtgccgggggagcagctgcgcaaggcctacgcgtgctacctctccacctcctccggccccgtcatcggcacgctctacatctccacggcccgcctcgccttctgcagtgacagccccatatcctaccacgcccccgccgtcgctgtcgccggcgccgccccagctcaccctcctgaggccatctacaaggtagtgcttcccctgaaccaagtgaaatcggtgaacccatccgccagcatgacgaacaggggcgagaggtacatccagatcatgacgacggacaaccacgagttctggttcatggggttcgtctcctacgacaaggcgctcaagaatctctacgaagccctgcagcgccgtgcgtgatcgtcgcccacggccaccgcagctaagcttcactctgatcctaatatacatatctgccgatttatattccattggtgaacttgtaagcttcagatcttgctctggaataagtgtgacacatcactaaaacaaaatctgatgccgtgtgcccgcgtgtatgatctgtaattcgctcatcagtgtagaatgtgctgaattcacttgttattgtagattgtgctgaactcactatcctttttataatgtactgaattacctgaacatagataaaaaaaaaaaaaagcgctgaaaacgaaaagaagagctaccatgccgacgga

SEQ ID NO: 94558 - DNA, 669 bp, Oryza sativa
  Clone ID: PAT_MRT4530_92837C.1
accttcccacgttgggttggattggtcaaggcggcaacgaaccgaaggaaggaagggaagcatctgggctacaggtccacgcgatcgattgttcgatcgatctcggattgatcgctttgtgattgtgattaatctcgcggcgacatggcgacgtcgtgggctgcgccgccgccggggtacccgtacgcgcagggtcagggcggcgcccagccgccgcacccgccgcagtccacggccgtcgccgtcactccggtcagcaacggcgtggggaacccctacgtgatcgtcaccccggccagcgcgtccccctccacctgccagtcactaaggaaggcgctggagcggtacggcaggaagctggaggacggcacccgcaaggccgccgacaccaccggcaacatctggcaccaccgtgcgcacccaccgatcccctctctcccaatccgttcgcgcgcgacgcgggtgactgatgcgttgtgcgtgcagttcggacggcgccgaacatggcggacgcggcggtggcgaggctggcgcaggggacgaaggtgtacgcggagggcggccacgacagggtgttcacgcaggcgttcggcgtcgtgccgggggagcagctgcgcaaggcctacgcgtgctacctctccacctcctccggccccgtcatcggcacgc

SEQ ID NO: 94559 - DNA, 323 bp, Oryza sativa
  Clone ID: PAT_MRT4530_92838C.1
aggttcaaatgcaacttattcataaggcatactgctgcaccacaggaaactgccttatcaagctaacatatcatacggactctacgggccattaaaccaaacacacatagacggtcgtaccactaatacttgacgaacagaagctcggtacgaccacccacataaaatgcttcgccacactggctgactactgaccaacacggatgtaaaacaccacgtgctgggtgcagctattctcgatggttgtatacaggagggtgaatacatcctccagatgatcggcggcggaaatcagacactaggtcgctggcgagaatccgctc

SEQ ID NO: 94560 - DNA, 616 bp, Oryza sativa
  Clone ID: PAT_MRT4530_92839C.1
gcactactaccgtggtgaaagtgcaaaacatgttgaaccccacatcttgctcccctggtaaacaaaaatgaggtagattgcccattttacacattttcaacggaaaatggactgtgctggtgttttccaatctgttcactttacatggtattctgtagccactcttgtttacgattgtattttgcaacttgcaacaactgtgaaggcgatgacatgttgcagattttcatatccaaattaattttaaactgtaaacctgtacaaaaacatggttcccttgcatactagttgcattgctgtttgcatctctgttacctttttcccaattagtaatagtcattcccttgcatatgtttattttattttatttattatcccttcccttcttttccaattgttcatgtttaatattggcattctctgttctataagatgcattcagccattctctatgacagaaatatttggatcagggttaagggaacttctgaataaccccttcgaaaccctcatatttgattagcttatacaccatattcttatgattgcctccagttcttaccctagactcagatattccaaataaaattctaagttatataaaaaaaaaaaaaaa

SEQ ID NO: 94561 - DNA, 3094 bp, Oryza sativa
  Clone ID: PAT_MRT4530_9283C.1
ctcgggccggccgggaaactgaactctatgtccaaaatttgttttactcatctcgtgctgactacttttgtctgttgtcaggtcctgtgggtgaggacatgttccattggcaagctactattatgggaccctcagacagcccatttgctggtggggtattcttggtgaacattcatttcccaccggattatccttttaaaccaccgaaggtaatttctttgcttatgtgattcaacgccataccttacagtcattttcaatatcgtggtgtttagaactgcatttacatgataacatgagttcttggggccctcaataaaacattatctgctatctattttttcccttggattctaatgtttaggcgatgatcgaaataaacatatcagattcaacatccaaaaataaggtttatttcaatgttatgatgtttagagctaatgttatatgataacatgagttcttgggggtccccaaggacaacattttttgctctctgtattcttcacttggactctgactctgtatatatattatgatcttatttgccggccgggagcaaccaaagcaattcttgagctcaatcagcaacaacacccttcttgcttagttaagtccttcgccctcccaagaagaagaagatgtcttgctgcggcggcaactgcggctgcggcagcggctgccagtgcggcggcggctgcggcggatgcaagatgttccctgatgtggaggccacacaccaccaccttcgctatccaacaaggtactttcaacgaaaccaatgctgatttgttaacagaagggtcaaaaacagcctacaaaattctgaaacgacaagcaactccgatttacaaattgacaactcttgaccaagcgacaccattatttgtttgatcagatcaaccttgcacattgatttacggacagacaaaattcaaagttgaccgaaaacacatactggaggcagtacatgcacgtcacttccgaccaagagtggggaattgggattggtctttgatttctggagctggtggagctgcagagcgatggccctcaccatatccacccctgaaaccgccacgatccccgcggcccctgccacgaccacggccgccatagtacctctctccttcagctggccaggaactcgttgatgctcccggccgggctccccgactcctcgcagcttcctcttgtttttcttggccgaaccccccctcgacacgccgtcgccgccgaggggagagagagagaggccgccggccgccgctaccactgacccccccccctcgccggagcgccccgtcgccggtcgggtttgatcgatggcgtccaagaggatcctgaaggagttgaaggacctgcagaaggaccctcccacctcatgcagcgcaggtcctgtgggtgaggacatgttccattggcaagctactattatgggaccctcagacagcccatttgctggtggggtattcttggtgaacattcatttcccaccggattatccttttaaaccaccgaaggtctctttccgcaccaaggttttccacccgaacattaatagcaatggcagcatttgcctcgacatcctcaaggaacagtggagtcctgcacttaccatatcaaaggtcctcctgtcaatttgttcactgctgacggacccgaaccccgatgatccgttggtgccggagattgctcacatgtacaagactgatagggccaagtatgaatccaccgctcgctcctggacacagaagtacgccatgggctaaagccagccaaactggtggacgtgtcgaaacccaacgacgttatcacctaaataaccatcaagtcaccactctccccccaacgaagtatgaatggacttttgagggctgttgtgcccagttgaactcatatgtaccctaccttgtgaagtccgtttcagtctggtagtctgttctacctgactgttctgttatttaagtcgtttcctaaatcatatttattatgtcaatttcaaccttcctctcttcagtcttcaaagaaagaagtgctttcctcttctcctcccttaatttctcaaactcctcaagagtcatttccttatcctcttccttttcttcctcatttggagtgacatctttgttatccttgttctcatctgcctgtggagcaccctccggtgcgccttgcttctcagtaacaggggccttctcatccaatttcagggcttccccagtttcctgggcgagaatttcatcagtggtagttccccagttcccacgccccgaaccctcacgcttcatctcatacccacggccagtgccgctatggcgctcatatggcctccgagacatcctctcagagtcatcaccatacccacctcgtcgacctcctccctggaagggtggccgagggcccctctccctgtcctgagcgccttcttcacctccagctctgctaccaccgcctccaccatatcctccctggaagccattcatttcttcacctccaaagtctcggttttgaccatagcctcgcccacctctgcctcggccgcgttctccgcgcccataccctccgcgtgagggtgcactgccatctcgagactccctcacggcctgtgaagggggagccggcttggtggggaacttggaggcggccggctgcgcgccgcccttcccggcggccggagccgccgccgccgccgcggccttcttcgcctcggccttctgcgccgcgacggccgccttggccagcagctgcgcggggtcgtcgttgtcgtcgccgccgaggaggtcaaaggggttcgcggtcgccataggtgcgagttcgacggcctacaaaaaaaatcacgctacaagctcgctatcttcgtgtgtggggtgggtgactggggaactgacccctcctggctacgaggctcgcctgccggactgcatcgccatggctctccagccgccaagatcgagggcgtgggaaaggcaagagtcggcggcggcggcggcggcggagagagagaggagagagacgtagtgaggggggagagggtgtgtttgtgaggaaaggaataaaaccctagccgcaatcgcgccctttcttattataa

SEQ ID NO: 94562 - DNA, 3687 bp, Oryza sativa
  Clone ID: PAT_MRT4530_92840C.1
aggagttgtcactggtacattacattacatgaattttatcacaaggagctgcacattctcagaaatgaaaaaccattctgatcaggaggaactccagttacactcgagctgccacaatcgtgtagataacaaccacagacacagggcaagaacaggaggtccaaattataaaaaaaaatgagacacccacaaactactgcaatcaccagaacaagtacagccattgacagtaaactcgtagaaaaccacactaccttgtcaaacaaaaaaaaacaaatcagaatagcaatagtagtacatgtgtcgttcacctacttgctgtttttctttttcagtaagctcccaaacttcttcagaagaggcttgttctttttctgttgctgctgtggttttgtcggggacattgccactttgctggtatcttctgatactgtcccatttggatgctcagtgttggtatcctccttgggctccagttcatctttggaggatacggtttcttgttttctgtctggatgtggctgcttctcgatgattttgttgctctcctgtgtggtgcactcggttttcacttcctcctgctcaaccttggtttcgcctttctcttcttcgtgattcatgtccccattggagctcctattgagaacatcaagttccagtttagggtttttatcgttttcgctttctgcgtctccattttccaccactgaatctgtaacttcttcgtgaacagaactgtatgcctcgtccacaaccactagcttctcctcctcctcgggatgtttctttatcatcgcttcagcaagcaaggcagacaattcatctatcttcttcatggcatcagcttctcgcaacctgaactcgtcgttctcctgggttaggctctgcagtgcgttctctttatctagtaatcgctccttcagttgtgaattttcatatgttgcctcctgcacagacttgttggcttcagcaacagcagcttctgtgtaaatcagtttctcttcaagactctctttctcagtctttgcctcatgcagagccttgctagcctcagcacacgctgattcagtgtacaccagcctctcttgaagcttttctttctcctcgttggcaacttggagttggtgctcggcatcttgcagtgattccactgccttgtcgacttctaattgaagagcactaatttcttcctccgactgcttgtttaacctgacaatgtcagtctccttagactcacattcttctctgtacttgttcacctcagcctccaatttatcaacatttttccttaagcaagtgatgtcatagtttgcctcatcaagcattacctcataactctccttggtgctttttagggccatcttaagatcaccaatctgcgcgagggcatgctcgtggtcatcttctttgctcaaatacctctcatgtgcttcctttgctttgtcagattcctcactcaatgcagcagtaagatcttccactgctcttttctccttctcttctctatccctagtctcgttcaactcgcttattagcttcacattctcctcggtcaggccttcaatctttacattcgcggccttctcattgtttaaggcctctgaagctgcttcttcagcagcctcaagcttgtttctcagaacatctatagtcgtctgtagcccaaacacctcttgctgagatgcatcaaattgctcgttggattcgttgacatctgctaaaagccttgctacctcaatttccaaggcagttgtctttcctttgagcacttcaatttcagattctctatcttgtaatgcagactggatcttacccaattcttctgttgtggaggcaagcgattcacctttgaacttatctgagagagtaactgcctccaattccatttcaagcaatcctgccttgtgcttccattcttcgaatagctgacgggcttctgattcggccttcttcgcatcagcaacctctgatttaagctcctcaatcagtttttccgtctcggctaacctctcctcaataattctggcttcctctagtttgcccttcagaactgaaacctcggactccagattcttaacaagctcctcggtttcacggtttttactctcctcgctctctgcagtcgaatcaagcagtcctttcaagcggacaacttcactggagaggatctccaccttctccgcattgacctcagcgatcttcatggcatcgtctgcgtggccaagtgcagctttcttggcctcattcgccatcgcaagctcacgcctgaatctctccagctcctccgtcgtagtgaccaacgtctccaaatcggcggcgtgctggccacgcacgcactcgatctccctctgccactcctcctcccgcttctgcgcctcatcgatgcccgcctgctcgagctcatccgcccggaacttctcgatctccgttgcctcctcggcccacctcttcgccatgagcgcatcctggagcttctcatgcgtctcatcagcaaccctcttcgcctcattcagctccccgacaaggcgatccctctcgccaacggcgaaggccagctgatccttggccttcttgagatcctcctgcgcggactcgagccgcgcctgcagctccgcctccttcctcggctgcttatcaggtggagtgccgatcttgggaacccggcgctcgacgacgggcttggagtcgacggatctcggcgagcggtcgaaggagaggcgggggcgggcggtggccgacggcggcgagttgggctcggacttgaacgggccgccgccgccgccgccgacgccgttgttgcgggagcgcggcgtggacggcgtgccgccgatgctcctcctggtggcgccgggagtggaggggcggtggatggaggacggcgtggatggccggtggttggacgacggcgtgctcggccgccccctgctgatgggggactcgttcggcccagatctggatttggagggcagcattgtggacatggctgaggaagaagaagaagagagaactcttcacacttcactcttcgctcttcaaagaaggaggaggaggagaagaagcgagagggaggcgtgggctcccttgcgaaaaaggctgcaaaggaaaaaggcaaacaagggaaggaaggaaggagaggagggagccaaaggcaaaaggaggcacatgccaaagacaaagatgatggatgatgctaccaccaccaccagcgccaccgtcacggccaccaccagcagcggcagcggcagcggcgagcgattagctaagctagctgtctacggtagaggagctcgttggagctggccaactgtgcacccagggaagacctggtcaattgggcgcacagggcaggagctcgttggccggctgcgcatacagagagggccttgctggtcgtgttgtgtggatgaggagctcagtggttgtccgcacgcacgcggggaggacctggctggccacaacgcgagaatggaggagattgctgatcggctacgctcaagaggaggaatccccgtccatgacacgcgctgggaggagcttgtcgggcggcttcatgcacgtgcactgaggagccctctggccagggggcaaaggggaaggagctcgcagaccggctgtgctcagaggggggggggggggggggggtcgctgaccgcgacgcgggtgggaaggaacttgctcgctgacaag

SEQ ID NO: 94563 - DNA, 221 bp, Oryza sativa
  Clone ID: PAT_MRT4530_92841C.1
aatcacacagagcttgagagcgaactgtgtagcgtgctgtggaggtcgaggaaatagtcaagctccgaccattgtacgcagtgaggcgtagggtgccaggagcagcacttcaatcttgggtttggtttatgccgagctttacaaccaacggttcgacgttggggtccgtagaccacgcgaacgtccccatggaaggtgtaaagttccaaccggcggctttt

SEQ ID NO: 94564 - DNA, 333 bp, Oryza sativa
  Clone ID: PAT_MRT4530_92842C.1
gcgcagcggaagtaagcactaagaaggtgaaggaaccctcgcgatttagtgcgcgtcgatgtagaggaagtagtcgatcgcaccggctcgaccttctcctcttcgtgcgttctcctcgccgtgctcccatgccaatcagcaccgcaaagcagaggcgcctctaccggtatccacatgtccagggaagaaacaccacgggcagatgtgctagcacccgcgcgcagttcatatacactcggctgcaacccgaaaacttcttttcggtccacgtgtcaacagcggtccctagcagaacgtattgacccaccgagcatacataaagatcatatcggt

SEQ ID NO: 94565 - DNA, 699 bp, Oryza sativa
  Clone ID: PAT_MRT4530_92843C.1
atggcagcagcatggcggacgagccgggtggcgtgcgtggcggcgggcgagaaggacaagcacagcaaggtggtgacgtcgcgggggctccccgaccgccgcgtcaggctgtcggtgccgacggccatcgcgttctacgacatccaggaccgcctcggcgtcgaccaaccaagcaaggccatcgagtggctcatccgcgccgccgccgccgccatcgacgcgctcccgtcgctcgactgctccctcgtcctccccaacgccgcccagctcctcacccgccggaggcggaggccgtcgagcgggcggccttcggcggagcaggcgcgcacgaggaaggctacggtggcggcgtcgcctaggaagtcgggggagaagaggcggaagacgaggtcggggtgcgcggcacggagggcggagcgcatcgcgaagttgagggcacggagggaggggtggatgccgaggcgcgaggcgagcacctcggcggcgtcgggcggccaaagctggatcaggaagccgtcgacgccgaggagcggcggcttgtgctccggcacgggagaaggagaggaaggtggcggcaggagcatgggggagataaaagaggacgagctcaagcatggcggcgagaggagtggggcgacggcgggcggagaaggccggcaaggcggtggcgcggagcgaggtggtggcggacgacgatga

SEQ ID NO: 94566 - DNA, 539 bp, Oryza sativa
  Clone ID: PAT_MRT4530_92844C.1
ctcgctcgctcgctccttctcgttccggattactgccaccgcatcctcgccggagccaaggtccccttccaccgccgccggatccaaccatctgccttggccggccccatcctgcactgcactgcttccgccgttttggatccgggctcccttctgcactgcactgcttccaggtccccagatcggcgaggggcgcacggtctcacatgatgttgtgatgtgctcatagggagagtggctcaggagattggggcttggggtggatcaacaacttggtgagggaggccggtggcgaagtagcaaggaaggccgggcgatgcagatccatggcagagcagcttctcttaggagctcagttgcgactccggcgcaggatctcgcgcagctgtgcgggaatcatgcagcaacccatggttgattggtggctcgagcaacagccagccacgccgcagccgccatcattaacagagggaagtgctttgagaaaattttctgaatgttatattgtttattgattccatattttgcttccttgcctg

SEQ ID NO: 94567 - DNA, 357 bp, Oryza sativa
  unsure (1)..(357): unsure at all n locations
  Clone ID: PAT_MRT4530_92845C.1
aaatataaatagccgnnctgccatatatttcattcacatatgcctcacccaacaacatatagtcgtagcagataccactcttacatcaaggcagagagggatcaggtgaaacaaaaacaaaagcagagcccggccggtaaaatcaaaagacgatgaacaaactgggaacacacgaaacaaggggggagacattatcgaatcagagatgaacaattaaccaggggtatatttgacggtgccggcttagttgccaccagactccttgcatacccggggttttgtaggctatgaaactgatgagctgaactctgcctgtctctgtctgaaccctatttttctggcctaatgctttagggt

SEQ ID NO: 94568 - DNA, 667 bp, Oryza sativa
  Clone ID: PAT_MRT4530_92846C.1
cccacgcgtccgggccgctgctccgtcctccgttgccgccgcctattacatctagggaaattcatctcggatcaatttttatcacttgagagtttgcgtgcagcgtggtctatgttatgcatttgtttgcacataaaaaaacaggtccttatccccttgaaacaagattagctgaacaatgcctcaaaatacttatgaaagtctttcttctttacatcgttgtttttttcggtggaaaattgttatttttcttacataaaaactctatttctacaatcacaagcatgggcttttactattcgtgtagtctgtagatagtgcttctgtcatacaacttgttcaatggaactctgtagtcgctatgccccttactcttaaaaagtgcaataaatagaattttaagagagaagcaaaggccaactgccctgtttgcttgcccttaagtgatgtgttattgtgatatttgaattatttttttctttcgttctggaaatactttcgttagtattattaggtctttccatggtatcatgtctgacctactagcctttcatggcacagtatagtatttttacttgtttggaaccaatatccttcttatgtaccagaacataatattgtccttatattctggcaggactgcttataatctggcacttcacgaaca

SEQ ID NO: 94569 - DNA, 1485 bp, Oryza sativa
  Clone ID: PAT_MRT4530_92847C.1
atggcggagggtgttgtgggctcactaatcgtcaaacttgggaataccctggcgagtgaagcagtggagctcgcgaagtcgttgctcgggctggagggatcagctctgaagcgcctcttctctgagatccgggatgtgaagggggagctggagagcatccgtgccttcttgcaggcggccgagcggttcaaggacgccgacgagacgacctccgcgttcgtgaagcaaatcaggaggctcgccttcggcatcgaggatgccgtcgacgagttcacctaccagctcggcgaaggaggtggaaggatgccattcaagcggatgtgcaagatcggcacatggtctcgcttggccgcaaacctgcaggacatcaaggtcagcctgaaaagcgctgccgagaggaggattaggtatgatctgaagggcgtcgtcgtgagaggcgtgaagtcggtggtgggaagcagctcaaactcaaactggagatcagactccgtgcacttcaagagggatgatgacctcgttggtgttgacaagaacagagatttgctgatgagatgggtgcaagatgagcagcagcagcggcacaggatagtcagtgtgtgggggatgggcggaatcggcaagacggcactggttgcaaatgtttacaatgctgtcaaggatgactttgacacctgtgcttggatcaccgtgtcacagagctatgacgcggatgatctgctaagaacaactgttcaagagtttcgcaagaacgaccggaagaaagatttcccagatgacgaaggtgcatcaagctacagaaggctagtcgagacgattcgctcttaccttgagaacaaaaggtatgtccttgttctagatgatgtgtggagtacgaatgtttggtttgatagcaaggatgcatttggtggtgccaatattattggacgaataattcttacatcaaggaattatgatgtggcattgcttgcacctgagacgaacataattaatttgcagccattggtaaagtcccatgcatgggatttgttctgtaaagaggcattctggaagaatggaaatagggattgtccaccagaattgctccaattggcacaaaattttgttgacaagtgccatggcttgccaattgcgatcctacaactctatgatgcttatgatgggaagaacatatacttccatgagaactcatttcccaggctcagggagctcagtatacgaggtgcaccacacctgaatgaaatcgagatgaaaagaggagctgtggcaagcctaactgacctcaagctcttggtctgtccaaacctgaagcagttgccctacggtatcgaacatgtcaggactcttgaggagctcactctggaccgtgctgcagaagagcttgtgggcagggtccgacagaagacagagacggtgatttctcacgtccatcgtgtttatgtcgggttcagcagaaatggtgtattggctgcagaaaggatccaataa

SEQ ID NO: 94570 - DNA, 1593 bp, Oryza sativa
  Clone ID: PAT_MRT4530_92848C.1
atgtgtggcatcctcgccgtgctcggcgtcgcagacgtctccctcgccaagcgctcccgcatcatcgagctatcccgccggttacgtcatagaggccctgattggagtggtatacactgctatcaggattgctatcttgcacaccagcggttggctattgttgatcccacatccggagaccagccgttgtacaatgaggacaaatctgttgttgtgacggtgaatggagagatctataaccatgaagaattgaaagctaacctgaaatctcataaattccaaactgctagcgattgtgaagttattgctcatctgtatgaggaatatggggaggaatttgtggatatgttggatgggatgttcgcttttgttcttcttgacacacgtgataaaagcttcattgcagcccgtgatgctattggcatttgtcctttatacatgggctggggtcttgatgtttgcaggataaaaattctggttttgatatatgttccttctaagaaatttaaggttttcgtcactggtcatgaagtaggattctttttcgatgtaatatcagggtccttgttcaaggctattattaagaggctaatgacagatgtgccatttggtgttctcttgtctggtggactggactcttctttggttgcatctgttgtttcgcggcacttggcagaggcaaaagttgccgcacagtggggaaacaaactgcatacattttgcattggtttgaaaggttctcctgatcttagagctgctaaggaagttgcagactaccttggtactgttcatcacgaactccacttcacagtgcaggaaggcattgatgcactggaggaagtcatttaccatgttgagacatatgatgtaacgacaattagagcaagcaccccaatgttcttgatgtcacgtaaaattaaatctttgggggtgaagatggttctttcgggagaaggttctgatgaaatatttggcggttacctttattttcacaaggcaccaaacaagaaggaattccatgaggaaacatgtcggaagataaaagcccttcatttatatgattgcttgagagcgaacaaatcaacttctgcatggggtgttgaggcccgtgttccgttccttgacaaaaacttcatcaatgtagctatggacattgatcctgaatggaaaatgataaaacgtgatcttggccgtattgagaaatgggttctccggaatgcatttgatgatgaggagaagccctatttacctaagcacattctatacaggcaaaaggagcaattcagtgatggtgttgggtacagttggattgatggattgaaggatcatgcaaatgaacataatgctgctaggttgacagtacctggaggtcctagcgtcgcgtgcagcactgctaaagctgttgaatgggacgcagcctggtccaaaaaccttgatccatctggtcgtgctgctcttggtgttcatgatgctgcatatgaagatactctacaaaaatctcctgcctctgccaatcctgtcttggataacggctttggtccagcccttggggaaagcatggtcaaaaccgttgcttcagccactgccgtttaa

SEQ ID NO: 94571 - DNA, 2492 bp, Oryza sativa
  unsure (1)..(2492): unsure at all n locations
  Clone ID: PAT_MRT4530_92849C.1
actcggcttcacgcgaatccgacggccgggacgcgattagcggctcgcaaagccctaattagatcccctctcctccctcctaaacccatccgtgacgcggggcgggtgggtgcggattccattctcctcttggcatcacgaggcggcgccgcttggtctagccagtagccacagggagaggtggtagccgcagccgccgccgacgagacctcgccgccggggggagggcaccatgtgtggcatcctcgccgtgctcggcgtcgcagacgtctccctcgccaagcgctcccgcatcatcgagctatcccgccggttacgtcatagaggccctgattggagtggtatacactgctatcaggattgctatcttgcacaccagcggttggctattgttgatcccacatccggagaccagccgttgtacaatgaggacaaatctgttgttgtgacggtgaatggagagatctataaccatgaagaattgaaagctaacctgaaatctcataaattccaaactgctagcgattgtgaagttattgctcatctgtatgaggaatatggggaggaatttgtggatatgttggatgggatgttcgcttttgttcttcttgacacacgtgataaaagcttcattgcagcccgtgatgctattggcatttgtcctttatacatgggctggggtcttgatggttcggtttggttttcgtcagagatgaaggcattaagtgatgattgcgagcgattcatatccttcccccctgggcacttgtactccagcaaaacaggtggcctaaggagatggtacaacccaccatggttttctgaaagcattccctccaccccgtacaatcctcttcttctccgacagagctttgagaaggctattattaagaggctaatgacagatgtgccatttggtgttctcttgtctggtggactggactcttctttggttgcatctgttgtttcgcggcacttggcagaggcaaaagttgccgcacagtggggaaacaaactgcatacattttgcattggtttgaaaggttctcctgatcttagagctgctaaggaagttgcagactaccttggtactgttcatcacgaactccacttcacagtgcaggaaggcattgatgcactggaggaagtcatttaccatgttgagacatatgatgtaacgacaattagagcaagcaccccaatgttcttgatgtcacgtaaaattaaatctttgggggtgaagatggttctttcgggagaaggttctgatgaaatatttggcggttacctttattttcacaaggcaccaaacaagaaggaattccatgaggaaacatgtcggaagataaaagcccttcatttatatgattgcttgagagcgaacaaatcaacttctgcatggggtgttgaggcccgtgttccgttccttgacaaaaacttcatcaatgtagctatggacattgatcctgaatggaaaatgataaaacgtgatcttggccgtattgagaaatgggttctccggaatgcatttgatgatgaggagaagccctatttacctaagcacattctatacaggcaaaaggagcaattcagtgatggtgttgggtacagttggattgatggattgaaggatcatgcaaatgaacatgtatcagattccatgatgatgaacgctagctttgtttacccagaaaacactccagttacaaaagaagcgtactattataggacaatattcgagaaattctttcccaagaatgctgctaggttgacagtacctggaggtcctagcgtcgcgtgcagcactgctaaagctgttgaatgggacgcagcctggtccaaaaaccttgatccatctggtcgtgctgctcttggtgttcatgatgctgcatatgaagatactctacaaaaatctcctgcctctgccaatcctgtcttggataacggctttggtccagcccttggggaaagcatggtcaaaaccgttgcttcagccactgccgtttaactttctatcgtcgcataaaactccgtagtttgttgttcttggttcaatcccagcttctttcagatgtcgttagtttcttcaaacatgtaatggagatgcgtgcttttcctggcttgttagttactgtatgcttgtcatcgtgtatgttttcttttcttttccaatatgcaaactgtttggtcgtggactgatcagaacattgtaaatatgaataaccgcgactgatatcctcaagttgcttttggtttgcaataaaaaaaaaaaaaaaaaaaannnnnnnnnnnnnnnnccctccaggggggggcccgggaccacaattgcccttataatggagtgatttacccccgcttcattggcggtgttttaaaaacgtggtaacgggaaaaaccctgcgtgtaccaaatttaatgccttgtagaaatatcccctttttgccatttggggttataacaaaaaggccccacccgtttggctcttccaaaat

SEQ ID NO: 94572 - DNA, 774 bp, Oryza sativa
  Clone ID: PAT_MRT4530_9284C.1
ctaaccgcttggtctgtagctacacattggaagctgagatgtaggactgatcaaatttttcgctgggcaggcacaccaaagactctccgttaaaacacaatgacctcaaaggatgtgcaaaaggcaaggacacaatattattattgtactgttctttctagttatgtggacatggtgcaaattcagactaatgggcgatagacatgacatgaatttggggctatatactgtttatcttggaattatttggtggcatactataaattagacaatcttttagcgagacaaccctctgccggatatgcttcagagcacttaacaagcaaaaaataatggccaccgaacatctcacacaatgactataggcgcactaaaaggcacaatccaaaagtaaagatatccataaatgagacagcaacgaaagccaacagaaaaaacattttataagagctgaacagtaaaataagaaaatggtggcattggaagataaagaaacttagataactagatccaccagcgaatattctcatataataatctgcaccctacatgcattacaatactatatgaatcatgcatgcatagaatgtccgcatggcactaaacttaacatgacatgcacttttgctgatctaattttagaatagtaagtatatgatatttaaagttcaagcactactgcatctgcatgttgttagacctcaactgcaaccagtatgtgagtgcttgcatgaacggtttacactagagtcttcaaattgccgtacgcgtggg

SEQ ID NO: 94573 - DNA, 520 bp, Oryza sativa
  Clone ID: PAT_MRT4530_92850C.1
ttctcggctcgaggccggactacttttacggctgggacagcgcccctggcggcgtctcgctggagcggcatcggcggcaacccgccgctgcccccggagcaacgccctggcagggcctcatcgacagccagctcggccctgatgtaagctccatccaatccaaccctgcccaggttggagagagatctcatcccgaagttgttgctagcttcttggaatagattgtttcttgcagcttgcatcgatgcgctttagttccgtttgtttgatccgtgggatgccaattgagttgcagctcctttgggagaaaattgcgtgcgaaaccagtgtttgaaattttgctgaggaccaatagaatagtgcgtgcgtgcgtgcatgcgtgcgctgcgtttgacccgtgaattagcttgggagttggggttgtttgattgacctcatggaacccagccaaaggttttcatgtttaaggggagttaattaaatgtacctccttggtcgtgaaaaaaaaaaaaaaaaaaaa

SEQ ID NO: 94574 - DNA, 251 bp, Oryza sativa
  Clone ID: PAT_MRT4530_92851C.1
gacacgaaagtgctgcttgcttgtacacttgttcatgtgtctatctgttttctcgatttgttccggtttaaagcatcagttttccgctcaatttaagggcgaaggcaaaattttttgttatttactgctgttctctatcgaataatctgctctattacagaagaagagggggggggggaaaagccaacaaaaaaaatagaaagaaaaacaaaaaaataaaaagataaattcagaagaaaaaaaaaaaaaaa

SEQ ID NO: 94575 - DNA, 479 bp, Oryza sativa
  Clone ID: PAT_MRT4530_92852C.1
atatatatatgtggggatcattttacgatagggtcccaggctcccagctgcgaccgtctgctcagtaggtcccgcggtcccgccacgcgccactcgtcttgaccgcgcgctcggctgccgggccagcgcgccgaaccgccaatcaagcaggaggcgcggcgcgggcctttggctgcctccctttcccaagccgaaacgcacgattcgcgcccgcgcgcgcgcgcgtgccccctgtgcgtgttggtttcaggttttggcctctttctgcccggggaatgtgggatccgccgcgtcgccctgcgctcgacagacaccgaccccgcccccgaccacccccgagccgtgaacgtgaacgcgatcaccacccgggcggccggccgcctcatccgctcgaacaccaaaagcgaacaggggaaaaaaaaacggggagtcgagtcgcttcgccgcgcggatgagacgcgcgctgaccaccacccgac

SEQ ID NO: 94576 - DNA, 580 bp, Oryza sativa
  Clone ID: PAT_MRT4530_92853C.1
cctccgctgcaggattgcgcacgagcacaagcccaagtcgcgtcgcaccgaagcagagtagagaagtacagtagcggagcgccatcagccgtccgatcgagtgatccgatggctatcgcgtctgctccacctctgctgctgctgccgctgccgccgaggagcgggcgctcgcggcgagggtgaccaccaccaggggctacgccgtgctgggggtggcgccggagaagaaggcgcatcagtctgaggcggtcgcagagtccggtgagaacgcccatggctgaacttgctgttccctcttcaccacgcccccccgtccttgcctaaacttctccccgcatccaccatctcctaagctcacgtcccactcgtttttaccctatctcaatcacactttgccatcttcgtcaacccaccttcactccactttattcttatcccttatttccactaattccttatcccacttatctacattctttattctattccacctcccccctaattacctacgctacctaacccattcctttccctcactctgtttccacactcacctctacactactcaccaccatacccc

SEQ ID NO: 94577 - DNA, 294 bp, Oryza sativa
  Clone ID: PAT_MRT4530_92854C.1
atggcgtcgacggctcccactgtccggatctggctgtcctctaccccctcccagtccccctccgcccccaagctcctcccgcagccgatccggtggtggcggtggcgtcggcggctcacatgggcggatccggtggaggacgcaacaatggcattttcgacgggtggatccggcgatccagtgatcctctaccccctctcctccccctccgtcccaagcttctcccgcggcggatctggcggtggctcccgcgaacagatccagccgaggcagcggcaggggcttgctttttag

SEQ ID NO: 94578 - DNA, 564 bp, Oryza sativa
  Clone ID: PAT_MRT4530_92855C.1
atggggcctcttctgctctgcgcaccacatgggcagctgtcggatgggagccacggcgggcgacggcgccgtcgatgtccgctgcgagagctaggaggcggggtggctgtacgtgtgcaacagctggctgtacgtgtgcaacagctgcgtgctgcccaccacggtgggcgtaaaccccatgatcaccatacagtcagtgcgtgtattgcgtcgccaatagcatcgctgactccctgtccgatttttatgaacgtatcatttgcagactgcaaaaagagagctcgcctggaacataagacggccgacggcgacgagcgagagaggagcgaggaagggcgccgccagatcgccgtgcggttagccgcggtggtctccgggtccctgatgctcgccgccgccgtgctgctggagatgcacatgttgatgggtggtctccgggagctcgacgccatgagcttctcgggcttcgtcatgcagcacgtcgtcgtcgtgctcgccgccgccggcctcctcctcgtggcgttggctggctgcccgccgtgggacgacgagcggcggcgctga

SEQ ID NO: 94579 - DNA, 217 bp, Oryza sativa
  Clone ID: PAT_MRT4530_92856C.1
ggatttttgacaaaggaacgcaggacaataccacgacacaatcaggaggggagagcaaacaaaaactagcgaaaaacaaacaggcataaagctcggcacatgcacaccgagaataccaagaagacgggcactgggacaaaagaaaagggcaatgctagtgacaagaccgagcattggaaagaacaccttaccgcggacagtagaccataccacaagg

SEQ ID NO: 94580 - DNA, 549 bp, Oryza sativa
  Clone ID: PAT_MRT4530_92857C.1
atggggcctcttctgctctgcgcaccacatgggcagctgtcggatgggagccacggcgggcgacggcgccgtcgatgtccgctgcgagagctaggaggcggggtggctgtacgtgtgcaacagctggctgtacgtgtgcaacagctgcgtgctgccccctcttctgctctgcgcaccacatgggcaaccacggtgggcgtaaaccccatgatcaccatacagtcaatttttatgaacgtatcatttgcagactgcaaaaagagagctcgcctggaacataagacggccgacggcgacgagcgagagaggagcgaggaagggcgccgccagatcgccgtgcggttagccgcggtggtctccgggtccctgatgctcgccgccgccgtgctgctggagatgcacatgttgatgggtggtctccgggagctcgacgccatgagcttctcgggcttcgtcatgcagcacgtcgtcgtcgtgctcgccgccgccggcctcctcctcgtggcgttggctggctgcccgccgtgggacgacgagcggcggcgctga

SEQ ID NO: 94581 - DNA, 721 bp, Oryza sativa
  unsure (1)..(721): unsure at all n locations
  Clone ID: PAT_MRT4530_92858C.1
ggaaaggagaacggaaccctcgacggaaccgccgcctccactgtccggggggcggtagagatggcggcgaagaggctcctcctcctctcccgctgccgcctcattgcccaccgcccttcctgccacatccccttcctgccgcccgcgctcgcccgctacctcggctccccatccagccccaaccccaaccccaagaatactagtagcatggggacggcatcgtcgggggaggaggaggaagacgacgagggcaaagctttcccgtggaggagatggaggcctgacgtggcctggctccccaaggccctggagcccgcactgcaactctacaaccaatacaagcctttcctcactagtgcgcctactgacaatatccccgcaagcacccgcaccttcagcgagatcctaagcgacctccagcggagcaaggtcagcattaaggactggagtctcactgatctcaccatcggcctctacctcatctacctcagccaagcttctgcaaaggatgctcaagccttcaagggtcttcatatctcctgcaacaacaaggctagccccccttctcttctcttccctatcacaatttcacaatttataatcttgctagacntctgtaactctcatttctcttaatgaaatgggagagctttgctctcctagttcaaaaaaaaacatctataaatctgcttctttctcaaccatttatactatacaatac

SEQ ID NO: 94582 - DNA, 261 bp, Oryza sativa
  Clone ID: PAT_MRT4530_92859C.1
atggcgcgaagggcggtcagacctcgatctacaccggttagattggcaacaaggcgcggtcaaactagggcaatcaagccggtcagaccgatctccatcagcttcgaagagcatccaggtggcagcgtccacgtcatctaccaaagaaatataatcaagtggaacaaaaatacttacctccaggagaaggcattggaatcggtctctgtcttggtggcttctgaacagaggcgaggtggctgccggctggagtcaaactag

SEQ ID NO: 94583 - DNA, 2577 bp, Oryza sativa
  Clone ID: PAT_MRT4530_9285C.1
gcacgaggaccgcaactccaaggctccgtcgacacgaacttcacaatggggaagcggagaggagtaggagaggagaggacactgacgacaccttctccggcgcggagaggctcatctaagcctactgataccaaaatcacctaccgatatacatcgaccctatccttcccgctagtgcggaatgagggggcccaaaaggacagcatggagaagggggctgtgctggtcgtaaatcccatcccaattgatataatctcgccacaaaacaacaaatcttgcagacccccagctaaaatgggtgactatggctaaatcttgtcggggcagtttggaagtgtacttacccctggctgagaaaaactaacttgcctccaggatcatattcgtccttcgtcacgagaagaaggtaatcggtctgctccggccagttagaagcttgggtaatgaatagggcgcaagagccgagagatcaggatgaggtgatcctggtctcgaggccaggcgccaagctgtgcggcatcagataggaagtcaaacctaagccgcacctccgttactcggggaacatgactacctcaaaggttccgaacgtagatcccctgtcctgttggattcctgagatgataatgcgcggcgcatcctccgctatgactccttcgctgacagccatgtcaatgcaggattgagaagtggtctgattcaaccaagtggtggttatagcatatcattgacttgtgatcaatgccctggcacaagtgatacagataataatggagcaacctgtgccctgcccgccaggcagtgcaatgaacgcatcagcaaaccgggccatttcagccttcctctcgtgcatgccagagaccgctctaacttcaccaacaggctcaccagtgacctctctgggcatcaaggatttcgggatgaccccaatgacatggcgaccaccgtcgtgaacagcgtgggagacgaggcccatgaggccgatggagccaccgccgtagaccaggtctatgcccctctcgaccagttccttgccgagctcgacggcggcgtcctggtagctggccttcctccccttggcgctgccgcagtacacgcagatccgcctgaaccgcgaccgcctctcccctgcaccaccgccaccgctctccggcgccgccgtcgccgccgcccctgctccggcgctcctctccgccgcagcctccattgccatcggcaccagcctcgccctcaggtaggtagagcgcgcgtgcgtgagcgaggcagcgattggaggagagagatggagagagaggaaattgaattggagggggaggcgcgggtcaggctgaaggatgctagggtccagtacctctccttggttcttcttgagaccattgtgaagaactgtgagaaggccttctcggaggttgctgctgagagggttcttgatgagatggtcaggttgattgatgatcctcagacagtggtaaataacaggaacaaagcccttatgcttattgaggcatggggagagtctggtgatgagcttcggtacttgcctgtctatgaggaaacctacaagagcctgaaatcaagaggagtgcggttccctgggcgtgacaatgagagcttggcccccatatttactcctgcgcgttcagtagctgaagctgaagttgatgcaaacttttcccagcagaccttcgaagatgtgcaagtgcatacatatactgctgaagaaacgaaggaagcttttgatgtggctcgtaacagcatagaacttctttcaactgttctttcatcctctcctcagcaggatgctttgcaggatgacttgacatccactcttgtgcaacaatgctaccaatctcagcacactatccagagaatgattgagactgctggagacaatgaggccatgctttttgaggccttgagtgtgaatgatgagatccaaaaggtgctgtccaaatatgaacagatgaagaaacccgcagcgtctgagaacgcagaacaacggccggtagtcataccaattgccacagaacatgaagattctgctacggtcggcaatgaagatgccctggtcagaaaaccagctggttctcgagcaaggtcaggtggagatgatgatatccttgatgatctcgatgagatgatatttggcaagaagggaggaagcagttcccaagaagggcccaaaaagcaggatccgaagaaagatgacctaatcagcttttaaataccgttctggccagttcctcgtggaatcagaagatgtttgctgtttcatagtgccgaacgatatctgtattcatccccgtagaagatttcacattcgccaggatttggatcgcttgtttatttgcatacgatctatcatacttgtctgtcacagtttgttcggttgatttaagttgcttcacccttcacatcctctggttgcatgattgcatctgcattggatggctaattatctcttgatggaaaaacacgtccagtataatgaatgagcctcagctcctattcattgctcaaaaaaaaaaaaaaaaagtataatgaatgagcctcagctcctattcaaaaaaaaaaaaa

SEQ ID NO: 94584 - DNA, 240 bp, Oryza sativa
  Clone ID: PAT_MRT4530_92860C.1
cgcgttcggttggacatacccggtcggtggacacctgtcggtgggtggaggagaagaaacttacgaggattcccctagtaacggcgaggcgaggataatggcggtagagcacgcacacccggtctccctagccgtcctcccgtcgtccccggctcaggcgacgccgttgccgctcttcctgaggtacgctgctttccgttgtgggggagatgccgccgaaagaataggccccttctgatt

SEQ ID NO: 94585 - DNA, 510 bp, Oryza sativa
  Clone ID: PAT_MRT4530_92861C.1
gtcatttggggcaaaatgttttctgtagtcaatggtacggcacatcacaaatgagctaagcttgtaaatcgttatgtgatttccatgtctgctcaggttaaattaacctgcgctttgctaacagctctggtttgctatgcttgctgatagttatgatttgtagcatttggttttctttataatttatagcccagaatcactgaatttgctgaatttctttgttgcaggcatttgaacaattgatcaacttaattgaaaaggggtatggctaattagcatcctgttggttttcaagttatgtttaggaatgatatgaagatattgtttcttgttatatcttagctgacaaacactgtttgtatttcatagtgttgctgttgaacaactatatcagatagatgagactgacatcacaaaaaacagtgaggatacttgatgattgctagactgtttttccctggtactcatctgtttcactgcatgatttttttttcccttgttaggtttacg

SEQ ID NO: 94586 - DNA, 605 bp, Oryza sativa
  unsure (1)..(605): unsure at all n locations
  Clone ID: PAT_MRT4530_92862C.1
aaaaagggaaaccgggggaaaaatcccctatagtttgaaaaagccccccccggaaaaaaaccccaaccaaagggggaaaaaaacccacggggcccccgcccggaaaacattaaagggcccggccgatggataaacccgccccaaatggccccaaaaaaggaccaataaaccgggctcccaaaaaaaaatgggggggccccaaggaacccaattaatcgggggggccccggcgcccccggggccctggaaaaaacccctggcctttggccgggggcctggaccccgagaaataagccccctccccggccccaggggaataccccggcgccgcggccccagtggaaaacctagcccccgggggccctttggaaaggaaatggcttccctttttataacccggggcgggggggtaaccccccgccgggggggctcccgggggggagtggccccccgttaaacctgacctaaaaaacgtggaggccccgccgggggggaggacccaggagcccccgaaaatgaagggcggccccaaaaagggctggcccccccccccggggggggcaaccccccaacccaccctttttttggcgtnggacccgggcccg

SEQ ID NO: 94587 - DNA, 464 bp, Oryza sativa
  unsure (1)..(464): unsure at all n locations
  Clone ID: PAT_MRT4530_92863C.1
ggaatggtatcatcccatcccacctagtcccagaatcaaacacacgctacaagattaggctttggtttcaggtttagggtgtgtttgttcacgctaaaattaaaagtttaattgaaattgaaatgatgagacggaaaagttggaagtttgtgtgtgtaggaaagttttgatgtgatagaaaagttgaaagtttgaaaaaaaagctggtaactaaaccaggccttagttagggtcgtgtaagctacggtttagccgttcactttgtttgatacagttacggatggagtaatattttctttaagctggatgtttttagttttacaaatctaatatggatctgaatatatgatcatataataatattttgataaactattctgtttcacttataaattatttagcatacaaatttcaaatccagttataaataagaaatgngaagttgtactaaacaggacctgtct

SEQ ID NO: 94588 - DNA, 780 bp, Oryza sativa
  Clone ID: PAT_MRT4530_92864C.1
ctactccgacgcggtgtccaagtgccgtcctcttccggcctccgatgcggtgtggcggctcctcctttggccgcagcttttcccctcccctcggtcccctcctcccctacgcctctcggctgcccctgtgcggtgcggcagctcgtcctttgtccatggccacaacttgtcccctcccctccgtcccctatgcatctcggctgctggcacctcttcttgttggcgcattgaggttgtcgtcatccaaggatagaacgactcccagaagtcggcggcggccagacctggaccggctataggaagggcaagttgggaatgggcaggttggcgacggctggttgcagtgagggaggaagcgaagtccggcgagattggctgcgccgccgccgttaccgccgtgccggccaccactgccgccgcatcctggcaggggacggctaccgccgccagatccgggttgggggcaggtgcctccgccggatccgggcaggggccggtcgctcgccaccgtgcgcacgccatcgagcccgccgctcccggttgcctaccgccaagcccgccgctgccggagccgaaggaggcaaagaggtcggagccagaggagaaggagaaagtggcgctggcgccggtggtgtggcatcgcttgtgcttcatgctctttcgataggtcgcgatctttccacatacacagagagcttgggatctcaccctgagcccccggccgaaccggcaaaggggggcccgtgcggtctcccggtgaggagccccgcgctccgtcat

SEQ ID NO: 94589 - DNA, 378 bp, Oryza sativa
  unsure (1)..(378): unsure at all n locations
  Clone ID: PAT_MRT4530_92865C.1
aaattaaatttactttttttttttattgataacacaaacttatttagggaacggctcaacttanacattcactatttaatttaactactccaaaatacacctaaaatgaacatntctcaccaaaaactacttactttacattaaatatcatcactttccccagaaaatgacactttttacttttgaacacactttactctttaaacatcctcctcctaatcttcatcttacccttccttcttcctttaatactacttacccctaaactactcttttattttcacataattcatagtatttttctcacatttatccacgtccatatcttataatttgcccccaattttaactaataaaatcatctcaaattccctgcat

SEQ ID NO: 94590 - DNA, 1479 bp, Oryza sativa
  Clone ID: PAT_MRT4530_92866C.1
atggtgtcggcgtcgcgcttcgtcctcctctcgagggtccccgccgccgccgcctcctcccgcttcctccgcccgctcgccgccgcggggagcctcctgccggcggcgcttgcccccttcgccccgcccgcggcgggggccaggtgcttcgccacgcagccggcgacctcgtcgctgcgggactcgtcgccgaactggagcaaccggccccccaaggagacgatcctcctagacgggtgcgacttcgagcactggctggtcgtcatggacccgccccccggcgatccctccaaccccgagcccacccgcgatgagattatcgacggctacatcaaaaccctcgcccagatcgttggaagtgaggacgaagcacggcataagatatactcagtgtcaactcggcattactttgcttttggtgctcttgtatctgaggaactctcctacaaactcaaagagttgcccaaggtccgctgggttcttccagactcatatctggatgtcagaaataaggactatggaggagagccttttataaatggagaagctgttccttatgaccctaagtaccatgaggagtgggtgagaaacaatgcacgtgccaatgaaaggacccgacgcaatgataggcctagaaactttgacaggtcaaggaatttcgagaggagaagggagaacatgcacaacttccagaacagagatgtgcctcctgggcagggattcaacagccctcccccaccagggcagggcccagtcctgcctcgtgatgctcctccgatgcctccacctccatctccaccaaatccaggtgctcctccaagctaccagccccatgcaccaaatccgcaagcaggctatacaaactatcagggtggtgtgcctggttaccaaggtagagcccctggctatcaaggtggcaaccaggaataccgaggtccacccccacccccaccctctgcttaccagggcaacaaccctggataccagggaggagggccaggttaccatggtggcaacccacctccttatcaagccggcaacccacctccttatcaagccggcaaccctgtctttgctggtggtgcaccaggctaccaaggccaaggaggcaaccctagttaccagcaaggcagcgataactacaatgccggtgcgccggcctataagagggatgagccagggaggaattaccagtagaacaacactgctagaacaaatgatatgtagagtctagtacgagcataacgctatttgctgtctgttttggagtctatcgcatgtatactcttaccctgctttgcaaactcagtttcttttgtgtcgactaattacttcgatgtgtctgaaactggcgattgtttgaggcacttctagcattataaatgtttagtcaactagtgttttttgtccaaataaaaaaaaaaaaaaaaaaaaaaaaaaaaaaagagggggcctcgtgccgaattcctgcagcccggg

SEQ ID NO: 94591 - DNA, 128 bp, Oryza sativa
  Clone ID: PAT_MRT4530_92867C.1
gctctgtcctgtgatgcgcaatggaagcgtgactgagcgtgaggccctcactgaccgggccgctgggcgaccctgatcttctgagaacgggtacgatatcggagcacgcctgtagggacccgaaagag

SEQ ID NO: 94592 - DNA, 2735 bp, Oryza sativa
  Clone ID: PAT_MRT4530_92868C.1
ccggccgggaaaaccctcagcccccctcattcccaatctagggttttcccccatggcgtcggcgtcgcgcttcctcctcctctccaggctccccgccgccgccgcctcctccacctcccgcctcctccgcccgctctccgccgcggggagcctcctcccggcggcgctcgccccctccgccccgcgcgcggcggcggcggcggcgaggtgcttcgccacgcagcccgcgacctcctcgctgcgggactcgtcgccgaactggagcaaccggccccccaaggagacgatcctcctcgacgggtgcgacttcgagcactggctggtcgtcgtggagccgccccccggcgatccctccaacccggagcccacccgcgacgagattatcgacggctacatcaaaaccctcgcacaggtggttgggagtgaggaagaagcaaggcataagatctactcagtgtcaactcggcattactttgcttttggagctcttgtatctgaggaactctcctacaaactcaaagagttgcccaaggtccgctgggttcttccagactcatacctggatgtcagaaataaggactacggaggagaaccttttataaatggggaagccgttccttatgaccctaagtaccacgaggagtgggtgagaaacaatgcgcgtgccaatgaaagaagccggcgcaatgataggcctagaaactttgacaggtcaaggaattttgagaggagaagggagaacatgcagaacttccagaacagagatgtgcctcctggcccagggattcaacagccctcccccaccaggtcagggcccagtcctgcctcgtgatgctcctccgatgcaccatgctcagggtaatgttcctccacctccaccaccaaatgcaggtcctccaaactaccagccccatgcaccaaatccgcaaggctatacaaactatcagcagggcggtgcgcctggctaccaaggtggaccccctggctatcaaggtagcaaccagggctaccaaggtccacccccacccccaccatctgcttaccaaggcaacaaccctggataccagggaggagggccaggttaccagggcggcaacccgcctccttaccaaggtggcaaccctggctatgcaccaggctaccatggccaaggaggcaaccctagctaccagcaaggcggcgataactacaatgccggctcgtcggctcgtagctgggctgctggctgctgccgctgggctgttggctactgccgctgggctgctggctgctgcgactgcgaggcgaggcgtcgtcggctccttggtgtggctgtggcgtcgtcgtcagtggtggtagcggcggtgaaacggcgggacggcgccgcggccgcgagacggcgctgcgaaacggcgggacagcgtcgcgagatggcggcggtacgagacggcgaagacggtgggggttggcgcatgtcgagtgcggcggtgaatggattggctggtgccggtggtggcatcatcgcccagatcatcacctaccccctccagactgtgaacacccggcagcagacagagaggtcagcaaaaaagaagaaggccaatggcgcagccatcgccaatacttccaccctcttccagatgctccagctgttccaaacagaaggatggggagggttgtatagcggccttaaaccctctcttattggcaccgctgcttcacagattctcaaaaacaaggtggaagatctagcagttgctcgcggtaagaagggtctaggggatggtactgttgggatgttctcctggcttggtattgcagctgttgctgggtcaatcaatgttcttcttaccaatccaatatgggttctcgtgactcgtatgcagacacatacacaagcagaaaagaagatcatggagtctaaaaaggagcttttgctgaaggatgttgctagggccaattcaatagaggtctcaattcttaaggacaggttgtataaacttgattctgaaaagcctcgtccatatgggacaattcaagcggtccgggaggtctaccgtgaatcaggcataagaggattctggaaaggacttattccaacactaattatggtattcttattaggtgcaatagcaaagctcggagctactgttgtgacatacccattgctagtggttaagtctaggttgcaagcaaaacaagaaattggcaggaatgtgatgtccagatacacaggtacgattgacgcgatcataaagatgatccggtatgaaggattgcacgggttttacaaaggaatggatggtgaaaagccaacaaaggctgacaagatccgccacagctttctttgggctggcaaagcttatgcaaacggcggcgtctgtcgggtcgcatgggctcgagtttgctcgcccaaggagtatggtggtttggggattcctgatctagagagagctatcgggcattcagagtgcttaccgctcaatgaacactctttcctctcatggttgtgcgactgtcgcaagaagatggtcaaggaacattgccggggtttcgacaccatcgtgacgttggttgcatggacgatctggaaggaaagaaacaatcgagtcttcaaccagaagagcagaacttgggcggaggttgcaagggttatgacgggtgaagcggagctgtggcggctagctagagctgcaatccccgttttggtagctcatgttagtggagaagggtcgcaaaatttagttggagattag

SEQ ID NO: 94593 - DNA, 653 bp, Oryza sativa
  unsure (1)..(653): unsure at all n locations
  Clone ID: PAT_MRT4530_92869C.1
ttttttttttttttttttttttttttttttttttttttttctgcagaacaccagcaattaataactggtgaataaaaacaagaaatccatggaattacattgccaccccaaatcaaaattccccaagattctatggtatacctcccccataccagaccctttacatcaccaaaaggcaaaatgaaaagaggttcatcaattagaaacatcctgacaatctaaattaccaacctacacaatcttactccttgtagcaattacaccactgctccagttctctactatttcttcccaggcccccttcacaatgtatttaccaccaagcccccattcactttctccagtatacccccaaaaacatatttacctccaagctcacctccccatttccggtataccggccatccttgacttgaacagaagaacaaaggatgaatgctaagctactgcactactgacctactaagcaatgacaccaatgaaatttctacaccatcatctttggcacttgcttcgcaagagacaatggnaaactgccttctaccttgggatgggggttctccaaggagtggacctcagtttgtcgggagntgcgggccttcanggccggaggtgaangggcatggttctgtggagcgctgcancatctggaa

SEQ ID NO: 94594 - DNA, 684 bp, Oryza sativa
  Clone ID: PAT_MRT4530_9286C.1
atgtgctgctgctgctgcgagtgcgggtgctacgagtgctacgacgcgtgctgcgaccgctgctgctgcggctgcgtctcctacgacacccgggagaccatcttctactgcgccgtctgcctcctcctcgtcgccgccgtcgtcctcctcgccgtcctcctcgccgcctacggcttcatccgccacgtctccatcaccgtcgagtccgcgtccctcacgcggttcaacctctcctccccgtcggaggccaccgctctcgcctacaacctctcgctcacgctcgccgtccgcaacaagaactgggccatgagcatcaagaacaccaaggacctggaggccgggtacagcttcgacgggcagcggttcgagcgcgtcaagctcgccggcgagggggagaagcacccggcggggaagacgcgggtgtaccacctcgactccagcagcgacaacgcatacgcggcgctcgggaacgccggcgtcgccgagttcaagaaggagaacgcgacgggggtgttcgaggtggaggtggcggtcaccggcgaggtcaggtaccaggcgcactacaccaagtgcaagctcgccgcgacgtgcccgctcaagctgcagctcgcgccgccgggcacgccggcggtggtgttccagaaggtcaagtgcaagctcgccgccgccgacaagaactgctag

SEQ ID NO: 94595 - DNA, 517 bp, Oryza sativa
  unsure (1)..(517): unsure at all n locations
  Clone ID: PAT_MRT4530_92870C.1
ggacggntgcacgaggctccgccacaccacatcccggccgcgcccccggcctcgcgggcgtgtcacccggagactgagcgcgcggcgccgcgttggagtcacgccacgccatggagagaaccgtggtgctgtatcccggcctcggcgtcggccacctggtgccgatggttgagctggccaaggtgttcctccgccacggcctcgcggtcaccgtggcagccgtcaagccgccactcgactctcccgatttctccgccgctgtcgcgcgcttcgcggagtgcaaccccgccatcaacttccacgtgctgccgccgccaccgccaccgcccgcgcccgtgggctccggctccgacggcgagtccgcgtccccgatcgtcggtatgctcgggttcctcaacgccgtgaacgcgccgctccgcgacttcctctgctcgctgccctccgtggacgcgctcatcgtcgacatgttctgcacggacgctctcgacgtcgcctccgagctcaggttaccggtcta

SEQ ID NO: 94596 - DNA, 566 bp, Oryza sativa
  Clone ID: PAT_MRT4530_92871C.1
acgctgccgccgccaccgctgtcgccgacgaggaggagatgtggcgggcgttcgggagcttgtgctctcctcctcctccagtcttccatccacaggcctctcccgccaccgccgccatctccacttcgagccttaactagactctaccacctccgcgccccctctcccgcttcctctcctcctccccggagcccctgccggatgctgccggcggcgctgcttccacatcttctgatcccaccgatgatggggaggatagcctcgcctctgatcccaccgaagccggggaggataacctggcctcgctctgggaggacgccggggacgccgatgacatcttcgccgccgatgctatggtcgacgaggtgctggtcgaacgcgtctgcgctgttgtggagtccacccccgaggatcagatccccttcgccctcgctttcaaggtcgtggacttacaacgagccactcctcgccgccattctcgtgtccaccgccaagagctgctccggtaaaaagctactcctccagttcaaatctattaacttatcatggcctgcaggaggtcattt

SEQ ID NO: 94597 - DNA, 567 bp, Oryza sativa
  Clone ID: PAT_MRT4530_92872C.1
atgtcgcctatacttttcaatattgtggttgatatgttagaggttctcattgagagaactaaaggcgatggtcaaattagaggagtcattccacatttagtggaggatggtttgtccattctacaatatgctgatgatacaataatttttctagatcatgaccttgaacatgccaaaaacatgaaggccatcatgagagccattgttggccaaaagctaattgagtggaacgatttgatcctcaggctagctaatataactctagctaatgaagcggactactttgtatggtcgctccataagaatggccaattttcaatccaatctatgtatatcgcgaacatgaactctaatgttcggatcgaaaagagagttctatgggacttaaagattccactaaagatcaaggttatcttcatgttttcctattggttccacttttggtctacgatgctaccacaggaggagtatgatactatgcgcaatggtgctatgctcttggtatcgacagccgagggtctcttattgaactatgggtggcgtagttcaattagaattgctagctaa

SEQ ID NO: 94598 - DNA, 694 bp, Oryza sativa
  Clone ID: PAT_MRT4530_92873C.1
tcataaaacatgagctgaacattgtgaagataaggagatcctcgacgcaggccaccgtgacacgcctattgtgcaggaatgcgaggagccgcgccatccttccgccgtccttgtggaaaggaagcacgctgacggtgtacttggactggttgcagtcgggctagtacacaaggcatgggagccgctgatgtagatcacgacgtagcggatcggggtgctggggtcccgaggatggccgcgcacgcccttctcgtccccatgggcactagttgttgggcggtgcgtggccacagagcacgatgaggccgaggacgaagggtgcggagaggcggtggccacggtatagcagcgtgatttcccggaaccactgcatgttgtccacgtcacgcttggggtaggtgacgtcgatgagggcgaggtcatcgtcatcgtagccgatgcagaggacaacctcccttctggtcactggcaccagatcggctgcagcagcggccagcggcgcctcctctccttgatgcggcaaaagatggagaagcgcgacagcgagaagatgaagaagcgcagtggctgactgggggtgacgacaaggcctcctcatgcaacggttccaagccattgatgctgctcgtgcggatccaccaccgacgcctggatcccgtcgtctcttcgtctccctctcgcgcggatcagccat

SEQ ID NO: 94599 - DNA, 2032 bp, Oryza sativa
  Clone ID: PAT_MRT4530_92874C.1
atggacggcggcgaccgcctcagcgcgctccccaacgacgtcctccacctcatcctcctccgcctccgctccgccgaggccgccgcgcgcaccagcgtcctggcccgccgctggcgccacgtctgggccaccctcccggagctccggttcaggatggacgtcagcctcgccgcccacgcggccccggccctccgccgcctcgaggtctccaccgacgcggacgacccggcggcgtcgacggccgcgctccggctcgccgcgccgcgcgtcgccggcgaactcagcttctgcatctggccgcggtgggacgacgcgccggaggaggatgacgggccggcgccggtgaggcgccccggcgtcgtcaagctcccctgcttcgagaaggccaccgagctctggctaatcctcggcctcctcggcgtctcgctgcccaaatccggcgtgttcgcgcagctcaccgcgctcgccttccgcgacgtccgcttcaccggccgctgcgatctcggcgccgtcgtctcctcgaagaggtgccccgtcctgcaaaagctccaagtccacgactcccaggatctgtataacctgaccatcttctcggagtccctcctccacatcgagctgagcgacctccatggcgggatggggcggctcatgatcgtggcgccgctgcttcgggttcttgatgtgcgccattgcttctactggaggacgtacaggtcccattcccttgttcgggatcaaccatatgccgcggtcttcacgcccgcgctggaggatctcatctgggttgatgcgtatgatcctaccacggtccaatttggcggcgttaaacgcctccggaagctgccactgcgcttcttcatcttctcgctgtcgcgcttctccatcttttgccgcatcaaggagaggaggcgccgctggccgctgctgcagccgatctggcggaggggaggcatgggtgcccagcggagcggcggcatgcgtcagcggccggtgtggagaagggaggttgtcctctgcatcggctacgacgatgatgacctcgccctcgtcgacgtcacctaccccaagcgtgacgtggacaacatgcagtggttccgggaaatcacactgctataccgtggccaccgccactccgcaccctttgtcctcggcctcatcgtgctctgtggccatgcgccgcccaacaactggtgcccatgggggcgagaagggcgtgcgcggccatcctcgggaccccggcaccctgatccgctacgtcgcgatctacatcggcggctcccatgccttgtgtaccagcccgactgcaaccagtccaagtacaccgtcagcatgggccgcagtcagtatttgatggaagccataaccatgctgccagcaattgaggtcatgtccctggagttgtcaaaaagagggcacgcttttgggcagtgtgttttccatttgctcaggatgtccactggtataagaaagctgaagcttgcattacgtggaggcctcaaggactctgaggagaggatcagtgttttgtctacctggttccagggacaccaggcagatgctcgttgttctgcaagttgcatctgtaatcggccacaagcctggaaaacagaggacctcttcttggattctctccaggaagtggaaatcagtggattcagaggatcagagcatgaattggccttcttgaagcgacgttttggatgggcagcaattctgaagacattcaccatgcatcttcatcttgatcttactgtcagcgatgatttatgcaaggagcttcttagcctcgctacccctgagaccgatgtgaagatctacttctatcgtgatgatgatgttcacgctaggccagcttgggtgttgtatacaccagaagagtaaggccccaatcggttgaagcctggtactaagtacttaattatgcagggtatgctatgaattaccatgaaactggatcttatattttgatgacactggatgttctgttatgatcgggattaattcccatactttgccctgcaaggttggcatg

SEQ ID NO: 94600 - DNA, 360 bp, Oryza sativa
  Clone ID: PAT_MRT4530_92875C.1
aattattatttttgattttaatttttgttttaagacccaaacctgaatgaaaaacaaacaaaggctacgatataattggagggaacggggtgattgatactacagacaagggccggtggggggggccattcaaaggccaaatccggccccaatccagggtccccgagaagagggctgcggacacgggttgcggcgggcaaaaacgaggcgggggcagagggggaagccagaggagaccgggagctggacggactccacccgcggactgggcggcgatcttgggggtgcagggcacgggggagcggcggatggcctgggcaaactactgcaaagggagtcgtacggccagggccacggacc

SEQ ID NO: 94601 - DNA, 417 bp, Oryza sativa
  Clone ID: PAT_MRT4530_92876C.1
atgatcgatgtgccagggcttacagctccaggctggctgcctacgccgcttccgagtgacacgttccccgtgcaggacggctaccttgtcgccgactgggggcttacacctccgagccggtcacctacgccgccgccgggccggccgcctactccgccgttgggtgacatgctccgtgtacaggacggctacctcgtcactgactgggggcttacacctccgagctggctacctacactgtcgccgagttacattgtccccgtgcaagacggccactttgccgccgacagggaccttacacctccgagctggccaccttcattgccgccgactaggggcttacaccttcgagccagctgcttacgccattgccgggtgacttccccccatgcacgacggctacttcaccgccactga

SEQ ID NO: 94602 - DNA, 515 bp, Oryza sativa
  Clone ID: PAT_MRT4530_92877C.1
tttttgtttggtttttttttttttttttttttttttttaaaaccaaacaaaccctagcaaaatataatctaaaagggataatggtttacatgtccggacaaacagccacttaacacacttctggcgaaactaaaaaccaggcgggttcaagaatgtgatgtgacggctttgcacaagctttcactcaggctatacaagttgcaaaactggtgcacaccttcctaaaggatgccaacactacataattgttgcctggtgaaaaacgcatactttagaagctttaatccctgctccagacttagagatatgaaatccgggaccagctgggaaataatgtaacacaggccccctgggaacctttaggttatgggaccaccggaacaatttagttccccgaacgggggccacaatttaccaccgttgggcaaatattgttttatatggattgggcagcaacaccgccttgggcaaagtcaaaggttgcaccttggggagcagctaccgggggggctccc

SEQ ID NO: 94603 - DNA, 452 bp, Oryza sativa
  Clone ID: PAT_MRT4530_92878C.1
tggtttaactaatggagctctgctgaatggtttcgtgcgacatgtggggcgtgctggccagctgcagggtagtccagcagaccaacatgatggtgaccaggggtggtctcagacaggcagggagagggagggggtagctggactgcgcagcgtgtggccgtgatttctgaagatgattcataaaccatgcgtgctgagctgcagtgagagcagagtaaaaactggttcacagtatcggtgtacgattgcagttggcatgcatgcagaaaccgacagggaggaaaacggctacgggagccggacaaacacaagcagctaagctaagctaccactcgctctcatctgcattctgcattgcatcatattcatgctgatttcatatctatcgatcgatttgtatgatatgatttttgcagcatcgatcgagaacatgcatgcatatgatcagatgc

SEQ ID NO: 94604 - DNA, 2571 bp, Oryza sativa
  Clone ID: PAT_MRT4530_92879C.1
ataccgggggcagtaggcgcgctgagtgggcgagcgagcgagcggccacaccacccaccaactgagagctgagcaggcgagcgagcggacatggcagcatcgctccaagccgcggccaccctgatgcagccggccaagctcggcggccgggcctcctccgccgcgctgccatcgcgcccgtcttcgcacgtcgccagggcgttcggcgtcgacaccggtgccgccggcaggatcacgtgctccctgcagtccgacatccgggaggtcgccaacaagtgcgccgatgccgccaagctcgccggcttcgccctcgccacctcacctctgctcgtctcgggcgccagcgcggaggggcgtgccgaaggagggcttaccttcgacgagactcagggtaagacgcacatggagggtgaacgggagcgcccacggagacaccggtgcctggccgtggttggcgccggggagtgaggaagttaaaagggattaccgaggagaaacaagagatagaaccgggaacccgtcctcgcagataacggcccacgggacagcccacacggacacggccacaccacccaccaactgagagctgagcaggcgagcgagcggacatggcagcatcgctccaagccgcggccaccctgatgcagccggccaagctcggcggccgggcctcctccgccgcgctgccatcgcgcccgtcttcgcacgtcgccagggcgttcggcgtcgacaccggtgccgccggcaggatcacgtgctccctgcagtccgacatccgggaggtcgccaacaagtgcgccgatgccgccaagctcgccggcttcgccctcgccacctcagctctgctcgtctcgggcgccagcgcggagggcgtgccgaggaggcttaccttcgacgagattcagagtaagacgtacatggaggtgaagggaaccggcacggcgaaccagtgcccgacggtggagggcggcgtcgactccttcgccttcaaggccggcaagtacaacatgaagaagttctgcctggagccgacgtccttcaccgttaaggcggagggcgtggccaagaacgcgccacccgagttccagaagaccaagctcatgacccgcctgacctacaccctcgacgagatcgagggcccgctcgaggtcagctccgacggaaccatcaagttcgaggagaaggacggaatcgactacgccgccgtcaccgtgcagctgccgggaggcgagcgcgtgccgttcctcttcaccatcaagaatctggtcgccaccggcaagccggagagcttcggcgggcccttcctcgtgcccagctaccgtggttcgtccttcctcgacccaaagggccgcggtggctctaccggctacgacaacgctgtggcgctccccgccggaggcagaggagacgaggaggagctcgctaaggagaacgtcaagaacgcctcgtcgtcgacgggcaacatcacgttgagcgtcaccaagagcaagccagagaccggcgaggtgattggcgtcttcgagagcgtgcagccgtcggacacagacctcggcgccaaggtgcccaaggatgtcaagatccaaggggtgtggtacgcgcagctcgagtagggaatgaacaaatgttttgtgcgtggccgggttgatatatcgatacatggagagagggaaggaaggctgcaatgtgtgtatctagtaatgcaaactcgatcgggctgttgatggttttaatttttagcttttgtttcttcctctgttctcgtgaactgatgatcatatcccccgatgatgttatttgcatttcgacaagcggagaggacattgtacgatacatatatgtgcctatcttcacgaacatttgccttccaaaaaagactaaaaatcctctatcccaaaagatgagatatcacatgcagcaatgaacgaaggaggaggggatggaactgctgtggccgaagaggaggagatatcacttgcagcaatgaatgaaggaggagaggatggaaccactgtgacggaaaagggggaagcctcatttccaaggttgtgtgtgctgccctctttgaagaggttggacattgataactgccccaagctgagggctctcccacaacagcttggacacgaggccaccagtttgaaagagctctcccttgtagcagcaagctgcttgaagtcggtgaaggaccttccatccctatctggtttcctttctgtttgtagatgtgaaggcctggagagggttacagaacttcccaaagtgagaaagctgtttgtaagtgtttgtccaaatttgagctgtgttgaggagttaggcagtttggagcagctatggttggatgtgaatatggaggactcatcaccgtgggtgcatgggcttcgagagcagtaccgccacctggatgtctacacgtggcctagagagtgagatgtgaagacccaactaaaagacagtagattggtagagacacaaggtaagggcattggatttgtatttgttgatacatatttttattctatcgttatctaaaatagtggaaacatattttaatttcaaaaaaaaaaaaaaaaa

SEQ ID NO: 94605 - DNA, 369 bp, Oryza sativa
  Clone ID: PAT_MRT4530_9287C.1
atgacaacaacaatgaatctggcgctcaggagctccctggcagtgctggcctcgggagctgtagggacatctggcagcgatgccgacaacggcgtcggatccggcgcttgggacctcggcagtgatgacaaagacatggatctggcacttgggagctcgtcgatggcaatcgagaacatcttctgtgagaccaccatgaagtccaccatctccgactactaccacatcaacagcatcaacatcgcgcacggcggccacactgtcgtcatgctcttctgctcgcccaccgccgctcattgccgctctgcccgcatctcggcgccgctccactgccacgcagggcagccgcccgccggccttccttactga

SEQ ID NO: 94606 - DNA, 477 bp, Oryza sativa
  Clone ID: PAT_MRT4530_92880C.1
atggattgggcccctgcttgcctcactgcgagccactcctcctcgttcacctccttgccggctctttcatggtggttgcgacggccggaggtggaagaggcagggcagtggcgggcagcggcgaccgtggaggaggagggcgacagtggagaggaggcagagcggcaatggaggaggcggagcagcggcggcggcggtggcagaggaggcgaagcggcgtcgaacgggcttctagcggcggaggaggaggcggagtggcggcgatggaggccgagcaacagcgaaggtgctcctcgccacggtggatatgaaggcggaggacctcacgacggtgaacgccgaactggagggagagatgaagagcagacgagaggaggggggattggggagaaggggagagaagatagagaggaggtggagaaggaagaaaatgatagggtagccttgttggcgtgccataaagtggtaaaaaaataa

SEQ ID NO: 94607 - DNA, 129 bp, Oryza sativa
  Clone ID: PAT_MRT4530_92881C.1
atggctaaactttcatctaaacaaaacccaagaaaccctgaaggggtaccaaactatttaaagaggtgggaggacgaccaaagggactctagggtcgtgctccacctggttggggcgcaccccacttgg

SEQ ID NO: 94608 - DNA, 901 bp, Oryza sativa
  Clone ID: PAT_MRT4530_92882C.1
gcatgtaacatactgacatcttactcttcaacaactaagtttggcaccaaattactcaaccaacaataagaatatatagcatgagattggagcacccattactgacattaaagtacgattacaagccaaacatcttaagtatctatcggattataatctccgcgttccacacttgatacatccaatttaagagttgtaaagccatggaacactatgcgaggagaaaccaaggtgaggcacacgcgagtcagttcctcacctcgtcctcgtggaggagcatgttggggacgcccctggagatggggaagcagcggtcggtgtcggggcagacgagggcgccctcctcgatgtggatctcgaggagcgcgcggtggaggcggcggagcgcgctgccctcgtcggcggcggcgccctcggcggagagctcggcgtcggtggggggcgcctcggggaggagctccgggaggccgagggcctgggtggcggcgacgagcgcgggccagtcgatcttggggagcatgccgcggaggaactccgggttgggctccgcctccttggtcgaccacttcaccacctgcagcttcagcgggtagcccgtcaccgcgccccgcgcgttcgacgccagcatgttgtgcgtcaggagcctcatctccctcgacctcgaattcgacctaggtcgcctcttctcctcctcacgccgccggctgctgttgctgcggcggtggcggcggcggcggtataaaccctagcaagcgggaggcggaaggggcgcagggatggggcgagaagaaaatggcggcggactttgagttgctgacatgtgggccccacaggtatgggcccacatgtcagtgaccccacctcgtaggagtcccttcctgctccgagatgggtgcacaac

SEQ ID NO: 94609 - DNA, 108 bp, Oryza sativa
  Clone ID: PAT_MRT4530_92883C.1
ggggatagaaccttaggtattgacagcaaggacttggtaatcagttaatgcgaattacatttcaaacccattataatggaatgcaaatccacatggagaaacgaaacc

SEQ ID NO: 94610 - DNA, 389 bp, Oryza sativa
  Clone ID: PAT_MRT4530_92884C.1
tatattcgtagaatgagtatctgatttgacaaaagttaatttcaatctaggagaacaattctcaactgcctggcctgaatgatcctgaagctgagaagcagcaacaggagctgttgatcaagtgcatatctgaagatctgggtttctctattggaaggtctattgctgcatacctcatctaccgttgcctgatccactagaaatcatttgaagaggacaggacaatagtttttgatcgcattattcagaagataagtgctgcaattgaggtatgtggcagtgatttgggaaacaattttttttcttatcgggcgtgtgaccttgcccaatgagtgggaaggtcgtagtgaaggaaaatgtgggaaaactggttgcgagggtaaaccgga

SEQ ID NO: 94611 - DNA, 343 bp, Oryza sativa
  Clone ID: PAT_MRT4530_92885C.1
gtgacacttcatctcatatagtccaaaagagcctacagcgagaaatggtggggagagggagcgtccgcctcctgcgaggaagtctccacacctcgacagaagacctaatctgttggacgtaatacctgcatcagcacgacagactctacttactgtagcccactcctgacatggtcagtggctacagataacataggctccctggaagagtgtgctccgtggaccctccccggatgaggcctcggcaagccttaacaagaggaaaccttgctctgcactgaagcggaaggagatgaccgggttaagaatcttctcagacgattcccagggagacatgcaggaa

SEQ ID NO: 94612 - DNA, 1321 bp, Oryza sativa
  Clone ID: PAT_MRT4530_92886C.1
atgggcaaggtgtttttgtccgacattaaggcgagcaggatggaggaagggaagatggcggcggcggcgcccgctccgatccccgccgagagtgacgggatacagactttggatgccccatccaagctatgcctcacgatgtcagaggatgccattggggacgtcttgcatatgtcaggacgtcgttggcaatgaggccaccactttggttggtccttttgcgccgtgtagcagtcatcacaatagcgatgacgagttgatgcagtcgtacacaatttacacaatttaatactctatcccagttaaaagcatctcttggtctggatgggatgtagtgcccatattcatcaatatcaaatagatcatttctgggtacatatttgaaatcattgataggagtgtcctgatgcattgagatattcgaatgtttcttcaaaatcttgtggattacaacccaaatcagaattccagcatggaagagtgacagaagtactgtcactttcacataccagaaaatatgggctgccttcttgttgggtataaggaaggaaatgtggtacatgactagatatgagaagcatgaaaggaagactctagggataatagatgtaaagcgctgaagagccttggattccttagcatgcaaatgaagaagaaaacccatagccaaaatgcaccacatcgtcccaaaaatcaagagcaccgcagttaaatctcctgggtgatccttcattgagattgccacggctgcaggatagatgaaggagcccaacaaatgcacaccataacccacttgatctcgatcccagtttttttccaaatcactcttctctggcgctgagcccctgacgagaaccggcagcatcggttggtgtacggcctgatcctcccctggatctttcacctcgtcgatgtcgtcctcgatgccgtcctcgatgccgtcaaggcggtcgcctcccggtctggtacgagcgatgcctagcccaacgggacgcatctggatcatcttggtggtggccgtagcatcctctcctcctcctccgccgccgccgccgtccttcatctccgcgacgctccagtcagcggcgttcgccgtgggaacaagaacaacgcacttgtccccatcggcgtcctgcggcacagggatgtacccgtagctcgccgccccgtctcccttcgccgccgtctcgctctccggtacccccttctcgtcgtcctctcccgccgccgccgccctcctcaagctccccatctcggcgtcctcgcccatagccctcctagcccacggtatccagccccgtctcccttccacagtggccat

SEQ ID NO: 94613 - DNA, 470 bp, Oryza sativa
  Clone ID: PAT_MRT4530_92887C.1
ccatcacatgcatatcatattatcatccatcatacttcacatagtagacataatgaatttcgatcatactaatattctcactaaactcgcatcggggttaaacctaatacatctaacgacatgttcctaatgctgtcccaactcagattaatcaatgctacactacggtcctttattttactttcccattacgatacctggagggcgcacccaaggagaacatctaaactgcatcactgaggaactggctgaggtcctgtagcagctcctaagcgaactcaatctgattgcacgataatgacactataggaatcttggttagctgaggacattttgatctccttacgcttgaggtccaacttcgcctagtgggcatctgctaggacgagcggatcgatcgcccccacgatatagagcgagtaaactagctctactggtggtcaaccccagaagaggctctccttgaacgc

SEQ ID NO: 94614 - DNA, 307 bp, Oryza sativa
  Clone ID: PAT_MRT4530_92888C.1
ttgtatctgaggccatttgtttggctgaacaggaggaaagatgcaccaacctgatcaatgggtcgtgggagagtagagctcaaaaagattgaaaatccgacaaaccgccaagttaccttctccaagaggaggatggggctgctcaagaaagcaaatgagctggccattctttgtgatgcacaaattggggcgattgtgttctgaagctctggggagatgttctagtgccccacgcccccttggaggattgcaaatatctttgatagatacctgaaagcccccagcacccgttttgaggagatggatg

SEQ ID NO: 94615 - DNA, 297 bp, Oryza sativa
  Clone ID: PAT_MRT4530_92889C.1
atgagggccaccgttgggcagctagcaacgacacacgatcaagctagccacgcacgtacgcacgcagcgtacgccgcaggagtagtgcgcgacacaccaatctcactgcaagtgcacgtatgtagtatgggcgcagacatggtcggagaaaccaacaaggaaccgcccgctcaatctgggaaaaaaaaaggagtagtattaattagcaaattcatttgcatcattaggcaaacggaatatctctctctctcccccctcgatccaagttcaccgtaccagataatttcacgggtaaat

SEQ ID NO: 94616 - DNA, 534 bp, Oryza sativa
  Clone ID: PAT_MRT4530_9288C.1
ggatgcattgaaaacgcaagatgacggtaggcaggatatggcaatgctggcaatggatatgtcatgaagttggatctaggacgcaagtgccacgggatttgagatgtccatgcccgatctgaacgtgtaatcgcaaactacattaaaaggcttcttcttctctgcctccactgaatagcgtcggcaagcaatggcaccagggccaggatgttgacagatcagatcgattggctctagcccatggcaaggacaaggtggcaaaaggagctcatcacatatgatcagaacgtcgtgaggggtgcaagagttcataccgcatatcaagatcgacgcattgcggttttttgtttagcatgactcgttattaaataggagaaggccacagcaatagtcttgtagtcttttcattttcttttttgttttagttttcatgtaacctctggtagtgtgtggatatggagaccagattactatccattatctaaaaaaaaacattgatttctttggagtaaaaaaaaaaaaaaaaaaaaaaaa

SEQ ID NO: 94617 - DNA, 283 bp, Oryza sativa
  Clone ID: PAT_MRT4530_92890C.1
gtcttcctcctcctgcggttgctatcggcacagataagatttggttaggagctgttttgtttgttgggttgaaatcgtcaagtaacgtggacgtgggggtgaagcaaaggaagggaggggagattgggtttgggtggtgtgaggattgatttgttttattttcttaggggggcaccttccttgatggctttccttcttaaccgttgttttatgataatactctcttatttagatcccactgttcgcttacccacacacaccttccgtttcttgttctaccatt

SEQ ID NO: 94618 - DNA, 411 bp, Oryza sativa
  Clone ID: PAT_MRT4530_92891C.1
aaagccccttgggggggctaaattcggggggccaaccgcaaaaaaaggaacggggccccccaaaaggtccaccaggaaggaaaacaaacccttaaaaaaaaaaaggaaatgggcaaaaagggaaagaaaacaagggggccaaaggagccaaaaagggggaaaaaaaaaaaacaccccctggggaaacaaggggggccaaaaaaaaggatccccccttatgggggaaccccctaaggatgggccgaaaaaacccctggacattttatttaaaaaccaaaacccaaaacaggggggaaaaaaaccaaaaacggaaacccccaaaaaaaggtgggaatcccccccctagaagggggggggccaaaaaccacacccctgggtgggtggaaacaaataaccaacccggatattaac

SEQ ID NO: 94619 - DNA, 1250 bp, Oryza sativa
  Clone ID: PAT_MRT4530_92892C.1
gcacgaggcctcgtgccgaattcggcacgaggctcctcatcctcactttgtttctttgtttctcttctccccctttggtgaacacaagggacaatttgctaggacagccatggtctgagcggctttggtggtttggcttcttgggatctcctcttcagaattctggcttcttgatgaactgaggtgcagaattctgtgtctgcttcttgggtgcttgagctgaggcagaaatcggtgagagtggtaggtgtttgttgcgatcgttgaagcatgaagagcagcagccaagaagcgggagaggaggtgtccgagatcagcagccaggcggcgtccaacaacaacgagacgtgcaactcctcctccggcaaggtcagcctcgacctgtcgctcaccgtcgccgccgccgccgcggcggctgcctccgccaccgagtcgagcaccacggacagcggcggcacgcggccggcggcgacggcgacggcgacggcgcgcgagccggcgcgggtgttcacgtgcaactactgccagaggaagttcttcagctcgcaggcgctgggcgggcaccagaacgcgcaccggcgggagcgcacgctggcccggcgcgccgtgcggctcgacgcgttcccctacggctacgccgacgtggcctcgctgccgctgtacggcgccggcctgtaccccatcggcatccaggcgcacgcgtcggtgcaccaccaccaccctggcgtggcggcgccggcggggcgcgccgagttgaggtcggcgcgcgcgctgctcggcccgatgccgttcttcgtgcaggcggcaggcgatgaggatgccagcttcgggtggccgggcagcttcaggccaccgcccaccgccgccaccaccatccccgccgccgccgccgccccggtcgccgtcaactccggctcctccaactccaaccacggcggcagcgtcgtcgtgcaggccgccgccgacgagcccgacctcacacttagactctagctgtcccatccatccatccattagtctggtgtaacattcatcaggttgctcctgatcatctcctccgtttgtgagtagaattcttgcttgcttgcttgcttcgctctcgatcctgctgcttgagcttgacatcaaccaacctgctagtaaattactattgcttcaaatgcatgcgtggaagtattgtttttgtaaatacagcttagcctatcctaatatgattgtacttgtgccctagctagaaaaaaaaaaaaaaa

SEQ ID NO: 94620 - DNA, 1806 bp, Oryza sativa
  Clone ID: PAT_MRT4530_92893C.1
gctttccttcttgctcgcctgttagaggtgcgtcaaacatgcccataatatataaaaaataacttccagctgctccttgtctacagacaagaaaagaaatggttgaggcatttatatagactgtatagtgaatatgcttattttaaaaaataaaaataaagagcaacacttatgttagtacaatgcagcactgaatagtaactacattactaaaactatatactgcaggtaagcaaatcacattgcatctaacttttcttgcaaaaagtaaactgtgtacatttctgatattgttccaggagatccactgggcaattagtatctcaattgtccgcagattcttctatggttcgtcgactaaattttctgtttgacttctaccataattccatagatcatgaagttcacctctaaaccaaccaagtataacaataagccctaatgtacatggaacaaggtacagcagcgcaggttgaccatgcccgtccatcaggaagagcgcaagataggtaaggaaaaggccaacagcatatcccaccgtcagccatagaaaatacccattgaagaggccccttttgcttgctctatcaaatctgtagctgaatgcaactagcaatccagggaaaataatgtcaccaaagcctatcatgtcatagccaccccatggatcaaagaaacgaggtattcttaagagcatcggaattgcttccccagagttatcaccacgagcaactgcaatcatgacactttcatggaatataagaggtgaaatgaacacccagaaaacatcatacacaaatgcagcactaagaagagctgatgcaacctcaataccaccaatgcagaataatacaattagcagccagacgaaccaagaagacatgaagtagaagaggaggaggaggaaaactgaagctactaaaataaaaacaatagcccccttggcactgatctcgaagatttctttatcttctctgttggttgttccagaattaggcccatcctgtttagcacgaaaaggaacaaatctgtcagtaaaacataatccagtgacgaacttccgtgtcaactgattataacgctcatcaacttgctcgcatgcaacaaattcagtccagagtgaagcacaaactatggttcctatagccattatccacaagaagcatgctgaaaggtctacaactggtcgatttggtgaatatagctgcacctccagccttgctccctgatccaagaggcccttcatcttttttccagctgactgtggtatcattacaacaggtattgtaacattaatggaagtatcgttgtcactgcaaaccatcttgtaaagttcttcattatcattgataactagtaaaccaactgcacctccagtctgtgcaatctttgctttagcagtgaaagcgcattctccacgttgtgctatagcaatataatttgttagctttgatgtcgaattggaacaacaatcaagtggatttgcaaggacagcaaatgttttctgagcttcatgaatatctcgaggcacggaggctccaaatcttgcactcaacccaacaacaattgtaccttcagttccatttacccaattcttcaccttaaccagctggaacttgttggagcagccgggcgacggcgggacgcccgcgtcgtcgtcgctggaggcgtcgtcggccgcggagccgccggcgaggaggacgagcaggaggacggcggcggcggcggggaggcggcgggcgtggtgggtcgccatagggcgtcgccgcgtcgcgccgctcgcctttccgtggctcggacggcagt

SEQ ID NO: 94621 - DNA, 710 bp, Oryza sativa
  Clone ID: PAT_MRT4530_92894C.1
gtataacaataagccctaatgtacatggaacaaggtacagcagcgcaggttgaccatgcccgtccatcaggaagagcgcaagataggtaaggaaaaggccaacagcatatcccaccgtcagccatagaaaatacccattgaagaggccccttttgcttgctctatcaaatctgtagctgaatgcaactagcaatccagggaaaataatgtcaccaaagcctatcatgtcatagccaccccatggatcaaagaaacgaggtattcttaagagcatcggaattgcttccccagagttatcaccacgagcaactgcaatcatgacactttcatggaatataagaggtgaaatgaacacccagaaaacatcatacacaaatgcagcactaagaagagctgatgcaaccctgatatttggtaagcgtgccatttgaagcacagttatcatcaggcagattccaaggatgtcttggcctatgcaagcaaaagaagcatgccgatagacagcccaaagaattgcaaagatagtgcaaaatggtacaatcagaacagaaagggtcaacacctccccaaaaaaggggagttgtacagtcttctgtccacaatccttgcaaatcctagtgagaagtgtgaccaagcaaacatgcataccctcaataccaccaatgcagaataatacaattagcagccagacgaaccaagaagacatgaag

SEQ ID NO: 94622 - DNA, 193 bp, Oryza sativa
  Clone ID: PAT_MRT4530_92895C.1
gcggaccggccggaatccggacgacccacgcttcgatcagcccagcaccgccaccgggagggcgagacaaggaccggaagccagccccaaagggaaccgcaaggacgcgacaacgaaggaggagaccgacggggagaagaacgaggcgagcaacagcgcaggcgccgacgacgccgggccaaggagcgcggga

SEQ ID NO: 94623 - DNA, 1623 bp, Oryza sativa
  Clone ID: PAT_MRT4530_92896C.1
ttttttttttttttttttttttgtgtttttttttcagtttgatcccgtgcttttgcccgggcccctctactccatttagtttgcctcttttgggccatttcattctcccttttaggctgcttttttttctttgagccaactttttccatcagtttgcactaatgaaattcctcagacatagataggtacagttgcaaaatgcagtgtgcccccaaaacccctaaaatgacatagttatacagattgctcaatgttccagacttccaggaatgcaatcgtcgaatccatcagaatatcaataaaatatgttatccagccttcaacctctaatctctctaagtgatataatattcctatttgaaactgtaatccgcggaaccaatttttgtatctgcagctaacatgcaagccccagtcatttgctaggtctcttacaagagttcgggagccccattggggcaccacatggttttgatctccactgaactcccaaactgggtgtgaatgatttaaaatgtcctggagctcgggcaggctgttgaaattgcactctttaatactgtagttcagcacatcgctgcacatgctccagccatagggcaaatgtgttctgttagcatgaagagcttgctgcacttctggaaggttgaaatagaaatacctttcgtaagtcatacaaacatccacacctacactcattttagtcacatatttccgcagccgtagctcctgcatcacaattgatgggtagcacacatcaagaataacatcgtaattgttcacataatccccaactatactgtttgcctctgcaatggcatcattgcatgacttgctctcattgtgggggttgctaaaggtatagtcctcaaaatcacaactgtggctgattgatagaaatatttcgtcagagatcatgccatgggaccagaaatactcatatgttgcggggacatctctgtcaagcttgagaagcggattcccgatagctactcccttgatgttgaatttgaacccatttgatttctcattatgtgtgagaagtacatcggtgagttgcggtatataatgccctgcatagctctctccactaagaagtagccctcttgacctgtattcagggaacttcttgtaccatcccaacagaaatttgtacatgtcattagcggtctgtgcatcgccagtattgtaatctgatgaagtgttggagtaggaccatccaactccagccggtgattcaacaaacagaagattggatactttgttccaagacttcttgttcaatctcaggcctctgccatctcctctcggataaaatgggccgagctctgtgaacgcgccacctccaaccgaagaacatccaggaccattgacaatgacaactccaattccatctccgttgagccagagggtgagcggcttggcggcggcgccctccgccgcctcggcgaagtagtagaagaggctcctcccggccttctcgtcgacgtcgacgtatccggcgaactgcctgaacccgacgacgggctgccccggcagccgcgccaccaaatcctcctccgggaacccccacacaccaccaagaagaacgcaaccaaccaccaccgccaccgccgccgccat

SEQ ID NO: 94624 - DNA, 1470 bp, Oryza sativa
  Clone ID: PAT_MRT4530_92897C.1
atggcgagcgagagagcgggaagcaaaagggcggcgaagggaacggagggcacgacggcggcggcggcggcggcggcggcgctgcagctgcacggcgacgtgctcggggaggtcctccgccgcctggcgccgcgctggctcgcggcgtgccgctgcgtctgcaaggcgtggcgcgacgccatcgacggcggcggcctactacgcgcggacctcctcccgctctcgctcgccgggttcttcctcaacttctcctgccacgactactcggagtacttctcccgccccaccaccaccaccaccaccacgacgacgacatgccatcgccatctgatcaccggcaagctcgacttcctgccctcggaaggagagtggcaaatggcgctggatcactgcaacggcctcctcctcctcgagagcggctgcgtcgtgaacccagccacgaaggcgtggatggatctaacgccatacccaccaccacctcctctcatagaagaagaacaagaagtaaaaacctacccagaagagcacctcgtgtttgatcccaccttgtcgccccacttcgaggtgctgataatcccccatctcttgccgttcgataaggatcgatccaagaaacaaccacctcagaattctgcgtggccgccatcgccgctcgtcctgaacgtcttctcgtcaagaacaagggagtgggaggagaggccgttcgtccgagaaggagaggccgcaggagccatggccgacgtagcatcggtgcggggcacgcattacgctgcctactggcgaggaacgctttacgtccgttgccaaagtaatttcgttatgagattatccttgttagacaacaagtatcgaattattcatcggccggtggatgcggaagcgagggaattttcgagccgttatctaggaaaatcaaaacagggcgtgtactttgcgtcactcagcaaagacaggcttctagtttggcttctcgatgaaccatgcggtgacatgaagtgggtcttgatgcatcaaactgacctcggccccagcttggcaacaagccataagcttgatgggcattggattctggacgatattaactacgagtgtagtacttggcttttccccaagggaagaaagccactgacgctagcgagagaaaattttgaatggaattccgacgatgatgatatcgtcaacgacgcagccgaagatactgtcaaaaggaggtacgatgaatacgctctgatccttgggtttcatccctacaaggaaattctctttatcgaatcaatggacagagggtacgcttatcatctaagcagttcgaaattcgaagagttgggtaaattgcacccagtgagtttgcacggtatacctaatgaacacctcgatgtggaattatcttttccatatacaccttgctggatcgaagagtttccccaaccagaattggattgtaagctcaattcgatttggaagccgtga

SEQ ID NO: 94625 - DNA, 883 bp, Oryza sativa
  Clone ID: PAT_MRT4530_92898C.1
aacaaggatatcgatcaaagtatactgtattattgatgtgtttcaagaagtggatgtacaagcaaagaaaaaagataaaaaaaaataaaactagaataaagctactaagaagaattactctgtctttacacttttgagatcgatctcaatttttcgtcgtcatcagcatcgaatccgtcctccgattctcccgtccacaaacccaatcgaaatccatccccaacaaaccgagagatcggaggacgaagcaaaaggaaaccaaaaaactagctaaactaagtaattaatcgaccaaccaaccctgaagaagaagaagaagagcaatctgggagctccgctccaccgccatggcgatgcatccatggagatgatggaaggatcaggcgcggaagcaaccggcgaagcgggggaggtggaggtggatctgggtgtggtggtgggaggaggagtcgaggtcgaggaggtgggaggcggcggcgccgtggaggtcctggacgatgaggtgctcgacgtggacgaagcggtcgacgcggcaggggatggcgatggcgccccgctgcgcgaagccgtactcgcgctcggcctcctcgagcagcgccccgaagagcgggtgcttgagaggaagaagcgtttgatggggttaaagggagaagggccaggggtcggagctggagatggcgaggcggaagacggtgagggaggagtcgcggagggaggtgtgggatgtgcgcctgtttcgagttcaaggtcgggtttgtttttgcgttctgtttcgaggcggtttgggtggattacggaaatgaaggatattcttgtggtggtcacatatgaggtgaactatgatgggcttaaacgtaagcgtgctataggcctcgctggttga

SEQ ID NO: 94626 - DNA, 494 bp, Oryza sativa
  Clone ID: PAT_MRT4530_92899C.1
acccgcgatctgaccggtctgtgactggcatgtatcaagcggtcagaccggccagcccgtggtctgaccggccgactctgtgtcggtttcggtttcggtttcggttgtttgtttggatatccgtgattgtttcatgtatatggcttctagatagatactatgcagagaagtaataaagttgtcatctactttgagagttctttgatttatgttttctcgggtttggcggtctaactggtgagacaccggcggtcagaccggcggcattgtggcggtcagaccggcagaggagtggcggtcagaccggtgacggcttcaggaggcataggcgatttcagggcggtccaaccgggcaatctacaccggtcagaccggcggcacaggcgcagtcagactggcagatcaacctcggtcagaccgatctacatcgaatttgagggtaacttttaattccgtaaaaagttggcaggggtcttcactagctgcatcgggta

SEQ ID NO: 94627 - DNA, 472 bp, Oryza sativa
  Clone ID: PAT_MRT4530_9289C.1
aaaaaaccccatttcgcaaaggcttgaaagggggcatatgcaaaaacaaaaccagctacctttattggcatggcatggcatcccgggccgaacgaatattcttctggtcatttcccattggggcatggggctatttccatgggggggcaaaagaaaaacgtacaaaaagccttttttttttttcaccccacttttgcgaggggggcatggaaagggaaaacccctgaaccgggaactccttccaatggtgggggaccgtcttgatctgggggaaaaactgcaccccccccttgccgaaaaaaatcaagtctcctgcaaaggaggctttgctgccggggaaggaaaaaaacggcaggggtaccggaatcggcacgttgatgcccacctggccaggttaaatggctggttgaaatttccttgcaaacccaccacaaggtggaaaaatgggggccccattgccatatttggttct

SEQ ID NO: 94628 - DNA, 900 bp, Oryza sativa
  Clone ID: PAT_MRT4530_928C.1
atggcttttcagctcggcaagctcgtgtgcactctcctcgccgcggtgctgtgcttgagctgcttcgctcgtgctcatcacttcgacgacgatgggtttgggcccggtgggttcggccatggccccaaggggttcggacgcggccctggctttggccatgactgccgctttggccggtgccatggcggtggcggagggtttggaggaggtggaggattcagaggcggaggcggtggtgggcttggtggaggtggcgggtttggcggcggaggtggcggcggactaggaggaggaggttgtgaaggcggtggctttggcggcggagtgggaggcggtagtggtgcaggaggtggccttggaggcggaggcggcggtggctttggaggaggtagcggcggaggggttggtggtggaggtggtcaaggcggtggtttcggagccggtggtggtgtcggcggtggaagtggtacgggaggcgggcttggcggtggaggcggtggtggttttggaggaggtggcggtggcgggattggtggtggaggtggcaagggaggagggtttggagctggtggtggtgtcggcggtccagctgcgcgaaggcggcggaatggccaccggtggtgctgccggtggcgaagcccttggtggtggtggtgccgccggcatggtggaggtttcggtggtggagctggcggaggtgctggtcaaggcggcggcggcggtcttggcggaggcggtggcaccggaggcggcttgggtggtggtgccggaggtggcctcgagcacggcggcggccttggtgggggcggtggcttcggcataggcgttggtgtcggcgtcggcgttggtttcggcggtggcgccggtgccggtagtggtgcgggcggcggtggacgttaa

SEQ ID NO: 94629 - DNA, 316 bp, Oryza sativa
  Clone ID: PAT_MRT4530_92900C.1
atggtacgctacttacaagatgggaacgaaaatgacctcgtgttcctgggacggtgttcccggattgaggatcgctgccaccgaccccgttttctgtgactatgggatttgttcttctgaatatcatttgaaacctctgaatttcaacttgcatgatattgtgaacccactaattgagcaaagagaggtgatatatggtctctacattgcacttattattctggaaatatcatctctatcatttatgttgcctatattagctggattcttttggcccacaggtccacgtgaagattactattgtccagctctgtag

SEQ ID NO: 94630 - DNA, 796 bp, Oryza sativa
  Clone ID: PAT_MRT4530_92901C.1
attccccgtcgaccccgcgtccgaaatggtgcaagttgaaacagtagctcagtttggtgtgatatttctgctgtttgctctgggacttgaattttctacatcaaaacttcgagttgttcgtgcggttgctgttgttggaggattgctccaaatcatcctgttcatgttgctttgtggtatttctgctacgctatgtggaggcaaaacaaaagaaggtgtttttgttggtgttcttctttctatgtcttcaacggctgtggttttgaaatttctgatggaaagaaatagcatcaatgcccttcatggccaagttacggttggcacactcatattgcaggactgtgctgttggtcttctttttgcacttcttccaattctgagtggcgcttctggtcttcttcaaggagttgcatcaatggccaagtcgttggtggtattgataacattccttacaatcctttccatcctctcccgaactggtgtgccttggtttcttaagctgatgataagtctttcatctcagacaaatgaactgtaccagttggcagctgttgcattctgcttgttgtttgcttggtgcagtgataagttgggcttgagtcttgagttgggttcgttcgcagctggagtaatgatatcaacaactgatcttgcacaacacacacttgaacaaattgaacctattcgaaacttcttcgctgctcttttccttgccagcattgggatgctaattaatgtccatttcctttggaaccatgtcgatatactccttgcagctgtgatcttggtgataact

SEQ ID NO: 94631 - DNA, 180 bp, Oryza sativa
  unsure (1)..(180): unsure at all n locations
  Clone ID: PAT_MRT4530_92902C.1
tcgtccatggcgtctaagaggaggtggccgtggagacggtggagggcggttcggccgatgctaaggcgccgtactgcnacccgccgactgcgccgttgctgctacactatcgagctgnttaagtagccgttcgaccttgccctcatcagaattcatggtcatttcatgtccgctcatgtg

SEQ ID NO: 94632 - DNA, 318 bp, Oryza sativa
  Clone ID: PAT_MRT4530_92903C.1
cggaattcccgggtcgacccacgcgtccgattaaacatgcgagatctggtggaccctactcgtggggctaatgatacagggaggtgaagggcgcgaaggaaaacttatgcgtgccgaatgctcgctggccgtgcgcgcccggaaaggagtaccacgcccgggtacccatgcagatgagatacaaatacaactatggcggcgaacggaaatgctattgggactgacctgctgcgcaacccggagctggggggaacggaccagacggtggaattgaagacagagctgtggctgtggatgaccgagcggtcgacgagccag

SEQ ID NO: 94633 - DNA, 2148 bp, Oryza sativa
  Clone ID: PAT_MRT4530_92904C.1
atgatcgaccgcgcgctggagaaggagttcccggagtccgagggcgagcagggcggcggagagaaggaccccggcagcttcaacaacacggtggctgagaagcagggagtcctggaaactgtggccagaagagtaacaaagaagaatgagaccaaagacaataagtcattcccatttaaggaagttttcttggatcggccagagcaagaggatgttcccacattgattgatcggaaggataatgtttttattatatcaaatccgaagtcaaaataccctgtgctgcaactggaccttagattgatatcggatcttgtcgttgttattgtgtctgctacatttggtggaattgcctttgcttgccttgggcaacctgtgattacaggttatttacttgcaggatctataattggaccaggaggttttagctttgtcagtgaaatggtgcaacttcgagttgttcgtgcggttgctgttgttggaggattgctccaaatcatcctgttcatgttgctttgtggtatttctgctacgctatgtggaggcaaaacaaaagaaggtgtttttgttggtgttcttctttctatgtcttcaacggctgtgggtgcccaatttgttggtgggagctctgattgtgttggtgacgaccattgggcagagccggttttgaaatttctgatggaaagaaatagcatcaatgcccttcatggccaagttacggttggcacactcatattgcaggactgtgctgttggtcttctttttgcacttcttccaattctgagtggcgcttctggtcttcttcaaggagttgcatcaatggccaagtcgttggtggtattgataacattccttacaatcctttccatcctctcccgaactggtgtgccttggtttcttaagctgatgataagtctttcatctcagacaaatgaactgtaccagttggcagctgttgcattctgcttgttgtttgcttggtgcagtgataagttgggcttgagtcttgagttgggttcgttcgcagctggagtaatgatatcaacaactgatcttgcacaacacacacttgaacaaattgaacctattcgaaacttcttcgctgctcttttccttgccagcattgggatgctaattaatgtccatttcctttggaaccatgtcgatatactccttgcagctgtgattttggtgataactgtaaagacgtttattgttgctgttgtcgttaaagggtttggctatagcaacaaaacatctcttcttgttggcatgtctcttgcacaaataggagagtttgcttttgttcttctaagccgtgcttcaagcatccatctgattgagggcaaactttatctgcttcttcttggaaccactgcactcagtctggtaacaacaccccttctattcaaaatgatacccgcggtggtccacctcggtgttctcttgagatggttttctgttgatagcaatcaggtggagttgggcctaaaaagtgatggcctccgcatcgatagcggcaagcgcataaatttgatagtccaaggctcacatgactcatgacatattttggcaccacgcaaaaggcttactactttttaagtatggcttacgctaaacagctccacattgtaaagtgttttttcgcatgtacgaaaagtgtttgtaccacacatgcacggccgtggaacctgtggagtggagtggaggcaaaagaaatcaatcaatctcgtttcggttgtcttgggatagattgatctgcgagtggtgcaatgggcaatagagtttgccggttttgggaggagagcagcatgcagcatacctgccttgggatgaatggcggtgtgctgcatcgctcgctggaaatttgagtgtgtaaaccccacaaatgagggttttctatgtaacataacaatgtatgctgattaattgattggattagcgagatagggtttagtttggcttggtcgttaccatgccattgtattcattttgtcagcgcttgtgtacgcgtttctcatcgcgaattttgctgtgtagtttgtaactagtgaccttttaccattatctaaccttgtccgtttctattactgacttcgaatcgaatccaaaatggatgcccttttggaaaaaaaaaaaaaaaaaaaa

SEQ ID NO: 94634 - DNA, 207 bp, Oryza sativa
  unsure (1)..(207): unsure at all n locations
  Clone ID: PAT_MRT4530_92905C.1
ccaacngacaccccnacacacgccattaactcacccaacagcagctagccgatgccgtgccaaccaacggncgaacacctctntggctctctccnccaccgcgtcgtagtcgtngtcgtngccgatggacanatacagcaagatccgctacatcgtctggntcaggcagangctnnggnggtggcggtccngggccgcggcgaagcg

SEQ ID NO: 94635 - DNA, 1513 bp, Oryza sativa
  Clone ID: PAT_MRT4530_92906C.1
atggacgccgcgagccgcacctggccgcccccgaccccctccccgccgcccttctcctcccgcccccgcgtcgtgggccccccgccgccgacgccgtacgacccttcgccgccgccgccgccccaccaccaccaccaccatcgccgccgccaccgccactccaagaaaccgaagcctcagcctcagcctcaacctccgcctccgccgctgccgccgcagcagcagcagcaagagcccgccgccggcgccggcgccggcgcggacttctccgcgctgccgccggagctcgtgcacagggcgctggcggccgcgggggcgtcggacgtcgcggcggcaagccgggcgtgccgcgcgtggcgggacgcgctgcggccgctccgggaggccgcggcgctgcacgcgcgggggcgacgcgtcaagcacgcggcaggcgcggccgcggccgcgggcgccgaggggcggaaggcggagaggcagcgcgcgctggggctgttccagcgcgcggcgaggctggggtccgcggcggcgatggtggacgccgggctgatgtgctgggaggaagggcggcgtgacgaggcggtggggtgctaccagaaggcggcggagctagggcaccccgtcgggatgtgcaatctcggcgtctcctacctagaagctgatccacccaaggctgaggaagctgttagatggttttatccagctgcggctgctggcaatgctcgtgctcaatacaacctgggcctttgcttgcagaatgggaaaggaatcaagcgtaaccagcgggaagctgcaaaatggtacctgcgagctgcagagggaggaaatgtgcgagccatgtacaacatttccttgtgctacaactatggtgaaggattttcacaggatcaagtgcgttcaaagaggtggctgcaattagctgctgattgcggtcacaagaaagctctttatgaatgtggtattaaactttgtgcggcaggagacaaggtgaggtctcttatgtatctagagttggcgacgcgccgtggagaagctgctgcctcacatatgagggatgtaatacttgaatcactttcccttgtgaatgcgcaacgtgccctgtcagatgcggataaatggagaccaagagcactgtataccagaagatgagcaaatgggcccatcacacgtataccaagttaataaccccttgatgccaaaagtaaaatggaaattcaccacctgaaggcccaagtgagcaatatgcatctgtggcatactctagtgtatgtggaactgtgtatatgttaactttcaagcccctctctccttttcttttgtacagaaattatgacagcagaaatactgttacagaaggtcaagtggcaataatatccctgatgcagcataggatagaactttatagttgaattgtttcagattgtaataaataggaacaactggtgtttttttttcgctgaaaaagtgtggatgtaggtccaatgcagtgcaaagtaattctgtgatcagctgttct

SEQ ID NO: 94636 - DNA, 1959 bp, Oryza sativa
  Clone ID: PAT_MRT4530_92907C.1
cggcatttcttacatctcgccccctccaattcctcccaattcacgactcgcccccctccccttccccaccttatctccggcgatctcctcgccgtctccggcggcgggggagagatgcggggggccgacctgatcaacctcctcctcccggacgagatcctcgacgaggtgctccgccgcgtggccgtgtccggggccaagcgggacctcgacgcgtgcgccctcgtctgccgccgctggcgccgccacgaccgcgccacccgccgctccgccaagctcgccgcgtccggggcccgcgccgacgaggtgctccgcctcgtcgccgagcggttcccggcgctcgtcgaggtgtcggtggacgagcgcatcagcgtcgaggccgccgcggccgggccctcctgtgccgccgctagatcgcgccgccgcccgatgtatgatgttagtccttctgggcgccgtaggaggatgtcccgcagctcaaatttcggagcgcacatgtccccatttccattggaccagccgggcagtgataatgagacagagcgcacttgcttgactgatgttggattaactagtcttgccaggggttgcaaagggctcgaaaaactaagtctggtatggtgttcttccataacttcgacaggcttagtaagaatatcagagaattgtaagaacttgagttcgttggatcttcaggcttgctatattggagatccaggacttattgctattggtgaaggctgcaagttacttcgtaatttgaacttgcgttttgttgaaggcacttcagatgaaggcttgattggactaataaagaactgtggacaatcacttgtctctcttggcgttgccacttgtgcttggatgactgatgcatccttgcatgctgttggatcacactgccctaacctggaattcctgtcactggaatcagatcatattaaaaatgagggagtagtatccgttgctaaaggatgccgcttgttgaaaactttgaagctgcaatgcatgggtgctggtgatgaggccctagacgctattggtttattttgttcattcttagagagtctgtcactcaacaacttcgaaaaattcacggacaggagcctttcttctattgcaaaagggtgcaagaatctcacagatcttattctcaatgactgccatttactaactgatagaagccttgaatttgtagctcgtagctgcaaaaaattagcacgcctgaagatcaatggttgtcagaatatggaaactgctgcactggagcacattggacgttggtgcccgggtcttttggaattatctctaatttattgtccaaggatccaggacagtgcatttctggaggttggtagaggttgctcccttctcaggtctctttatttggtcgactgttccagaataagtgatgatgccttgtgctacatagctcaaggttgcaagaacttgactgaactttctattcggcgtggttatgagataggagacaaagcattgatatcttttgctgagaactgtaaatcgcttagagagttaacactccaattttgtgagagggtatctgatgcagggctgactgcaattgctgaaggctgtcctcttcgaaagttaaacttgtgtggatgccaactaatcactgataatgggctcactgcaattgcaagaggatgccctgatctggtctacttggatataagtgttctccggtccataggagacatggcgcttgcggagatcggtgaaggttgctcgcagcttaaagatatcgcgctgtcccactgtccagaggtcactgatgttggtctaggccaccttgtcaggggctgcctgccgctgcagtcatgccagatggtgtactgcaggcgagtgagcagcacaggaatagcgactatcgtctcgggctgccccaagttgaagaagctcctcgttgaggagtggaagaaatcgtgctcatga

SEQ ID NO: 94637 - DNA, 238 bp, Oryza sativa
  Clone ID: PAT_MRT4530_92908C.1
ccacctcaagtacttgagcatagagcttgctccagcatgtagcatttccccagaatgcgattatttgtctttggtttatttcctggatgcttctcctgttctagagactttcatcttgagggagtacatggagcattgctctgtttttgacgatgcctcacctatgaggctgatggctgaacacaagaagcacaagaatctaaaaaatgtgacgatgattggcttctgctctgcaaag

SEQ ID NO: 94638 - DNA, 318 bp, Oryza sativa
  Clone ID: PAT_MRT4530_92909C.1
cccactcgtccgcccacgcgtccgtgtgtctgcgtcgtagtatatctcctctccgattcgcggcggcggcggcgtctccggtctccatctaattacaaggaaggatggagtggtgggtgcggtgatattcagtaacaagcctgaacgtatcctaagcaacagcgatgacctcactactcaggatatcaaccaatattatggtaatgtggagaaagactaatggactctttacacaccttgctacctgtatgatacactggccatcacccagagcgtcctgtttgacaacactcgacgcaaggacgacaggctcactga

SEQ ID NO: 94639 - DNA, 3310 bp, Oryza sativa
  Clone ID: PAT_MRT4530_9290C.1
atggcgctgtacctgctcttcgagtcggcgtcggggtacgcgctgttccacgcccacggcgtcgacgagatcgggcagggcgtggacgccgcccgcgcctccgtgctcgagctccagcggttcagcaaggccgtcaagctcgccggcttctccccttctcctccgccgtcgacgcgctcaaccaggattatgactgatgagctgaggagcttcctggagctcaatttgcccaaggtgaaggaggggaagaaggctaagtacagcgtcggggtcatggagcccaaggtcgggtcccatatctccgaggccaccgggatcccctgccagtgcaatgagttcgtccaggaactgctccgcggagtgcggctacacttcgatcatttcattgatcaactcaaggttgttgatttcacatttgcgcttgtttctactgggcatgtggccatgtgggggtggatggtagcactatgccttctgcagttctgcactggtgcaatctcagttactgcaataccaactgacttggaaaaggctcagctaggcctggggcatagctatagcagggcaaaggttaagttcaatgtgaaccgtgtggataacatggtaattcaagcgatttttttgttggatacacttgataaggatatcaattccttctccatgagagtgagcctcttctttcctctcttttatgcaatgataaattcaggtggggaatctctccccccccgggaatggtattcttggcattttcctgagctggtcaaaatcgtgaatgataactacgtttattctaagattgcaaagtttgtggtgaacaaatctgatttagcagaaaaagacatcccagctttagcagatataattggagatgaggacaaggcaaaagaaattgttgaagcagcaaaggcatccatgggtaactataatacaatttgctccataattgagcttggagctcggttaatctctcatgctggcagtctttcaaatcttgcgaagtgcgctgcttccactcttcaaattcttggcgctgaaaaggcacttttcagagctctgaaaactcgtggtaacacacccaagtatggcctcatattccactcatcttttattggccgtgcgtcaactaggaacaagggcagaatagctcgatacctggcaaataaatgttccattgcctcacgcatcgactgttattcagagttgaatacctcagttttcggtcagaagctgcgcgaacaagttgaggagagactagacttctatgacaagggtattgcaccgcgtaagaaccttgatgtgatgaaagctgctattaatgatatgacaaatgccgtctcagaggatggtggtgaaaaagagaagaacgacacatctgctaagaaaaataagaaaaagaagtctaaagctgaagctgatggtgaagaaatggaccttgataagcctgccaaggttgctgcagaagagactgatccagaaaatgagaataagaagaaaaagaagcacaagctagaggagccacaggatcaggagatggcagtcaatggcaatctcgaacaagatgaaactcccaagaagaagaaaaagaagaagccggaggcttcagaagatgttgagcctaggacagccactgaaggaaagaagagaaagaagaaaaagtccaaaacattgttgataatgagtcatgatcaacttaagtgtcaaggataacattgctgctctggttagagcttccttgtaacattgctgctgttctgggtatcaaaattctagttagggcctaggggttcctctaagagttacatgtgatgcatatcaccttggatggagccttttcttttcagatagcttaattaccatcttatcgtagtatcgcctgtgaaatcccaaacatgtatacaagtttgcattgtaatctgactcatggggcagcacatgtccttgttgccagtcaaaaatgttgcaggtttgtgttgcagctagctaatcacttgcgttgcaaagatgatgcaaaactgcgtttgctcttgctcctcctcctcttgatcttcctgtctgatgcgaggttcttcttcctgtctacttcaagggtgttcttcctgtctacagcgaggtccttcagtacctgttcgacttcttgaacaacaccaagtcttctgagccatcctgcaagcagctgagaaggttcttggccaataataacgccgttctcctcgagctctgtcaaaaatgccagtgctccttctagcctgttcaccttctcataagcccccaatatcaaagcaatgcatttgttgcacggtgtgattctcgcgcttctcatattccgtgttactatcatcgcttcgttgattcgatccgcgaggcagtaagcattcaccagaagtgcgcaaagctttgtgtcaggtactatccctgcgaattgtatggcatcgaaaactcgctgtgccccttctgaatcgcctttgtatgaataggctctcagcaatgccttgtaaacttcctttcctgcaacaatctgctgatcccccatttcactgatcatgtcttctgctttgtctaacatgtcagccctgatgtaagccatgatcattgaaccgtatacacgcttatccatcggtaggccaagcaatccgatctcgttgaaaatttcttttgcacgagtgagatctccggctttactgtacatgtccatcagtgcagtcaacataacttgatcgcaaggcaaacctctgcttttcatggcatggaatgcatcctcagctttctgcaatagcttttgtttgccatatatgtggatcaatttggtgtagtcacggacatttgcctcaaaagaatcctccagcaatgcatgctcgagcacctcagcaaggagagggctctccatagccgtgagctccttcagcaccagcaaccaatccgtcctcttgggcttcatggctttcacccagaacacgagcagcgcaccaagagtctcctcatcctcatctccatcctgatcaggaggaggcaagcacacgaggcgcgccatcagggccctacagcgattgggaagcttgggggagagcccccgaatcgcctcccactgaggctccgacggcgctgacccgaacgtgtcccacctgaacctcggcgtctctcccgccgccgccgccgcctgctcggccttcatggaagctagtggctgctccgctacttgccgaccgggcacgcacgcgcacgcgcatcgggaaggcgccctggcgtgcgtggtggcactgggaaactgggaggtcaacgagtatatcgccggaacagccagcgagatcat

SEQ ID NO: 94640 - DNA, 2769 bp, Oryza sativa
  Clone ID: PAT_MRT4530_92910C.1
atggaggcgctccggaaggcggaggccgagctgacggtgtacgtgcacccctccatcgccgccgacgtccgccgcggcgtcccccgccagctcagcggcacacccctctcttatgaagatcgcaaggtagtagatgtgggaaaaggtgagcttgtatcgtacggtgctcgcccgcagcgcctcaacagttcggccggaccttaggttggttgggtgcttgccacttagctgctgtcatggttatacggtggttggaatgttctggacaagtcgaaaaggactttaggataaaaatttctaacttggtttagcttggtttcgacggaccagaaccggagggatgtgatcaatgtgatccgcaagcttactgataatccaagtagcttaaaatgccagctcctggatgacatacaacaagttatagccagtaagaggccgataagtgtttcttgcaataagttagggccagaatccaatcaggtgaaagctgaaaccgctatcgtatattcttgtaaggggaaaagttggcggggcaacaatgttccgctatgttgaaatgaaacttttaagtagttatagaccaatatgaagttcagttttgtgtctgtgtctcgcgccatgccagccataaccgattatagtgtttcgaacgttgtttaactatatatacatgatgatgatagcaacaccatttcagataataccctggaacagttgggatttctagaccaagagtcaaatgatgcaagcgttaacacagaaaagatacaatcaagcacaccaaaatgcaaatcagtggaagacataccaatagcaccagctgcaaagagatgtaagaacatggattccaagaaacttgtcccaaacagcaataacaattcatgtctcactggtagccaggctcccagaaagcttcccagaaagggggactaccctgttcaactacgtcggaatgaaacatttcaggatacaaagcctcccagcacttggatatgtaaaaatgcggcctgcaaagctgtgttgaccgctgacaatacattctgtaagcggtgctcatgctgtatttgtcatcttttcgatgacaacaaagatcctagcctttggctggtctgctcatcggaaactggtgacagggattgctgtgagtcatcgtgccacattgaatgcgcactccagcatcagaaggtaggatgcgtcgatcttggtcaatctattcagctcgatggtaattattgctgtgctgcatgcggaaaggttattggaatacttgggttctggaaaaggcagctgatggttgctaaagatgctcggcgtgttgatatcctttgttcccgcatttacttgagccatagactattggatggcacaacgcgttttaaagaatttcataagattgtagaggatgcaaaagcaaagctggaaactgaggttggcccccttgatggtacatcttcaaagatggcccgtggcattgttggccggctgcctgttgctgctgatgtgcagaaactttgctctttagcaattgatatggcagatgcgtggctgaagtcaaactgtaaagcagaaacaaaacaaattgatacacttcctgctgcctgcagatttagatttgaagatattacaacttcatcattagttgtggtactgaaagaagctgcttcttcacagtatcatgctatcaaaggctataaactctggtattggaatagcagagaacagccttccactagggtgcctgcaattttccccaaagaccaaagaaggatactggtttccaatttgcagccttgcacggagtatgctttccggatcatttcatttactgagtatggtgatctgggccactctgaatgcaagtgttttaccaagagcgtggaaatcattcacaagaacatggaacatggtgcagaaggttgctcatctactgccaagcgggacagcaagagtcgaaatggctggtcatcaggcttccaggtgcaccagctgggtaaagtcctgaggaaagcttgggctgaggagaatggttgccccagtgaggcctgcaaagatgagattgaagattcctgctgtcaaagtgattcagctttacacgataaggatcaagctgcacatgttgtttcccacgagcttgatcttaatgaatcctcagtccctgacctaaacgctgaggtggtgatgcctacagagagcttccggaacgagaatatatgtagtccaggaaagaatggattgagaaagtcgaatggttccagtgattctgatatttgtgctgaggggcttgttggagaggcaccggccatggaatcccgatcacaaagtcgtaaacagacatcagatttagagcaggaaacttatttagagcaggaaactggtgctgatgatagcactttgctcatcagcccacccaagcacttctcccgtaggttaggtcagttagatgataactacgaatactgcgtcaaggttatacggtggttggaatgttctggacacatcgaaaaggactttaggatgaaatttctaacttggtttagcttgagatcgacggagcaggaacggagggttgtgatcacttttatccgcacccttgctgatgatcccagtagcttggcaggacagctcctggattccttcgaagaaattgtatccagtaagaagccgagaactggtttctgcattttgatgctgtgcttggcgcccagccagccattacccatgatgatatattggaacttgaatgtctgtatctggtttactgggaaatga

SEQ ID NO: 94641 - DNA, 509 bp, Oryza sativa
  Clone ID: PAT_MRT4530_92911C.1
aaaaacaaaaaccccctttaggcccccaagccccacttttaaaattccctgaaaaaattttttttggcttgaattttgtaaacaaaaataacaaatccttttccacctccaaaaaacccccttaacaacaaaaaattttaaaggggcttaaataatctccccctttttctaaaaaaaaactttttttgggggggctaggccccaaaaaccctttcacttaaagggggctttccatcctgggaaacaaaagctcccaaaaaaaatttttttggccttgccgttttcaaaaacaacaggggggggggttaatttttcccaggcctttatccaggggaccctgggtttggcaaacttgaaaaaataggggggaattttgccgagcttttccctgacctgtttggggagggaaagggaacccttttggaggggggcccaccccttgggggagggggggttctggaaaaaggggaatatttccccctgccaaaaaaagcccttttttttctttt

SEQ ID NO: 94642 - DNA, 1215 bp, Oryza sativa
  Clone ID: PAT_MRT4530_92912C.1
atggcggctcgacaacaaaggctcggccacacatccaaaaacctcgtgcaacaaccatggttaaactacaagaaatgtggagagctcacttactatggtggcaacgacaactcgggttgcaagtgtgaggacgttagcatagaagacaatgcctgggccaggcctccttaccaaggcccttgtagaggctcgactccgcttccgaggcgcaacccggctgcagtccgcggcctgatgagacctccgcttctgatggttgtagtagtagtagtttctacggcgcatcgtggaaccctaatgcgtttttcgctatgccgctggctaatgctggagctgttacaggtggccaaggcgcagccttgcgttcttcgccggtttactccggccagccgtcggaaatgtgtggctgcgagaggccatgggcgtcaggagctccgcgccggccaataccagcttgatgacgatgagccgctgtggctggcagtggtcagagatatcacttggggtctgaggagcttcctggccttcttggctgagcagccgaggcagctaaagcacctggagtggccgggttttcgcaacacgttgaggacagcaacacttactcttatacttgtagccgtattcattgttgcgctgtcttctgtggatgctgccctttgctacatcctatcctgactgcttcggaaatcagcatagctttatgtcacgggaatatttgcttattgttggagtctgattgactgattgggaaggataaaagcaccgtccagcagtaattttcaagctctatttgttgattgttcatgggctgaccctgcaaagttactatggaggagtaaatgatattttttgcaggctggagctagtgtccctaatgtagatggttattgtcccacgagtaccttggtcatcctgagagggtcgaaagaaatttaagaaatgctcgtgcagctgatattaatttatgtagttgcttactatagcacagttaatgccaatcacttttggttaaggaaagaagatgcacgtgggtttcccagtcacttattttctttttgttatataaacagcgggtcacgcggtatttggttgtcatgactcatgattaaacagaaacaactcatcttcagtggtttgtaaattactatgggcaagccaattgccaaataattttatttcgagcttgctgtgcaaaaaaaaaaaaaaaaaaaa

SEQ ID NO: 94643 - DNA, 1374 bp, Oryza sativa
  Clone ID: PAT_MRT4530_92913C.1
atgactgggtcagtggatacaagatcagtggtgtcaaagatgactttagcattactggaggacagcgggtggtatcaagctaattatagcatggctgagcatttagattggggtcgcaatcagggaacagagttcgttatctctccctgcaatttatggaaaggggcataccgctgcaacacaactcagttatcaggatgcacatataatagggaggcagaaggttactgccctatagtaagctatagtggggacctgcccaaatgggctcaatatttccctcaagctaataaagatggttcgtgcactgatgtaaatagtgcacgagcacctgacagaatgttaggtgaagtgcggggaagcaactcaaggttgccgttgatgggatctggaagtcatgtccgcaaactggtggacctgttcagttcccagggttcaatggatcttgcccagccaagtgcacaggtcatggtatatgcaaagccaatgggatctgtgaatgtgaaagtggatggactgggattgactgctcaacagcggtttgtgatgagcaatgtagtttgcacggaggagtctgtgataatgcattgtgcaccaagtgaactcagtattctacaacagcttgaagcagtggttcttgtgccaaattacaataggttgatgccaagtgggcggaccttccttaacttctttaacaatgccaactgtgcagcagctgcaaagcgtagcccgctggatctcgattcaaaggtgcgacgaagatggggataaccggcttcgggtatgactactctgcatgtgagttcaacaatagcgcctgtggggtggtggccgcgattgctgtcaccggagccatggtagcaagaagggaagaagaggaacaagggtgttccgtgcaaccaggatatggcgagaagaagtctttctggctaatgactataacttccccgggcgtttcttccctctgatatctccatctgcggctcggagattgtgtaaagtataattggcgatgtcctatccatattcattttctcttttctttttggccaccactttccaattgtaggatacgggaagtagtggcccatttcacctgggcacctgaagatgggtgcctggtgtataagcagtgttggagcgggctctgtgtgtttaggaagttagtctgactggaaggagggtggagtgagaagctggaggcgggcggtagatttattttttacctttttttttttgtcgcgtcagagttagcggaggaatgtaaagtgtaatgtgtgttgtaatcccatgacccatctaacaaacagagcatctcaatgagagccccctatgttgtcttgtgtgttcagctaaaaaaaaaaaaaaaaaaaa

SEQ ID NO: 94644 - DNA, 948 bp, Oryza sativa
  unsure (1)..(948): unsure at all n locations
  Clone ID: PAT_MRT4530_92914C.1
cttaactggtatgggatggggtattgcataatgatttctatgctgatggagccacttcctgagaggcgggaaggtggatgtcctcagaaaaccatgacgactcgatggcgggaagctatccttgggatcacaatggatggtggacagaaccgtcatttatggtaagggttcgggttatttaccagacttgaagcccctaagctaaccggagctttccaggaagcggcatcgccgcaccttcacctcctcggagtcgcgtcgggttccccgtgcacgcgctgtcctggagcaccctgccattgtcccttgccggagacgggaagcgctggcttggtgtcgcaccctccccccacacccacccccctccccgccgacgaggacctcgtcgtttgcgcgcccgcctcaccagatcatcaatgccgtgacacggctaggtgccgtcctcgggtgcgcctcccagccggtgaagtaggagccgcttggcattcgtcaccgcacgtacaccagctcgccggaccgccgtcgttgccttcgccgttgttccgctcgctcgtcgccagagagaaagaggatcaggagagaaggatttgggagctacggttttgcccctctctcccagtcacgcttcatccggcgccgggatgatcggagccgtccatcagattggacagctcagattcgccccgcgtcagatcgccgccgctgctaattacgcagccactggagcgcggaggtgcatcgggtcgtcgccgcgtatgtgggccgcgattgtttgcttgacttgcgggccatcaaattgatgggtccccgctacacagtgcattcgcgcgaagacgggttggcttcggaagacgtgggccaaaagcaaatttaactaaatcccgccaatttgttttcggacccatcccccctccggccgatgattcatcgnacgcgggaccgatctga

SEQ ID NO: 94645 - DNA, 589 bp, Oryza sativa
  Clone ID: PAT_MRT4530_92915C.1
atttaaggctcttaatgaatgagatcatgactgggtcagtggatacaagatcagtggtgtcaaagatgactttagcattactggaggacagcgggtggtatcaagctaattatagcatggctgagcatttagattggggtcgcaatcagggaacagagttcgttatctctccctgcaatttatggaaaggggcataccgctgcaacacaactcagttatcaggatgcacatataatagggaggcagaaggttactgccctatagtaagctatagtggggacctgcccaaatgggctcaatatttccctcaagctaataaaggtggccagtcttcgttagcagattactgtacatattatgttgcttattcagatggttcgtgcactgatgtaaatagtgcacgagcacctgacagaatgttaggtgaagtgcggggaagcaactcaaggtgtatggcctcaactctagtgcgaactgggtttgttcgcggatctatgacacaaggaaatggctgttatcagcatcgctgcacaaataactccttagaggttgccgttgatgggatcctgaagtcatgtccgcaaactgg

SEQ ID NO: 94646 - DNA, 544 bp, Oryza sativa
  Clone ID: PAT_MRT4530_92916C.1
aagccaatgggatctgtgaatgtgaaagtggatggactgggattgactgctcaacagcggtttgtgatgagcaatgtagtttgcgacggaggagtctgtgataatggtaaatgtgaattccgctgttcagattatgcaggctacacttgtcagaaaggttctgcaatattgcccagcttgtcaatgtgccatgatgtactggttagggatgctgacgggcagcattgtgcaccaagtgaactcagtattctacaacagcttgaagcagtggttcttgtgccaaattacaataggttgatgccaagtgggcggaccttccttaacttctttaacaatgccaactgtgcagcagctgcaaagcggttagcctgctggatctcgattcaaaggtgcgacgaagatggggataaccgacttcgggtatgctactctgcatgtgagttgtacaatacagcatgtgggggcgggtcttgattgctcggaccagaccctgtttagcaagagggaagaagaggaaaagggtgttccgtgcacaagatatggc

SEQ ID NO: 94647 - DNA, 506 bp, Oryza sativa
  Clone ID: PAT_MRT4530_92917C.1
ctccggaggaagagaagattaacagtgagcgcgtgtggtgaatgtagggcacatgatagaaggagttaaggctcaagcggagaacacaaggtgaatagtgatgactggaaggaaacagatgccttcctcagtgactttatactcttgacaacgttgtgcccagttactactttgtcgcgcctactattacgccatctgggtactcgttcccacgctaacactaatacgattacaccgcttgcggtgcatgaggtggatatgagtgtgcggaagcttagatagatcatatcgtgcgcgctttagttacgctagccgacctaatcgacgttaccatatctgcacacaaaactaatcgccatgtccagatgcgtgcgctactaaagaaatgtggcagatttgatgagaccgctcatagatgacagccaaggtaccatagccgatgagcgtggattgtgacctgagaggtactgcccacttgagtagaccgcacccacctgacacacaat

SEQ ID NO: 94648 - DNA, 376 bp, Oryza sativa
  unsure (1)..(376): unsure at all n locations
  Clone ID: PAT_MRT4530_92918C.1
caaagctccgggccgaggccatgccaggccncngcaaatgcgaatacatgatctacagaaatcatagcattgtttaggtccccaggaaattaattgaancttggnccattggattctgagacatgaccactgagacgactgggccaatggttgctcatacacgctactactactaatctacaattaaagtgttgcaagtgtgctgttcttgcagcnccanncgtgttgtatttgtatatactagttcaaggggaaatgcctgtgattgtgaattaancatgcatgcacaatgtcgaattactgcagttcgcctacctgattaatttaatacagtcacctgaatttagttaaaaaaaaaaaaaaaaaaaaaaaaaaa

SEQ ID NO: 94649 - DNA, 2830 bp, Oryza sativa
  Clone ID: PAT_MRT4530_92919C.1
cgtaaaagaaacagaaatctctaagctaatcaatagagaatcttgggagtcacctgatggcaggaagttcgaggaggtgcatttaggtgaatatcaatgggatacctacgcagaagcattgggtcgtgcatgtaatctccatcttggtctcatcaagttgggtcaccaacgaggatagtcgtgctgcaatatttgctgatacaagaactgagtggatcattgcatctcaggaaatcttgcgacaaaatctaacatgtgtaactatctatgcatctcttggcgagattgcactggtgcgatcgctgaaatgagacacaggtttcaactcggatatgttgattcaaagcaacttcaagaagctacttgcaatcagttccaagttacagagagttaagcatgttttcaaactgatgtggggagccatgctgaacctgccatgcgaaactctaattgaagcactggacaacattttcttttggtgaagttgaagaattgggtaaaacatcacatacaggctgcaagattaccttcaagcactggtactgcagttattatgaatacaagtggagggacgggtcttcccaagggtgcagtgattacacatggaaatatggtggcctgaatgggatacctacgcagaagcatttagtcgtgcatgtaatttttcttctggtctcatcaagttgggtcaccaacgagatagtcgtgctgcaatatttgctgatacaagaactgagtggatcattgctgctcagggatgctttcgacaaaatctaacagttgtaactatctatgcatctcttggcgaggatgcactggtgcattcactgaatgagatggctaagatgactagcgaattgagccccttcttctcattcttctgcggagaggaccacccgcaccaagatgagtcgaccggccttgttcatgagggaggccttccacattgggagacacaggtttcaactctgatatgtgattcaaagcaacttaagaagctacctgcaatcagttccaagttgcagagtgttaagcatgttatctatattgaggatgaacctgttgaggctgaggtactcaatcaaatgaagcactggacaacattttcttttggtgaagttgaagaattgggtaaaacatcacatacagatgcaagattaccttcaagcactgatactgcagttattatgtatacaagtggaagtacgggtcttcccaaggtgtacacacatgatgagcctaccatcctgttactttcactgaacaagagcttaagtgatggtgtaatgattacacatggaaatatggtggccacaactgcagctgtcatgacaatcataccagaacttggcacaggggatgtttatctggcataccttccgctggctcatgtctttgaactagcagcagagactgtcatgttagcttctggtgctgccattggatatggctcagctctgactatgacagatacatcaaataaaataaagaaggggacaaaaggagatgtttctgcactgaagcctactcttatgatttcagtccctgcaattttagaccgcatcagagatgccgtgtttaaaaaggttggtgagaagggtggtctgaccaaaaagctgtttgacattgcctataaacgaaatcttggagctattgaaggaagttggtttggatcctgggcaccagagaggatgatatgggataacctcatttttaaaccaatacgttccatgcttgttttgaattacctgtgctgcagtgtaccagtaggtcaaggctatggattgacagagacttgtgctggagcagccttttctgaatgggatgacacaagtgtgggccgtgttggtccaccccttccttgttgctatgtcaagctcgtttcatgggaagaaggtggctataaaatttctgattctccaatgccccgaggagaggttgtagttggtggatacagcataacaaaaggttatttcaacaatgaagcaaaaacaaatgaggtctacaaggtagatgagaggggaatgcgctggttttacactggagatattggccagttccatcctgatgggtgcctcgagatcattgatagaaaaaaggatatagtaaaacttcagcatggagaatatgtgtctcttggcaaggttgaatcagctctaactactagcaattatgtggacagcataatggtttatgctgatccatttcataattattgtgtggcgttggtagtgccggcgcaccaggccttagagcagtgggctcaaaattctgggattaactacaaaaactttgatgagctgtgccacaatgatcaagccattaaggaggtccagcaatctctatcaaaggctgcaaaagcagcgaggcttgagaagtttgaaataccagcaaagattgtgttgctgcctgaaccatggactccagagtctgggctggtgacagctgcacttaaactgaagagggagcagataaagaccaaattcaaagatgatctgggcaagctctatcactgaatcagctatgatgtctgctggggcaccattatggatgaaataatctatgttcttttgctatttgtcatccgcaaggctctcttgacgggatgacctgctcactaaattcagcgtgtagtcaataccccgaatgctagacccgggaaacgactgggacgtggagcagtgtaattatgggatttctccgtgccttgttaggataataaatttctcaagaccggattaacctgcttctgttcttctggttaataatatatagttgcatgttccttttcttaaaaaaaaaaaaaaaaaagcctaaaaaaaaaaaaaaa

SEQ ID NO: 94650 - DNA, 1244 bp, Oryza sativa
  Clone ID: PAT_MRT4530_9291C.1
ggcaagctaatgaactctttaaaactacaagacttcctgaagaaattcagctatccccatgacaaagcacaactgacgaaaactactcattgtacaagaaggtaaagaaactgagcagaccgaaccaaaggctgcaaaatctgttgccctgtctatatattctctatggagcattatcctacaacacccaatgacaccattctttgtcgatcactagcatgtactgtacaaaactgtttccatgtttcacaccaggtgcttaaatcccgtttagttactggtttttgacttcttattttgtttagctgatgatgcaccctttgaagacggagaggtagacggttggccactatcacggggtgcaactccatcctgtttatctctggaactggaatcagaatgctcttccttgtcatccgattttgaattaagaaatcggcctccagctcccctagcccttttcagggcatgttgatgccgtgactcatggagatatggcttacggcccttgacaagcttcttttcagactcagctttggctcgagattgtcgacgccttaatatggcattgtactgttttgcattaacatagacaggctcttcaattgcatcggtaggcagtggtagtccagctggatgcatcccgaccaatggtggatgcatcataggctgtccaccataagctgcataaaggcttccgtaatatggatcaatatttgcgtaagcaatttggcccattgcatgggccatatcgtgatgggcatagggtgtcgcataatctgttgaaggtgttgctaccattgtatggctatctgtactagtaactgaggcttcttgctggtcctcaggttcaccttgcctttgctgtttttgccgctcatcagctccatggttgcctgaaacatcatgaactacagacgtcatggcttggttgtttttgcagacagaagcagaatcaggatgattgtagtcaaaagaaacagacgttaatcaccccagctttccgtgtgcttcaggcatattttggttttgaaaccttgtaggagagacaggagcttgcagcacaccacacttccgggaggaagaggccaggcgagcggaggtgcgggatggtgagggaaatcccggcgaggcgatcccggcgaactctatccccgccggcggcgagcggcggcgacggcgaccccacgcgtccgcccacgcgtccgcccacgcgtccgcccacgcgtccgcccacgcgtccg

SEQ ID NO: 94651 - DNA, 231 bp, Oryza sativa
  Clone ID: PAT_MRT4530_92920C.1
atggtgcgccgccgccccgcaaatcgacctctcgtctcgctcccctccagcttcgtggcgtgccctccccgatcccctttggcctcgcccccgcagtttccccccatctcgccgcagattttgttaattttcgcctgctttttgatccgcctcaccttgtcgcgcaggcgggcaccccgtccccctcctgctccggcggttggatttactccggccatcctcaggaggtaa

SEQ ID NO: 94652 - DNA, 1475 bp, Oryza sativa
  unsure (1)..(1475): unsure at all n locations
  Clone ID: PAT_MRT4530_92921C.1
tatgctcgaaatatttcagagaacatttgaaagtntgatattctgtgtcaagagcacacagtacnagcatgtctatcgaaccattacnaagttatanaatgtaaaatatagccttatactacccagtatgacaaacaaaagtanggacggtaaggaactttgcagactccaaagttaattataaactttgtactaacaaatacaaattatcatcttgtaattagctgattatcatgcatgtacatccatttaattttttaaaaactgaccatgagcacaatgatgactgaagtaaatctttgtggccacatttcctacagattccagcacagcaaccagcaaagaattgtggatatggttatcaatggtttttccattcggttctctctcttacatgttattcagttgccaatggatattaggacttctaaccaaaataggcaatacttctgtgtcaggcactcaggccctgtcatattgatggtaataaaatccagaaatgcatatcaacggaacaaacctatgatttcagatcggtcaatttttatggatgagtcaaaaaaaatgaaaatatttacataccttcaccatctcatagattctctctgcgatggcaatggacgaatcacctccaaatgaacatgaatccaggggtaaaatagcagacttggatcctttaggtggtgaagatgtctcgattgctaactttcttgcaattcttccaggcttctttaacaataggaacaagcaagtcccgccagcatcctccggattcgcggacgcgtggcgtttttccttgagaggtaattcttctaaaagaagaatccacccagaagttccattagatagagccaaaaagcagaagtggcgttctttgcccctctcaaatgctattcgacaagggaccgcatcaactaagttaacttcaagtccaggtttgggtactgagccatcgaaacctgctaaagttgctcgattatttacaggcaaatcagttggggaaaaaataggaggctggtcggtgagagtttctccaaggcagaagaggataacttgacgctgtagcacaaaacccttcaccatctcatagattctctctgcgatggcaatggacgaatcacctccaaatgaacatgaatccaggggtaaaatagcagacttggatcctttaggtggtgaagatgtctcgattgctttcttgcaattcttccaggcttctttaacaataggaacaagcaagtcccgccagcatcctccagattcgtccaaaagttttatactgtaatccttatgcgaatcctttagccattttagatgaaaagcagtgaactcttcttctccatggggtagcagttgcctgaaaagccagccaccagctaagcgaacatctgcagatcaattagatctgcagaaaagggtacctaatgccccgagcacctgatatctgtggaatttaaacgtcattgggagtagtt

SEQ ID NO: 94653 - DNA, 1594 bp, Oryza sativa
  Clone ID: PAT_MRT4530_92922C.1
atgagcatagtgcccaaagagacgattgaggtgatcgggcagagcgtcggcatcgccaacctccccgccgatgtctccgccgcgctcgcccccgacgtggagtaccgcctccgcgagatcatgcaggaggccatcaagtgtatgcggcatgcaaagaggacagtcctgactgccgatgatgttgatagtgctctcagcctcaggaatgttgagcctgtatatggatttgcttccggtgaccccttgcggtttaagagagctgtgggacacaaggatctcttctatattgatgacagggaggtgagattattgaggcccctctacctaaagctcctcttgatacagcagttgtagctcactggctagccattgagggagtccagcctgcaattccagagaatcctcctgtagatgctatcgtagcaccaacagagaataaaaggacagagcatgggaaagatgatggacttcctgttgacatcaagcttcctgttaagcatgtgttatctagagaactccagatgtattttgataaaatagcagagcttacaatgagtagatctgaaacctcagtttttagagaagcattagtgagcttatcaagagactcaggccttcatccgttggttccttacttttcctacttcatcgccgatgaggttgttatcttgctcttagagtctatattgatgtgcaagcttgcattgcctatgttgctatgctgtcagatttgcatcagttgatgccgtcaattatcacctgcatggttgcgaaaaggcttgggcataggctttcagacaaccattgggagcttagagacttctctgctaatttggttggttcagtatgtcgaaggtttggtcatgcgtatcacaacatccaaacccgggtgacaaggacgttggtccagggatttattgatccagctcccatgccaggaaccatggatggcttctccacccaattaccccaccctagcatgatgcaatcagcattctcttggcaattggcggaaagccacgcatcaggtttgattcggagggatcagggaagcaaccacacgcaaagagtttccacagtgctgaggctagcctggaaggaggaccaaaatgctgggcatctgttgagttcattgtacgaggtattcggtgaagccatcttctcctttgttcaaccaccagagatatcgttctttttgtaggaagcaaatgcatagtgttcagagctatgtaatatgcattgtaccattaggctggtcttgtggaattcttgaaactgaaattgacgtctaggaatcttgtagtgatctctgatgctagatttaatcgcttggtgacttgctgctgcaatattttatgtgctgatttcttgaagttttatgtttattgtagtaattttatctaatgtaaacattttattacgctctactggtgcgccattttatggcatatgtacatttttgaaccttacagaaaaaaaaaaattgtcgttggcatgtgctaatgctgggcatctgttgagttcattgtacgaggtattcggtgaagccatcttctcctttgttcaaccaccagagatatcgttctttttgtag

SEQ ID NO: 94654 - DNA, 146 bp, Oryza sativa
  Clone ID: PAT_MRT4530_92923C.1
gctcgagcttccgctagggtttcgccgacgccatgccgtagggagatcacatatagcttcaccataagcgtcatggtcgtctcctggactattaggagcgcaagcgctagccggcaggtgcgcgaggtgcacactctatccatgga

SEQ ID NO: 94655 - DNA, 309 bp, Oryza sativa
  Clone ID: PAT_MRT4530_92924C.1
atgactctctttttcaacgccaaatcatgtggcgctgaacttagatatctcagtgccacgtcaagcaacgctgaatgccgtgccactgtggatgtgaggctaagtcagcgtgccaacttgcaggaccaacaggatttgatctcaatccgtaaagcacaatgggcccccgtctgtgtggctctacgtccagtccagtacaggtccatgtccatgtggcttgccttttctctgcaggacatgtgggccctcaaagacaagtggaaaagctccatgtcctctcctgctactgagcccaatgccccgaagtag

SEQ ID NO: 94656 - DNA, 1068 bp, Oryza sativa
  Clone ID: PAT_MRT4530_92925C.1
atgtactcttcctcctccatgaaaccctcctccccttcacaagccaaccaagacgccgatgatgccaaaacctacaaggagctctaccagcgctgcaccgacttggtgtcgtcatggccgagccgccaaggcctttcttacctccagctcttccgccacgagaaaggatggtacaacggcgtcacgcctctcgtcgggacgatggtcgccgacgagctcttcgccgcgcgcccctcggacatcgtcgtccccaccctgcccaagtccggcacgacgtggatcaaggcgctgctctacgccacggtgcaccggagagagcatcccgccgacgccgccggcgaccaccccttcaactccctcggcccccacgaatgcgtcaaattcctcgagtaccatctctacagggcggacgaggcccccgacctcgacgcgctcccggacccgcggctgttcgcgacgcacgcgccgttcgacctcctgccgcgagccgtcgtcgccgccgcgccgccgtcgggctgcaaggtcgtctacgtgtgccgtgaccccaaggacaccctggtctccctcctgcagttcgtcaacgagtacaagtcccggaacgggagggagctcgtcgcagtggacgccgccgtgggcttcttctgcgacggcgtgtcgccgttcgggccgtactgggagcacgtcctcggctactggcgcgcgcaccgggagcgccccgagcgggtgctcttcctcaggtacgaggagatgaagcgggacccggcggggcacgtgcggaggctggcggagttcgccggggtccccttcacctcgccggaggaagacggcggcgcggtggacgccattgtcaggctgtgctcgttcgacaacatggtcggcctggaggcgaccaagggtggccgcacgcagctcacaaccacaaccgtgccgaacagcgcgttcttccggcgtggagaggttggagactgggcgaaccatctgtctccggagatggcgcaacgaatcgacgccatcaccgaggctaagtttgcaggttttggcctagcgcccagcctgatcgagctctag

SEQ ID NO: 94657 - DNA, 1142 bp, Oryza sativa
  Clone ID: PAT_MRT4530_92926C.1
cacccccacccccacgaacgcaaacccccacaagtaccacctcccggccgggaaaaaaactcccgaaatccaaaccacccccctcctcccctcacgggctcacggcctcacccacccaccaacccatccatccaactccgcggcggcggcggcggcgatgacgacccgatccaacggcgagcaccaccacgggccgccctcgtaccagcagcggcgcccgcactacgggggcgggtacggcggcgggtcggcctcgttccgcggctgctgctgctgcatcttcctgctgctcaccttcctggccctcctcgcgctggccgtcgcgctcgtcgtggtgctggtggtgaagccgcggaagccgcagttcgacctcaaccaggtgtccgtccagtacctcctcgtcaccccgccgtcctccgccgcctccgccgtgggggggaccgtggccgccgcggtccccgccgcggcctacctctccctcaacatcacgctcctcttcaccgccgtgaaccccaacaaggtcggcatccgctacggcgccacggcgttcgacgtcatgtaccacggcgtgccgctcggggtggcggccgtgcccgggttcgagcagccggcgcacagcacccgcctgctccagacccgcgtcatcgtcgaccgcttcaacgtgctccaggccgacgcccaggacctcgtccgcgacgccgcgatcagcgaccgcgtcgacctccgcatcaccggcgacgtcggcgccaagatcctcgtgctcggcttctcctccccaaaagtccagtggtggggacgaggtgtactcgagaatttacggttacctggaaatgaggggcgtgggttaggcgataaaccatttgtaaatgcagacctgcagagttgcggaagaacgttttggagaaggaacgtggcccttccgtgttgtgtcgagtgtcagacggcaggaatataccgtagagtagtcctcatgccgactggagagtgtcttgaacctggttataaaggtgggtctccggacacagcaccgggtttggacttcccaggcttaacgtaactctcacctcaccctagaggaggaggtcgccgctgatttttgtgaattactgtccggtaattatcactaaaaaaaaaaaaaaaaa

SEQ ID NO: 94658 - DNA, 613 bp, Oryza sativa
  Clone ID: PAT_MRT4530_92927C.1
atggagtactcttatgcctttgagcatgttcaggcctactggctactgccttctttaaagggcaagccatatggctcttcttcaggaagctacaagcaggaaatttgctggttgactccgacagttggcaccatactaccagtgcagtggcaacgtatcagcatagagctgagcaatgcatccaccacctcgaccgatggattcctcttgagcaagcacatggcatactccatttctgcagcatcacaaggcaacacaattctcccgtcgcttgtgaagccaaactcctcctgggacatcctcaggagttcactgaagaccactgtgccaaggtacgccaatgggacctcaaaccgcctcccatcagctgtgtacatgacgcagtggcccttgactgctacagaagtggagcattcttcagtttcttgggcctttcccatgatcctcttccttccaagggctgccatcctctgccactttgccaattgaaccagtctcttggcgctgatcatgtgtgatgctcagtttctgactccaaacgaactgatcaactgatgatactgagatagctagtctctgaatttatagatgagggaaatgatatcatgccagt

SEQ ID NO: 94659 - DNA, 300 bp, Oryza sativa
  Clone ID: PAT_MRT4530_92928C.1
atggcagaagctgatgatgcctggatagaaattctcttgaggctgctgggaactactcttggatttattcagctcctacaaccatcaataatatcaaatcttcgctctcacttcatcttcaagtctttcgtattggctgctgcaattcagacgcaggacttctggtcagttgtcgatgctataactggtgaagtttgttacaattctactatacatgtgggctcggattggttttcgcctttaagctggagcgtggcactggcagctgcggtggtttcagaagttgcatggaccacttga

SEQ ID NO: 94660 - DNA, 668 bp, Oryza sativa
  Clone ID: PAT_MRT4530_92929C.1
ttgggtgaatatccgcacaggtgtcaaggtcgacaaggaaggcttcacattagtggacctggccaagtcaatcctcatccacgggtccttatccgccgccgacgccgcctctcactctctcactctcccagatccaccgcctcctccatgcccaagaccgccaccgccggcttcatcgaccgccgccgcctcctcgtcctcaacgctgtcgcctcctcctccctcgaagatccacgggtccttcaccgaccacggccgcctcacatcctcctctccagatctacgcccggcggccgtcgacctcctccacgccgctacctcctccgggcccgctcaagatccggcctccccgacggccaccgcctccctccacgccgtccccgagcccggcgcctccctccacgccgtccccgagcccggcgccgcccaagaccgccgtccccgagctcggcacctccctccactccgtccccgagcccggcgccgcccaagaccgccgtccccgagcccggcacctccctccacgccgtccccgagcctggcgccgcccaagaccgccgtccccgagcccggcaccttcctccactccgtccccgagcccggtgccgcccaagactgccgtccccgagcccacgtcaacctcctcaccgagcccgccaccgtgcaag

SEQ ID NO: 94661 - DNA, 510 bp, Oryza sativa
  Clone ID: PAT_MRT4530_9292C.1
atggcggcgacagcggacaacggcgaaaagatgatcctcctgatcagctcggacggcgagcgttttgagctgtcggaggcggcggcgagtcagtcaaagacgttatcccacatgatcgaggatgactgcaccgacaatggggttcccctccccaacgtcaccgccgtcgtcctcgccaaggtggtcgagtacttcaagaaacacgccgccgtcacccccaagccggccacggaagccgtcgccgctgataaagcgaagagggaggaggagctcaagagcttcgacgccgagttcgtcgacgtcgacaggacgatggtgttcgagttgattttggccgcaaacttcttgaacgcgcaggacctgctagatctgacctgccagcacgcggcggacttgatcaaagacatgtcggtggaggaggtcagggaggtgttcaacatcaccaacgacttcacgccagaggaggaggcggaggtccgtaaggagaacgcttgggcttttgacaactag

SEQ ID NO: 94662 - DNA, 615 bp, Oryza sativa
  Clone ID: PAT_MRT4530_92930C.1
atggaagtcgtaccaggtttggaatgggatgatgtagaactagacgtctatgaggacccaaatcctgtaaaagatgtcgtgggccaaaccctggttgataacaaggaaatcgggaagtctgaagtgcctagagtgctcaaaagccacaactccaagtctatgggtgatcaaaaggagaagtggatggtatccaccttcagagggggtttcttctggctagatttcactgatattcacgccatctatcgttgggaaaagatggacgtaaactttgtcggtgcatggtgcctgttgcaatacatggatgctgagaagacaaagcaatctatcgaatatctggatccaacaaggatctgtcaaacacagcataccgtgacgctgtcattaaattccaaggttaatggaagatatagggttaacccagaggatttgcctagaatagaacatcgaacaaactttgacgatacaagcattacaaatgtgcagcgggacctctacctcttcatccaccgcaggaggtatcatatcaaaagacgattcttcgacctagacagcatactagctacaagcaatgaatacaaggcacttcaggagtggagcaatgctatgccataa

SEQ ID NO: 94663 - DNA, 573 bp, Oryza sativa
  Clone ID: PAT_MRT4530_92931C.1
cttctttcctgttttctgtgccgtgccaggaaacctaggatggaccgagccaacccaaggcttacatgccgcagctgccaagagacgtagtacagaacatattcaacgtcacgtttgacggtcaaaccgccgggaagtggctgtcctgtgctgtcagtcaaagacagggtgcgagcactggctgtgtgccaagcttggaaagaccaaatggacccgaccaagtggccactagatggtttagagttggtcggcagtcaagaagcgcatctccgcattgccggctggatacgtgccacccagccggccctaaatgccttggccatgcgctactttgaccagccgcagctactggtcactctgtcttctataggggctcgcacggcattgacggagttgtcgctgtctggagaggctgccgacatcctggattcactggtccctgtctgcctctttagcaagctgaagcggctctcccttgcctgccgctaccctcccgaggatgatttcgaaggccggctggaccttgcagccctgcagccactgtcggccctggagcacctacgctgctgctct

SEQ ID NO: 94664 - DNA, 1395 bp, Oryza sativa
  Clone ID: PAT_MRT4530_92932C.1
atggcccgcaatgctcgctcccataattgcactgtcctggagcccagggatggcgccgccgctcggcggctacccccggtgactccacgcgtcggttcctccagggacgcggagaccggcgtctacgccttcttcgaggaggatgcgggcgagcttgatgtcgcttaggcaggtcgccgtcattctatatcgagggtgtgtgatctaacgttcctggacgactgttcatagccctgcgatgacggcttgttagcaatgagatcataaccgacggaggcgctcagcttgcacttgaaggtcgccgactattccaacgtttgaattcatgattatgcagttagtcgtcttttcatggacagtgtgaaggacctttttgcagatgtttatgttcccgaatagcctgagggtagtggatatattgcaatatagctaacagatttttgagaaaacttggctggaaaaaaaccatcgttggcttgagtgtcgccattccaagcattaaaatatgattatcaacactgtcccatggtataggaccagtggttcattcacaaccgggccagagctacccatatttattttgtgttagtacttagttgttcagtcgagtgttagtttcgggaaaagttaaaaatggacccctacttatactatggatgctatgtattgtaaaaaaaaaaaaaaaacgggaggaccgcgatgtgcgcgtacatggtcgaggagctccaggtggacatcgacgccgccgatgagttaggcataacgcaactcgatgaggctggtgctgatgttaagggtgttggtacttttacccccttaatagttgctgcaactgaaggcttaactgatttctataagtgcttactggagggtggtgctgatcctgatgtgcctgataaagttgaccctttcttcaaaataagaccagctgatctgaagttggaaggaaatagggcatacatgagaaaagactatcttactgccgcaaaactctacaatatggccgatgggcggcggcagcaggcagcggcagcgacagcagcagcactaagcggcgtcggcggcagcagcagcaacaacagcagcaccagcaccattaccaggaggcggcaccggctacaccatcggcagcatgtgacggcggtagcatgtagcagcaacactacatcaacagcagcagcaacaaccagcaaggaagactgtggaactaggatattgcgccctgattggcccaagggctgctacagggaagggaccgctcacatgttcatgaaggactatgaaaaggcctgcaatgcatttcttgatggtttcaaactggacccagcgaatattgagattgaaaatgcgctacgggaggctttgaaatcattgaaggcgtctcgtgctgcttga

SEQ ID NO: 94665 - DNA, 1740 bp, Oryza sativa
  Clone ID: PAT_MRT4530_92933C.1
atggacagaagaacgaggtatcaaacatacgaagactcgacggaatcagttggcgccggatacatccccccgggcgcccaaggccctctcgttgcccaactccgcgctccctatcgcggccaggaggtaaccatcggcggcggcgcgctccacctagatcaagccgtcgacgccagggagattcggatggtccagcatgaggaggatcgcatccaggtcctccccggcttcatcacggagcttagtcacaggcgttccgctccgcgaggagttgtcagtgacacagagattcccgtgtctgtcttcaccggcaagccacatttcccctcctccctccagcagcgcctctctataaattgcgtcctcgtcttcgtctccatccaaaccgcccaagccgaagctagaaacttagaaagagcggagagggagagggagaaggagagagctcgatcggcggcaatggacgagtgggaggagcttgcgtggagagtgcccgagacgctcatgctagtcagctgcgagatggaagccaccaggttgatcgaagtcgcccacagcaatctacaagtgcgcggaactttgttccgccggatacacttgggcatgccggcggccatcgccatgaacctcttcggcgacccggccgccgaaggagtcatccccaccgagatcctcgaggaggcccgccgcgagatctcgcagagcggcgctcgccacgggaagaccaggcacgtcttcgctcgctacgtcgtcgcgcacctcggcgtccagcaagatgacccggcgtaccgcagctgggaggtccaccaccaggacgccatccgcttcaccgataaggcgctggagaaggttagcgaagccgcgtcgcatgccgaggcggccaaggacgccgtcgacatcgccgagaccctcctctcccagccccagcccccgctccagctgtgggcagagtggacgtcggcggccgagaagctcgtggaccaggccgctttggaggccaccctggcgctggacgaggtgctccgggcgcgccaatctgttgctctcgagttcttcgacgccgtagcgattctgcgtcgcggaagagctccaccggcggcggtggacaagtggtggcaagagattgagaggacactccctggagccttcctgctcgtcgccaccggcgggctgaaagcgctcaggttgatccgagatgcccatggcaagctccaggaacgcgtcgctatgctgcgcgtgaacttacgccaggagacgccggcggcggccgtccccgtcgaaggaaattctgcctaccagctggatcccgagggaatctgccccaccgtggcccttgaggacgcccgccgcgagatctcgcagagcaccgttctccacgcgaagacaaggcacgtcctcgctcgctacgtcgcgcacctcggcgcccagcaggatgacccggcgtaccgcagctgggacgtccaccaccaggaagccgttgaccacatcagcaaggcgctgaagagggtgatcgatacggtgtcaaacgccgaggcgggcaaggtcgccctcgtcatcatgggtagcgttgcctacgggtgcccgctgtgggatgtgtgggcatcggaggccgaaaaattcacggcagtcgctgccctcgaggccactatggcaacgaatgagatgcgctgcgctcaggaagccgttgctcaggagttgtccgatgcctggacgattctgttgtcaaggcgaagaaactga

SEQ ID NO: 94666 - DNA, 777 bp, Oryza sativa
  Clone ID: PAT_MRT4530_92934C.1
tatcaaaaattttttaaaaaataataatctctacttttagttaaaaaataagaagtacttccatcgtccgtcaaaaaaaccaagcgaaaaaggaaaaaaaccaaatatgtctgattcaaaaaaaaaaacgggagaaaaaagccggaaaaagaaaaaccaaacgtaaaaaaaagggcgataaaaagaaaaaaaaaacagatcggtcccatccaaaaaaaaccggaaaaagaaaaataaaaaccaaacgtaaaaaaaagcgataaaaagaaaaaaaactgatcggttcgataaaaaaaacacgggtgaaaaaaccggaaaaaggaaagaaaaaacaaatatgtccgatccagaagaagggcgaaaataagggaaaagaaaaacgaatccgactccgtctacgcggtaaaaaagggcgaaaaaaaaagaaaaaatctatctgatttcaaagaaaaaggaattatatgtgacacggttaaaaaatttctatctctacctctactatacttaaaaaaaataaaaggtgcttccgtcgtccgtaaaaaaaccagcgaaaaaaatcggacgagcgaaaaaaccgggagaaaaaaaaacgggcgaaaaagaatcggtccgattcaaaaaaaaagaaatcgggcgaaaaaactaggcgaaaaagatcgggtgaaaaagccgggcaaaaaaaaaagaatccgattatgtggacgcagtaaaaaaaagggcaaaaaaataaaaatgaatctgtctaatttgatcaaacaatgtggctctgatttttta

SEQ ID NO: 94667 - DNA, 581 bp, Oryza sativa
  Clone ID: PAT_MRT4530_92935C.1
gcgtgatgtatacgactcactattgggcgaattgggccgacgtcgcatgctcccggcgcatggcggcgcgggaattcgattcatcagcgtaaaccaagacttcttcttcatcatacacctccaaggacaatttcaaatatgaatgaaagtgtggaacgtggtatccagcaaacgtaatatgatctgccgaaaaccaagataatagagcttgcctggacatttacccgctaatagcgttctcttggaataacagggcgggtccctcgattttgcaaagagctccaaaacaactactgtttatatgagcgatcataatgaaaattcaataaaatccacgtaggcatcccaagtgccgtcatcactcgtcaaggcgagtttgatctcctgatctccagtagcgtgagtaattttggacaaggtttgaacagtcgggcgttttgcccgtgaaattgaaggaacctacagttactccgccaataaccaagtccaccttggccgtaccagcatgcttgaagccccccgcactgagatattatgcgtagagttggcaaaatactgtgaatatgatacatagtcagcat

SEQ ID NO: 94668 - DNA, 244 bp, Oryza sativa
  Clone ID: PAT_MRT4530_92936C.1
gttgagtattttttttttttttttgactaaaagcgttcttttttacttaccccagcacaaatgcaatccaccagatcgatcgatccatggggcaaccggaccaccagggcgaggcgggacggacaacatccaggatgtcggggcgtcaagaagccgctttagggcttccagaagatggggggctgggcgatcagggaggggaccatgtaagggtccatgtgggacgccggccggcgaccctcga

SEQ ID NO: 94669 - DNA, 2384 bp, Oryza sativa
  Clone ID: PAT_MRT4530_92937C.1
atggatttcggaccttgcaacgagacgctcgacaccgaactgctacacgtgctgacctccggcgacgaggtccgcatggcggacctgctgggcagagaacgccgtggccatggccactccctgtcccaggtggcgatacgcgtcgacgacgacgacgacggccgcgcgccggcgggagcgagccgcctccttggcgtgacgacgggcaacggcaacacggcgctgcacgtggccgccacccgcgggcacgccgcgctcgcggcgctggtctgcgcgacggcgcccgcgctggccgccacgcgcaacaggttcctcgacacgcctctgcactgcgcggccaagtccgggcaccgcgacgtggcggcctgcctcctgtcagagatgctgcgagccggcggcgcggcgtcagcggcgctgccgctgcggcgggcgacgaactgcctgggcgccaccgccttgcacgaggccgtgcggaacggccacgccggggtggtggctctcctcatggcggaggctcccgagctggcctccgtggccaacgacggtggcgtctcgccgctgtacctggcggcgacggttggctccgtggacattgtccgggcgctgctccacccgttgcctgatggaacgccctcgccggcctcggccgctggtccggacggacggacagctttgcattctgcggcaactactagcaaagagccctccctagctctggtttgtgatatccaaggatcatttcctttgcatgttgctgctgtgatgggcagtgttaggatcgtcgttgagctcatacagaaatgccccaacaactacaacgatttggtcgatgatcgaggaagaaattttctgcattgtgctgttgaacataacaaggaaagcatagttcgctacatttgccgagatgacaggtttggtatcctgatgaatgcaatggacaatgaaggaaatactcccctccatttggccgccgagtatgggcacccaaggatggtcagtttactcttggagacgatgagcgtcgatgtagccattaccaacagggatggtctaactgctgctgaccttgcttatcgccatctgcaacctggtttgcactattttctgaatcctcgagccgtggtaaagaatctcttctactgcaccagagcaccggttaccctagaaggggatcatgctaggactggcatcccatcggccatggaggatgccgatgctcccaaggacagtggtggcgtgacatccaccggaacagtcgcgtccgtgctgatcgccacggtgacgttcgcggcggctctcaccgttccggggggctacgtcgccgacgaccacccgaacgccgggacggcggcgtcggccgggcggttcgccttcagggcgttcgcggtgtcggacaccatggcgttcctctgctccatcgtgggcacctgcctcctcgtcgtcggcgaggcgagggaggtccggccgagcaggggccgtctccgcgcctaccaggggtcggcgtgggcgctcgtgacggccggggcgcagttcatggtcgccgcgttcgcgttcgggctccaggtcgcgctcggcggcggcgcggacagccggtggctggtggtgttcgtccacgcgctgtgctcggcatcggtgctgctctgcttcccgggcatctgggcgccgttctgcctcgggaaggcttgcgtcgacctcgagccggccacgcgggcgtggaggtcgccgaagtgcgcggcggcatcagcgagaaaggaggcttgccatgcgggaacgcggaggtcgtataactggcggttcagcttcttccagcgcttccgctcggcctccacgtggctggctctgggcttgttgggacacggccgccgcccaccactgcctgctctgatcctcgccatgggagccaccgctggcagtttgccgcctaatcagcgactccccatcgccaacgcgtccctccctcagttgccttcaccagcccagcaacaactccacggtggtagcttggtagatttttagggagagcaactgctaaagtgtcaaagctctccagggggtcgacggaggagtggaggaaggtgacatcggaggcacggaagttgtcgaagcacaacgtgttctgttgggcgtgcctcgtggacgacaaggccgtgccttggctgctatgcttcctctcctccaccaccgccgccatacaggataatgccgtggcgtcgctgctcaacctcttgaagcaccccgccgggcagatgaccatcatggaggtcggaggcgtcggcctcgttgtcgacgtgatcaacgtcgttgccaaggccgtggcgcagcataacgtagcggccatcctcttctacctctcgtcgaacaacccggatgcatcccggaggtga

SEQ ID NO: 94670 - DNA, 312 bp, Oryza sativa
  Clone ID: PAT_MRT4530_92938C.1
aagctttggtcagtggtatgaacaagttcttaaagtcacttaacattaccttccgtcgtgatccaaccaactatagaccacgtatcaacaagttaaactctatgaaggataaggaacaaaaagaacaaggaaactatttctacctccatgatgatgaagatgaagaagacaagtcaagcaagaagaagcatgaaaagaagaagtaaattagttcccaaaaaccctaaccaattccctcccaaaattttggttctctcccctctttaaaacacaaataactattaaacagtaattattaaaaaaaaaaagctt

SEQ ID NO: 94671 - DNA, 1413 bp, Oryza sativa
  Clone ID: PAT_MRT4530_92939C.1
gcacgaggccatcgtcaatcaggccgtccattcccaatcaaaccggccttaacatagccaagataactcctggatgtcctacatcattttgtttggaccaaaaaaaaaattccaggggcattttgtttggaccaaaaatgaatttctggcctagggctgaggctccaactgatggacgagccaatcggatacagtatattcctgaacccaaccaatggccaaataatgagataaaatgccaagcagattccggtgtcttttcctttcaactttcggcacatacatacacgccttctttttgctcgacaaactattccaataattggagaatttttattttatggatatcactggagattagattcacccttggacgatgacgtacactcctgttcaaaggttagcaaattgctgcctgtgagtgtgaggtcgaccggaacagatacgatacctccaaaatgcatcagatttccatcaatgttcccgatgtcagatcgacctagccaagcagtcgccttcacagaaaaccccatggagctgcgtgatactgaggtcctcctgaaagtatggtccaaacatgcccaacctggccagtaaatttcagtaggtaacagaacaaattcccagtaaataggaaatgtggcctctcatttaagctattcaactaaagtgggaatccatctttttaatgtttggccaagaaatggtgaaatttcttggcttttgcttataaagatggccaatcgtgtggcaatatgctagagttacaagaataatactgtactgttaatgtttacaagaagaatttcatcctttcgtccttcttcatggcattatacactgcttggacctgctcgctggaaaccacaggaatgggcccaatttttacagaaacatatttccccttcgacgacactttatgggaaatctgagcctttggaatttgttcttccagtactgattcaactgcaaccaccatggcctggacaaaatcatctcctccagtaccaattgcagtaaatcctctaactgtaggatatgtatttacctgcttatccagaacaagccattcatcagttgcatcatctgtcacagtaccacccatgacaacatttgttgtctgtgcaacccgtcctttagagttcgctacctgggagatggccttgagcacggcgtcctgcggcggatcctcctggcctccgggaccggcggggttggcgcagcaccggaccaataaggaggcagaggcgcggcggcgggcggcgtcgagccgcgcgagcgaggcggcgcgcgggcgggggagacgggagggcgccgggagcgggaggagcgcgagggccctgcacgccatcatcttgtagccggccgccgcgaccaccgctgacggacggcgagtcgcgctgtgcgttggac

SEQ ID NO: 94672 - DNA, 209 bp, Oryza sativa
  unsure (1)..(209): unsure at all n locations
  Clone ID: PAT_MRT4530_9293C.1
gaccggaccggaattttcgttttgactcacgcgcccgtcaatacctaccaccccaagacgcnagcggcatgggagctttttttgagaggtttccatggttctttcccccctgccgaaggtggtgatggggtcgctgtcgttcgaggtgctctggatgctgcccagagatcccctcgatgccgaagctgccgatcgggcggacgagcccg

SEQ ID NO: 94673 - DNA, 189 bp, Oryza sativa
  unsure (1)..(189): unsure at all n locations
  Clone ID: PAT_MRT4530_92940C.1
cggacgcgtgggcggncccgtgggcggacgcgtgggcggacgcgtgggcggaaccggaacgcgtagctagcgcgcggcgtacatggggaaggcggaggctaggtccatggagcacggctggggcagaggagaggcacgcaactcgggaagatcttggtggggactgccggcaccacggagcggattttg

SEQ ID NO: 94674 - DNA, 318 bp, Oryza sativa
  Clone ID: PAT_MRT4530_92941C.1
gggttcgtcgcggccgcgtggctcgggggacggcgtgtactccgccgcggcgaccacgctgccctacgaggacgcggatgggctcatcaagtacttcgccgtcgacgactcccgcggccgcgtgttcgtgttctctgtcgccgtggacgcgctgctcgagctggagcctagggtgtgcaacgagccgccgatcactgccctgcttgtgtacctctctccgcgccacacctcttcttcctcttcaccggccatgccgacggctccatcgctgcccaccgcctcgtcgagtcgtcggagtgtggcaactggtggcgcatt

SEQ ID NO: 94675 - DNA, 298 bp, Oryza sativa
  Clone ID: PAT_MRT4530_92942C.1
gtggcctctatttctgaaggactagtacttctggtttgggggagggtagttgacgacatgggactggggaacgaggcgagctagtcttctacacgtcagataacacctgcgtctgccttggcgaaccacagtggagagggggcaggcaagttgtagtctaagcgcaagaaacgaacgaacgtgttcacccagatgggcaaagcaaagatactaaggatggagtacacgcactcgaggacgggctggtatgtggagcacacaacaccgctatcaggccaggcccagatcacctactgca

SEQ ID NO: 94676 - DNA, 1201 bp, Oryza sativa
  Clone ID: PAT_MRT4530_92943C.1
ccacgcgtccggagagaaacatctagagtgaataagaaagatggggttcgtccgtgccctgttcctgctggcgatggtgtgcgtggcggcgcacgcgaaggactaccccaaggaggagggcgcgaaggcggaggggccggccgccgcctcggggggcggcggcggtagcacccacgacgtggtgaagctgggcggcaagggcgacggcaagacggacagcaccaaggcggtcaacgaggcgtggacggcggcgtgcgctggcaccggcaagcagacgatcgtcgtccccaagggcgacttcttgacgggtcccctcaacttcaccgggccatgcaagggcgacatcgtcatccagctcgacggaaacctgctcggctccaccgacctcgccttattcaagtcgaactggatcgagatcatgcgcctcgaaagcctcgaaatcagcggcaagggcaagctcgacggccagggcgccgccgtctggagcaagaactcctgcgccaagaaatacgactgcaagatcctccccaacactttggtgctggacttcgtgaacaacggtctcatcagcggcatctctctggtgaaccccaagttcttccacatgaacgtgttcaagagtaagaacatcaccatcaaggacgtgaccatcaccgcgccgggggacagcccgaacacggatggcatccacatgggcgactcctccaagatcagcatcattgacacggtcatcggcaccggcgatgattgcatctccatcggccccggcaccgagggcgtcaacatctccggcgtcacctgcggtcctggccacggcatcagcgtcggtagcctgggcaggtacaaggacgagaaggatgtgacggatgttaccgtcaagaactgcgtgctcaagaagtccaccaatggcgtccggatcaagtcctatgaggacgccgcctcgtactgccccaacaagatctgcactgccaacggcaactccaaggtcaccatcaaggacatcaccttcaagaacatcaccggcacctcctccacgcccgaggccgttagcctcctctgctccgacaagctgccgtgcaccggcgtcaccttgaatgacatcaaggtcgagtactctggcacaaacaacaagaccatggccgtctgcaagaatgccaagggcactgccaccggctgcctcaaggagctttcgtgcttctaa

SEQ ID NO: 94677 - DNA, 332 bp, Oryza sativa
  Clone ID: PAT_MRT4530_92944C.1
attaacgatgaccgaacggacaatatatcattgatctgagaggaaccgtttacacgttatgatcagcaatggactgatctggtacacaacaacaggtaccgatagtggagatgttcattaactccaacctgagagcataaatggtagaaggcgaacagactaatcgactatactcgaagggaaatgtagcactgaaatggtcaggagtatcttgtaaaaagctcacgtgggtggcacgatcgaccgcagctctaaagcacccgaataaacgaactctgaagtgttaaggtaatggattctgagagtcgttagaagacccagggatcaaaaga

SEQ ID NO: 94678 - DNA, 1356 bp, Oryza sativa
  Clone ID: PAT_MRT4530_92945C.1
atgccccaggacattgatgtaggtcaaaatgttgaagtggatgaccttctagatgctcttttgatggaaaaagagtccaatcctgatgcgaaaactcgcccagccaattctattactgtttttgatgttgacaaagcatgtgcaactgctaggaatgctagcaacactatgctggaagtcaggctttttttagcggcagtgttcagcttttcttccttcacaagttcttctaattatgtcattcgcgaatgtttgggatcagtcttggacctaaagacagtggctacaattgattggtccatgaagaccccaagactgcagtactatacttcatcaatggtggatgatgtttttactcgtcttggtgaagacatcaaggtaaaaccttgggcacacacagtgtatggaaaaaatggcatcccagatgttcaacttgacaagattgactattcattcattccagatcttaagaagaagcacaagcataaggcgcccaatgcaaagaggtataagattgggaagctcggcaagaaggagaagtgccccttcgaggaacaaaatgactcatttgtgcgtgttcctaacatgagaaatatgcttgcttctcatttggatgacctggaccttccaactgatatggctatcaaagtcgaccacattatagaaaaatatcagttgtcgtggagaaatgctgttgaagacataacctcgaaagaaatgaggcattgtgcccaagaattggaggaattatttggacttgaagcccgtaatactataaacaaagatgaaagcagcaaaagggtggtagtggatttaggcacatttaagtttactgaagatgcatttgtagatgtattccaaccacatggttggatgagtaattgggtagtccaggccctggctataatagctgaataccgcaagttgcttgcatcagaaatctggtttcacaaggataacctcgccatggttgatcttactaagactgatagtgagaaatctgatgaagaacgcgatacaggcacaagaacctatattgagactgatggacgtgccaatggtgaagaatcagctggagacagtgatcgaaaaggcgatgctagcataaaggaagaatcagatgcaacagcctctgatagagatgcaagaaagaggaaacattctgagactgaatctgaaatagatggaagagccaatgctcgtgctcccagaacggcctctgcttcaagagattctatccctaagaagactagaatcgtagaaagcatcaacaaaaatgttgaggtacatcttgcttacccattggaaggcattggctcaactgtcattttactgatagaccaatccgtgaattga

SEQ ID NO: 94679 - DNA, 293 bp, Oryza sativa
  Clone ID: PAT_MRT4530_92946C.1
tgttcgacccaatagtgtcataagaaacaaaacttcatggaataaatggttgacacatgaggcaatgaggtggaaaaaaaaaaaaaaaaaaaaaaaaaatcaccaaaaacattatataaaataaagaaaatgaaaaaaatctataaacagataaaaaagtagttaggctttcatagtcttccaaacttcctctccgttacttccaaagaaaaaattcatctttagatcttacatcttctaattaaatggccgcctttttacaacgtgctgactgacaaaaccatttctatacc

SEQ ID NO: 94680 - DNA, 1751 bp, Oryza sativa
  Clone ID: PAT_MRT4530_92947C.1
cacgcgtccgttctcctactcctccagcctcccagacgatccccccagtcccccggccggcaagaaggagagaaacatctagagtgaataagaaagatggggttcgtccgtgccctgttcctgctggcgatggtgtgcgtggcggcgcacgcgaaggactaccccaaggaggagggcgcgaaggcggaggggccggccgccgcctcggggggcggcggcggtagcacccacgacgtggtgaagctgggcggcaagggcgacggcaagacggacagcaccaaggcggtcaacgaggcgtggacggcggcgtgcgctggcaccggcaagcagacgatcgtcgtccccaagggcgacttcttgacgggtcccctcaacttcaccgggccatgcaagggcgacatcgtcatccagctcgacggaaacctgctcggctccaccgacctcgccttattcaagtcgaactggatcgagatcatgcgcctcgaaagcctcgaaatcagcggcaagggcaagctcgacggccagggcgccgccgtctggagcaagaactcctgcgccaagaaatacgactgcaagatcctccccaacactttggtgctggacttcgtgaacaacggtctcatcagcggcatctctctggtgaaccccaagttcttccacatgaacgtgttcaagagtaagaacatcaccatcaaggacgtgaccatcaccgcgccgggggacagcccgaacacggacggcatccacatgggcgactcctccaagatcagcatcattgacacggtcatcggcaccggcgatgattgcatctccatcggccccggcaccgagggcgtcaacatctccggcgtcacctgcggtcctggccacggcatcagcgtcggtagcctgggcaggtacaaggacgagaaggatgtgacggatgttaccgtcaagaactgcgtgctcaagaagtccaccaatggcgtccggatcaagtcctatgaggacgccgcctcggtgctcaccgcctccaagtttacctacgagaacatcaagatggaggacgttgctaaccccatcatcatcgacatgaagtactgccccaacaagatctgcactgccaacggcaactccaaggtcaccatcaaggacatcaccttcaagaacatcaccggcacctcctccacgcccgaggccgttagcctcctctgctccgacaagctgccgtgcaccggcgtcaccttgaatgacatcaaggtcgagtactctggcacaaacaacaagaccatggccgtctgcaagaatgccaagggcactgccaccggctgcctcaaggagctttcgtgcttctaaacgatcaacccacgctacatcctgccaccaccaccattattttttcatttctatttctattttccaggtcacttatagtttttctctggcgatgctctgattggattgttctgatgcagtcggactatccgactgctctatagtcagattgtctgcagtggtaccggactatccagttagttctaagctgtttgtaagtttaagaaatttttggaaatacctattcatccctctaggtgacatatacaatcctcaagactctttcaatcgatcatcatcgatctctttgtgtgtgttcatcgtgtttaagagacagatcgaggtttggagagcatatggatgtatccgcgtgtgttccttgattttgatcttccaagttaatgtccatatcctttctttctgtaaaattaagaccc

SEQ ID NO: 94681 - DNA, 347 bp, Oryza sativa
  Clone ID: PAT_MRT4530_92948C.1
gggggaccgacagaaattaattaagcttgaaattttcttggtcggtcacccccccccccacatttaagggccattctttcattccctgttgcaactgcaactggagggtcggggcgtggtttctacaagtgtacacatggtactttggttggcaccatttcaatcgtgtcgttttgctcatttgccggggacaaaattggtggcgttttcccaagcttttttggcgacggggttggccacttggtcaaaaaggttttttatggggcccttgccggtgacaatggcctggacaaaaaaacccaacatggaaaacatggcgagggggccgttttttaactcttttacct

SEQ ID NO: 94682 - DNA, 641 bp, Oryza sativa
  Clone ID: PAT_MRT4530_92949C.1
cgggctccaggccgcgtctccctctccctctctccgcacatccatcctcctagagagggagcgcgcgcaaggaggaggaacaagggctcctcggatcgggaccagctgaggtgagcgctcgatcatctcccgttttctctcctcggatctgaccatctttcttgcctttgttttctttcttttttcttttcttcttcttcttcttcttcttcttttcccctacctgttcttggtcaatcggggatttcgctgccgtgaggctgacccttcttgtggtgcggtggtggcagtgggtaggatggctgcttgatccccttgattttagtattttattttatttttcagattagatgcgtagtgtagctcgtacctcgcattgcccgcccaatgcgtgttcttcgttttctttaatttggatcatatatggcactgaatttatcaagtttaaaaaaatgtcatcgtattttgcttaactttgtcaccatcaagtacacctagaacgaaaatttccaaaattagacggaacattccgaaatatcgtattatagaagttgccctcgcgtatcttccccctttcccttggcgtaaaagaaaatctccggtgtcgtctcctccgctccttgttcccaagacgagtcgcg

SEQ ID NO: 94683 - DNA, 298 bp, Oryza sativa
  unsure (1)..(298): unsure at all n locations
  Clone ID: PAT_MRT4530_9294C.1
ctctcacgccagctcagcgaggaaccagcacaaagcagtaagagaaagagaagatgaggggnnngagaggatggccggctgggagccacaagttctcggagaggcagccgaacgggcgcgcgnngcnnggctccgacgacaaggactacaaggagccgccccggcgccgctgttcnagccaggggacgtcaagtcgtggtccctctaccgcgcagggatcgccgagttcatggccaccttcctcttcctttacatcaccgtcctcacggtcatgggggtcaacaactccccctccaag

SEQ ID NO: 94684 - DNA, 6063 bp, Oryza sativa
  Clone ID: PAT_MRT4530_92950C.1
atggccaagccagcaaaggcgcacgacctctccccgagtatgagcggtgacgacggggagccaaacccacgccgtcgagctcgtactccaccgccccctccacgccaaagtcctaggcgggagaaggcgctcgagagggccgaaggatccgcgacttcgacacccacaggaggtggagaagggcggcgagatggggagcgtcgcctcctcgtctacggcgacggcagcacgccccagggcgcgctccaagctgcgggcgcgctcctacgtcacccgcccgtcgcccatgacccggagtctccagcccaacgttggctggacgatgtggccaaattggtcatgactgcacggcagcgcctagatgctggtgggcggtcctccgccaccaaggcctctggtgctgctaccaccggctccgcatcgtcaagacggagggcgcggcgagcggcagccgctgttcgccattcggccgccactccttcgtcaacgcctccgacccgggaagatctgcttggggaaccggatgctcgcatcagtatcgagcgccggcgtaatggccgacgtgctccccacgcaacggagggcgcctcctcgtccggagtgtcacctcaccacggacgcggggatcagccctccgtgcccccggttggtggtgtcggctgtagagcctttgtggcgagccttcggaatgtccgttggcccccaaggttccggcccaccatcgccgaaaaatatgacgggagcgtcaaccccgccgagtttccccaggtctacacgaccgggatcgaggccgccgggggtgacgacagggtcatggcgaatttctttcccatggccctgaaaggacaagcgcggggttggctaatgaacttgccacccgcgtctgtccactcttgggaggatttgtgccaacagttcaccatgaacttccaaggcacatatccacgcccaggtgaggaagcggacttgcacgcagtacagcgaagggatgatgagtcacttcgctcgtacattcagcggttctgtcaagtccgcaacaccataccatgcatccctgcacacgcggtgatttacgcgttcagggggggtgtgcggcacaaccgcatgcttgaaaagatcgcctccaaggagctccaaactaccgcggagctttttcagctcgcggaccgagtggctcgtaaggaggaggcatggacctggaacccctccggttccggtgtggcagcttcggccgcccccggatccgccgctcagatagggcggcgtgacaggaggaggaagaagaggtcagcccataccgacgacgagggtcatgtcctcgccgtcgagggcgcttcgcgggccacccgaaaggggaggcctgcgggaggcaaaaagaacgaggccggcgctcccaacagggagcgcccaaccggcaagtggtgcaccgtccacaacacttcccttcacgacctcgcggactgccgtgcagtcaaaagtttggctgagcggacgaggaagtgggaggaggagaggaggcaggagcgccgagagggcaaatccccggcggttccttccggtaatcggcgaagtgaggccaagcagaaggcccccgccgaggacatcgatgacggcgatgatgacctaggtttccaagagcctggggccaccattgccaccgtcgatgggggagcgtgtgctcacgtttctcgccggagcttcaaggccatgaagcgagagcttctggccgcggcccctactcatgaggcgacgtgtcgggcgcggtggtcggaggttgccctcaccttcgaccagaccgaccacccaccgtgcgttgcccggggagggcagattgcgatggtggtttctctcaccgtttgcaacgtgaagttggggcgtgtcctcattgatgggggagcggccctcaacatcctttcccctgcggcctttgacgccatcaaggccccggggatggtgctccggccgtcccagccaattatcggtgtgacgccggggcacacgtggccgttaggtcacatcgacctaccggtcaccttcggtggatccgccaacttccgcacggagcgggtgaacttcgatgtggcggacctcagtctgccctacaacgcagtcctagggaggcccgcgttggtgaagttcatggcggcagtccactacgcctacctacagatgaagatgccgggccccggtggccccatctctgtccatggcgacctcaaagtcgcgctcgcttgtctggagcagcgcgcggaccacctcgccgctgcatccaagcccgagggtggcgacgagaggcttggcgcttccgcccccgccaccccgaggcaacggatgatcacaggcgacgaggtcccggaagacgcgctcgtctccttcctgcgggcaaacgctgacgtcttcgcatggagaccggcggatatgctcggggtccctagggaggtgattgagcaccgtctcgccgtgcggccgggcgcaaggccggtccggcagaaagtgcggcggcaggccccggaacgtcaagccttcatccgcgaggaggtggcgcgacttctggaagccggattcatccgtgaggtcatccatccggagtggctggcgaacccggtggtcgttcccaaggcgaacggcaagcttcggatgtgcatcgactacaccgaccttaacaaggcatgtcctaaggatccttaccccctgcctcgcatagatcagattgtcgactccactgcggggtgcgaccttttgtgttttctagatgcatactctggttaccatcagattcgcatggctagggaggatgaggaaaaaactgcgttcattacccccataggaacctattgttatacgacaatgcccttcgggttaaagaatgcaggtcctacttttcaacgtactactcgaatttctttgggtaaccaattaggacgtaatgttgaggcttatgtcgatgacttggttgtaaagacgcgcaaccaggaaatgttactctcagatctagcggaaacttttgagagtctccgctccgcccgcataaaactaaaccccgataagtgtgtgttcggtgtacctgcgggcaagcttctagggttcttggtctctgcccgaggcattgaggccaaccctgagaagatacgggctatagagcggatgcgcccccccagcaaacttagggatgtgcaatgcgtcaccggttgcatggccgccctaagtcggttcatatcgaggctgggagagaaggcgttacccttatttaagcttctcaaacgcttcggaccgtttacctggacggaggaagccgaaaatgccctcacccagttgaaggcgtatctaagctctcccccagttcagcccttgttactctacttagcggcgaccccgcaagtagttagtgtggcattggttgtggagcgcgatgagaacaattctcatttcacgcttccccaccctgtgccgacttggcctgggagagagcagggaggagaggctcccgagccgaacggtggcccaaggcccccgacggccggagttggccctctgcccgcttgtcagacggtgctaggagcccccgacccccaggaaggccctgaggccactgtgggaaggccgcacctatcgcccttcgaccccgaggctaaccctgtgctgacccgacccgggaaagagcagggagaagaggcccccgagccgaacggaggcctaaggcccctgacgaccggagttggccctttgcccgcttttccgacgacgccaggagcccccgacccccaggacggccccgaagccactgtgggaaggccgcccctgttatcctccgaccccgaggtcatcagcacagaagataagtgcgccccacgaggctgcttggacgaagagtgccccagggatgcggcccctagcgaagaggatcggccccaccgaaaggtgcagcggcccgtctactttgttagtgaggccctccgggacgccaaaacccgataccctcaggcccagaagatgctttacgctattctgatggcctcgaggaaactgcgccattatttccaggcgcatcgggtcacagtagttacgtcttaccccctcggtcaaatcttgcataatcgagagggtacaggacgggtggtgaaatgggcaatcgaactttctgagttcgatttgcactttgaaccacgccacgctatcaagagccaggccctcgccgattttgtggcagagtggaccccggctcccgagcccgtctcgatccccgaggccagcacggacccctcgcagctgcctcacaccgcccactgggtgatgcagttcgacggctccctgtctcttcagggcgccggtgcgggggtcacgttgacctctccgagcggagacgtcctcagatacttggtccgcctcgactttcgagcgaccaataatatggcagtatacgagggactccttgccggactaagagtggcagctggactggggatccgccgcctccttgtgttaggcgactcccagctggtcattaaccaagtctgtaaggagtaccggtgctctgacccgcagatggacgcctacgtgcgccaagtacggcgtatggagtgccattttgacgggattgagcttcggcatgtgcccagacgggataacatgattgccgacgaactctcacggctcgcgtcctcgcgagcccagaccccaccgggcgcctttgaagaaaggcttgcccagccgtcggcgcgacccgaccccttaggggagacggatgcgcctgaccggccaccgaggcctgtcggagtccaggcctcgggacccgaggggagtgctcccaactcccttagattgattgcttggatcgccgagatccaagcatacctcacagataagactctacccgaggaccgcgaagggagtgaacgcgtccatcgcatctccaaacgctacgtgctggtagaagggaccctctatcggcgcgcggctaatggaatcctcctgaagtgcattcctcgggaacaaggcgttgtgcttcttgccgatatccatgaaggcgaatgcggagcccactccgcctcgcgcaccttggttggtaaagcttttcgccagggtttctattggccgacagctcttaatgatgcggtcgacctggtccggcgatgtagagcgtgtcaattccacgccaagcaaatccatcagccggcccaggccctgcagaccataccactttcgtggccatttgctgtctggggactcgatatcctgggaccgtttaggcgggccccgggcgggtttgagtatctgtatgtcgcgatcgacaggttcactaagtggcccgaggcttatccggtcgtcaagatcgataagcactccgcacttaaattcattaagggcatcacggcccggtttggagtgcctaaccgtattattacggataatggcacccaattcactagtgaactcttcggcgactactgcgaagacatgggcatcaagctctgcttcgcctcacctgcccaccccagaagcaatggccaagtggagcgcgccaatgcggaaatcctcaaaggccttaaaaccaagaccttcaacatactcaagaagcatggcgattcatggatcgaggagttgccagcggtgctctgggcaaaccgaactacaccaagccgagcaaccggggaaacgcctttcttcctcgtctacggcgcggaagcggttctcccatccgagctcaccctgaggtctcctcgggctaccatatattgcgaggctgatcaaaatcagcttcgcagagatgacctcgactacttggaagagcgaaggcggcgcgcggccctccgagccgcgcgctaccagcagagcctgcggcgctaccatcagcgccacgtccgggcccgatcactctgcgtcgatgacctcgtcctacgccacgtccaaacgcgtgctggattgagcaagctttcaccaatgtgggagggtccgtatcgagtggtcggcgtcccccggccgggctccatacggctggccacgggcgacggcactgagctgcctaacccgtggaacatcgaacaccttggtcgcttctacccctga

SEQ ID NO: 94685 - DNA, 757 bp, Oryza sativa
  Clone ID: PAT_MRT4530_92951C.1
ccacgcgtccggaggaagtactttgatatcaactttaatttgtgagaatttgattgattatcacaaaccaatttaactaggagggggaatgagatcgatatacctccctagtatcccttcgagcaattttttccttatttgccactcttctttatatgccattgaaaattttctattccgtatttgccatttgatggaattttacattcgtttctatgccattgccgttaaccctattaaagcgagtttgatgtaatgtagtaaattacgtgctgcgagtattaaccatgttgaatgtcctaaattctgaaatcaacttgcactagatgatttaagttgtgtgagaacatattttacatgttacagtatgaagttccagttgttgaatgtttcctttgcccaaaattggtttttacaaatttgtttgcgtgattaacatttcatttcttgttgctaattattaattcctaatttgtttgttttctatcttgttccaaaggctagtagtatcatatctatcttctatgattgattttctgatgtttattcgtttgatgtcaatatatgttgtgttgcgaatacttgtgtctatgtccagtaattcatgagatacgaggtcaaatgaatatagtgcttgtatgtttttttatggacattgccgagctagtaaaccattttgtatttgctattgaaactttgaaagctttgatgcctttgatttttatagagaaagcagttaattgggttgacttttttc

SEQ ID NO: 94686 - DNA, 1151 bp, Oryza sativa
  Clone ID: PAT_MRT4530_92952C.1
atggccgagccagcaaaggcgcacgacctctccccgagtatgagcggtgacgacggggagccaaacccacgccgtcgagctcgtactccaccgccccctccacgccaaagtcctaggcgggataaggcgctcgagagggccgaaggatccgcgacttcgacacccacaggaggtggagaagggcggttccggcccaccatcgccgaaaaatatgacgggagcgtcaaccccgccgagtttctccaggtctacacgaccgggatcgaggccgccgggggtgacgacagggtcatggcgaatttctttcccatggccctgaaaggacaagcgcggggttggctaatgaacttgccacccgcgtctgtccactcttgggaggatttgtgccaacagttcaccatgaacttccaaggcacatatccgcgcccaggtgaggaagcggacttgcacgcagtacagcgaagggatgatgagtcacttcgctcgtacattcagcggttctgtcaagtccgcaacaccataccatgcatccctgcgcacgcggtgatttacgcgttcagggggggtgtgcggcacaaccgcatgcttgaaaagatcgcctccaaggagccccagactaccgcggagctttttcagctcgcggaccgagtggctcgtaaggaggaggcatggacctggaacccctccggttccggtgtggcagcttcggccgcccccggatccgccgctcagatagggcggcgtgacaggaggaggaagaagaggtcagcccataccgacgacgagggtcatgtcctcgccgtcgagggcgcttcgcgggccacccgaaaggggaggcctgcgggaggcaaaaagaacgaggccggcgctcccaacagggagcgcccaaccggcaagtggtgcaccgtccacaacacttcccttcacgacctcgcggactgccgtgcagtcaaaagtttggctgagcggacgaggaagtgggaggaggagacgaggcaggagcgccgagagggcaaatccccggcggttccttccggtaatcggcgaagtgaggccaagcagaaggcccccgccgaggacatcgatgacggcgatgatgacctaggtttccaagagcctggggccaccattgccaccgtcgatgggggagc

SEQ ID NO: 94687 - DNA, 2328 bp, Oryza sativa
  Clone ID: PAT_MRT4530_92953C.1
atggcggcgctaggtcacacggcgctagggcgctaccgacggcgagaggcgaaagcaagggtggcgacgggcggtctgacgcacgcctcgccccatcccgtcaggatgagagcctccaagcactcgtcccgagccggagccggcgtgttagctcctggagatggcacggggctctgcgggtgtttttctaagctctcgcattctttcgtgtgcgccaagcttttcctgttcagcccaatggccgaacaagcaaaggcgcacaacctctctccgagtgttagcggtgacaacggggagccgaacccacgccgtcgagctcgtactccatcgccccctccacgccaaagtcctaggcgggaggaggcgctcgagagggtcgaaggatccgcgacttcaacatccacgggtgatggggaagggcggcgagatggggagcgtcgcctcctcgtctacggcgacggcagcacgcctcagggcgcgctccaagctgcgggcgcgctcctacgtcacccgcccattgtccctgacccggagtctccagcccaacgttggctggacgacgtggccaacttggtcatgacggcggagggcgcggcgagcggcggctgttgctcgccatttggccgccactccttcgtcagcgcctccgacctaggaagatctgcgtggggggccggatgcccgcatcagtatcgagcgccggcagcctttgtggcgagccttcggaacatccgttggcccccaaggttccagcccaccatcgccgaaaaatatgacgggagcgtcaaccccgccgagtttctccaggtctacacgaccgggatcgaggccgccgggggtgacgacagggcacatatccgcgcccaggtgaagaagcggacttacatgcagtccagcaaagggatgatgagtcacttcgctcatacattcagcggttctgtcaaggggggtgtgcggcacaaccgcatgctcgaaaatatcgcctccaaagagccccacttcggccgcccccgggcgtttcgctggccacccgaaaggggaggcctgcgagcgacaaaaagaaggaagccgacgctccctgacctcggctacttggaagagcgaaggtggcgcgcggcccttcgagccgcgcgctaccagcagagcctgcggcgctaccatcagcgctacgtccgggcccgatcactctgcgtcgacgacctcgtcctacgccgtgtccaaacacgtgctggactgagcaaactctcaccaatgtgggagggtccgtatcgagtgatcggcgtcccccggccgggctccgttcggctggccacgggcgacggcacagagctgcctaacccgtggaacatcgaacaccttcgtcgcttctacccctacattttcgatttcctaaaggctattaaatcagcctataacaagaagggggcccgaaggcctcggaagaagaaggaaaagctattaagattggcggaggcctgggggctcactccgacgtgcctgggcgcccccgacccccaggatggccccgaggccactgcgggaaggccgcgcctgtcgccctctgaccccgaggtcgtcggcacagaagccgagtgcgccccgcgtggcctctcggatggagagcgccctggagatgtggcccctgacgaagaagatcagccccgccgaaaggtgcagcggcccgtctacttcgttagcgaggccctccgggacgctgagacccgataccttcaggcccagaagatgctttacgctatcctgataacttcgaggaagttgcgccattatttccaggcgcatcgggtcacggtggttacgtcttatcccctcggccaaatcttgtataaccgagagggtactggactggtggtgaaatgggcaatcgaactctctgaattcgatttgcgctttgaaccaagccacgcgatcaagagccaggccctcgccgactttgtggtggagtggaccccagctcctgagctcgtctccgcccccgaggccagctcgagcccatcgcagctgcctcacaccgccctctgggtgatgggggtcgggcccgagggtgatacggccgcccttctctttgtctccccgaggggtcggaccgctcccgtctcggcccagagggccgaggcgccccgaccccttgtaggttttgcgccgcgtatatggggcggtctgacgcacgcctcgccccatcccgtcaggatgagagcctccaagcactcgtccctagccggagccagcgtgttagctcctggagatggcacgttggtcccgacagccatgttcccacgtcgcgcctgcttccggcggaagtggaggtag

SEQ ID NO: 94688 - DNA, 130 bp, Oryza sativa
  unsure (1)..(130): unsure at all n locations
  Clone ID: PAT_MRT4530_92954C.1
cgaccagcgggcgaaccagccaaaccgaaagacaggccacacacagcgaggcgaaaccanggacacagccaacnacagagagaaaagggaacccgcncacaagaccacacaagacacgagccgaaagcac

SEQ ID NO: 94689 - DNA, 6585 bp, Oryza sativa
  Clone ID: PAT_MRT4530_92955C.1
atggccgagccagcaaaggcgcacgacctctccccgagtatgagcggtgacgacggggagccaaacccacgccgtcgagctcgtactccaccgccccctccacgccaaagtcctaggcgggagaaggcgctcgagagggccgaaggatccgcgacttcgacacccacaggaggtggagaagggcggcgagatggggagcgtcgcctcctcgtctacggcgacggcagcacgccccagggcgcgctccaagctgcgggcgcgctcctacgtcacccgcccgtcgcccatgacccggagtctccagcccaacgttggctggacgatgtggccaaattggtcatgactgcacggcagcgcctagatgctggtgggcggtcctccgccaccaaggcctctggtgctgctaccaccggctccgcatcgtcaagacggagggcgcggcgagcggcagccgctgttcgccattcggccgccactccttcgtcaacgcctccgacccaggaagatctgcgtggggaaccggatgctcgcatcagtatcgagcgccggcgtaatggccgacgtgctccccacgcaacggagggcgcctcctcgtccggagtgtcacctcaccacggacgcggggatcagccctccgtgcccccggttggtggtgtcggctgtagagcctttgtggcgagccttcggaatgtccgttggcccccaaggttccggcccaccatcgccgaaaaatatgacgggagcgtcaaccccgccgagtttctccaggtctacacgaccgggatcgaggccgccgggggtgacgacagggtcatggcgaatttctttcccatggccctgaaaggacaagcgcggggttggctaatgaacttgccacccgcgtctgtccactcttgggaggatttgtgccaacagttcaccatgaacttccaaggcacatatccgcgcccaggtgaggaagcggacttgcacgcagtacagcgaagggatgatgagtcacttcgctcgtacattcagcggttctgtcaagtccgcaacaccataccatgcatccctgcgcacgcggtgatttacgcgttcaggggggcttcggccgcccccggatccgccgctcagatagggcggcgtgacaggaggaggaagaagaggtcagcccataccgatgacgagggtcatgtcctcgccgtcgagggcgcttcgcgggccacccgaaaggggaggcctgcgggaggcaaaaagaacgaggccggcgctcccaacagggagcgcccaaccggcaagtggtgcaccgtccacaacacttcccttcacgatctcgcggactgccgtgcagtcaaaagtttggctgaacggacgaggaagtgggaggaggagaggaggcaggagcgccgagagggcaaatccccggcggttccttccggtaatcggcgaagtgaggccaagcagaaggcctccgccgaggacatcgatgacggcgatgatgacctaggtttccaagagcctggggccaccattgccaccgtcgatgggggagcgtgtgctcacgtttctcgccggagcttcaaggccatgaagcgagagcttctggccgcggcccctactcatgaggcgacgtgtcgggcgcggtggtcggaggttgccctcaccttcgaccagaccgaccacccaccgtgcgttgcccggggagggcagattgcgatggtggtttctcccaccgtttgcaacgtgaagttggggcgtgtcctcattgatgggggagcggccctcaacatcctttcccctgcggcctttgacgccatcaaggccccggggatggtgctccggccgtcccagccaattatcggtcacatcgacctaccggtcaccttcggtggatccgccaacttccgcacggagcgggtgaacttcgatgtggcggacctcagtctgccctacaacgcggtcctggggaggcccgcgttggtgaagttcatggcggcggtccactacgcctacctacagatgaagatgccgggccccggtggccccatctctgtccatggcgacctcaaagtcacgctcgcttgtctggagcagcgcgcggaccacctcgccgctgcatccaagcccgagggtggcgacgagaggcttggcgcttccgcccccgccaccccgaggcaacggatgatcacaggcgatgaggtcccggaagacgcgctcgtctccttcctgcgggcaaacgctgacgtcttcgcatggagaccggcggatatgcccggggtccctagggaggtgattgagcaccgtctcgccgtgcggccgggcgcaaggccggtccggcagaaagtgcggcggcaggccccgaaacgtcaagccttcatccgcgaggaggtggcgcgacttctggaagccggattcatccgtgaggtcatccatccggagtggctggcgaacccggtggtcgttcccaaggcgaacggcaagcttcggatgtgcatcgactacaccgaccttaacaaggcatgtcctaaggatccttaccccctgcctcgcatagatcagattgtcgactccactgcggggtgcgaccttttgtgttttctagatgcatactctggttaccatcagattcgcatggctagggaggatgaggaaaaaactgcgttcattacccccataggaacctattgttatacgacaatgcccttcgggttaaagaatgcaggtcctacttttcaacgtactactcgaatttctttgggtaaccaattaggacgtaatgttgaggcttatgtcgatgacttggttgtaaagacgcgcaaccaggaaatgttactctcagatctagcggaaacttttgagagtctccgctccgcccgcataaaactaaaccccgataagtgtgtgttcggtgtacctgcgggcaagcttctagggttcttggtctctgcccgaggcattgaggccaaccctgagaagatacgggctatagagcggatgcgccccccagcaaacttagggatgtgcaatgcgtcaccggaagccgaaaatgccctcacccagttgaaggcgtatctaagctctcccccagttctggtcgccccggagccagacgagcccttgttactctacttagcggcgaccccgcaagtagttagtgcggcattggttgtggagcgcgatgagaacaattctcatttcacgcttccccaccctgtgccgacttggcccgggagagagcggggaggagaggctcccgagccgaacggtggcccaaggcccccgacgaccggagttggccctctgcccgcttgtcagacggtgctaggagcccccgacccccaggaaggccctgaggccactgtgggaaggccgcacctatcgcccttcgaccccgaggctaaccctgtgctgacccgacccgggaaagagcagggagaagaggcccccgagccgaacggaggcctaaggcccctgacgaccggagttggccctttgcccgcttttccgacgacgccaggagcccccgacccccaggacggccccgaagccactgtgggaaggccgcccctgttatcctccgaccctgaggtcatcagcacagaagataagtgcgccccgcaaggctgcttggacgaagagtgccccagggatgcggcccctagcgaagaggatcggccccaccgaaaggtgcagcggcccgtctactttgttagtgaggccctccgggacgccaaaacccgataccctcaggcccagaagatgctttacgctattctgatggcctcgaggaaactgcgccattatttccaggcgtatcgggtcacagtagttacgtcttaccccctcggtcaaatcttgcataatcgagagggtacaggacgggtggtgaaatgggcaatcgaactttctgagttcgatttgcactttgaaccacgccacgctatcaagagccaggccctcgccgattttgtggcagagtggaccccggctcccgagcccgtctcgatccccgaggccagcacggacccctcgcagctgcctcacaccgcccactgggtgatgcagttcgacggctccctgtctcttcagggcgccggtgcgggggtcacgttgacctctccgagcggagacgtcctcagatacttggtccgcctcgactttcgagcgaccaataatatggcagaatacgagggactccttgccggactaagagtggcagctggactggggatccgccgcctcctggtgttaggcgactctcagctggtcgttaaccaagtctgtaaggagtaccggtgctctgacccgcagatggacgcctacgtgcgccaagtacggcgtatggagcgccattttggcgggattgagcttcggcatgtgcccagacgggataacatgattgccgacgaactctcacggctcgcgtcctcgcgagcccagaccccaccgggcgcctttgaagaaaggcttgcccagccgtcggcgcgacccgaccccttaggggagacggatgcgcctgaccggcccccgaggcctgtcggagtccaggcctcgggacccgaggggagtgctcccaactcccttagattgattgcttggatcgccgagatccaagcatacctcacagataagactctacccgaggaccgcgaagggagtgaacgcgtccatcgcatctccaaacgctacgtgctggtagaagggaccctctatcggcgcgcggctaatggaatcctcctgaagtgcattcctcgggaacaaggcgttgtgcttcttgccgatatccatgaaggcgaatgcggagcccactccgcctcgcgcaccttggttggtaaagcttttcgccagggtttctattggccgacagctcttaatgatgcggtcgacctggtccggcgatgtagagcgtgtcaattccacgccaagcaaatccatcagccggcccaggccctgcagaccataccactttcgtggccatttgctgtctggggactcgatatcctgggactgtttaggcgggccccgggcgggtttgagtatctgtatgtcgcgatcgacaggttcactaagtggcccgaggcttatccggtcgtcaagatcgataagcactccgcacttaaattcattaagggcatcacggcccggtttggagtgcctaaccgtattattacggataatggcacccaattcactagtgaactcttcggcgactactgcgaagacatgggcatcaagctctgcttcgcctcacctgcccaccccagaagcaatggccaagtggagcgcgccaatgcggaaatcctcaaaggccttaaaaccaagaccttcaacatactcaagaagcacggcgattcatggatcgaggagttgccagcggtgctctgggcaaaccgaactacaccaagccgagcaaccggggaaacgcctttcttcctcgtctacggcgcggaagcggttctcccatccgagctcaccctgaggtctcctcgggctaccatgtattgcgaggctgatcaaaatcagcttcgcagagatgacctcgactacttggaagagcgaaggcggcgcgcggccctccgagccgcgcgctaccagcagagcctgcggcgctaccatcagcgccacgtccgggcccgatcactctgcgtcgacgacctcgtcctacgccgcgtccaaacgcgtgctggattgagcaagctttcaccaatgtgggagggtccgtatcgagtggtcggcgtcccccggccgggctccatacggctagccacgggcgacggcactgagctgcctaacccgtggaacatcgaacaccttcgtcgcttctacccctgaggggggggggtcggctaaaatcgccgaacggggcccagaaccgagccgtgccccgaggcgtggtgaactccggggggggggggggggaatcggcaaaaacccacaatcgggtcacccataaccctcggtcaccacgttcccggcctggccagtctcgacatgtggatctccccaggcactagccttgacccgcgtcgtttgaggccccaggatggccccgaggccactgcgggaaggccgcgcctgtcgccctctgaccccgaggtcgtcggcacagaagccgagtgcgccccgcgtggcctctcggatggagagcgccctgaagatgtggcccctgacgaagaagatcggccccgccgaaaggtgcagcggcccgtctacttcgttagcgaggccctccgggacgctgagacccgataccttcaggcccagaagatgctttacgctatcctgatagcttcgaggaagttgcgccattatttccaggcgcatcgggtcacggtggttacgtcttatcccctcggccaaatcttgtataaccgagagggtactggacgggtggtgaaatgggcaatcgaactcgctgaattcgatttgcgctttgaaccacgccacgcgatcaagagccaggccctcgccgactttgtggcggagtggaccccagctcccgagctcgtctccgcccccgaggccagctcgggcccatcgcagctgcctcacaccgccctctgggtgatgtagttcgacggcacctgtaggaaccggccccac

SEQ ID NO: 94690 - DNA, 441 bp, Oryza sativa
  Clone ID: PAT_MRT4530_92956C.1
atggcggcggcggcggcggcacggtgtagtcgaggcggcaggagacggcggcgcccgtggtggggcgggagaggaactgggtgtgaaccgcgagtcgtggcagttgaggaggatgccgcccagcgagagcgggaggaggtccgcgcgcaggaggcggcgggagtcgacgacgagcgcggcgccactccttgcaggcgcagcgggacgctgcgcgaggccacgcggcgggaggcggcggaggacggccgcgagcacgtcgtcaggcagcgacgacgccacatccatcgcctcagcacgtcgtcgtcgcttgactatcgcggcaaattggggaattctttttcgccaatgcagttgatttgggctcaaccgctcaagccgcgggaggtggtcgtggctcgttgccaagtagtgtcgctgccagttaacgggccggcccattag

SEQ ID NO: 94691 - DNA, 3332 bp, Oryza sativa
  Clone ID: PAT_MRT4530_92957C.1
atgtccagattcgtgtgctactcaagtaatgtggcagtcttgaagagaccgctcattgttgacaaccgagttaccattgccgatgtgcgtgtccccccgagggggtcgggccgcacccgcctcggccccgagggccgaggcgccccgacccctcgtgggtctttgctctgcgtgtatgggttagaccggtcagatcgcgggttaggtggcgacaggcgatctgacacacgcctcgccccatcccgtcaggacgagggcttctaggcgctcgtccccagctggagctagcgtgttacctcccagagatggcacgttagtcctggtcagatatatgccaggcttcatcctaaccattacaggcaagatgttgtgtgaagaagggcgaacatgtagattgctaaactgacacgtggtggacaagaatgaccgacgtaactggtctgacaccggtcatgtcgtcagcagacagccacgattccacgtcgcacctgctcccggcgaaagtggagacgcgcaaccaggaaatgttactctcagatctagcggaaacttttgagagtctccgctccgcccgcataaaactaaaccccgataagtgtgtgttcggtgtacctgcgggcaagcttctagggttcttggtctctgcccgaggcattgaggccaaccctgagaagatacgggctatagagcggatgcgccccccagcaaacttagggatgtgcaatgcgtcaccgagagcagggaggagaggctcccgagccgaacggtggcccaaggcccccgacgaccggagttggccctctgcccgcttgtcagacggtgctaggagcccccgaccccaggaaggccctgaggccactgtgggaaggccgcacctatcgcccttcgaccccgaggctaaccctgtgctgacccgacccgggaaagagcagggagaagaggcccccgagccgaacggaggcctaaggcccctgacgaccggagttggccctttgcccgcttttccgacgacgccaggagcccccgacccccaggacggccccgaagccactgtgggaaggccgtccctgttatcctccgacccagaggtcatcagcacagaagacaagtgcgccccgcgaggctgcttggacgaagagtgccccagggatgcggcccctagcaaagaggatcggccccaccgaaaggtgcagcggcccgtctactttgttaatgaggccctccgggacgccaaaacccgataccctcaggcccagaagatgctttacgctattctgatggcctcgaggaaactgcgccattatttccaggcgcatcgggtcactgtagttacgtcttaccccctcggtcaaatcttgcataatcgagagggtacaggacgggtggtgaaatgggcaatcgaactttctgagttcgatttgcactttgaaccacgccacgctatcaagagccaggccctcgccgattttgtggcagagtggaccccagctcccgagcccgtctcgatccccgaggccagcacggacccctcgcagctgcctcacaccgcccactgggtgatgcagttcgacggctccctgtctcttcagggcgccggtgcgggggtcacgttgacctctccgagcggagacgtcctcagatacttggtccgcctcgactttcgagcgaccaataatatggcagaatacgagggactccttgccggactaagagtggcagctggactggggatccgccgcctcctggtgttaggcgactcccagctggtcgttaaccaagtctgtaaggagtaccggtgctctgacccgcagatggacgcctacgtgcgccaagtacggcgtatggagcgccattttgacgggattgagcttcggcatgtgcctagacgggataacatgattgccgacgaactctcacggctcgcgtcctcgcgagcccagatcccaccgggcgcctttgaagaaaggcttgcccagccgtcggcgcgacccgaccccttaggggagacggatgcgcctgaccggcccccgaggcctgtcggagtccaggcctcgggacccgaggggagtgctcccaactcccttagattgattgcttggatcgccgagatccaagcatacctcacagataagactctacccgaggaccgcgaagggagtgaacgcgtccatcgcatctccaaacgctacgtgctggtagaagggaccctctatcggcgcgcggctaatggaatcctcctgaagtgcattcctcgggaacaaggcgttgtgcttcttgccgatatccatgaaggcgaatgcggagcccactccgcctcgcgcaccttggttggtaaagcttttcgccagggtttctattggccgacagctcttaatgatgcggtcgacctggtccggcgatgtagagcgtgtcaattccacgccaagcaaatccatcagccggcccaggccctgcagaccataccactttcgtggccatttgctgtctggggactcgatatcctgggaccgtttaggcgggccccgggcgggtttgagtatctgtatgtcgcgatcgacaggttcactaagtggcccgaggcttatccggtcgtcaagatcgataagcactccgcacttaaattcattaagggcatcacggcccggtttggagtgcctaaccgtattattacggataatggcacccaattcactagtgaactcttcggcgactactgcgaagacatgggcatcaagctctgcttcgcctcacctgcccaccgcagaagcaatggccaagtggagcgcgccaatgcggaaatcctcaaaggccttaaaaccaagaccttcaacatactcaagaagcacggcgattcatggatcgaggagttgccagcggtgctctgggcaaaccgaactacaccaagccgagcaaccggggaaacgcctttcttcctcatctacggcgcggaagcggttctcccatccgagctcaccctgaggtctcctcgggctaccatgtattgcgaggctgatcaaaatcagcttcgcagagatgacctcgactacttggaagagcgaaggcggcgcgcggccctccgagccgcgcgctaccagcagagcctgcggcgctaccatcagcgccacgtccgggcccgatcactctgcatcgacgacctcgtcctacgccgcgtccaaacgcgtgctggattgagcaagctttcaccaatgtgggagggtccgtatcgagtggtcggcgtcccccggccgggctccatacggctggccacgggcgacggcactgagctgcctaacccgtggaacatcgaacaccttcgtcgcttctacccctga

SEQ ID NO: 94692 - DNA, 208 bp, Oryza sativa
  Clone ID: PAT_MRT4530_92958C.1
ctgagtgtggggtattgtgaaccatctgcctaatttttctgtaaatataaaattattctaaaaaatagagactactttaataaaattaaaaaatcctgataccctaaaacaaacacgtttttctcttgtgctaagtcccccagtgcacaccatccactgagcctgctcatttaacaacaggcagattctgtttactccaggcatctca

SEQ ID NO: 94693 - DNA, 5568 bp, Oryza sativa
  Clone ID: PAT_MRT4530_92959C.1
atggccgagccggcaaaggtgcacgacctctccccgagtatgagcggtgacgacggggagccaaacccacgtcgtcgagctcgtactccaccgccccctccacgccaaagtcctaggtgggagaaggcgctcgagagggccgaaggatccgcgacttcgacgcccacaggaggtggagaagggcggcgagatggggagcgtcgcctcctcgtctacggcgacggcagcacgccccagggcgcgctccaagctgcgggcgcgctcctacctcacccgcccgtcgcccatgacccggagtctccagcccaacgttggctggacgatgtggccaaattggtcatgactgcacggcagcgcctagatgctggtgggcggtcctccgccaccaaggcctctggtgctgctaccaccggctccgcgtcgtcaagacggagggcgcggcgagcggcagccgctgttcgccattcggccgccactccttcgtcaacgcctccgacccgggaagatctgcgtggggaaccggatgcccgcatcagtatcgagcgccggcgtaatggccgacgtgctccccacgcaacggagggcgcctcctcgtccggagtgtcacctcaccaaggacgcggggatcagccctccgtgcccccggttggtggtgtcggctgtagagcctttgtggcgagccttcggaatgtccgttggcccccaaggttccggcccaccatcgccgaaaaatatgacgggagcgtcaaccccgccgagtttctccaggtctacacgaccgggatcgaggccgccgggggtgacgacagggtcatggcgaatttctttcccatggccctgaaaggacaggcggggggtgtgcggcacaaccgcatgctcgaaaagatcgcctccaaagagccccagactaccgcggagctttttcagctcgcggaccgagtggctcgtaaggaggaggcatggacctggaacccctccgattccggtgtggcagcttcggccgcccccggatccgccgctcagatagggcggcgtgacaggaggaggaagaagagtgaggccaagcagaaggcccccgccgaggacatcgatgacggcgatgatgacctaggtttccaagagcctggggccaccattgccaccgtcgatgggggagcgtgtgctcacgtttctcgccggagcttcaaggccatgaagcgagagcttctggccgcggcccctactcatgaggcgacgtgtcgggcgcggtggtcggaggttgccctcaccttcgaccagaccgaccacccaccgtgcgttgcccggggagggcagattgcgatggtggtttctcccaccgtttgcaacgtgaagttggagcgtgtcctcattgatgggggagtggccctcaacatcctttcccctgcggcctttgacgccatcaaggccccggggatggtgctccggccgtcccagccaattatcggtgtgacgccggggcacacgtggccgttaggtcacatcgacctaccggtcaccttcggtggatccgccaacttccgcatggagcgggtgaacttcgatgtggcggacctcagtctgccctacaacgcggtcctggggaggcccgcgttggtgaagttcatggcggcggtccactacgcctacctacagatgaagatgccgggccccggtggccccatctctgtccatggcgacctcaaagtcgcgctcgcttgtctggagcagcgcgcggaccacctcgccgctgcgtccaagcccgagggtggcgacgagaggcttggcgcctccgcccccgccaccccgaggcagcggatgatcacaggcgacgaggtcccggaagacgcgctcgtctccttcctacgggcaaacgctgacgtcttcgcatggagaccggcggatatgcccggggtccccagggaggtgattgagcaccgtctcgccgtgcggccgggcgcaaggccggtccggcagaaagtgcggcggcaggccccggaacgtcaagccttcatccgcgaggaggtggcgcgacttctggaggccggattcatccgtgaggtcttccatccggagtggctggcgaacccggtggtcgttcccaaggcaaacggcaagcttcggatgtgcatcgactacaccgaccttaacaaggcatgtcctaaggatccttaccccctgcctcgcatagatcagattgtcgactccactgcggggtgtgaccttttgtgttttctagatgcatactctggttaccatcagattcgcatggctagggaggatgaggaaaaaactgcgttcattacccccataggaacctattgttatacgacaatgcccttcgggttaaagaatgcaggtcctacttttcaacgtactactcgaatttctttgggtagccaattaggacgtaatgttgaggcttatgtcgatgacttggttgtaaagacgcgcaaccaggaaactttactctcagatctagcggaaacttttgagagtctccgctccgcccgcataaaactaaaccccgataagtgtgtgttcggtgtacctgcgggcaagcttctcgggttcttggtctctgcccgaggcattgaggccaatcccgagaagatacgggctatagagcggatgcgcccccccagcaaacttagggatgtgcaatgcgtcaccggttgcatggccgccctaagtcggttcatatcgaggctgggagagaaggcgttacccttatttaagcttctcaaacgctccggaccgtttacctggacggaggaagccaaaaatgccctcactcagttgaaggcatgtctaagctctcccccagttctggtcgccccggagccagacgagcccttgttactctacttagcggcgaccccgcaagtagttagtgcggcattggttgtggagcgcgatgaggacaattctcatttcacgcctccccaccctgtgccgacttggcccgggagagagcagggaggagaggctcccgagccgaacggtggcccagggcccccgacgaccggagttggccctctgcccgcttgtcagacggtgctaggagcccccgacccccaggaaggccctgaggccactgtgggaaggccgcacctatcgccctttgaccccgaggctaaccctgtgctgactcgacccgggaaagagcagggagaagaggcccccgagccgaacggaggcctaaggcccctgacgaccggagttggccctttgcccgcttgtccgacgacgccaggagcccccgacccccaggacggccccgaagccactgtgggaaggccgcccctgttatcctccgaccccgaggtcatcagcacagaagacaagtgcgccccgcgaggctgcttggacgaagagtgccccagggatgcggcccctagcgaagaggatcggccccaccgaaaggtgcagcggcccgtctactttgttagtgaggccctccgggacgccaaaacccgataccctcaggcccagaagatgctttacgctattctaatggcctcgaggaaactgcgccattatttccaggcgcatcgggtcacagtagttacgtcttaccccctcggtcaaatcttgcataatcaagagggtacaggacgggtggtgaaatgggcaatcgaactttctgagttcgatttgcactttgaaccacgccacgctatcaagagccaggccctcgccgattttgtggcagagtggaccccggctcccgagcccgtctcgatccccgaggccagcacggacccctcgcagctgcctcacaccgcccactgggtgatgcagttcgacggctccctgtctcttcagggcgccggtgcgggggtcacgttgacctctccgagcggagacgtcctcagatacttggtccgcctcgactttcgagcgaccaataatatggcagaatacgagggactccttgccggactaagagtggcagctggactggagatccgccgcctcctggtgttaggcgactcccagctggtcgttaaccaagtctgtaaggagtaccggtgctctgacccgcagatggacgcctacgtgcgccaagtacggcgtatggagcgccattttgacgggattaagcttcggcatgtgcccagacaggataacatgattgccgacgaactctcacggctcgcgtcctcgcgagcccagaccccaccgggcgcctttgaagaaaggcttgcccagccgtcggcgcgacccgaccccttaggggagacggatgcgcctgatcggcccccgaggcccgtcggagtccaggcctcgggacccgaggggagtgctcccaactcccttagattgattgcttggatcgccgagatccaagcatacctcacagataagactctacccgaggaccgcgaagggagtgaacgcgtccatcgcatctccaaacgctacgtgctggtagaagggaccctctatcggcgcgcggctaatggaatcctcctgaagtgcattcctcgggaacaaggcgttgtgcttcttgccgatatccatgaaggcgaatgcggagcccactccgcctcgcgcaccttggttggtaaagcttttcgccagggtttctattggccgacagctcttaatgatgcggtcgacctggtccggcgatgtagagcgtgtcaattccacgccaagcaaatccatcagccggcccaggccctgcagaccataccactttcgtggccgtttgctgtctggggactcgatatcctgggaccgtttaggcgggccccaggtgggtttgagtatctgtatgtcgcgatcgacaggttcactaagtggcccgaggcttatccggtcgtcaagatcgataagcactccgcacttaaattcattaagggcatcacggcccggtttggagtgcctaaccgtattattacggataatggcacccaattcactagtgaactcttcggcgactactgcgaagacatgggcatcaagctctgcttcgcctcacctgcccaccccagaagcaatggccaagtggagcgcgccaatgcggaaatcctcaaaggccttaaaaccaagaccttcaacatactcaagaagcacggcgattcatggatcgaggagttgccagcagtgctctgggcaaaccgaactacaccaagccgagcaaccggggaaacgcctttcttcctcgtctacggcgcggaagcggttctcccatccgagctcactctgaggtctcctcgggctaccatgtattgcgaggctgatcaagatcagcttcgcagagatgacctcgactacttggaagagcgaaggcggcgcgcggccctccgagccgcgcgctaccagcagagcctgcggcgctaccatcagcgtcacgtccgggcccgatcactctgcgtcgatgacctcgtcctacgccacgtccaaacgcgtgctggattgagcaagctttcaccaatgtgggagggtccgtatcgagtggtcggcgtcccccggccgggctccatacggctggccacgggcgacggcactgagctgcctaacccgtggaacatcgaacaccttcgtcgcttctacccctga

SEQ ID NO: 94694 - DNA, 3123 bp, Oryza sativa
  Clone ID: PAT_MRT4530_9295C.1
atcacttgcccatacttcgtgcccatacccagtttcgagttctcggatttaggggctggaccaacaacggtttgccttcagctgcaaacgtttccttcgtagctcgccattggtccacgtgaccatcgtatgcactattttgagctgcgcttttctcgtccttgcctttcatgtaaaacatatatccgttgatgccgtacacttgccataaggtcacgaggcaagttgggccatttgccagcctctgcaatgtttttttcctcgagtgattcaccaaacgataggttttgatccttcaacaattcagggaatttgtgcttctgttcctttgagatccaagttgctgatcttctagggttgcaggctctgatctcgttcttgtgtttctcatcaatgtacagctcgaggatggctagctgttgtagcacgctgctatgtgcttctgctacagctttgtagtcgtcatcatagaaccttttcttgcctacggtccccttcccaattaaccgaccctcgtgtagagcagggggtatcctaatagtgtggcatccttcatgtaatctatacagcactcaaccacctcctcagttgtgtacccctctgttattgatcccttcggatgagcttggttatggacataccctttcagaaccgacatgtacctctcgtacgcctacatctgattgttaacaacggaatttggcatcatattcggagatgaaggaagaagatcgaagcgaatttggtgttgaattgaaaacaacattggagggaaaaacatctcaagctggcatgttgtctcgattgcgaatgtttgaagggggcctaactacttaggatcaaaaaccttctgtgatattcgattgaaaaagtcgcacaactttgttatcactaccttagtgtgaactggcttgactgctcttatagcaatatgtaggaagacagttaacatcttgcgacagtgatgagcattgtatccagagatggtcaaatctttcatggatacaagttttttctgatgttcgacgagaaaccagtcgggactttcaaactatgcaagcatctaaagaaagcctttttctcttctggtgtcagtgagtagcatgccggacgaatctcgatcttcccatttgccagctcttttgggtgaaggtaatgccttatgtccagatttaccaggtctgtacgtgacttgagcccatcattcgtcttactcgggatgtctagtggggtgctaatggtgctattgaacacattcttctcaagatgcattacgtcaatggcatgacgaatctctaggtctttctagtattccagatacctgaaaaatattgagtgcttcttgatccgttgcatatgtattatcccgatccgttttcttcctcttgcctgcctttctctttcccttccaaaacacgaccttaatcttctttgtcttgttgaagacttgtgtaccagttcatgtttctggaggaagatcattctctactgtcttgtcgaataatctagcaatcacacgccacttgtgcctctgtggtaagaaccgacaatgacgcatgtacaccgtcttccttgaggaggtgagttacttgtacgatgtgttgtcgatacatataagacatccaaacttccccttaagatgacctaagagcgaaaagttcgctggcaggtcattgatggtaacgaatatgatggcacgcagagtaaaatgtttcctgcagtactcatcccacactcgtaaccgttctttccacatttcttatatgtcctccatcattggttcaagaaacacatccatgtcaatcccaggctgttttggcccttgtataaggatagtccacaaaatatactttcgcttctagcaaatccatgtaggcaagtcatacatggtgagcagtactggccaagtgctgtgtgagctgcttgtttcattccgtctgtgtttaaggcaaaccttatatttctgggtcctttgcaaatttcgggtgtagtgcatcaaagttttccactgtcgagcatcggcgggatgtcgaatcataccatctgttttccgaccctcttgttgccatctcatcgactggcatctgtaggtttgaaaacagttgcttcaggcgatctttcactggcaggtaccacatcaccatagccgaaattttttcctttgcatccaccgatgaatcttggttgaccacatctttgtctgagactctgttgcccgtcttgtaccaactcgtaccacatgttaggcaacagtcttaatccgtttatttcttgcggtacagtatacaatgattttcgcatacatgaatcttttgaatacctagagataatggacatattagtttcttagcttgatatgtgttggtcggcaacaagttcggcttaggaagcataactctcgacagacccatcaaatcgttgaagctaatgttggaccatctatgtctggtcttcaatatgagaagttcaagcacagagcgtaacaccacatagtccatgtcacatccttccgattcatcataaagaaggtcattcgctgctttttccaacacttcccaattgtcaaaccctcgaacgtcttgtattagttagaacctctagttcaatgtgccgcaccatatcctccatatcaaaataaatatatctgtcatctataccagagccaccacattccgggatcgttccctgtgacatctcttcaattataaaattttctgtcgcatcaaagcaaaaatcatcagcctcttcgttacgaccaacgacttctccgtgcaaagtccatatcttgtaatcatccttaaatccacgctctacaatatgccccaaaatatctttcgggtcttgcagcatcttatcattcttgcaatcaaagcatggacaaaaagtgtccctcttgttcccccttaaagcatgtacctttgtctgaccaacaaatttagatgcttccttcaagaacaccggatgagttcttcttgtgtcgtacatccatgcttaagtggagctaaatctatttagcttagctctagctccaggagacgtggagttggagctgtgccggaacccgtcacgcgccaccactgtactgttgcagaaatggcatgcagtatatgtgccacttgtact

SEQ ID NO: 94695 - DNA, 321 bp, Oryza sativa
  Clone ID: PAT_MRT4530_92960C.1
atgagcatcttcgaagactgggcctgcaaatcctggagaactcaccactatgagcttcgaagagcatcttcgaagactgggccggcaaatcctggagaactcaccactatgagcatcttcgaagattgggccggcaaatcctggagaattgacaagtcaccacaggcgcttcgctatcgatggctattatgctacaactacaggcaagggtatcctggcgggcaaaacttttggctgaggacaaaagaaggcacagagaatatgatggcctccagaaggaacaaagcggccgtcttcgatctgctctcagatactcattga

SEQ ID NO: 94696 - DNA, 4665 bp, Oryza sativa
  Clone ID: PAT_MRT4530_92961C.1
atggccgagccagcaaaggcgcacgacctctccccgagtatgagcggtgacgacggggagccaaacccacgccgtcgagctcgtactccaccgccccctccacgccaaagtcctaggcgggagaaggcgctcgagagggccgaaggatccgcgacttcgatacccacaggaggtggagaagggcggcgagatagggagcgtcgcctcctcgtctacggcgacggcagcacgccccagggcgcgctccaagctgcgggcgcgctcctatgtcacccgcccgtcgcccatgacccggagtctccagcccaacgttggctggacgatgtggccaaattggtcatgactgcacggcagcgcctagatgctggtgggcggtcctccgccaccaaggcctctggtgctgctaccaccggctccgcgtcgtcaagacggagggcgcggcgagcggcagccgctgttcgccattcggccgcccctccttcgtcaacgctttcgacccgggaagatctgcgtggggaaccggatgcccgcatcagtatcgagcgccggcgtaatggccgacgtgctccccacgcaacggagggcgcctcctcgtccggagtgtcacctcaccacggacgcggggatcagccctccgtgcccccggttggtggtgtcggctgtagagcctttgtggcgagccttcggaatgtccgttggcccccaaggttccggcccaccatcgccgaaaaatatgacgggagcgtcaaccccgccgagtttctccaggtctacacgaccgggatcgaggccgccgggggtgacgacagggtcatggctaatttctttcccatggccctgaaaggacaggcgcggggttggctaatgaacttgccacccgcgtctgtccactcttgggaggatttgtgccaacagttcaccatgaacttccaaggcacatatccgcgcccaggtgaggatgcggacttgcacgcagtacagcgaagggatgatgagtcacttcgctcgtacattcagcggttctgtcaagtccgcaacaccataccatgcatccctgcacacgcggtgatttacgcgttcagggggggtgtgcggcacaaccgcatgctcgaaaagatcgcctccaaagagccccagactaccggggagctttttcagctcgcggaccgagtggctcgtaaggaggaggcatggacctggaacccctccggttccggtgtggcagcttcggccgcccccggatccgccgctcagatagggcggcgtgacaggaggaggaagaagaggtcagcccataccgacgacgagggtcatgtcctcgccgtcgagggcgcttcgcgggccacccgaaaggggaggcctgcgggaggcaaaaagaacgaggccggcgctcccaacagggagcgcccaaccggcaagtggtgcaccgtccacaacacttcccttcacgacctcgcggactgccgtgcagtcaaaagtttggctgagcggacgaggaagtgggaggaggagaggaggcaggagcgccgagagggcaaatccccggcggttccttccggtaatcggcgaagtgaggccaagcagaaggcccccgccgaggacatcgatgacggcgatgatgacctgggtttccaagagcctggggccaccattgccaccgtcgatgggggagcgtgtgctcacgtttctcgccggagcttcaaggccatgaagcgagagcttctggccgcggcccctactcatgaggcgacgtgtcgggcgcggtggtcggaggttgccctcaccttcgaccagatcgaccacccaccgtgcgttgcccggggagggcagattgcgatggtggtttctcccaccgtttgcaacgtgaagttggggcgtgtcctcattgatgggggagcggccctcaacatcctttcccctgcggcctttgacgccatcaaggccccggggatggtgctccggctgtcccagccaattatcggtgtgacgccggggcacacgtggccgttaggtcacattgacctaccggtcaccttcggtggatccgccaacttccgcacggagcgggtgaacttcgatgtggcggacctcagtctgccctacaacgcggtcctggggaggcccgcgttggtgaagttcatggcggcggttcactacgcctacctacagatgaagatgccgggccccggtggccccatctctgtccatggcgacctcaaagtcgcgctcgcttgtctggagcagcgcgcggaccacctcgccgctgcgtccaagcccgagggtggcgacgagaggcttggcgcctccgcccccgccaccccgaggcagcggatgatcacaggcgacgaggtcccggaagacgcgctcgtctccttcctgcgggcaaacgctaacgtcttcgcatggagaccggcggatatgcccggggtccccagggaggtgattgagcaccgtctcgccgtgcggccgggcgcaaggccggtccggcagaaagtgcggcggcaggccccggaacgtcaagccttcatccgcgaggaggtggcgcgacttctggaggccggattcatccgtgaggtcatccatccggagtggctggtgaacccggtggtcgttcccaaggcgaacggcaagcttcggatgtgcatcgactacaccgaccttaacaaggcatgtcctaaggatccttaccccctgcctcgcatagatcagattgtcgactctactgcggggtgcgaccttttgtgttttctagatgcatactctggttaccatcagattcgcatggctagggaggatgaggaaaaaactgcgttcattacccccataggaacctattgttatacgacaatgcccttcgggttaaagaatgcaggtcctacttttcaacgtactactcgaatttctttgggtagccaattaggacgtaatgttgaggcttatgtcgatgacttggttgtaaagacgcgcaaccaggaaatgttactctcagatctagcggaaacttttgagagtctccgctccgcccgcataaaactaaaccccgataagtgtgtgttcggtgtacctgcgggcaagcttctagggttcttggtctctgcccgaggcattgaggccaaccccgagaagatacgggctatagagcggatgcacccccccaggaaacttagggatgtgcaatgcgtcaccggttgcatggccgccctaagtcggttcatatcgaggctgggagagaaggcgttacccttatttaagcttctcaaacgctccggaccgtttacctggacgaaggaagccgaaaatgccctcacccagttgaaggcgtatctaagctctcccccagttctggtcgccccggagccagacgagcccttgttactctacttagcggcgaccccgcaagtagttagtgcggcattggttgtggagcgcgatgagaacaattctcatttcatgcttccctaccctgtgccgacttggcccgggagagagcagggaggagaggctcccgagccgaacggtggcccaaggcccccgacgaccggagttggccctctgcccgcttgtcagacggtgctaggagcccccgacccccaggaaggccctgaggccactgtgggaaggccgcacctatcgcccttcgaccccgaggctaaccctgtgctgactcgagccgggaaagagcagggagaaaaggcccccgagccgaacggaggcctaaggcccctgacgaccggagttggccctttgcccgcttgtccgacgacgccaggagcccccgagcccccaggacggccccgaagccactgtgggaaggccgcccctgttatcctccgaccccgagctcttaatgatgcggtcgacctggtccggcgatgtagagcgtgtcaattccacgccaagcaaatccatcagccggcccaggccctgcagaccataccactttcgtggccatttgctgtctggggactcgatatcctgggaccgtttaggcgggccccgggcgggtttgagtatctgtatgtcgcgatcgacaggttcactaagtggcccgaggcttatccggtcgtcaagatcgataagcactccgcacttaaattcattaagggcatcacggcccggtttggagtgcctaaccgtattattacggataatggcacccaattcactagtgaactcttcggcgactactgcgaagacatgggcatcaagctctgctttgcctcacctgcccaccccagaagcaatggccaagtggagcgcgccaatgcggaaatcctcaaaggccttaaaaccaagaccttcaacatactcaagaagcacggcgattcatggatcgaggagttgccagcagtgctctgggcaaaccgaactacaccaagccgagcaaccggggaaacgcctttcttcctcgtctacggcgcggaagcggttctcccatccgagctcaccctgaggtctcctcgggctaccatgtattgcgaggctgaaaagatcagcttcgcagagatgacctcgactacttggaagagcgaaggcggcgcgcggccctccgagccgcgcgctaccagcagagcctgcggcgctaccatcagcgtcacgtccgggcccgatcactctgcgtcgacgacctcgtcctacgccgcgtccaaacgcgtgctggattga

SEQ ID NO: 94697 - DNA, 5730 bp, Oryza sativa
  Clone ID: PAT_MRT4530_92962C.1
atggccgagccagcaaaggcgcacgacctctccccgagtatgagcggtgacgacggggagccaaacccacgccgtcgagctcgtactccaccgccccctccacgccaaagtcctaggcgggagaaggcgctcgagagggccgaaggatccgcgacttcgacacccacaggaggtggagaagggcggcgagatggggagcgtcgcctcctcgtctacggcgacggcagcacgccccagggcgcgctccaagctgcgggcgcgctcctacgtcacccgcccgtcgcccatgacccggagtctccagcccaacgttggctggacgatgtggccaaattggtcatgactgcacggcagcgcctagatgctggtgggcggtcctccgctaccaaggcctctggtgctgctaccaccggctccgcatcgtcaagacggagggcgcggcgagcggcagccgctgttcgccattcggccgccactccttcatcaacgcctccgacccgggaagatctgcgtggggaaccggatgctcgcatcagtatcgagcgccggcgtaatggccgacgtgctccccacgcaacggagggcgcctcctcgtccggagtgtcacctcaccacggacgcggggatcagccctccgtgcccccgcggttctgtcaagtccgcaacaccataccatgcatccctgcgcacgcggtgatttacgcgttcagggggggtgtgcggcacaaccgcatgcttgaaaagatcgcctccaaggagccccagactaccgcggagctttttcagctcgcggaccgagtggctcgtaaggaggaggcatggacctggaacccctccggttccggtgtggcagcttcggccgcccccggatccgccgctcagatagggcggcgtgacaggaggaggaagaagaggtcagcccataccgacgacgagggtcatgtcctcgccgtcgagggcgcttcgcgggccacccgaaaggggaggcctgcgggaggcaaaaagaacgaggccagcgctcccaacagggagcgcccaaccggcaagtggtgcaccgtccacaacacttcccttcacgacctcgcggactaccgtgcagtcaaaagtttggctgagtggacgaggaagtgggaggaggagaggaggcaggagcgccgagagggcaaatccccggtggttccttccggtaatcggcgaagtgaggccaagcagaaggcccccgccgaggacatcgatgacggcgatgatgacctaggtttccaagagcctggggccaccattgccaccgtcgatgggggagcgtgtgctcacgtttctcgccggagcttcaaggccatgaagcgagagcttctggccgcggcccctactcatgaggcgacgtgtcgggcgcggtggtcggaggttgccctcaccttcgaccaaaccgaccacccaccgtgcgttgcctggggagggcagattgcgatggtggtttctcccaccgtttgcaacgtgaagttggggcgtgtcctcattgatgggggagcggccctcaacatcctttcccctgcggcctttgacgccatcaaggccccggggatggtgctccggccgtcccagccaattatcggtgtgacgccggggcacacgtggccgttaggtcacatcgacctaccggtcaccttcggtggatccgccaacttccgcacggagcgggtgaacttcgatgtggcggacctcagtctgccctacaacgcggtcctggggaggcccgcgttggtgaagttcatggcggcggtccactacgcctacctacagatgaagatgccgggccccggtggccccatctctgtccatggcgacctcaaagtcgcgctcgcttgtctggagcagcgcgcggaccacctcgccgctgcatccaagcccgagggtggcgacgagaggcttggcgcttccgcccccgccaccccgaggcaacggatgatcataggcgacgaggtcccggaagacgcgctcgtctccttcctgcgggcaaacgctgacgtcttcacatggagaccggcggatatgcccggggtccccagggaggtgattgagcaccgtctcgccgtgcggccgggcgcaaggccggtccggcagaaagtgcggcggcaggccccgggacgtcaagccttcatccgcgaggaggtggcgcgacttctggaagccggattcatccgtgaggtcatccatccggagtggctggcgaacccggtggtcgttcccaaggcgaacagcaagcttcggatgtgcatcgactacaccgaccttaacaaggcatgtcctaaggatccttaccccctgcctcgcatagatcagattgtcgactccactgcggggtgcgaccttttgtgttttctagatgcatactctggttaccatcagattcgcatggctagggaggatgaggaaaaaactgcgttcattacccccataggaacctattgttatacgacaatgcccttcgggttaaagaatgcaggtcctacttttcaacgtactactcgaatttctttgggtaaccaattaggacgtaatgttgaggcttatgtcgatgacttggttgtaaagacgcgcaaccaggaaatgttactctcagatctagcggaaacttttgagagtctccgctccgcccgcataaaactaaaccccgataagtgtgtgttcggtgtacctgcgggcaagcttctagggttcttggtctctgcccgaggcattgaggccaaccctgagaagatacgggctatagagcggatgcgcccccccagcaaacttagggatgtgcaatgcgtcaccggttgcatggccgccctaagtcggttcatatcgaggctgggagagaaggcgttacccttatttaagcttctcaaacgctccggaccgtttacctggacggaggaagccgaaaatgccctcacccagttgaaggcgtatctaagctctcccccagttctggtcgccccggagccagacgagcccttgttactctacttagcggcgaccccgcaagtagttagtgcggcattggttgtggagcgcgatgagaacaactctcatttcacgcttccccaccctgtgccgacttggcccgggagagagcaaggaggagaggctcccgagccgaacggtggcccaaggcccccgacgaccggagttggccctctgcccgcttgtcagacgatgctaggagcccccgacccccaggaaggccctgaggccactgtgggaaggccgcacctatcgcctttcgaccccgaggctaaccctgtgctgacccgacccgggaaagagcagggagaagaggcccccgagccgaacggaggcctaaggcccctgacgaccggagttggccctttgcccgcttttccgacgacgccaggagcccccgacccccaggacggccccgaagctactgtgggaaggctgcccctgttatcctccgaccccgaggtcatcagcacagaagataagtgcgccccgcgaggctgcttggacgaagagtgccccagggatgcggcccctagcgaagaggatcggccccaccgaaaggtgcagcggcccgtctactttgttagtgaggccctccgggacgccaaaacccgataccctcaggcccagaagatgctttacgctattctgatggcctcgaggaaactgcgccattatttccaggcgcatcgggtcacagtagttacgtcttaccccctcggtcaaatcttgcataatcgagagggtacaggacgggtggtgaaatgggcaatcgaactttctgagttcgatttgcactttgaaccacgccacgctatcaagagccaggccctcgccaattttgtggtagagtggaccccggctcccgagcccgtctcgatccccgaggccagcacggacccctcgcagctgcctcacaccgcccactgggtgatgcagttcgacggctccctgtctcttcagggcgccggtgcgggggtcacgttgacctctccgagcggagacgtcctcagatacttggtccgcctcgactttcgagcgaccaataatatggcagaatacgagggactccttgccggactaagagtggcagctggactggggatccgccgcctcctggtgttaggcgactcccagctggtcgttaaccaagtctgtaaggagtaccggtgctctgacccgcagatggacgtctacgtgcgccaagtacggcgtatggagcgccattttgatgggattgagcttcggcatgtgcccagacgggataacatgattgccgacgaactctcacggctcgcgtcctcgcgagcccagaccccaccgggcgcctttgaagaaaggcttgcccagccgtcggcgcgacccgaccccttaggggagacagatgcgcctgaccggcccccgaggcctgtcggagtccaggcctcgggacccgaggggagtgctcccaactcccttagatcgattgcttggatcgccgagatccaagcatacctcacagataagactctacccgaggaccgcgaagggagtgaacgcgtccatcgcatctccaaacgctacgtgctggtagaagggaccctctatcggcgcgcggctaatggaatcctcctgaagtgcattcctcgggaacaaggcgttgtgcttcttgccgatatccatgaaggcgaatgcggagcccactccgcctcgcgcaccttggttggtaaagcttttcgccagggtttctattggccgacagctcttaatgatgcggtcgacctggtccggcgatgtagagcgtgtcaattccacgccaagcaaatccatcagccggcccaggccctacagaccataccactttcgtggccatttgctgtctggggactcgatatcctgggaccgtttagacgggccccgggcgggtttgagtatctgtatgtcgcgatcgacaggctcactaagtggcccgaggcttatccggtcgtcaagatcgataagcactccgcacttaaattcattaagggcatcacggcccggtttggagtgcctaaccgtattattacggataatggcacccaattcactagtgaactcttcggcgactactgcgaagacatgggcatcaagctctgcttcgcctcacctgcccaccccagaagcaatggccaagtggagcgcgccaatgcggaaatcttcaaaggccttaaaaccaagaccttcaacatactcaagaagcacggcgattcatggatcgaggagttgccagcggtgctctgggcaaaccgaactataccaagccgagcaaccggggaaacgcctttcttcctcgtctacggcgcggaagcggttctcccatccgagctcaccctgaggtctcctcgggctaccatgtattgcgaggctgatcaaaatcagcttcgcagagatgacctcgactacttggaagagcgaaggcggcgcgcggccctccgagccgcgcgctaccagcagagcctgcggcgctaccatcagcgccacgtctgggcccgatcactctgcgtcgacgacctcgtcctacgccgcgtccaaacgcgtgctggattgagcaagctttcaccaatgtgggagggtcgtatcgagtggtcggcgtcccccggccgggctccatacggctggccacgggcgacggcactgagctgcctaacctgtggaacatcgaacaccttcgtcgcttctacccctgaggggggggtcgggtgttag

SEQ ID NO: 94698 - DNA, 6024 bp, Oryza sativa
  Clone ID: PAT_MRT4530_92963C.1
atggccgagccagcaaaggcacacgacctctccccgagtatgagcggtgacgacggggagccaaacccacgccgtcgacctcgtactccaccgccccttccacgccaaagtcctaggcgggagaaggcgctcgagagggctcaaggatccgcgacttcgacatccacaggaggtggagaagggcggcgagatggggagcgtcgcctcctcgtctacggcgacggcagcacgccccagggcgcgctccaagctgcaggcgcgctcctacgtcacccgcccgtcgcccatgacccggagtctccagcccaacgttggctggacgatgtggccaaattggtcatgactgcacggcagcgcctagatgctggtgggcggtcctccgccaccaaggactctggtgctgctaccaccggctccacgtcgtcaagacggagggcgcggcgagcggcagccgctattcaccattcggccgccactccttcgtcaacgcctccgacccgggaagatctgcgtggggaaccggatgcccgcatcagtatcgagcgccggcggcgcctcctcgtccggagtgtcacctcaccacggacgcggggatcagccctccgtgccccggttggtggtgtcggctgtagagcctttgtggcgagccttcggaatgtccgttggcccccaaggttccggcccaccatcgccgaaaaatatgacgggagcgtcaaccccgccgagtttctccaggtctacacgaccgggatcgaggccgccgggggtgacgacagggtcatggcgaatttctttcccatggccctgaaaggacaggcgcggggttggctaatgaacttgccacccgcgtctgtccactcttgggaggatttgtgccaacagttcaccatgaacttccaaggcacatatccgcgcccaggtgaagaagcggacttgcacgcagtacagcgaagggatgatgagtcacttcgctcgtacattcagcggttctgtcaagtccgcaacaccataccatgcatccctgcacacgcggtgttttacgcgttcagggggggtgtgcggcacaaccgcatgctcgaaaagatcgcctccaaagagccccagactaccacggagctttttcagctcgcggaccgagtggctcgtaaggaggaggcatggacctggaacccctccggttccggtgtggcagcttcggccgcccccggatccgccgctcagatagggcggcgtgacaggaggaggaagaagaggtcagcccataccgacgacgagggtcatgtcctcgccgtcgagggcgcttcgcgggccacccgaaaggggaggcctgcgggaggcaaaaagaacgagaccggcgctcccagcagggaacgcccaaccggcaagtggtgcaccgtccacaatacatcccttcacgacctcgcggactgccgtgcagtcaaaagtttggctgagcggacgaggaagtgggaggaggagaggaggcaggagcgccgagagggcaaatccccggcggttccttccagtaatcggcgaagtgaggccaagcagaaggcccccgccgaggacatcgatgacggcgatgatgacctaggtttccaagagcctagggccaccattgctaccgtcgatgggggagcgtgtgctcacgtttctcgccggagcttcaaggccatgaagcgagagcttctggccgcggcccctactcatgaggcgacgcgccgggcgcggtggtcggaggttgccctcaccttcgaccagaccgaccacccaccgtgcgttgcccggggagggcagattgcgatggtggtttctcccaccgtttgcaacgtgaagttggggcgtgtcctcattgatgggggagcggccctcaacatcctttcccctgcggcctttgacgccatcaaggccccggggatggtgctccggccgtcccagccaattatcggtgtgacgccggggcacacgtggccgttaggacacattgacctaccggtcaccttcggtggatccgctaacttccgcacggagcgggtgaacttcgatgtggcggacctcagtctgccctacaacgcggtcctggggaggcccgcattggtgaagttcatggcggcggtccactacgcctacctacagatgaagatgccgggccccggtggccccatctctgtccatggcgacctcaaagtcgcgctcgcttgtctggagcagcgcgcggaccacctcgccgctgcgtccaagcccgagggtggcgacgagaggcttggcgcctacgcccccgccaccccgaggcagcggatgatcacaggcgacgaggtcccggtcaaggaggaagacgcgctcgtctccttcctgcgggcaaacgctgacgtcttctcatggagaccggcggatatgcccggggtccccagggggttgattgagcaccgtcttgccgtgcggccgggcgcaaggccggtccggcagaaagtgcggcggcaggccccggaacgtcaagccttcatccgcgaggaggtggcgcgacttctggaggccggattcatccgtgaggtcatccatccggagtggctggcgaacccggtggtcgttcccaaggcgaacggcaagcttcggatgtgcatcgactacaccgaccttaacaaggcatgtcctaaggatccttaccccctgcctcgcatagatcagattgtcgactccactgcggggtgcgaccttttgtgttttctagatgcatactctggttaccatcagattcgcatggctagggaggatgaggaaaaaactgcgttcattacctccataggaacctattgttatacgacaatgcccttcgggttaaagaatgcaggtcctacttttcaacgtactactcgaatttctttgggtagccaattaggacgtaatgttgaggcttatgtcgatgacttggttgtaaagacgcgcaaccaggaaatgttactctcagatctagcggaaacttttgagagtctccgctccgcccgcataaaactaaaccccgataagtgtgtgttcggtgtacctgcgggcaagcttctagggttcttggtctctgcccgaggcattgaggccaaccccgagaagatacgggctatagagcggatgcgcccccccagcaaacttagggatgtgcaatgcgtcactggttgcatggccgccctaagtcgattcatatcgaggctgggagagaaggcgttacccttatttaagcttctcaaacgctccggaccgtttacctggacggaggaagccgaaaatgccctcacccagttgaaggcgtatctaagctctcccccagttctggtcgccccggagccagacgagcccttgttactctacttagcggcgaccccgcaagtagttagtgcggcattggttgtggagcgcgatgagaacaattctcatttcacgcttccccaccctgtgccgacatggcccgggagagagcagggaggagaggctcccgagccgaacggtggcccaaggcccccgacgaccggagttggccctctgcccgcttgtcagacggtgctaggagcccccgacccccaggaaggccctgaggccactgtgggaaggccgcacctatcgccctttgaccccgaggctaaccctgtgctgactcgacccgggaaagagcagggagaagaggcccccgagccgaacggaggcctaaggcccctgacgaccggagttggccctttacccgcttgtccgacgacgccaggagcccccgacccccaggacggccctgaagccactgtgggaaggccgcccctgttatcctccgaccccgaggtcatcagcacagaagacaagtgcgccccgcgaggctgcttggacaaagagtgccccagggatgcggcccctagcaaagaggatcggccccaccgaaaggtgcagcggcccgtctactttgttagtgaggccctccgggacgccaaaacccgataccctcaggcccagaagatgctttacgctattctgatggcctcgaggaaactgcgccattatttccaggcgcatcgggtcactgtagttacgtcttaccccctcggtcaaatcttgcataatcgagagggtacaggacgggtggtgaaatgggcaatcgaactttctgagttcgatttgcactttgaaccacgccacgctatcaagagccaggccctcgccgattttgtggcagagtggaccccggctcccgagcccgtctcgatccccgaggccagcacggacccctcgcagctgcctcacaccgcccactgggtgatgcagttcgacggctccctgtctcttcagggcgccggtgcgggggtcacgttgacctctccgagcggagacgtcctcagatacttggtccgcctcgactttcgagcgaccaataatatggcagaatacgagggactccttgccggactcagagtggcagctggactggggatccgccgcctcctggtgttaggcgactcccagctggtcgttaaccaagtttgtaaggagtaccggtgctctgacccgcagatggacgcctacgtgcgccaagtacggcgtatggagcgccattttgacgggattgagcttcggcatgtgcccagacgggataacatgattgccgacgaactctcacggctcgcgtcctcgcgagcccagaccccaccgggcgcctttgaagaaaggcttgcccagccgtcggcgcgacccgaccccttaggggagacggatgcgcctgaccggcccccgaggcccgtcggagtccaggcctcgggacccgaggggagtgctcccaattcccttagattgattgcttggatcgccgagatccaagcatacctcacagataagactctacccgaggaccgcgaagggagtgaacgcgtccatcgcatttccaaacgctacgtgctggtagaagggaccctctatcggcgcgcggctaatggaatcctcctgaagtgcatttctcgggaacaaggtgttgtgcttcttgccgatatccatgaaggcgaatgcggagcccactccgcctcgcgcaccttggttgctcttaatgatgcggtcgacctggtccggcgatgtagagcgtgtcaattccacgccaagcaaatccatcagccggcccaggccctgcagaccataccactttcgtggccatttgctgtctggggactcgacatcctgggaccgtttaggcgggccccgggcgggtttgagtatctgtatgtcgcgatcgacaggttcactaagtggcccgaggcttatccggtcgtcaagatcgataagcactccgcacttaaattcattaagggcatcacggcccggtttggagtgcctaaccgtattattacggataatggcacccaattcactagtgaactcttcggcgactactgcgaagacatgggcatcaagctctgcttcgcctcacctgcccaccccagaagcaatggccaagtggagcgcgccaatgcggaaatcctcaaaggccttaaaaccaagaccttcaacatactcaagaagcacggcgattcatggatggaggagttgccagcagtgctctgggcaaaccgaactacaccaagccgagcaaccggggaaacgcctttcttcctcgtctacggcgcggaagcggttctcccatccgagctcaccctgaggtctcctcgggccaccatgtactgcgaggctgatcaagatcagcttcgcagagatgacctcgactacttggaagagcgaaggcggcgcgcgaccctccgagccgcgcgctaccagcagagcctgcgacgctaccatcagcgtcacgtccgggcccgatcactctgcgtcgacgacctcgtcctacgccgcgtccaaacgcgtgctggattgagcaagctttcaccaatgtgggagggtccgtatcgagtggtcggcgtcccccggccgggctccatacggctggccacgggcgatggcactgagctgcctaacccatggaacatcgaacaccttcgtcgcttctacccctga

SEQ ID NO: 94699 - DNA, 537 bp, Oryza sativa
  Clone ID: PAT_MRT4530_92964C.1
gcgttcgccgcgctcaccgcgctatggttcgcccggtacgcgaggttctggcgcgaggtgtcgcagatgcagaacttcgtgacggcggccatcgcgctgggcatggtggaggtcaccacctggtacctcgacctcgccgagttcgacgcgtcgggcgtccggccggcggggacgacgttctgggcggcgacgtcgggcgccgtgcgcgccgcggcgtgccgcgtgctggcgctgctcgtggccatggggtacggcggtggccgcctcggcgccgcgttcctcgccgcggcggaggtgctcgacgtcggcgacaacgtcggcatcgtcagtgaccactcgccggcgaggaggctcttcttcattctccccgtcgccgccctcaacacggtgttcatctactggatcttcacctcgctgtcaagaactatcagcaagctcaaggcgaggaggatgacggcgaagcttgaaatgtatcggaaattcgcgaattctctcaccatcgccgtggccctgtcgctcggctggatcacatttgag

SEQ ID NO: 94700 - DNA, 1457 bp, Oryza sativa
  Clone ID: PAT_MRT4530_92965C.1
atgtcagtgatgccttcgataaggcggctcctcctcgccggcgcggcggtggcggtggtggtcgtttcttgcgccgtcgtttgtgcggaggcgtcggtgcatgagtacgccggcgagaggttcgccggcgtcggcaatggcttcgtgctgcacggcggcagcgagggtgtctacgcgtcggccacggcggagtcgttcgtccgattcgagaaggtggcgttcaggaggacgccggaggcggcgtcggtggcggaggaggacggcaaccggacggtcacggtggcggcggtcatcttcgaggccggcgaccgcgacgccgtcggggcggtgtccgacgtcgtcggcggcgagcgcgcgctgtgctgcacgccgggcatggcgaggcgaggcgggtgcacggagggggcggtcgtgtaccgcgcccccgcgtcgtcgaacgccaccggccgctggcccaaggtgctcgccgcgtcgttcctcccgggcagcctcgtcgcggcgttccccgacgagaccgtcgccgtggcgcgcaccgggatgtacagcctccacttcgtccactgcgacgcgtcgctcgccgccgggcaggtggtggccgcggaggggaagaccatctggaagaacagccgcggctacctcccggggaggatggcgccgctcaagccgttatacggcgccaatgtcgttggcgttcgccgcgctcgccgcgctctggttcgcccgaacttcgcgacggcggccatcgcgctgggcatggtgaaggtcaccacctggtacctcgacctcgccgagttcgacgcgtcgggcgtccggccggcggggacgacgttctgggcggcgacgtcgggcgccgtgcgcgccgcggcgtgccgcgtgctggcgctgctcgtggccatggggtacggcgtgacgaggcccgcactgggctgcggcaacgccagggtggccgccctcggcgccgcgttcctcgccgcggcggaggtgctcgacgtcggcgacaacgtcggcatcgtcagtgaccactcgccggcgaggaggctttttttcattctccccgtcgccgccctcaacacggtgttcatctactggatcttcacctcgctgtcaagaactatcagcaagctcaaggcgaggaggatgacggcgaagcttgaaatgtatcggaaattcgcgaattctctcaccatcgccgtggccctgtcgctcggctggatcacatttgaggtccattttaagacgactgatgagcacaacgagcggtggcgagtggcgtgggtaatccccgcggttcgcctactgagggaggagtgtgaggatgacacggagcacaatgacgaggacgatgacgtggaggacacgcggccgctgatcagggccgggccgctgtcctacgtggacaactgggcgtgctacgtcacgcaggacgccaagatcatactgaggacggactctggcgt

SEQ ID NO: 94701 - DNA, 161 bp, Oryza sativa
  Clone ID: PAT_MRT4530_92966C.1
tctgggtgtgctcgcacacaatgaccggggaactctaagtacgggaagctgctgcgagttacgaccatgcgaaaccgagggggtcggcaaaaaaacggttacccacagtcacagcattagatgtcggcactacacgcaaccgtcgaagggcgactttctag

SEQ ID NO: 94702 - DNA, 1596 bp, Oryza sativa
  Clone ID: PAT_MRT4530_92967C.1
atgccttcgataaggcggctcctcctcgccggcgcggcggtggcggtggtggtcgtttcttgcgccgtcgtttgtgcggaggcgtcggtgcatgagtacgccggcgagaggttcgccggcgtcggcaatggcttcgtgctgcacggcggcagcgagggtgtctacgcgtcggccacggcggagtcgttcgtccgattcgagaaggtggcgttcaggaggacgccggaggcggcgtcggtggcggaggaggacggcaaccggacggtcacggtggcggcggtcatcttcgaggccggcgaccgcgacgccgtcggggcggtgtccgacgtcgtcggcggcgagcgcgcgctgtgctgcacgccgggcatggcgaggcgaggcgggtgcacggagggggcggtcgtgtaccgcgcccccgcgtcgtcgaacgccaccggccgctggcccaaggtgctcgccgcgtcgttcctcccgggcagcctcgtcgcggcgttccccgacgagaccgtcgccgtggcgcgcaccgggatgtacagcctccacttcgtccactgcgacgcgtcgctcgccgccgggcaggtggtggccgcggaggggaagaccatctggaagaacagccgcggctacctcccggggaggatggcgccgctcaagccgttctacggcgccatgtcgctggcgttcgccgcgctcgccgcgctctggttcgcccggtacgcgaggttctggcgcgaggtgtcgccgctgcagaacttcgcgacggcggccatcgcgctgggcatggtggaggtcaccacctggtacctcgacctcgccgagttcgacgcgtcgggcgtccggccggcggggacgacgttctgggcggcgacgtcgggcgccgtgcgcgccgcggcgtgccgcgtgctggcgctgctcgtggccatggggtacggcgtgacgaggcccgcactgggctgcggcaacgccagggtggccgccctcggcgccgcgttcctcgccgcggcggaggtgctcgacgtcggcgacaacgtcggcatcgtcagtgaccactcgccggcgaggaggctcttcttcattctccccgtcgccgccctcaacacggtgttcatctactggatcttcacctcgctgtcaagaactatcagcaagctcaaggcgaggaggatgacggcgaagcttgaaatgtatcggaaattcgcgaattctctcaccatcgccgtggccctgtcgctcggctggatcacatttgaggtccattttaagacgactgatgagcacaacgagcggtggcgagtggcgtgggtaatccccgcggtgtgggagctcatctccttcttcctcctctgcaccatctgcatcctatggacgccctcacaaaattcaatgaggttcgcctactcgagggaggagtgtgaggatgacacggagcacaatgacgaggacgatgacgtggaggacacgcggccgctgatcagggccgggccgctgtcctacgtggacaactgggcgtgctacgtcacgcaggacgccaagatcatactgaggacggactctggcgtgtacgctaaagccggcgaagagtacaaacgggtgtga

SEQ ID NO: 94703 - DNA, 215 bp, Oryza sativa
  Clone ID: PAT_MRT4530_92968C.1
tccttcaccaacaatcgcgacgacgaaaagaagaagagaaatatgaatctcgtctcacccccaatggcgcagatcatcgacgggaaggcggtcgccgccgacatccgccgcgagggctatagttctttcttacctagtctgatgatgggctttctcatctctgtttgagcggatggatcgcatggtggtcgtacggtcccaacttcttctacatc

SEQ ID NO: 94704 - DNA, 670 bp, Oryza sativa
  Clone ID: PAT_MRT4530_92969C.1
ctatgcatgccactccgtcatgattttcgtccaatccatcacattttctgccgtctccgtcttcgtcctctcgtcgtcctcgtctcgacggcagcaccagcacggcagtacgaaggcgagcgcggatggcagcacggcgcacggcggcacggcagcacggtggtggatggcagcacggcaccggcgacggtcgtgcccgcgtccgctccccgcgcccctccgcgacctcctcgccgacttcctctctgcaccgttgcagccatcgtcgttgaccatctccgcggtggaccagccgccgtcgacctcatcgcctccgcccagatctggcgaggagggctgctcgtcgttgctgccgatggaggaggcgtcgaccctcgagctccgccgccgttggccccaagctttgtcactggtgctgccgacgcccatctcctctctccacacgaccatcctcggcagcagctgcgcaccctccgcgacctccccgcgagcgtcctcggtggcggcggcggcctcgctcacgaccgtcctcggcgcggccatgcccctccgcgaccgtgctcgtcggcggcggctgcagctgcgccctctccctgcgcttgcgactgtcctcgccagcggcagcctcgttcttgctaatcgccttctccccgtgcagactggtatctag

SEQ ID NO: 94705 - DNA, 1669 bp, Oryza sativa
  Clone ID: PAT_MRT4530_9296C.1
gccacgcgtccgcccattccccgggcccaggtgcgtgggccggagggcgagagtgaagcttgagccgtctcgccgcgggcgctgctgctgctgctgctgctcgcgtccgattccgacgagaggctgggaacttcaaagctgaaaaggactaatggagggtggaggcgcaaaagatggttctgcagcggcagcgcaaacaagggggagtggggatgatggttcccacaagccgctgccgccttgctgtctcaaggcgaaggctgcggcagcagagtctgaggcaaaatgccatgccacagtggtgtcagggtggttcacggaaccccgctcgcactctggtaaaacaagcaaagtgcagtacttcaacaatccaatgtggcctggagaagctcattctctgaaagtagagaatattctgtatcaagggaaatcaccataccaagaaatcttagtttttgagtcctcaacctatgggaatgttctggtgcttgatggtattgtgcagctgaccgaaaaggatgaatgtgcataccaggaaatggttactcaccttccactgtgctcgattccatcccccaaaagtgttttggttgtcggaggtggtgatggtggtgtgctacgagaaatagccagacatgcctcagtggagaacatcgatatatgtgaaatagaccagctagttattgatgtctgtaaagatttcttcccacaactatctgttggattcaaagatccccgtgttcaacttcatgttggtgacgctgtggatttcttgagaaatgcccctgaagggaaatatgatgctatcattgttgattcatctgacccaattgggccagctcaggagcttgtggagaagcccttttttcagacaattgctagagctctaaagcctggtggagttctatgcaatcaagctgagagtatgtggctgcacacacatctaattcaagatatgctttctatctgtcgtgaaacattcaagggagctgtgcattatgcctggacaagcgttcctacctatcctagtggtgtcattggttttttgctatgtgcgaaagaaggtccagcagtgaacttcctttctcctgtgaatccaattgagaaactggaaggagctatggaagctggaagggaaatcagattttacaattcagaggttcatcgggctgcttttgttctgccaacatttgtaaggagagaactggaatcacacaatacttgtgctgaaaaggataaatcagaaaccaagccagtcgcgaaaccaaagaagatgaaaataatgccgaatagtgccattccgactgcttcctagattcgggcggccatatgcgacaaccatgttcgacgtccttagctacagtatatgccaactataagaggagaatgtcgctgtaactcttctgtcttaagtatggtatgttatgcctgactgaataaaagggaggaacagatgagatgtgaaccaaaataatgttcttcctgatccgtgagcactgttgtagtgttgcctgttgtacaaatgtatattgtcacagcactgatgtgtttattatatggatgtggagtgaatcgcatggataatgtgcctttttatcccctaaaaaaaaaaaaaaaaaaagatcaagcgctccaaaaaaaaaaaaaaaaaaccaatcctgcagcccgg

SEQ ID NO: 94706 - DNA, 592 bp, Oryza sativa
  Clone ID: PAT_MRT4530_92970C.1
tcatcttctcgtcgtcctcgtctcaacggcagcaccagcacggcagtacgaaggcaggcgcggatggcagcacggcagcacggtggcggatggcagcacggcaccggcgacggtcgtgccagcgtccgctccccgcgcccctccgtgacctcctcgccgacttcctctctctccaccaccgttgcagccgtcgtcgttgaccatctccgcggtggacccaccgccctcgccgtcgtcgaccttatctgcgcgggagagctcgggagtcgccgccgccattgctgtcctcgtcgtggtcgtcgacgagccgcaccgcctccgcccagatctggcgaggagggccgctcgtcgttgctgccgatggaggaggcgtcgaccctcgagctccgccgccgttggccccaagctttgtcactggtgctgccgacgcccatctcctctctccacacgaccatcctcggcagcagctgcgccccctccgcgacctccccgcgaagcgtcctcgtcggcggcggcggcggcctcgctcgcgaccgtcctcgccggtagcagctacgcccgcgcccgccttcacggccatcctcggcagtag

SEQ ID NO: 94707 - DNA, 1821 bp, Oryza sativa
  Clone ID: PAT_MRT4530_92971C.1
atgggatgcatcctcggtaagctcgccgccgcgccaggctcctccctcttcttccccgcggccgccgctgcctccggcgccggaggaggaggaggagcgggcgaggtgcagctcgcggcgccgcagccggagaagatcgcggcggtgcagaaggacgagagcgggtggccgctctggctctcctccgccgccggcgacgcgctcgccggctgggccccacgcagcgccgacgccttccacaaacttgagaagagaaaagattcaaatgtgcagatagggtcggggacgtacagcaacgtgtacaaggcgaaggaggtggagagcgggcgggtggtggcgctgaagaaggtgagggtggatggcgtgggcgaggcggagagcgcgcggttcatggcgcgggagatcgccctcctccgccgcctcggcgaccaccccaacatcgtccgcctccgcggcctcgtcacctcccgcctcgccaccgcaccttccctctacctcgtcttcgactacatggaccacgacctcaccggcctcgccgccgccgccctcgccgccgaccaacgcttctccttaccccagcatgcttatggtaatagaaacctagaacagatcagaccccctttgattgaaaggaaaatggtaaagtgctacatgaaacagctactgactgggattgaacactgccacaacaagggtgttctgcaccgagacatcaagagttccaacctccttgtcagtaacgatggaatcctcaagatagctgattttgggctcgccacttcttttgatcctgataacaaggagcagcccatgactagccaagtgatcacactttggtatcgtccacctgaactcttgttaggtgctactcactatggcgtcggtgttgatctctggagtgtgggttgcatactagcagaattgcttctcggcgagcctatattcccagggagaacagaggttttacataaatatttcagagaactgcatgatttagagatgaaactcttggttatccaggtggagcaattgcacaaaatcttcaagttatgcggctctccgtcagacgattactgggagaaaatgaagttcccacatgcttcattcaggacatatgagcgatgcatcgcggagaaatttaaagatgtggcaccatctgcactatcacttcttgagactctcctgtctattgatcctgacatgagaggcacagcaactgatgctctcaacagtgagttcttcaggacagaaccatatgcctgtgaaccatcaagccttccccggtatccaccatgtaaagaaatagatgtgaagttgaagtatgagaagcataaaaggaaactgagggctaatggttcagtagaacgtcagaccacagcaagaaagcccatgtcacaaaatcctgggcgcagagtatttactccagatgtcaataataagcctcaagctaaaccaaatatcccaagattggtgacaagcacaagcacaacaaaactcgagaggtttcctccgcctcacctagatgcgtcaatcgggtttagtctcgattcatcggctgatgtttccacggaacagttcttcacatcatcagttgtggagctaaagaagatgcctagcctaatatttggccacatgaagtcttacctgaatagtccaaagaagaacacacacaaggcaaagccaggcctcagtatgccaccttccgctgttctcattggcgctttcaagccatattcgcttgggcatccaatggaggtgagaaggaagaacagggatcagttcagaaccaaaggaagaaattcagtaggtgcagtcaaatga

SEQ ID NO: 94708 - DNA, 226 bp, Oryza sativa
  unsure (1)..(226): unsure at all n locations
  Clone ID: PAT_MRT4530_92972C.1
caaagaccgggaccccccggnaaancggagntgncaattttgtttcncaaancagctcagaatttgcaacntcncaatcgcgattggnggccccccctttccccctttcttgcaanctgtaaattgtaaatagatccnggtgtatcaatgcaanagtgagctttttttccccaaaaaaaaaaaaaaaaaaaaaaaaaaaaaaaaaaaaaaaaaaaaaaaaaaaaaa

SEQ ID NO: 94709 - DNA, 164 bp, Oryza sativa
  unsure (1)..(164): unsure at all n locations
  Clone ID: PAT_MRT4530_92973C.1
tacctacatttcaatactttcaccagcaagccttttcctctaccatataacacttcctcgagtgttggctatatgggtgaactggaattcangactcctantatcttataagatgttatacaattcatcttcttaaaccttgtgattctttcataacatttttc

SEQ ID NO: 94710 - DNA, 3140 bp, Oryza sativa
  Clone ID: PAT_MRT4530_92974C.1
atggctgctgcagcgacggcggcggcctcgccggatgtggggacctgggggggggatggcgagggcggaggtcggcggcggtggtggtgagaggagtgctgctcccgcggatgtatcccggaaccccgaagcccaaggccaggggggaggcgtgggggaggacgcgctgttcacggagctgtggagcgcgtgcgcggggccgctggtgacggtgccgagggttggggagaaggtgttctacttcccgcaggggcacatcgagcaggtggaggcctcgaccaaccaggtaggcgagcagcggatgcagttgtacaatctcccatggaagatcctgtgtgaggttatgaacgttgagctgaaggccgagccagacaccgacgaggtttatgctcagctcactctgcttcctgaattgaagcaacaagaagataacggctctactgaggaggaggtgccttctgctccagcagctgggcatgttaggccacgggtgcactcattctgcaagacattgaccgcctcggacacgagcacacatggcggcttctcggtgctgcgacgccacgcggacgaatgcctcccaccactggatatgagccgtcagcctccaacacaagagctggtggccaaggatctgcacggtgtggaatggcgctttcgtcacatattcagaggtcaaccacgaagacaccttttgcagagtggctggagtgtgtttgttagtgccaaacggcttgttgctggggatgcctttatctttctcagaggtgagaacggggaactgcgtgttggagtcaggcgtgcaatgaggcagcaaactaatgttccatcttcagtgatatcaagccacagcatgcatcttggggttcttgccacagcatggcatgctgttaacacagggaccatgttcactgtctactacaagcctaggacaagtccagccgagtttgtggtcccttacgatcgctatatggaatcactgaaacgaaattactccattgggatgagatttaagatgaggtttgaaggtgaagaggctccagagcaaagattcactgggactattgtcggaatgggggattctgatccagctggctggcctgaatcaaaatggcgctcccttaaggtgagatgggatgaagcttcttccatacctcgccctgaaagagtttctccctggcaaatagaacctgctgtaagccctcctcctgtcaacccactaccagttccaagaaccaagaggcttcgtccgaatgctaccgctttgccggctgactcttctgctatagcaaaagaagctgctacgaaagttgtggtcgagtctgaaccaaatggtacgcaaaggaccttccagacacaagagaatgcaaccccaaaaagtggtttcggcaatagcagcgagttagaaagtgctcagaaatcaatcatgcgtccatctggatttgatcgtgagaaaaataacactcccatacagtggaagctaggttcagatggttggatgcagatgagcaagcctgagagttacagtgagatgctatctggatttcagccacctaaagatgtacaaaccccacagggtttctgttctttacctgagcagattactgcaggccattctaacttctggcacacagtaaatgctcagtatcaagatcaacagagcaatcacaatatgttccccagctcatggtccttcatgcctccaaatactcgccttggattaaacaaacagaactattcaatgattcaggaagctggtgtgttgtctcaaaggcctggaaatacaaagtttgggaatggagtttatgctgcactgccaggccgaggtactgagcaatactcagggggttggtttggccatatgatgccaaattcccacatggatgatacacagccacgcctgatcaagcctaaacctctggttgttgcccatggtgatgttcagaaagctaaaggtgcttcatgcaaactatttggaattcaccttgacagcccagcgaaatctgaacctttgaaatctccatcaagtgttgtatatgatgggacgccacaaacaccaggtgctactgaatggcgccgaccagatgtaactgaagtagagaaatgttctgatccttctaaggccatgaagccacttgatactccgcaaccagactctgttcctgagaagccttcttctcagcaagcttcacgaaacatgtcgtgcaaatcacaaggtgtatcaactagaagctgcaagaaggtccacaagcaaggcattgcacttggcaggtctgtggaccttacaaagtttaatggctatgaagagttgattgctgagctggatgacatgtttgatttcaacggtgaactgaagggtcctaagaaggagtggatggttgtctacactgacaacgaaggtgacatgatgctagttggggatgatccctggattgaattctgcgacatggttcacaagatcttcatctacacaagagaagaggtccagcggatgaatccaggaaccctgaactcaagatcagaagatagtcatgctaattcaatggaaaggggctcagtcggcagagaaatgcgaggctgcttgtcaacctcgtctcttaattctgagaactgctaatgctttcccatctggtaacgtcttttgaagtaacatgggagacaagaacgcgatgcatcgttataagaaaatgcatttcgtagtggagttaatgctttttttccccctttgatgtattggataagcccaaagtaccctatttgtagatggtgcttgtccttggtggtcaagttgcactcttatttgctgcagttttggttttctattttggtgaggtaagttgtcagccgccagtcctaccatataaatgttggtatgcgtagaaaagtaagctcagccctcccaccctgcacttcctctctctcagcactaagctgccacctccttgtaaatagcccctgtttaattgagtctaatatattatctaccttaactgacaaaaaataaataaatcttgctaaattatagcagtagcctggtaagattattgtagcccctgcggtaatcggtctgcccctctagaaggcaaggcaatttgaccctaaaatgttgccattttaaaaaaaaaaaaaaaaaaaaaaaa

SEQ ID NO: 94711 - DNA, 1097 bp, Oryza sativa
  Clone ID: PAT_MRT4530_92975C.1
atggctcctctccctgtgccctgcctcgccttgcagcagcagcagcacggcccggaatcagtgaagacgacactgttcaacatcttcgagggacaggacatcgcctgcgacatcgatgccctgacgaacaacagcagcaaattctgggtgacgccgcagggttggatcctagttcacgacaaaacttcgctgtccaccttcatgttcagccctctgaatcctgacgagaaggttcagatgccacatctacctgacgacttaccaagaaccagctcctgcttgctctcggacaagcctactcttcctggctgcattgttctccttgtcgagcccaatgccaatgtcatctggcactgtggcgtcgacggcaagaagtgggcgagacacgagtacgacattggaacgcagctcttggatccagtcagtgacctgcacgagaaggtgccgatatgcccgatcgccgcttgccggggcaagttctacttcaacagcgagagcctcaccgacatcggtgtgctcagagttctcccccacgccggcgttcagctcgctcgagctcggtggagagctcgaggctgcgaacagggcgaaggtgttcttggtgggatccgaggaggagctctacatgttatctgctactacacgatatccctgagacagattttgttggaaaggaaaatgttcagtgtttcaggaatccctgagacaaattttgttggaaaggaaatgttcagtgtttcaggaatccctgagacagattttcacactgataattttagttcagagattgttctgaaccaggaacttcatgaattggacatgtttcctgtaaaacgtatccccaccatcatcatcatcatcatcgtttagccttgcctgcatgattctagctgcagatggagtgttgtcggagatttacccgtatgaggtctcagagcctgtaaaacgtatgaaacaccctctcccaaactcttatattgtggtattaatatggattactgggtgtggattgtcctacatgttttttgtcgctttgcctctcgttgtctcgtgtcattctggaacattatgctagctggaatcaccttatggccccc

SEQ ID NO: 94712 - DNA, 549 bp, Oryza sativa
  Clone ID: PAT_MRT4530_92976C.1
atggtgccttctgctccactccgcaaagagcatcttcatggcgctgcagccgctaccagggagcttgaggccctctccggcgccgcctctgcctgcggttcccaccccctcgccgcatgccgccgcatctgcacgtcgtggcgcgcggccatcgacgaccgcctccgcgaggacctcctcccgctctccctcgccggcatcttcctcaacctccacgacctcttctaccccacgcagttcttctcctgccccaccaccacgccacccggcggcggcggcggcgccgtctccggcaacgtcgactacacgaggcgcaggtccaccttgcccgactgccacatgccctcgatcaacatcaccgaccactgcaacggcctcgtgctggtcaacaactgcgtgacctacccggcgacacggcggtgggagcggctgccagactgccagttgccacgccgccacccgcgccacgtcgcgagcacggcctccgccaggttcgccgccgtccgcgagcacctcgtgttcgaccccgccgtgtcaccgcgcggctag

SEQ ID NO: 94713 - DNA, 148 bp, Oryza sativa
  Clone ID: PAT_MRT4530_92977C.1
ccctcatttcgtcttctaccaccacaagcgcccccctccaaccaggcggacaccgccctcccactacgcgaacacccgcaacaacgcaccgtcggccgacgccctacgcgcaacacacgcaagggaagcacacacagaacctgtataa

SEQ ID NO: 94714 - DNA, 2235 bp, Oryza sativa
  Clone ID: PAT_MRT4530_92978C.1
atggcacaagcagaaaagcagcgctggtgcaagctctgcaacaagagcttcccttcatattgttcacttggaggccacatgaacctccacagcaccaggcgcaggaagaagaagccgccgccgagcccgagaaaggctccaccgatcactggtgcctccggcagcaggtacgatttccgggagcggtgccgccagaggccggtggcgccgcagagccagccggatcacgcctccagcgacgacgagccatggacgctggcccccaaggccgaatgccagctgtgcttcaaggctttccactcctgcgacgcgctgtcgatgcacatgaaggcgcatggccaccatgggaggaagatggtgatggtggagcagagggcatcgagaaagacttcttctgctaatttctgcggtgttgatgatggtgaccatggttttgctgctgtatcttatgctcactgtaagagagcgaggtcgaagaggatccgcatggacgttttccctgccccggtagtggtggtgacacatgggacacaggtggaggatgctgcctgcattcttgtgatgctttcaaaagatgcttacaagggctcagattctctggatgaagatcctcagatggatggaagcttggaatgcggtccgcagaagactgagatggagccgagttcttatcgtcttggtgtaactggtgatactgagctgataaagccagaaaattcaagttcttatgaggagatcaagtttggcagtctttcaaatgtgttgaaggcaacagctatccatgagtgcaggctctgcggcaaggtcttggcatctggatctgcattgggaggccacatgaagtcccacagtgttcctgctcataaaaaggttgcaacatttcccaaaacttctgtgactccatcaagaaaacagctgcttgaagtgcaaaatgagttgcatgaactcaaccttccagctctcagtaacagggactgcagcagtacaaggacagagtctgaactgaacccatggtgggttgcaagcagcattcagattttacttcttcaatacttaaatgtcatgagaagtattaaaatgaaacatgacaagttatgggatcttacaaattttccggttaagctaccaaaagatcacagggaaacacctccatccagcatgcctcatggcagcgacggtgcccgctggcggcccgtcccgcacgaagcgcctcccctcccactgcctcgtctccgacgagaagacggacaagaaaaacggcgacggtggccattccgatccatcgctcgtggggtaaaactcatcgtccctgcgcctgcgcctgcgctcgcgctcgcgaggggcaacgtgctcgcggacggcggcgaacctggcggaggccgtgctcgcgacgtggcgcgggtggcggcgtggcaactggcagtctggcagccgctcccaccgccgtgtcgccgggtaggtcacgcagttgttgaccagcacgaggccgttgcagtggtcggtgatgttgatcgagggcatgtggcagtcgggcaaggtggacctgcgcctcgtgtagtcgacgttgccggagacggcgccgccgccgccgccgggtggcgtggtggtggggcaggagaagaactgcgtggggtagaagaggtcgtggaggttgaggaagatgccggcgagggagagcgggaggaggtcctcgcggaggcggtcgtcgatggccgcgcgccacgacgtgcagatgcggcggcatgcggcgaggctgcccagtgggaccgtgggagtcgccggaggacctccgcgatcatgtcgtcggttggcatgcaagaaacaagggatatccattcgagagatgaaatcactttcgcagaggatccaatctcgtggaagcccaaactcgtcatcgccgccgtcgcgaggaggagacaggtggagacacgagaaggaggcttacgggtgggaaccgcaggcagaggcggcgccggagagggcctcaagctccctggtagcggctgcagcgccatgaagatgctctttgcggagtggagcagaaggcaccatcgctggagagggctccgagatcgccggcagtggcagagccacacgaggggtaggctttgtggatgctgtgccgtgagcaggcttcgtgcgaggttgagcggaatgcgtcgtggccggagagagctccaagctagccggcagtggcagcaccgccgtggggaggctggacatgagacggggtga

SEQ ID NO: 94715 - DNA, 336 bp, Oryza sativa
  Clone ID: PAT_MRT4530_92979C.1
agaaaaacacagggggtaaatcgaaaatttcaaatgaaccaatagaggggtacaatttttattgttaggaaactggataaaagctgtgcgaaaaaagaaaaacaaacttctttcagatgaaaaaatttaatcccttaaaattacaaaaaaaaaaaccgccggaaaaaaaaaatgaaaaaacgaggggtcaaaagggggagcctaaaaaaaaattatcgagggggaaaaacttgcgctttttcagaaaaaaaaaaatggccaaccctaggaaaaaaaaattttcaaaattggggggaaggggggttattttttttaccaacgagggggttttttttt

SEQ ID NO: 94716 - DNA, 177 bp, Oryza sativa
  Clone ID: PAT_MRT4530_9297C.1
ggggaaggctaaggagatcactgatgaaccgataatcatgaggaagagcataggtaggtgagctggattaactaggagaccacagaacctacaccaaggggacgcagccattctggcgtggggactacggacaacaatccaagctgctattagccaaaacttaaagaacgggcggaa

SEQ ID NO: 94717 - DNA, 204 bp, Oryza sativa
  Clone ID: PAT_MRT4530_92980C.1
atgacgactccgccccactgcgtcgcctccaactccgcccctctccctccgcccgtcgccgcctctttctccctccgcacaatgagagccactgtccaatcctcgtcgttctgccacggcatctccgacgccgcgctctccgccaacttgtcggtgcctgtcccgctctacaacgcctccaccggctgcctctcccccatctaa

SEQ ID NO: 94718 - DNA, 2982 bp, Oryza sativa
  Clone ID: PAT_MRT4530_92981C.1
tcaaccacgtgcattattctttaggctaagtgtcccgcatgatatcctgattgtccgaatgtcatcttctcccaagttgactcctgatccatcaccggcaacgctctcccgaagtatcaagacatcacatcggtctaattggcctattcgacccgctctaaccggctccatacaaagagaaacaccacttctcttgtcaaaattagtcataccaaaatttggcaatgacaaaatttggtaaggccttcctcttctggtgaaaggctgctttactgtcgtcaacttctgacactcatatatgtacaccgtctttatttttgagattggcttcaccgcaccgattgaaactagatctgggcaatcagcaatgtgcaattccttgagtgaggcgagattgcttctccacatttggtttggaaaggattctataccgtgacacttaatcattgtcagttcaacgaggcaggtgaggctttcaccgggcagggacagtaacccagtacaagaataaattttaataatctcaatggcgggcagatgttctttcttcaggaggccatcgagggttggcaatctgtggcagcattcaatgattaggacagtaaggaatgagaatgctccattgaggggatacgattctccaataaatgtgagagattcacactcgattatgtttaacttttgtagagatggaaggttaccactcaagagttgtatgggaatggctgtcacgtgcacacatttaaaggacaaggaggtgagggaggagcactcaatattgctgagaagaataccggaattacgcaactccagattcttgagggttggcactgataagcttcctgaattatggaaaagtttcgggcaattagacacagtaaaatctccaaggcaactaaattcaccaaacctttcagtttgcagtgatgttacgtttgcacactctcttatacttattctctcaaggaccggcatgtaatctgcctgtaggaagtggtcgaggcttgataacttttcacaggaagaaattgctaggtcggtcagggatgggaaaacagaaatgctgccgttattgctccagcatggaagagattcacctccataaccagcgacttctagacatttcagattggtgggaggttgcaggacttgaagcactatttcattgtccttacatgaactgaacaaccaattcagggtcagtcttctgagatctttcttgtttttaagatcaatttcaattgcaagatccttactaaatcccctaggatatatgtccaaatccccacagaattggttcaaattcttcatcaatctaacatttcgatcgttacctgcaacaggcagtaggttcttcattcgatagtatgcaaatcccactgattcatatgtctgtaggttgattaacttactgaagtcacttggcaagctttctagcgcgcattttgtagcataaagaaaaaggtcttcaaagtaccgatggccaatgtctagaattggaaagccaccatcagattccacaaagccttctgctacccaaatttcagctaaaatgttcttttcaaatttatgatctttcgggtacacagcacagaatgagaagcatctcttcaaatggaatggtaagtacatgtaactcaatctaagggcgggcaaaatgtcagtttcctcttgtttcaaatcccacagttcactcaatagtatattattccagtatggaatttgaaggttcatccttaacaggcgtccaagtgttttggctgctaaaggagaacccttcaacttaggaagtattcctctaccaatgtcctctagatcaggatcattgttagaactctgagacccaaaagcacacagtttgaagaaatcccagaatatgtcatcctttaaaccatccaatgtaaatgggtccattgtgctcactccatcagcaacttttgaagatctggtggtgaccaaaaccatacttccctgtagcccattttctaaaggtaaacaaagcctctcccaacactgcccattctccttcaaggcatcatcccagacgtcatcaagtataattaagaaccttttgttgttcacaatgttagaaagaccaagttgcagacaattcaaattatcagtagttgcctcttttcctgaagaggattgtattgcctctttaattaaccttgttgcatcaaaatcgtctgagacgcatgtccaaattattaggtcgaaatgggacttcacttgtggatgattgcatatatgttgagccaaagtggtctttccaacacccccaattccaacaattggcaacacagaaaaacatgatattcttgacttttctgatgtgctcattgatgcatcagccgtgctactatttctcttacgcttgtaacaggccctggtgagatttatcggtacaccgagcaattccataactttcttcagttccttgtcacgaccaaatatttttctctcatttgggaaagagctagtctctggcctaagtgatttgtcaaatcgttggggaatttcatgcaatcccatcctctccaactgacttgaaatattatccagcctttccatgatatcattcactttattgaagcttccttgaatcatattattgaagaagtccataaaaggagattggtttgcattactttccagtgctaccttttgttcataccatctaaactcatcaagaaggtcatcagcattgtacactgcatcctttatatttggaaggagattggccacacagtgtttatggatcctccactctgctcgatcaatgagatcataatttgcaggaagagtatccctaagacgttgaaggctactctgcaactgcaataattcaccctgaagcttttgctgctgttttccactccatcgagagtggagagtggaaagagcagatgtagcccattgaaataaatttacacactcattgatgccactaatgaacccaatggtcttggataagctcat

SEQ ID NO: 94719 - DNA, 174 bp, Oryza sativa
  Clone ID: PAT_MRT4530_92982C.1
tctttacctggtcgcggtcccaggtcatcacgttaatgttcgccgtttctgggggcgacgagtagagtgatggcgccagggacggacaaggagagaagagagaatgagcttcttctgggtaattgcctctggagaatctgtgctctggtcgactgatccagccaagacatgggg

SEQ ID NO: 94720 - DNA, 792 bp, Oryza sativa
  Clone ID: PAT_MRT4530_92983C.1
atggtgtgggccccacatatctccttctttctcttttttctcctatcttctctccttctctccggcgcagctttagatgggggagaggcagccggtggaggcgttgtagagcgggacaggcaccgacaagttggcggagagcgcggcgtcggagatgccgtggcagaacgacgaggattggacagtggctgtggcggcggcggcgtagcaggaggagtggccaagagagtcgtccaggcacggctccacgtccacggatgtcagcgccgagcgcgagcacgtgtacgcgggtcaacatccatgggcgcgccgctgcccatggcatccgccggtccctcccccctcccctccccctccagctcagctcgcacgcacctctcattgtgcggagggagaaagaggcggcgacgggcggagggagaggggcggagttggaggcgacgcagtggggcggagtcgtcatggcacgtgggtgtagagtcggcaacgccgatgaccggcgccgctgtcaagcctgacaacgcgctgctcgcgaaccacctgctcacaacaccgacgacgaggatgcgtcggatggctggtatcccgacgaccccaccatcaccgacatggctgtgcatcggcgagcagctcctctcatcagcgagcctcctaccccgccgcgccgccgcttcggtcgacgccgacccgcgccgttgcctccctcagttccgcaaggatgaggaggacctcggccgccgcccctcttcgccggaaatccgccggagctcctccttcctcggtcgccggtga

SEQ ID NO: 94721 - DNA, 126 bp, Oryza sativa
  Clone ID: PAT_MRT4530_92984C.1
ctctatccgcataccctgctccttcaccccctgtgggccactttaataaccgggggcggttctaaaactccctgcctccgaatgcatggaccacagtaccaaccttcatgcggcgatagaatcgct

SEQ ID NO: 94722 - DNA, 1407 bp, Oryza sativa
  Clone ID: PAT_MRT4530_92985C.1
atggttcagatcgagccgctcgaggtgtcactggaggccggcaaccaggcggactcggcgttgctcgacgacgacgggcggccgcgccgcaccggcacgttctggacggcgagcgcgcacatcatcaccgccgtgatcgggtccggggtgctgtcgctgccgtgggcgacggcgcagctcgggtgggtcggcgggcccgccgtgatggtggtgttcggcggcgtcacctacttcaccgccacgctccaggccgagtgctaccgcaccggcgacgaggagaccggcgcccgcaactacacctacatcggcgccgtccgcgccatcctcggcggcgccaacgccaagctctgcggcatcatccagtacgccaacctcgtcggcaccgccgtcggctacaccatcgccgcctccatcagcatgcaggccatcaagagggcgggctgcttccacgccaatggccacaacgtcccgtgccacatctcgagcaccccgtacatgctcatcttcggcgccttcgagatcgtcttctcgcagatccccgacttccacgagatctggtggctgtccatcgtcgccgccgtcatgtccttcacctactccggcgtcggcctcggcctcggcatcgcccagaccgtcgccgacggcgggttccgcggcacgatcgccggcgtcaccaacgtcaccgccacgcagaaggcgtggcggtcgctgcaggcgctgggcaacatcgccttcgcgttcgccttctccaacgtgtacaccgagatccaggacacgatcaaggcgccgccgccgtcggaggcgaaggtgatgaagcaggcgtcgctgctgagcatcgtggcgacgtcggtgttctacgcgctgtgcgggtggatgggctacgcggcgttcggcaacgcggcgccggacaacctcctcaccggattcggcttcttcgagccgttctggctcgtcgacgccgccaacgtcgccatcgccgtgcacctcatcggcgcctaccaggtgtactgccagccggtcttcgccttcgtcgagcgcaaggcgtcgcgccggtggcccgacagcggcttcgtcaacagcgagctccgggtgtggcccttcgccatcagcgcgttccggctggcgtggcgctcggtgttcgtctgcttcaccaccgtggtcgccatggcgctgcccttcttcggcgtcatcgtcggcctcctcggtgccatctccttctggccgctcaccgtctacctccccacggagatgtacatcgcgcagcgcggcgtgcggcgcggcagcgcactgtggatcgggctcagggcgctcgccgtcgccggcttcgtcgtgtcggccgccgccaccacgggcgccgtcgccaacttcgtcggcgacttcatgaaattccgtcccttcagtggatag

SEQ ID NO: 94723 - DNA, 2951 bp, Oryza sativa
  Clone ID: PAT_MRT4530_92986C.1
atgggaagtagaggcacgacaactcacgggagccgcgcgcgctcaaaccctagaactccacgcacgcgacgcgagctccaatcccacccggtgttccccccgtccccctgattcgcctgcaaccaccactcccctctccaatctaatcctcttccggctgtgccgtcctcctgctccgcttcccttttttccgcgagattttgttgctgtttgggggagaaactttttttgggtgctttttttgttctttggttgtgttgtttcaggagcgcgcgtgtccttggaggattcgcggcggctgggttttgtcgcttccgtgaagggtcgtgcccctcccgtctccgacgtccgatctctgtgcgccggggttgtcagctacaatgtcatcataccctgtgctaaacaacagacctattgatcaatggtgagttactgatctgaaggatgaacttcgtaagaggaggctccctgttaaaggcttgaaagatgaacttgtgaggcgactcttcgagtcaattcagagtgaaaaaaaagcaggaagctacaccgcctatcactgaagtaagtcagtcgctcacagtttcagctgccgaggagccccccaaggttaacgcggtggcaacccatgaagctcccttaagcaaggccccaacagacaaaggagaagagccaccaattgcaggagatgtttccacagtggaaaacgaacatcttcatgctgaaaataatactgaaccttttgttgagaagacacaagatgttggcaccaacgaagcaattggtgcccttgatatgaccagtgctgatgtagagtcagacatgacctcttctgatatcaagatagatgctactgaagccagcaaagttcaacaacatgacacagtagcaacaactgtggatgccatcccaacagatgctgatcctatggatactgatgttgcaactgagaaggcggttcttaatgatttgggtgacactacttcagtgtatgatgaagagcgcaaagattctgagctcacgaatgaggacgagaagcccatcgcaccaaaaccaaatgatcaggtacctgaggttagcccagatttagggtctccaattaagtgtgagtcaatttctagcgatgatatatcaactaacaaaaagaataatatagaggataatttgaatgctaataattttgatttagaactagaggctaagccagagatggtaaaaccatcttctggcattacttccataggtggagatttgcagccattggatgatgacaaagatctgggtaaaaaccagtcatctttggaatacatagattccacagctaatgtggatgaaggcggctctccagagaaactaaatttagacaggagttcaggtgatgagtcaatggaggaggatgtcatggagattaagcaagttgagtccaacattaaatctgaaggaacagctgagcttagctcagatcatgtgaaagaggtgtccctccctgatactgttgtggacaattcctctgttgacacgaaagaagttatagctgatgaaaagacagcagcttcaactgaaaagaggaaactcgaagctgaagaaactgttgctgccactgagccaatcaaacgccagcgtcgatgggctgcagatggtgccaaagttccagagagacaaccaataagtcatagtggctctgatgctcctaaggaaaattttcagcctgctttaaaacgatcttttggcaggtctgattcaacagctagtggagattccccaaaggagcgggttgtgccaccatctcagaaacctgcaacagcttccttgagaattgatcgatttgtaaggccatttacgctgaaggctgtgcaagaacttcttggtaaaactggatctctttgtagtttctggatggatcacatcaagacccactgctatgttacgccctttttgttaattagcattaccaaaatgtgttcaatcatgggtataatggatcatttcgacatgggaattcttaacatggacccagtgatagatcatcttgagatgttttcatcagtagaggaagctgtggctactcgggatgctgtctacgatttgcagtggccaccaaacaacggcaatcgtttggttgctgaatttgttgatccccaggaagtgaagctcaaacttgaacctcctccgccagcggcggctcctattagccctgctactacaccaaaggagccaccctttcaacaggctcaggctaatcaaaacatgcctcgtcaagccgctgcaccaagggagcacttgccacctccaccgcctcttactacgcttcctacatctgactcaggatcagcaaaggagaggcttccacccaccccaaagaaacagccggaacctcctgttgtgacactcgatgatctcttcaggaagacacattcttctcctaggatttattaccttcctttatcagaagaggaagtggcagccaagcttgcttcacagggcaaaggcaagagagaatgaggagctgtagcctctttttttcttgtcgctagtatgggggcatgtggaggtatgtagtggttacatacttgcatgtgtacgctgcaggttgtagggctgagagcctgagatctttcttcctaactttccaggaaaaatggtgtattacagctcagcagctggctcttgcagttcatttgaaataacaggaggcggcgactgctgttaggtattttgctgcaagagagagtagctgtaggctagtgtagaagcagcaaatgtattttctacagaaggaatgttttttgttctatcactgtctagtgtgttgcgtctaactcttgttacttggaacgtctgacgtctgagattatggttggtttaaacaatcgggtatggttgcgacttgtgactcctgttataatttaattgcgaggatatttattgtcacattggccaaaaaaaaaaaaaaa

SEQ ID NO: 94724 - DNA, 414 bp, Oryza sativa
  Clone ID: PAT_MRT4530_92987C.1
atggcggcgttagagggaggagcagcgggcggtgccggcggcaatcgttcgccgccaccgccaacaccggggcagcaggaggaggcgtcgtcgtcgtcgaagaactcgaaggtggccgggtggagcaaggaggaggacgacccgatcatcggtggcggcggcggggagaaagaggaacctacgccgtcgccggtgtgcctcccgctgttccctctgacgccgggattccaccaccagaagcaggcacaggcaccggcacaggcaccgccgccgcttgcggttacgccgggattccctacgccggagttcctcattcttttccccctgactccgggcctccggggatgtgatctgaaggacaatgcggcggcgatggatgtggatagcgaagccgtccggcgctcactgagttga

SEQ ID NO: 94725 - DNA, 285 bp, Oryza sativa
  Clone ID: PAT_MRT4530_92988C.1
tcaatagacgaccacctcaatcaacacccaccacaatatacggaacaacagaagccaacatacaccaagacaagatgccggatatcgactttaaagataggcatgactagtcccctacggtgtctccggatactgtcaggagagacgaaagcgctatctccgatctcgccgggcacggattcgagaaggaaggctaccctgttatcgactacgagtcagatctttagaccgccatgtcgacaatagttagataggctaccccacatattgtactggtgtgattat

SEQ ID NO: 94726 - DNA, 609 bp, Oryza sativa
  Clone ID: PAT_MRT4530_92989C.1
atggaacaattaaagaagaaatctgaggagccaacatctggaacgcggagggtgaaggaggcgacggcggctcccgctaggagggggagggcggtggtggcggcgctccctcccaaatacggtggaggcagcgttggcacggagggtggaggtggcggcggctccgccgggaggggggagggtggtggcggcggcgattctcctccctcctccaagaactggcaggaaggggtagagggaagggcggtgacggcgcagagggtggaggaggcggcggcttactcccagatctggtggaggcggcgacggctccaggcggtggcggcttccttcccgggcgcgacttccctcccctccctccctccctcccgacggtggtggcgcggctccaggcgtgggcggaggacatgcgttggtggcgggggaaaacaacgaaactggttaggaggtggaggctggtggtggcggatctggcggtggggagccgccggagacggggaagacaacggggtggggacactcgacgtcgccaccttgtggaagagaagggggagggagaggaggctggccgagggagcctcgtctgcaccgttgacccctttcgactag

SEQ ID NO: 94727 - DNA, 504 bp, Oryza sativa
  unsure (1)..(504): unsure at all n locations
  Clone ID: PAT_MRT4530_9298C.1
cggacgcgtgggcggacgcgtgggtttctagatcgcgggcggccgctcgcgatctagaacggggaaatagctttcctgagagaagttgaattgataagcattgctgtgcacaagaacatattaagattgataggattctgcacgactacaaaagagcgactcttggtctacccttacatggagaatcttagtgttgcttcccgtttgagaggtaacagtaacataagaatatcactttagcatgttcctagaatatgcattcatgattcatcttcatttacaatgtcaattgaggtatattagttaaaacagtgccaggaaatagaaggaaatgtggtttctatgtcttgataaaaaggaagtataggcaattgaatcgttgaattatctacttctttaggcaggttactaccaaanaaataggtccttttatgatgatacaaaccctaaaaatatctaatgcaatagtactggtgatgacacctatgcatgcagatatcaaac

SEQ ID NO: 94728 - DNA, 178 bp, Oryza sativa
  Clone ID: PAT_MRT4530_92990C.1
cccacgcgtccgccacagttagcgagcttgtcgttttcgtcggagaaccccacggggacggatcgttgtggcgggaaggaccgcctccactactacagcggcgaaaagaaggaaggaggcggtggattcatggagaatgtgaattgacttgatgcaccatattgttgtgtatatttag

SEQ ID NO: 94729 - DNA, 394 bp, Oryza sativa
  Clone ID: PAT_MRT4530_92991C.1
tttgtttttttattttttttgttttttttttttttttttttccacgaaatttaactttttgatgatagctaagaaccattaacaaaatttgaaagacatttaaaggaggggcacagggtggtgtaaacctcatttttggggccaaaattagagaacacggcccatggccctccccgggggcgcctaatcaggacccccaaaccaaacactggggtctggccattttgaacttataaaagttaaactttcctgggaaaacccgcttggctaaaccaccttgcctatggaaaaacccttatatttggaacaccttctttgccatgggtggccaaaacggggtcccgggaggagaacccccctgtgaccttgggggaacttttcgggcccgaagttc

SEQ ID NO: 94730 - DNA, 1058 bp, Oryza sativa
  Clone ID: PAT_MRT4530_92992C.1
cccacgcgtccgcccacgcgtccgggatcactgtataatcaaggagggtctggtgttctccagccttctccacctgcatcccttatcaatgatgcaactttagggacaaatcccgcatctggtggtgcacttgcttcaaattctttgccatcacttgcatcacaatatataattggtaggccttcaactcctccattttttggcactcctcttcaaatccaactctcatctggccttgcacagagtgtctctaatccccagccttctctttcctcaatgcaaccacgagcaccaccaccaccacctccacagccacatccatctcaaacattccaaggttctcttcgacaaccacaagagcagccaatgccatatccactaaatactattcagcctcaggtgccattgcagtttccgaaccagcttcatgttccacaactacaattttaccatcagactcagcaggagtctgtcttgcaaccgattgggcatgtgtctgaacaaccgattgggcagagtgcacaacagcagacggactctgggatgaatttaaatcattttttttcatctccagaagctattcagagtctgttgagtgatcgtgacaagctttgtaagcttttggagcagaaccccaaactcatgcagatgcttcaggatcgtattggccagctataactgaaatgggaggcgccggtgcgatgtgcctgcttgatcaccatgttgccaatgacaaattaagtcttctctttttctttgttcatatctgtgagctaggggcaaacatgatgaggtatttattgttgcgatccttggcaatgcgtgcaatatgtgtagtgttgctgtcagtttttgaccgatattaaattggttcataagctcatcctacatgggctatgtgtgttgagaatgaatgcttctaacaatcctttaaaatcacgagatgccactttatcagaaaaaaaaaaaaaaaaacaccagacgagacgaactctccgccgacctctcctcgtgccgtagaatccaagaatatgaactgaaaaaaaaaaaaaaaaaaa

SEQ ID NO: 94731 - DNA, 1250 bp, Oryza sativa
  Clone ID: PAT_MRT4530_92993C.1
ttctggaccattggatcattttgagatttgtgcaacatacctaagccctacatttcctcctccacatcacagtctgcccactgccacctccactttcacgcgtgtgaacgagcgcgagcgctcctctgcctcttgtgaagtcgctgtgccaccaccctgcctcgctggctagtcgaaaggggtcaacggtgcagacgaggctccctcggccagcctcctctccctcccccttctcttccacaaggtggcgacgtcgagtgtccccaccccgttgtcttccccgtctccggcggctccccaccgccagatccgccaccaccagcctccacctcctaaccagtttcgttgttttcccccgccaccaacgcatgtcctccgcccactgccaaccccgtggctccagcgccgcgtcgacacctcttcgcccgcccgtgtccaccacccacagccatcactctaagccatggggaaccctccccctctcctccaaccccaaaccctaatccacctctatctttgcagacatcgtatccacccgcctgcgaaaatactttggacgaataaaaaaaatatatcgccaccccacccctcgcccaacccacctccgggtgcgccgttgccatcacccctcccccctccgtccagatctagaagggagggaggggatccgccatcgggaaccgtcaccgcctggagccgcgccaccaccgtcgggagggagggagggaggggagggaagtcgcgcccgggaaggaagccgccaccgcctggagccgtcgccgcctccaccagatctgggagtaagccgccgcctcctccaccctctgcgccgtcaccgcccttccctctaccccttcctgccagttcttggaggagggaggagaatcgccgccgccaccaccctcccccctcccggcggagccgccgccacctccaccctccgtgccaacgctgcctccaccgtatttgggagggagctgccgcctcctctaccctccgcgccaccaccaccgccctcccctctccctcctcatgccagatatgggagggagggaggggaaccgccgccaccaccgccctccccctcctagcgggagccgccgtcgcctccttcaccctccgcgctgccaccgccctgcggtcggatcccgcgccgggagaggagaggtgagacaaagaatggcattttttcatgctctccccaacacgtacgtaaatttgataatacctcaacccaagaggctagagct

SEQ ID NO: 94732 - DNA, 1598 bp, Oryza sativa
  Clone ID: PAT_MRT4530_92994C.1
atgccgcacctcgtccgcgagcgcctcttcttcggcgacatcaacgacgccatcgccgcgctcaccaccaccaccgcggaagccggcggcttcacccacctcctctccgtcgtcagctccgccttcatctccttcatcaccgactgccgcccgggcctctccatccccaccgaggaggtccgccgcgtggtcgccggggaggagggcgcgccgccggtctccgccgtggcccccgggcggctgatgcgagtggtggagcgcgctggggtcgggctgcgggtcacgcggatggccgtgccgctgcgggacaccgaggaggagaacctgctcgatcacctcgagccgtgtcttgatttcatcgatgagggcaggaaggaggggaacgtccttgtccattgctttgctggggtctccaggagtgctaccatcatcgttgcttatcttatgagaacagaacaaaaatctctggaagaagcactagagtctcttaaggaagtcaatgagtcagcctgcccaaatgacggttttcttgagcagttgaaactgtttgaagaaatgggcttcaaagttgatacttcaagtcctctatacaagcgtttccgtttaaaattgctaggccaatcctacaaaattggagagaaaataggaagctatgtatttgaagatgatcctggtctttctggacagcctaattcttctactcagaatttaccaaacaagcaaacccaacaaccagcataccgctgcaaaaaatgcaggagaattattgctgtgcagggcaatgttgtgagccacactcctggtgagggtgaatcttgctttcagtggcaaaacaagagaaaaggagagcgatcatatagcaaagaacaagattgctcatcgttgtttgttgagcctctgaagtggatgactccagtggaagatggtgctttggaggggaagctatcgtgtatccactgcggagcacggctaggatatttcaactggtcaggaatccagtgcaactgtggcagttggatcaccccagccttccaaatttccaagagcaaagttgatattagtaccacttagggaggggaggatgccgctccgcgcttgcccgaccacgtggccgcggctgttcaccggtgtctccctggggtttacgaactcgaaggatctcgaccgaagattttcagatccattgtgcactagatagataccatgaagaaatattgcctcagaaacctccacttgtattgctacttgctgttagacgactatgccatcaattgtaattgttggttctgatgatctgagatgctaccaccacgcattgcatttttttttttcttggagtgaagaaaaatttataggcaggtaatattgtgatgctcttcagatatgagtagatctccgcactccaggtcttgcttcataatgctactcaactgcatcatcacatccttgtaaaattaccgaggaaactagatctgatgaatattgtttcttgaaactacctttatgtatctcttatcgtctcatactcatctggctataacatagtaaatgaaaaccactgtttggctcaagccatttaaaaaaaaaaaaaaaaaaaa

SEQ ID NO: 94733 - DNA, 308 bp, Oryza sativa
  unsure (1)..(308): unsure at all n locations
  Clone ID: PAT_MRT4530_92995C.1
aaataaggtcccagaccccnncnccangggaaacggggaggaggccacaaaaaagaacgaccccgcacgccccccgccaaaaacataccaaggaccacatccgcacccaaagacccaaacaaacccaagaaccacccccctgttacggcctgcacatcactaaacacactctctcgcccaggacaaccaccactgcaggagcagggactgcagcgcacccgggacgacacaccggacggcggcccccacccaaggagacccgacccggggggcccgaggccctgtcccaaagacccgacacagggggg

SEQ ID NO: 94734 - DNA, 659 bp, Oryza sativa
  Clone ID: PAT_MRT4530_92996C.1
cagaacctagtgatgttactttcttggccttgctatatgcttgcagccatagtggtctgaaagaggagggcatggattgctttgagcttatgactaagacttatggaatacaaccaagtgtgaaacactacacttgtgttgtggatcttcttgggcgatcaggttgtctggacgaagcagaggccctcatcttgtcaaggcctttaactcctgatggggtcatatggaagacattgttgtctgcttgtaagacccagaagaattttgacatggcagagcggatagcaaaacgtgtcattgagttggaccctcatgactctgcctcttatgttctgctatcaaatattcgagctaccagcaggagatggggagatgtcagtgaggtaagaaaagccatgagagataacaatgtgaggaaggagcctggtgtcagctgggtggagcttaagggtcacatacaccaattctgcactggagatgaatcgcatccaagacaaaaggagatcgatgaatgtttggaagagatgatggccaagattaggcagtgtgggtattcaccggacatgagcatggtgctccatgatatggaggatgaggagaaagaagttagtttgtctcaccacagtgagaagttggcaatagcatttgcttttctgagc

SEQ ID NO: 94735 - DNA, 1507 bp, Oryza sativa
  Clone ID: PAT_MRT4530_92997C.1
atgcctcacctcgtccgcgagcgcctcttcttcggcgacatcaacgacgccatcgccgcgctcaccaccaccgccgcggacaccggcggcttcacccacctcctctccgtcgtcagctccgcatccatctccttcatcaccgactgccgcccgggcctctccatccccaccgaggaggtccgccgcgtggtcgccggggaggagggcgcgccgccggtctccgccgtggcccccgggcggctgttgcgggtggtggagcgcgctggggtcgggctgcgggtcacgcggatggccgtgccgctgcgggacaccgaggaggagaacctgctcgatcacctcgagccgtgtcttgatttcatcgatgagggcaggaaggaggggaacgtccttgtccattgctttgctggggtctcaaggagtgctaccatcatcgttgcttatcttatgagaacagaacaaaaatctctggaagaagcactagagtctcttaaggaagtcaatgagtcagcctgcccaaatgacggttttcttgagcagttgaaactgtttgaagaaatgggcttcaaagttgatacttcaagtcctctatacaagcgtttccgtttaaaattgctaggccaatcctacaaaattggagagaaaataggaagctatgtatttgaagatgatcctggtctttctggacagcctaattcttctactcaggatttaccaaacaaacaaacccaacaaacagcataccgctgcaaaaaatgcaggagaattgttgctgtgcagggcaatgttgaggagggagaaaacccttccacgccgcacactctgtcacacgccggcgcgccggccagcggcggaactggcgacacccgccggcgaaggagcagcagcacaggaggtggacggcgcgccagcgaggtcgcccagccaacctctgcgtttagttgtcgactaatcgggaagaaggcgaggaggagaggagaggagaggagaggaaaggaggaggggaggatgccgcaccgcgcgcggccgatgacggggctgctgctgttcacgggagtcaacctggtgctcctcaacaccatcacccccgtctacgacttcgtctgcttccacccctactgggaacgcaggagaggacgtcgtcaaaaggagcgtgaagcactacaagccaatggttctctacaaactgctaaatgattttattcctagttgttttattacttggttagttcgatgaaaccctggattcttcattgatatggagtgaagaaaattttataggcaggtaatattgtgatgctcttcagatatgagtagatctccgcactccaggtcttgcttcataatgctactcaactgcatcatcacatccttgtaaaattaccgaggaaactagatctgatgaatattgtttcttgaaactacctttatgtatctcttatcgtctcatactcatctggctataacatagtaaatggaaacccctgtttggctcaacccttttattccg

SEQ ID NO: 94736 - DNA, 113 bp, Oryza sativa
  Clone ID: PAT_MRT4530_92998C.1
cgatccacccgtgcgatcatttttttttagtttgcagtctgtgctgatggctccaggactcgagaccctcatctggagatctctcctcctcctgtcctagccccgccgcttcg

SEQ ID NO: 94737 - DNA, 196 bp, Oryza sativa
  Clone ID: PAT_MRT4530_92999C.1
gggctgcaggaattcggcacgaggatcaatcagcgtcacaggatgtcgtgctcgtgccagcgtctctcgtcgggaggccgcggccgcgccgtccccgtcgccgacgcggccccgggcgagctggcggcgccggaggccatcaacctagtccccaacgggaagcgcggcatgccggtgctgatcacgccgtcgctac

SEQ ID NO: 94738 - DNA, 263 bp, Oryza sativa
  Clone ID: PAT_MRT4530_9299C.1
ctttagttgagagatgggcactcctcattctcggagggggatccatctcatgaagaggggctttatgtactccaagcctaaggggctacctagcgcttcactgacaaggaggccccacttgacagtcaaagccatacagtctcagaagccaacgtaccacatggtgcaacccatcaatggcgaccccttcatctgcagcctggagacacgcttgacctacagcccgctagtcgcctagtacctttccaacctgccggcgtacc

SEQ ID NO: 94739 - DNA, 891 bp, Oryza sativa
  Clone ID: PAT_MRT4530_929C.1
atggcttttcagctcggcaagctcgtgtgcactctcctcgccgcggtgctgtgcttgagctgcttcgctcgtgctcatcacttcgacgacgatgggtttgggcccggtgggttcggccatggccccaaggggttcggacgcggccctggctttggccatgactgccgctttggccggtgccatggcggtggcggagggtttggaggaggtggaggattcagaggcggaggcggtggtgggcttggtggaggtggcgggtttggcggcggaggtggcggcggactaggaggaggaggttgtgaaggcggtggctttggcggcggagtgggaggcggtagtggtgcaggaggtggccttggaggcggaggcggcggtggctttggaggaggtagcggcggaggggttggtggtggaggtggtcaaggcggtggtttcggagccggtggtggtgtcggcggtggaagtggtacgggaggcgggcttggcggtggaggcggtggtggttttggaggaggtggcggtggcgggattggtggtggaggtggcaagggaggagggtttggagctggtggtggtgtcggcggtgcagctggcggaggcggcggaatgggcagcggtggaggtggcgggtttggaggcggcgggggcaaaggtggagggtttggcgccggtggtgtcatgggaggtggtgctggcggtggcggaggccttggtggtggtggtggcggcggcatggtggaggtttcggtggtggagctggcggaggtgctggtcaaggcggcggcggcggtcttggcggaggcggtggcaccggaggcggcttgggtggtggtgccggaggtggcctcgagcacggcggcggccttggtgggggcggtggcttcggcatag

SEQ ID NO: 94740 - DNA, 825 bp, Oryza sativa
  Clone ID: PAT_MRT4530_92C.1
agtagagagaatgatggcttattatgggtatcttaatcaagtgcggattgatattattcatcaattacgtcatacacaagaaacgcttaaaacacggcgaactgaattaaaacagcaacaaaaagaacaacaagcgcaattaactatacaaaaaacacaagaaaaaacactaaaaaaagtacaaatggaacgggaaactaccttgcattcgctggataaaacattagcacaggagcaaaaccgtttagatgcattgaaaaataatgaaattgcgttacgagctcagttagccaaagcgatggaagacgctaaacgagaagataaattacaacaagcacgaaaacaaaaagaacaacagcaagaaacagaaaaacaatcaacagcaaaagtagtagagcaacctaaaatacctgagaaattgattaaaacggtacaaggtttaggtatgccaaataaacaatttaatatgcctgtcgttggtaaagtatcaatagatttggtaccactcaaatgggagagttaacttggcgaggcacagtgattgaggctaaccaaggctcgccagtacacgcaattgcaggagggcgtgtggtgttagcagattggttacaagggtatggacaagtcgtggtcattgatcatggtaaagatgatatgtcgttatatggttataatcagtctttaatggtacgtaaaggcgatgttgttgcactaggacaaaaaattgctttggttggcaataccggtggtcaaaatcggtcagcgctttattttgaaattcgccgtaaaggcaatccaaaaaatccgatggggtgggtgaaataa

SEQ ID NO: 94741 - DNA, 192 bp, Oryza sativa
  Clone ID: PAT_MRT4530_93000C.1
atgggatcaaataatccaaattcaacaacaaatgttctagttacaaaagcatatattcctctcaacaaccacgtcgtgacagctccaagacgcaataataaaacgcagctgcaagcacacgaagcgctcacaagagcaaagctcgctgctgctgctgctgaggcctcccaggacagcgcagccaactgctga

SEQ ID NO: 94742 - DNA, 213 bp, Oryza sativa
  Clone ID: PAT_MRT4530_93001C.1
caccaccagacgtcgactctaatgtagggggatagagagtgaaagcatgacaataatgggttgctgttggctttcttgatggatggatacacattgtaaaatgaaactttccaaagaaatttcacgagtgctgcagaatgattttttgcgtctgatagcactgtaaaaaaaaaaaaaaaaaggaaagataaaaaaatacttaaaacagaacaa

SEQ ID NO: 94743 - DNA, 346 bp, Oryza sativa
  Clone ID: PAT_MRT4530_93002C.1
acaatctctatgaaagtatccaaaatatcatatgtactgagaatgtttcgcaactgaactgaatagccaggcagctggaaacaagaggggattacagcaataataaccatgtactgactccaaaacagatgatatgttcagttgaggcaaatcaagcctctcatcttgcattggtgctaacctgctatcagtgaactaataagaagaaaatctcatgatgtactgccctatatctggctaacctttccctgtaatctaaaccgatataactttcagccggagcatcacgtcaattgccttctccacactgcaattgtgccttgaaaaaacgagactggaaattgga

SEQ ID NO: 94744 - DNA, 3907 bp, Oryza sativa
  Clone ID: PAT_MRT4530_93003C.1
gaaaatgtcgctgctgctccgccgcctcgccggcgccgcagcgggccgccatctccgccgcgcgctctccacggccgcgtcacgccctccgtggcgcatgatcctaaccgaggcggagctggacaggtcaggggcgccgtcgcggagcgcgcgggcgtccttggacctcgtcgagcccccgcgctcctcccgcctctccgtccccgcccacttcgtcaaccccggccccctcccggacgccgaaggggacgccgtcggcttcgtcggctgggtcatcggcggcagcggcgacgggctcctcctcctcaagttctacgacacccgctaccacgcccccgtcgtcgccaacgtccgcctcgccgtggcgctccagctgtccaggacgacgagcgagggcgtcctcgacccggacgtcgcgcacttcgtctgcaacccgctcagcggccagatgtaccgcctcccgcccgccatcgagaccaccaagtacagcacggggcgcggcctcctcacccgatccgagtcccggcacgggccgcccgacaggtacgtggtcgcggagctcaccaggggggagtccgggagcagcgtgctgcgccggttcatgtcggagaccgaggagtgggacgatgtggcgacggtgcggtcctcctcgggctcggagagggcggcggcggccgagcgggtgatgcacctggaccaccaggtggtggccttcggcggccggctgtggtgggtggacgtgagctggggcgccctctccgtcgacccgttcagcgaccggccggaggagcgcttcgtcgagctgcccaagggcagcgtactgccggacctgaccggaattggggggagacggattcttggcttgtatcggcggatgggggtcagcgaggggaagctccggtacgtcgaggtgtccaatgcgaagaagccgttcgtggtcagcgcattctcgctcgacgatgagggcagcagctggacgctggagcacaggatggagatcaccccaagctggaagggtgagctcaaggtgcccgagaagccgcggatcggcgccatcgatccactgaacgccaacgttgtgtacctgatattcctccacgaggttcttgccgtggacatggccaagggcgaggtgattgggaggagttctcctgatgacgtcaactctagttcagttgtgccatgcatcctaccaccgtggctcgaatcatgtcagatcccctctgcagcaaccctttcgagcaagaagactgatgttgaaagaaatactctggcagacacactgatggggttaggaactgagaacgccgcgatggtgccagacgaatggccgatatgggggttcgcggaagaacttcacagcattatgtgcaataagaacaacattcggaatgtattggttattgctgatgctggccatggaaaaactgcaatattggattccctggtagcaactgctggaattacttcccaggaagttactgaaagcaatagcctaatttctctgtactatgaaatgcctgaagattctctgagaagctacaaggataagagagctggtaacggacacttgatcaatcttattgactctcctgtgtgttgcaacttgtctaatgatgtccaacctgccctttgcataatggatggtgctctagttgtagtggacagttttgagggtgttactttatggaccaagacttctattcgtgaggctcttaatatgaagattcagcctgtttttactctgaataagatcgacagattcttccttgagcagaatgttgatggtgagaaagcttatcagaccctctccagtctaattgatagtgtcaatgctaccatgtcttcacacaaagatgctcaggtgtatcccactaagggaactgttgtgttctcatctggtctgcacggatgggcagttgcaatttctaattttgctaagatgtattcctccaaattcaaagttgaggaatctaagatgatagacagattatggggtgagaacttctttgacctggccacaaagaaatggacaaaaaagaacactggcacagctacatgcaagaggggctttgttcagttttgctatgaacctatcagagagatcatgaacgcctgcatgaatagcaagcacaaattgtggcctatgctagaaaagattcatgtcactgtgagttctccagctaaggaacttgttggcattgaactcgtaaagtatgtgatccaagcttggctgccagcatgcagtgcactttctgagatgatgatgtaccacatcccctctccagagaaggcgcaaagacattgtgttgggaattttggtgtggatcttgacaacatttaccatacctctgttagaaattgtgatgctgaagggccccttgttctttatgtttccaagatgaccctagcattaggcaaaggcaggtattttgctttaggacgtgtcttctccgggaaagtcacatctggaatgaatgtccaattcttgagtcccagctatggtattggtgaaagaaaagatttgtatatcaaatgcattaagagttcccttatttggataggagataaaagggagttagttgagggttcttcttgctcctctatccctggtcatagagacttatttgacaaggccacatacactacagttaattaccagttaattaagaagaactctacattgacaagtgtgaaggttatgcccatgagagcccctgctgtaacagttcgtgttgattgcaaagcctaccctgaccttccaaagtttcttgaagctctgaagaagttggcaaacactccagttaagactaggttaaatgacatccccttaagtgaattagaaggctgcagccgttatccaccaaactatcacttcctgaatttggatgaacctgatccttggttactttatgagaatatgatggactgcataggcaatcatcgcttctggactctatctcactcagataatgtttatgacttcgattgtccggaatccagaagttggaccacaccccaaaagggccactatctacagtatgtccaagtagatgggattgtgatgtgctttgtaggcaatgcttcaacaagttggctacatggtgttatcacagaggggtttgttgctgaatttattaagaagccacctggagatccaaaagaagttgcaaaaccgacacattatataacaacgccagagagggaaaagagtgatagatttattaagaagccacctggagatccaaaacaagttgcaaaaccgacacattatataacaacgacagggcggacaagaagtgatatacctatatcagggaactaccatcgccggttgtctacatttgcatttgggccagcaggcttcagaaaagcttgcaaaagtctctatatgtatgtaataggtgagttgtctgcttctgcggactatcttgacatgattgttacaatcattattctgcacctttgggacacatcacgaaacaatgatgtgctggacaaagcactgatggcatttcatccagacaacacagaacagatagtacttggagatgattgccgtgtaatgctgcaaaggtggaaaagagtttcatgtgaaactgttagctctattgatgaaagaagagattatgtgcctattgcttacacaactcccaaatgtgtttccaaagcatgtgatataataagaatcctgtatggtgaagtccatgaccattcaccattcgatgataaatttcttcccttgagctttgatgctcaaattgattcacaatctgatgatgaaaatgacaagtctgggcatggtaggatcaagggaaactatcatagcaaaaaagaagtgtacgggtcaatgcgatggagcaatgccaagctgaaagcatttggtatatatccgctaaatccttaa

SEQ ID NO: 94745 - DNA, 475 bp, Oryza sativa
  Clone ID: PAT_MRT4530_93004C.1
cccacgcgtccgcttgagaaccctaatgatatcacaaaagttcatttagtctatgcaaatgtcacgcatgacgacattcttctgaaggtggaatcacttctttgttatttgttaagactctctttttgctgcctctacaatatatctatgatacaattttgtggtctttctgactgttagcatcgccccatcagatttcagatttactgtgccatcatgtgatttaattgacttttgtgccatatattcactagtggacaccatgcacatacacatttcatttagttgccaatgacagctggtgaaatttcaagtattgtttatgataactgttaactggtttgtttcttcaaatgcaaaactcatgcaacttgtactgcatgaaagtggaataatttatacatagtactttgtagctgagatattttacaatttctttatgtaatgtcaaagcttctataaatgatatatgaat

SEQ ID NO: 94746 - DNA, 459 bp, Oryza sativa
  Clone ID: PAT_MRT4530_93005C.1
cgttttccttcgggagggcataaaatcgctttctttctatagggaggacgaacataaagacgattcaagtaagggccgagagcctacatatcactgagatgggccaaggaagaaaaagcacctactgttcgttaattgaaattttctttgcttagcgcccttgtgtttcgaatagaaaagcactggagatatctgtggaactgttcttagggcaagctagcagaaagaagtaatctatctggtcagcctggcgaagcatttaggcaaatggtccccaggggaaggagaaaagaatcctaggtaaacaacaatgctttccgatcgaaacaccctttttttcttatgttatgtcaatattttgagagaaaacttccatttatttgttgaatagacagattggccgagaataccatagctatactttatagtcataaaaactagaataaaaaaaaaaaaaaa

SEQ ID NO: 94747 - DNA, 561 bp, Oryza sativa
  unsure (1)..(561): unsure at all n locations
  Clone ID: PAT_MRT4530_93006C.1
tattaaagngacactatagaatactcaagcttgcatgcctgcaggtcgactctagaggatccccattctataccacttccgaaatgggtgttggaggagatggacaaggaccaggacctggcctacacggatcggagcggccgccgcaactacgaatacctctcgctcggcgccgacgccatgccggtgctcaagggccgcacgccggtgcagtgctacggcgacttcatgcgcgccttccgcgaccactttgccgccttcatgggcaacaccatagtcgagattcaagtcggcatgggtccggccggtgagctccgctacccgtcgtacccggagagcaatggcacctggagattccccggcatcggcgagttccagtgctatgacaggtacatgctgagcagtctcaaggcggcggcggaggcggtgggcaagccggagtggggcaacgccgggccgggagactccggcgggtacaacgactggccggaggactcgcccttcttccgccgtgaaggtgggtggaacactccctacggtgagttttgggtaccgagctcg

SEQ ID NO: 94748 - DNA, 1365 bp, Oryza sativa
  Clone ID: PAT_MRT4530_93007C.1
gcggtgctcgtctcttcgggtgtgggggtgtgcacgcccgacacccccgtccggctgcgccccccgcgtccggcgatgcccggagcggccggcctcatgagcctctcaccgggcggcgtcgcccccccaccttcccggcggcccccccgcccacgccccccccactcggttttttttttttttttcgcagatcaaggttgcacacttgagcgatcgatgtcgtcgcacgcgtacgcgacgctgattacaacaaataatcttgggagtataaaatatgtaaagcgtttttacccttctacgcgcgaggtcggctgatcgatcagttgctgagcgcgacggcggcctcgtgcacgagcgacccggtggcgtgcgcgacgccctgcgcctcccgctccacctgctcgcggcacacgtcccgcacgccggactccgtcatgcgcttcacgaacgcggcgaagcggcgccagttgtccggctggaacaggtcgggccccatgcgcaggtaggtgaacgctaccatgcgctcctcctccgccttctccgccgccgtcgtcacgatctggtcgtgcgccgtctcgtcgtacctcggcagcgcgttctcgccggcgagccccacgccggactcccgcgccgcggccgccacctgctgcaccagctcctcgggccggcactgcgcgtcctgcggctgctcgtggttgcgcatctccacgcacgtgaagttgagcaccgcgccgtggcgggccagcatgcgcgcgatcggctggtacccgtcgtggtgcctcgtgttgtagtaccctgccgtcagctccgcggcgtgggaccgcgtgccgtagtgccagtggatgccggccaccttcacggagatcttcacgccgggtgtgccggtgtacacgcccgacgccgccgacaggatgcgctcgccgtgttccaggagcatctgcgagtaccagctcatgaaaaactcaccgtagggagtgttccacccaccttcacggcggaagaagggcgagtcctccggccagtcgttgtacccgccggagtctcccggcccggcgttgccccactccggcttgcccaccgcctccgccgccgccttgagactgctcagcatgtactgcacatcgatcgccgaaacatcatctctcactcagttcgccgccaaatcaagaaattaaagagaaaccgatcgaaagctagccgccatgggagacgagcatgcagccaggcataccctgtcatagcactggaactcgccgatgccggggaatctccaggtgccattgctctccgggtaccacgggggccgagctcaccggccggacccatgccgacttgaatctcctgcagatcaagtcagcctcgtgc

SEQ ID NO: 94749 - DNA, 1040 bp, Oryza sativa
  Clone ID: PAT_MRT4530_93008C.1
atgccgcgcggcagcggtggggagcggcggcggcggctgtggcggtgggggaagaggcagtggggagcggcgacggcggcggtgcggagtggcagcggtggtggcggcggggagcggcggctgcggcgatgtggaggagaggaggaggaggaggacggcgtgcttcatgcttcggggaggccccgcgaccccgtcgcgttccgacccgaccagagcacccgaccccacccagaagaaggaaaaaaaaaatccgatcgggcctcgccgcgcgcgccggccaccgccaccgccaccgctaccacgagcgccatactcccctccctcctcgccaccgtcggctccctcgccacaggcgccgtcgcggcgctcgcggcggcgggggcgcacgcggggtccctcccccgcgcccgctcggtggcgtcggtagcggcggcggcggccatgtcgacggcccgcgtctacgccgacgtgaacgtgcaccgccccagggagtactgggactacgaggccctcgccgtcgaatggggatacttcaaagggcctgaattgctggttgacttccaaagttatgactactctttagacatgtggagccttggctgtatgtttgctggaatgatatttcgcaaggaaccattcttctatggccacgataaccatgaccagcttgtcaaaatagccaaggctattgattttcttgataaacttattcgcttcgaccaccatgacaggctgaccgctcgtgaagctatggcgcatccctactttgaacaagtgagggcagcagaagactgcagaatgagaacgtaacatgaacggaacgccatctgctgctgttggattgcactggaaatctgttgcagatttgctcctttgttttattctattctactgaggcaacgcaaaagttgtagcatgttgcgccttaggtccgcttgctgctgagcggtgcctaacatccttaaattttgaaacacatcataaagtgccgagtctataaatcagattatcagagataatctcttttcaaaaaaaaaaaa

SEQ ID NO: 94750 - DNA, 1409 bp, Oryza sativa
  Clone ID: PAT_MRT4530_93009C.1
cccagaagaaggaaaaaaaaaatccgatcgggcctcgccgcgcgcgccggccaccgccaccgccaccgctaccacgagcgccatactcccctccctcctcgccaccgtcggctccctcgccacaggcgaccgtcgcggcgctcgcggcggcgggggcgcacgcggggtccctcccccgcgcccgctcggtggcgtcggtagcggcggcggcggccatgtcgacggcccgcgtctacgccgacgtgaacgtgcaccgccccagggagtactgggactacgaggccctcgccgtcgaatggggtgagcaggatgattacgaggttgtgcgaaaggtaggcagagggaaatacagtgaagtcttcgaaggaattaatgtgacaaatgatgagcgctgcatcattaaaattctcaagcctgttaagaaaaagaagataaagagggaaataaaaattcttcagaacctctgtggtggtccaaatattgtcaaacttcacaatattgtcagagatcaacaatcaaaaactccaagtttgatatttgaatatgtaaacagcacagatttcaaagttctgtatccaacattgacagactatgatattcgattctacatttatgaacttcttaaggcattggattactgtcattctcaaggaattatgcaccgcgatgtcaagcctcacaatgttatgattgaccatgaactccgcaagcttcgcttaattgattggggacttgctgagttttattttccagagaaagaatacttcaaagggcctgaattgctggttgacttccaaagttatgactactctttagacatgtggagccttggctgtatgtttgctggaatgatatttcgcaaggaaccattcttctatggccacgataaccatgaccagcttgtcaaaatagccaaggttctaggtacagaccagcttaatgcttacctgaataaatacaggattgcacttgatccccagcttgaggctctgattgggaggcataccaggaaaccttggtctaagtttataaatccagaaaataggcatcttgtctctccagaggctattgattttcttgataaacttattcgcttcgaccaccatgacaggctgaccgctcgtgaagctatggttggttcctgtcaagctattcattcacaggcttaagactgcagaatgagaacgtaacatgaacggaacgccatctgctgctgttggattgcactggaaatctgttgcagatttgctcctttgttttattctattctactgaggcaacgcaaaagttgtagcatgttgcgccttaggtccgcttgctgctgagcggtgcctaacatccttaaattttgaaacacatcataaagtgccgagtctataaatcagattatcagagataatctcttttcc

SEQ ID NO: 94751 - DNA, 177 bp, Oryza sativa
  Clone ID: PAT_MRT4530_9300C.1
gggcgagcagtacgcggcgcagctgccgtcgatgtgccgggttgagccccacagtgcagcatcttcgccccgccagtactagctactggcttcctcatactataggatcacaccttcttttcaaccaacgagatagtgatcacaataatgaataatgaaatgtttgaaacaaaaaaa

SEQ ID NO: 94752 - DNA, 1542 bp, Oryza sativa
  Clone ID: PAT_MRT4530_93010C.1
atggcgtggtactctctcgtgctcatgacgtccttgttgttccctctccttgtcctacttgttatgcgctgctatgtcacaaggtccggcgccaagctactcgacaagctcccctcggtacctggcaggcttccggtgatcggtcacctgcacctcatcggctccttgccccacatctccctccgcgaccttgccactaagcatagccctgacatgatgctcctccacctcggcgccgtgccaaccctagtggtgtcatcctctcgtgtggcacaatccatcctacacacgcacgatgacatattcgcatcacggccctactctcctatagccaacatcctcttttacggtgcaacagatgtcggcttctccccgtacaacgagtattggcggcaaatcaagaagatcaccaccacacatctcttgactatgaagaaggtgcgctcctatgtgtcggcacgacaacgggaggtgaggatagtaatggccaggatcactgaggcggcgtccaaacatgtggtagtggacctgaccgagatgttaagttgctactccaataacatagtgtgtcacgcagtgtgtggcaagttctccctgaaagaaggttggaatcaactacttcgggagctggtcaaggtaaacacatcgctacttggtggcttcaacattgaggactactttcctagctttacaaggctggccgcagttaggagattgctactgtcatgcgccaaagcacacaacatcaacaagagatgggaccagctgctagaaaagctcattgacgaccatactaccaagcatatcaggtcttcctcgatgctcaaccactacgatgaggaagcaggtttcatcgatgtcctactctctattcagcacgaatatggcctaactaaagataacatcaaggcaaacttggcggccatgctcatggctggcatggacacgtcattcatcgagctagaatacgccatggctgagctgatgcagaagccccatgtaatgggaaagctgcaggccgaggtgagaagagtgatgccaaaggggcaagacatagttactgaagagcaactaggttgtatgccctacctaaaggcggtcatcaaggagacacttcggctacaccctccagcaccacttctaatgccgcatctttccatatctgattgtaatatcaatggctacacaataccctctggtactcgtgtcatagtcaatgtatgggctttggccagggactcaaactattgggagaacgccgacgagttcataccggagcgattcatcgttaacacattaggtgactacaacgggaacaatttccatttcttgccattcgggagcgggcggaggatctgcccaggtataaactttgcaattgccaccatcgagatcatgctagcaaatttggtgtaccgctttgactgggagctaccagcagatcaggcggcgaagggaggtattgatatgaccgagacgttcggggtggctgtgcaccgcaaggagaagctcctccttatcccacatctccatttgagatga

SEQ ID NO: 94753 - DNA, 2937 bp, Oryza sativa
  Clone ID: PAT_MRT4530_93011C.1
atggaagcgacggcggtgagcttggcgaggacggtgctcgacggcgtgctcggcggcgcgggctcggccgtcgccgacgaggcggcgctcctgctgggcgtgccgcgggaggtggacttcatccggagcgagctcgagatgatgcagtccttcctcagggcgacctccggctgcgccggcgacacggcgaggacgtgggtgaagcaggtgcgcgacctcgcctacgacgtcgaggactgcctcctcgacttcgcgctgcacgcgcacgcgcacgcctcgtcgtcctcctgcgcgccgccgctctggctccggccgtggcgcctcgccgagcgccaccgcgtcgcggcgcggatccgggagctcaaggccagcgtggaggagctcaaccagcgaaaccaccggtaccacgtcgtgcccgttctcgccgccggggatcagcagcagcagcagcacgagccaccagctgctcctcctcccgcgcgcggcgaacaacaccacctgcgcttccgcgactggcaggtcatcggccgcggcgaggaggagagcgagctggccaagctcatcagctccggcggcgacgacgacgcggagacgaggagacgggtggtgtcggtgtgggggatgggcgggatggggaagtcgtcggtggcgaggtcggtgtacaacgacccggccatcgtcgatggcttcgactgccgcgcctgggtgaccgtgccgcacccgctcgacagcgccggcgagttcaagcggcggctggtggcgcagctggagaccgaggtagacggcggcggcggcggcgacgacgtctcggcgtggctcaggcagaagcggtacctgatcgtggtggacgacgtgcggtcgctggaggagtgggagcacatcgagccgtgcctcgtggagagcgacgccggcggcgggcgggtgatcgtgacgacacggcaggtagacgtcgcccagcggtgcgtgcggggaatggagcacgcgtacgagctcaagacactcgctgctccgcatgacatgaggctgctgtgtcaaaaggtgtacaaggatcccgaatataccttacaattgcatatgctagaggaagctaataaaatcttggggagatgccgtgggcttccgcttgccattgccaccataggaggtcttctggccaacaggcccaaaacaagcgcagaatggaagaatctgcgcatccatcttggttcggagctagagtttgaccaggacatcaatagcatcaacagagttatcacctcaagctatgatgggctaccgtatcatctgaagtcatgctttctgtacctcagtatttttcctgagaaccatgagatcagatatactcgtttggttcggcggtggatagcagaagggtacatagcaaagcggcgtgatatgaccgtcgaggaagttgggcagaagcattacaatgacctcatgaacaggagcatgatccgaccaatgaagaagaagattggggccagcatggcagttgaacgttgtcaggttcatggcatggtgctccaaataatcttgtccaagtcaatcgaggagaaccaactatttatcattgacaagcactgcaatgaggttccacagagtaagatacgacacttggtagtgacaagatggaagaggtcggaggagaagatggcaacaaacataaatctatctctagttcggtcactgacagtgtttggagagtgtcctgcgtctctaatctcccctaaactacgattgctgagggttcttgatttggaaaatgcagttgatctagagaatgacgacctcaagcacatcggggatctacaccatttaaggtacttaggtctgcgaggaacaaatatatcaagacttccttcttctctgcagaaccttaaatgcctggagactttagatgttcaggacactaaggtgacacatctcccggatggaactgccaaactggagaagctgcgctatcttcttgccggcatcaacttcgcagaagacttggcagagaagatgcaaacaaatgcaaagaacaaggtaaacaaatgcaatggaaacctcttggaaaccttggcagacgttgtatgcaggtgccgtcgtggttttagtgaatgttgtgaatcttcatcttcctgctttgcaggccacttcagtgtaagggctcctgagggaattgagaagctaaggaacctgcacatgctgggggttgtgcgcattgaacgagacagcggagtggcacagaagctggggaaactaattagcttgcgtagattaggagtggatttggatgccactggagaagaagggaaggcattgtgcaattcaatccaaaaacttgctcgactggaacgacttgaagtccgctctaagtcgcttctatttctgaacgacttgaatggattagccccaaagcatctcctgtcactccggttgtatggccatttagaaaaattacctgactgggttagttccctcaatgatctagccaaggtaaagcttcttgagacacaattggagcaaaaagacattaatctactcgggaacctgagcaacctgacttctcttggattgtgggggaagtcctttgcaggggtgtcactgcattttagcagggacatgttcaagaatctcaaatcgcttcatattcaagggctggaaaacctcgagactctgaattttgagaaaagtgcagcggataggcttgagaaacttctagtgaagaaatgttttgcattgagcgacaacgaacggggaatatctgatatactgttcctaaagaacatagttgaaattaccctgataagtaagggtgacaaaccacatctgcagaagggattgcaaaggcaagttagtgaatttgagcttgtcaataagagacgccctaagcttcaaattgttaattccatgtcagggaggagcccaagggctaatactattgtaggataa

SEQ ID NO: 94754 - DNA, 1850 bp, Oryza sativa
  Clone ID: PAT_MRT4530_93012C.1
gtggcggcggcacgtccggtccgggtcgacgccgatctgaggggggcggcggcgccgatctgtgtggggaggcggcggcgagctgaggaggcggcggcggcgtgatgtacagccccgctggcgcccgcttgtggaggtggagggcggcggcggtttgatggggcgcggggcggcgccgatctgagagggtggcggcggcgagctgtggggcgcggcgacggcttgctgtggtggcgcggcaacggcttgctgtgggggcgacgacagcgagctgtggggtgcggggcggcgacgggtgctacacgcggtgacggtaggagggccagcgctcggaggtagccgacatcgacgctccctcaaccatgcaaggtattcctaccatagaaaggtattttccctctattctctttcagtgacccttaatttgattcttgatgttagagtaaggtcacattttagtttgccagatgggggcccaaagacctatttcacaagtctagcttcaaattgctgcagttagttgatttcatcggctctaaaattgtgtgaggttctaaacaatacattactttctggcgtatttgtgatgatgcttgggttgagattagtagtgatgagcaattgcatgagtggttatcgctgaacatagctcatgaagtagccaatattgaagccgatgttgatgaatttaaaggcccattgcaatgctctcccacaaaaagaagggtccatccaaatttcagaaataccctacccacagctaaagtggtagagccacctatttcaaagtctaagcataccaaaagagccacaaggaaaagggtcagtgatgagacagtcggagttgatgaggagggctcatattccgaaactgaatcattggtggcactaagtgatagtagctatgacactgacttggctgcatcatctgattctgattgctatgattctgaatgctctgactccgacaacagctatgaacctgatgatgaaattgttgatgatgatgatgatgatgattgtgatgatattcatgatttttcatatgatgttaatgatccatgcattgatgtagatgtgctgtttcgcgatgttgatgagtgcaaatcagcagtaacctgccatgcaatcttaaatgattatgctttccaaactgttaaaaaaaacaaggataggtttagggcaaagtgtaggcgagcagaggagggttgcaagtggacgttttttgcatccaccagcaagtccaaatatgatggttgcaagctatagaaggtcaataagaagtataagatggatgtcccaaatttcagggtttttagggccaaggagaaggctatggacatgatattcgatggccacgattggctatttctagtggcctatggggtgattgaaatcgagtctaaggagagttggacatggtttattcagaacttgaagcaagccataggtactcctacaggattggtcatcaacaccgatgcaggcaaagggatagagggagctgtagatgatgtctatccaggagtggaacaccgagagtgcatgagacacttgtggaagaacatgaagaagaagtatcatggcacattgttttcttagaacatgtggggagctgccaagagctgcacatttcagaggtatgaataccacatggacaagataaaggagaagtgtcctgatgcaatacaatggttggatgagaatcatccatatgtttggagtaggagcaatttttttgaactatgtaaggtagactacatcaataataatctttctgaatcattcaacagttgggtgtcaaaaactaaggacttgcatattgtggatatgcatgagaaaataagaca

SEQ ID NO: 94755 - DNA, 314 bp, Oryza sativa
  Clone ID: PAT_MRT4530_93013C.1
gatatgggctaggctttgctaggaccagattgtgagcaggttatgtgtactaaccaacattggatacgtttgtgctagtctgtgaaaaccagctttcatatcttcatcagaccttgaccgatgcggcataactattgaacacagacgctactgactcgcacattcggcagaaccctgatactaatgcatacaccttaacgatcaccggcaaaaagccattcatagatgagaatacaagccttgtggagctgatcactagaaacgaactgcaggctgcgttggctcatgaactgcgacacctaacgtgtgaccat

SEQ ID NO: 94756 - DNA, 108 bp, Oryza sativa
  Clone ID: PAT_MRT4530_93014C.1
ggggcaacataattgatctttttagggtgattaattatactgaattactcggggatcaatcgatcaacttaaatcttttcaaattcaaacgttttctttccctggaac

SEQ ID NO: 94757 - DNA, 898 bp, Oryza sativa
  Clone ID: PAT_MRT4530_93015C.1
gtcagctcaggtcagatcgtcaggccgttctgctgccttgtttggaatagatatcggcatggcttacttgggcctccttgttcttcttctcgccttctgcggtggagcagagcaccacggagcagaagcagccggtgatgcgtcagcccgtggcgcgagcgcgcgcaggggcctggccaccgtctccgtggcgaagccgtcgtaccccacggtgaccacgcccatgtccgcctccacctccccgagcacgatgccgatgagcagctcgccctccgcgttcccatccctggcgaccgcaggcggcggcggcggtggcggcggtggaggatcgtggtgcgtggcgagccagagcgcgagcccgacggcgctgcaggtcgcgctggactacgcctgcggctacggcgcggactgctcggcgatccagcccggcgggagctgcttcaacccggacaccgtccacgaccacgcctcctacgccttcaacagctactaccagaagaaccccgtcgccaccagctgcgacttcggcggcacggccaccatcaccaacaccgatccgagttcagggtcgtgccagtattcagcctcgagcggtggtggtcagaacatgctgcccccgccgtccccgaccaccctgccgccgccaaccccgatgacgccgaccaccccgatgacaccaacaccgaccacgccggacaccgggacgccgatctacggtggatccacgacccctcctgactacggctcaatgtcccctcccggcggcttcgggtcaaactcccctcctgattacggcgacgtcggcgccgcaccggcgacgatggccagcggcagggcggcggtggcgctcgccggcgtcctgatcgcgacggtgtctctgatgagcatgtcaacatga

SEQ ID NO: 94758 - DNA, 1827 bp, Oryza sativa
  Clone ID: PAT_MRT4530_93016C.1
cactattagatcgagtggacgcatagagtagaaactgtcactatacattgtttctaaaactcttaaaatatcaggatgtcgctttttttttttttttttttttggggaactaaccgcacgagacagcgggaggtttcatattcatatagcaggtaaaaaatacaagaaacaaggttgtgatgaggaaaaaaaaagacacccttctaacacacccacgaggaaagagcaagcactgaactgatgaccttgtggcacaaaaggaacctctaagactgctcatagatagggattgatttgttcattacatggccaaagataagaacactactcctaagtccaagagtgaacatgtaatatcagtcagcaccgtagcattccccgatagcttccactagatcctttgcttcaccattccttccaaagtgatcacgaacaggctgcaatatctcgttcaatgacttttcaagggccagcttcacatcagcaggatgcagagcgccactttcataatcagctgtaagttcctccatgctcagaaaagtctttttgccaccattccctttcttctggaccacctcaaacattccaaaccaaggcaagatgatatattttatgtactccaaacatggattgccttctgctagttttggagggcagaaagctttttccattttaaaacatatatcctccttgtgcaagtgtcttggcatgtaagtaccaccatccaagaaccaaataccaaaagcacaagcacatgtaacaacttggaacaatacatataaaagtgaaaagatactgtccaaaacagcaattgccttattcttctttttgaaatgcttataatattgtctagctaataagttggcatcatgctgttccattcccaacagccatatgtctgccttctgaaataatatgctagcacactgcatgtactgatccaacatccgatgctcaatcagtaggctctccagtgaaataaccctttttattctacgcacactgtttgtccttgcaatatccatgacaattggccagtactcatcaccatgttgacgtatttcatctgacaaccagactagatctactttatcaagagccatgccagttgctttccacatctcaatattgtacctgccaacagtccgcatcttatttagattgccactaatctcactgttcatctgggaaaaccagtctgccattaagattttaactttgaaaccagattcaaccattttattaatattgagtgtcttcatgatcccctgagaaatgtgcatccaggggcatggatcacaccaaacataacaaatgggggcatgtttcttctttagcagtaacttaagctcacgatcgttgacccgatcctccccaatgctcttcagtgctgcaaacctcaggtcaaaactcccctcaacagtatcccccgggagctgttcttcggggaacttttgccgttgtgacggcgtgctgccgtggagatgacaaagctgctgctgtggcatctgggagcggcggcgcggcgaggcggaagcctcgacggacatagtcggcgttcgcttccatgttttgcccacgaggccaaacgcccgcgctagcattgcccccacacggacacgggagctccaaatccaggggcgaccggctaatccggtcgcagcctccgcgcctgacttcgtcgacgacgatcggccgccgtcgccaggggttagggttagcggcggcccaagtcttcccccttatattctttttctgtttttctagatataataaaataaaatgataccgtactgttttgtactcctgtatgttgatatggggcat

SEQ ID NO: 94759 - DNA, 1063 bp, Oryza sativa
  Clone ID: PAT_MRT4530_93017C.1
caagatgatatattttatgtactccaaacatgaattgccttctgctagttttggaggcaagaaagctttttccattttaaaacatatatcctccttatcatcttccatgaagatagcccaagctggatgcctcctgttctccatttgagggtattgtaataaattaggaagcatatctgtagtttgagttaaggatgtgcacccgagtatgtttcggtgcatgtaccttgtgcaagtgtcttggcatgtaagtaccaccatccaagaaccaaataccaaaagcacaagcacatgtaacaacttggaacaatacatataaaagtgaaaagatactgtccaaaacagcaattgccttattcttctttttgaaatgcttataatattgtctagctaataagttggcatcatgctgttccattcccaacagccatatgtctgccttctgaaataatatgctagcacactgcaagcaaatgtaaaaaatctcatcaacatttaattttccaatcgcataagaatttctactcccacaaaatctgctaggtaaacagtaataagaggacctgcatgtactttttattctacgcacactgtttgtccttgcaatatccatgacaattggccagtactcatcaccatgttgacgtatttcatctgacaaccagactagatctactttatcaagagccatgccagttgctttccacatctcaatattgtacctgccaacagtccgcatcttatttagattgccactaatctcactgttcatctgggaaaaccagtctgccattaagattttaactttgaaaccagattcaaccattttattaatattgagtgtcttcatgatcccctgagaaatgtgcatccaggggcatggatcacaccaaacataacaaatgggggcatgtttcttctttagcagtaacttaagctcacgatcgttgacccgatccctcccaatgctcttcagggctggaaaacctaaggtcaaaactccccttaacagtatcccccgggaagcttgttcttgggggaactttttgccgttgtgacgggg

SEQ ID NO: 94760 - DNA, 412 bp, Oryza sativa
  Clone ID: PAT_MRT4530_93018C.1
ttccttttccttgtgtttctttgcaaggtcgtcgatggcggacgagccgacgccacggagtccgaagtcgtggtcggacataccggcggacatcgccggcctggtgctccgcctcctccccgcgcacgccgaccgcgcgcgcttcgccgcggtgtgcccgcagtggcgcgccaccgcgcggcagcggcccctccccccgccgccgccgctgccgctgctcgcgctcccggacggcaccttctacagccccccctacgacgagcccttccgcttccccggcttcggcttcgctggctacaaggccacctgcggcagccggctcgtcttcccgcgcgacgacggctgcttcttggtgaatcccttcaccggcgccaccgtgacgctccctgccctgtccagcgtccgcctccgt

SEQ ID NO: 94761 - DNA, 515 bp, Oryza sativa
  unsure (1)..(515): unsure at all n locations
  Clone ID: PAT_MRT4530_93019C.1
tatctagctaggtgatactgggatgtgttttgccaactgatcatgtatgagttcaaagagtaaggtggatttgttaatcacaaatgaaaatttagggtgcatctcaagcattggcgtgataaaaaattcagagaagagtaaaactgatggtgagataggtaattttggttccctgtattgatctttcattactcaccgtaaaagacatgatggtaaaaatatagtttactcctaatggttcaaaaaagttctggatgcattgcatggcgcacaatcctttgattcggcctaataattgtatagngagttgactaatagtaatataacctaattttgcattatttgtactatattttagttttttaaataaatgttttcctttgatgggtctatttctaaatgcagagagtgcatgcttatccacagtcaatatatgcagagaacaggttgattatatatgaaattccagcggaaatttttcgagggaaatttgacaggccagaactatttgtatg

SEQ ID NO: 94762 - DNA, 493 bp, Oryza sativa
  Clone ID: PAT_MRT4530_9301C.1
atggtgaggaccgggactatgctcagggaggagcagaggtctagtgcggtcaggatactatgtgagaaggtgactagagtctggattcttggaggtcaacttcggtcaacggtggggattggaactaaactcagaaaggagttggggtccagacggttaaggatatcgtgtgacgaagttagatacgagatggcacacggtggatagacatcgtgtgagagagatcttcgcaacggacttcatgaggtgttgtacgtgtcctggtcgatggcaggcttgatccatgcagaggcaagccgactcggctcaggcggcaagcagcagcagcgagggcaggagtctgacttgcggcagggcggcgatctaacccgcggcgtgcgagcagtccgaccggcggcgataggactacgtcgagatttccatcaatttaaggcatccgcaagctctctcgccaacatccgaagatcaagagtgagtcgtgtggttcagggtg

SEQ ID NO: 94763 - DNA, 594 bp, Oryza sativa
  Clone ID: PAT_MRT4530_93020C.1
tcatgttataattgtcgagccacctgagaagaatgccggagcgccattgcttggtgcttgcacgatcgtcgccaagtccagccatgatcccttcgctttagctggccgcaccgccgaggcgtcttcatgattgtcatcgatgccggtgatgcgatctcgtccacaaacaggacgtatcctcgtcatctgtttctggtcatcatcgcccgcactgattgtttctccgccaatgacaagcccgttcttgtcgtcgttgccggtaccaatcgtgcattcgtcgccaacgtgcaagtttggagccactagcgtctctgctcgactgctgccggcgaagatcttcaacttgtcgctgccactggcgtcatcatcacatgaatcctcacctcgccatctagtgatcacgagttcggcatccccaccgatgtctctcactccacaacgcccatacacatgacgtattatttcgtcgtggccgtcgtcggtgcactcccgagttaagccatcctgtaccacaatgatcttcagccattgtgctagaaaccagaaaagcagcgctatcccgagtgtcacggtgattggtcgactgaaggccat

SEQ ID NO: 94764 - DNA, 2619 bp, Oryza sativa
  Clone ID: PAT_MRT4530_93021C.1
atggcgagtttgaagtatgatctaccgctcctggaccaagacacaagattctcattttggcaagtgaagatgcgagccgttcttgcacaacaagacctcgatgatgcgctttctggatttgacaagaggactcaggattggtccaacgatgagaagaaaagggatcgtaaggctatgtcatatattcatctttatctatctaacaatattttgcaggaggtgcttaaggaggagacaaccgctgggctgtggttgaagctggaacagatatgcatgactaaggatctgaccagtaagatgcacctgaagcaaaagttatttttacacaagttgcaagatgatgggtctgtaatggaccatctctctgctttcaaggaaattgttgctgaccttgagtctatggaggtaaagtatgatgaagaggatttaggccttattctattgtgttcattgcctagctcatatgcaaacttcagggatactatactttatagccatgatactctaactttgaaagaagtttatgatgctttgcatgccaaagaaaagatgaagaagatggtaccctttgaaggttcaaattcacaagcagaaggcttggttgttcggggcaggcaacaggagaagaacacaaacagcaaatcaagagataaaagttcaagtagctaccatggaagatcaaagtccagaggcaggtataagtcatgcaaatactgcaagagagatggacatgatatatctgagtgttggaagctacaggacaaagacaagagaaccggaaaatatgtaccaaaaggtaagaaagaagaggaaggtaaagccgcagttgttactgatgagaaatctgatgcagaattgcttgttgcttatgttggttgtgcacaaactagtgaccagtggattcttaatactgcatgcacctatcacatgtgcccaaatagggattggtttgccacctatgaagctgttcaaggtggtactgttttgatgggtgatgatacaccatgcgaggttgcaggtattggaacagttcagatcaagatgtttgatggctgtatcagaacattgtcagatgtgcggcatattccaaatttgaagagaagtctcatctctttatgtactcttgatggcaaagggtacaaatattccggtggagacggaattttgaaggtaactaaaggctctcttgttgtgatgaaagctgatattaaatctgccaacctgtaccatctgcgaggtacaactatattaggtaatgttgctgcagtttctgattcattatctaattccgatgctactaatctttggcatatgcgtcttgggcatacgagtgaaattggtttggcagaattgagcaagcgaagattgctagatggacaaagcatcgggaagctcaaattttatgagcattgcatatttggcaagcataagagggtgaagttcaatacatctacacatactactgaaggtattcttgattatgggcattctgatttatgggggcctgctcattcttctattgttcatcaatctccaaaacgttctattgcaaaagataagcccaaaagaaatattaaacctcctccaagatatattgaagaagcgaacatagttgcttatgctttgagtgtggcagaagaaattgaaggtaatgccgaaccttctacatattctgaggctattgtttctgatgattgcaatagatggataactgctatgcatgatgagatggagtcacttgaaaagaatcatacttgggaattggtgaagttgccaaaggagaagaaacctatccattgcaagtggatcttcaaaagaaaggaatgtatgtctccaagtgatgaggcaagatacaaagcaaggctagttgctaaaggttatagccagattccaggtattgatttcaatgatgtcttttcccctgttgtgaagcatagttcaattcgcactttacttagtattgttgcaatgcatgattatgaactagagcaaatggatgttaagactgcatttttacatggggagttagaagaggacatttatatagagcaacctgaagatttatgtccacagtcagattatgatattgagtacatgtctagagttccttattcaagtgcagttggttcacttatgtatgccatgattttgctggaaatttggatagaagaagatcgctcacaggttatgttttcactattggaggatgtgctgttagttggaaggcaagtttataagcaactgttgccttatctactactgaagcagagtacatggctatttctgaagcttgtaaagaagctatttggcttagagtcaaagtgcaatatgcctacaaaggatcagatgttccatgagagaacaaagcacattgatgtgagatatcactttattcgaggtgtgattgctgaaggtgatgtcaaggtatgcaagataagtactcatgataacccagttgatatgatgacaaagccagttcctgctactaagtttgagctttgctcaagcttggatcaaatcaactggcacgctcatacatccgaaggcgagttttggacatgcactggagttaagcagatctcccaggccctgtgttttctatcaacagagtcctattag

SEQ ID NO: 94765 - DNA, 6150 bp, Oryza sativa
  Clone ID: PAT_MRT4530_93022C.1
atggctgcggcggcggtggcgcgccgcgtcgtcttggtgctcgtcctcgccgccgcctccctcgccgcggcgccgcgcggggcggccgctcgctcgctcggcggcagggagggccccggggagtgttgccacttactcagagtattgcttcgatgcgatatttcttgtgtgatttggggtgtgcggaactttctcaaaagcataagtacggtcatttttgctctatgtgtccagcttgcagaaactacaagctctttcagtttagaagacaaaaagtacgagaatgaaaatatgcttccaaagaatgcttcggatcctgagcagattgttcaagcaatttacgatgttgaggaagcaacagctcaagcgttacagataattttggagcgcaagacgatcaaaccaaagaatcgtgattcgctcatcagatttttacaaattttggtggctcgtcacccatccaagaggtgccgaaggggatctgctgagctacttattaacttcgatgatcactggtcatcgaatctgtcgttaagttcacaagagggttctaaattgttggaaagtgttgcggaagagaaccactggatctgtggaaaagaggtgccacgtggatattggctgttctgccgcggcagtaaaagtgaaacaagaggatttagctgtggtctatgggttttgatgcattcactaaccgtccgaattggggatggagagagccagtcaacctttacatcaatatgtgattttattcacaacttcttcatctgtgaggaatgccgcaagcacttttatgaaatgtgttcaagcgtgtcagcccccttcagaactgctcgtgagctcagtctctggttatggagcacacataacaaagtcaatatgagattgatgaaagaagaaaaggatatgggaactggtgatcccttgtttccgaaggttacctggcctccaaatcagctctgcccatcttgctaccgctcaagcaaggtcaccgatggagctgtggactggaacgaggatgcagtgtatcaattcttggttaactactatggaaagaagcttgtatcatcctacaaggagacctacatggagtctcttcagcaacaagagaagaagatagtttcagaggattcatcgatttctaatgctgcaagcgtcccaattggagctgccctgggtgttgcgattgccagctgtacatttggggcgctggcttgcttctggagggcccagcagaagaacagaaaagaagtgattaggttctatttgtcaatttttttacaggcaaagaaagaactggaactgaaaaatagcctaccagttgctcaccctgcacttcatcagaggggctcatcaatgaatgtgtatttttctggacggattaaaatcttgttactcatccaaaaggctgatgagatgggggaaattgctcgcagttttttccaggagctgtacacgaaggatgagagcatcaggccgacggagcttttaaatatgtttgagccaaagatcacaggagaaatgaatgacaacttaactcgtccattcactgacgaggagattggagatgctctgttccagataggtcctctcaaggcgccaggatcagactgttttccggcccgattttttcagaagaattgggcggtcatgaaaaaggatgtatgtgaagccgttaagaagttcttcgagaatggtgagatgcaggaaggagtgaatgacacagtcattgttatgattccaaagaagaattcggcggaggagatgaaggatttcaaacccataagtctatgtaatgtcgtatataaagtggtcgcaaaatgcttggtcagcaggctccgaccattattgcaggacattatctctgaatctcagagtgcttttgtaccggggcggttgattacggataatgcacttattgcgttcgaatgcttccacgccatacataagtgtaccagggagaatcagaatttctgtgcacttaaacttgacctgtcaaagacatatgacagagtagactggggttttttaaatggggtgatgcaaaggatgggttttggagatgtttggaggaagtggataatggcctgtgtgacatctgttcgttacagtgtccggctaaatgctaatattgatcaagcaacaagaataaaggaggctttggatctatttgagagaagcacaggacagttaatcaacccaagattaattcccatggcgagtttgaagtatgatctaccgctcctggaccgagacacaagattctcactttggcaagtgaagatgcgagccgttcttgcacaacaagacctcgatgatgcgctttctggatttgacaagaggacacaggattggtccaacgatgagaagaaaagggatcgtaaggctatgtcatatattcatcttcatctatctaacaatattttgcaggaggatctgaccagtaagatgcacctaaagcaaaagttatttttgcacaagttgcaagatgatgggtctgtgatggaccatctctccgctttcaaggaaattgttgctgaccttgagtctatggaggtaaagtatgatgaagaggatttaggccttattctattgtgttcattgcctagctcatatgcaaacttcagggatactatactttatagccgtgatactctaactttgaaagaagtttatgatgctttgcatgccaaagaaaagatgaagaagatggtaccctctgaaggttcaaattcacaagcagaaggcttggttgttcggggtaggcaacaggagaagaacacaaacaacaaatcaagagataaaagctcaagtatctaccgtgggagatcaaagtccagaggcaggtataagtcatgcaaatactgcaagagagatggacatgatatctctgagtgttggaagctacaggataaagacaagagaaccagaaaatatataccaaaaggtaagaaagaagaggaaggtaaagccgcagttgttactgatgagaagtctgatgcagaattgcttgttgcttatgctggttgtgcacaaactagtgaccagtggattcttgatactgcatgcacctatcacatgtgcccgaatagggattggtttgccacctatgaagctgttcaaggtggtactgttttgatgggtgatgatacaccatgcgaggttgcaggtattggaacagttcagatcaagatgtttgatggctgtattagaacattattagatgtgcggcatattccaaatttgaagagaagtctcatctctttatgtactcttgatcgcaaagggtacaaatattccggtggagacggaattttgaaggtaactaaaggctctcttgttgtgatgaaagctgatattaaatatgccaacctgtaccatctgcgaggtacaactatattaggtaatgttgcagcagtttctgattcgttatctaattccgatgctactaatctttggcatatgcgtcttgggcatatgagtgaaattggtttggcagaattgagcaagcgaggattgctagatggacaaagcatcgggaagcttaaattttgtgagcattgcatctttggcaagcataagagggtgaagttcaacacatctacacatactactgaaggtattcttgattatgtgcattctgatttatgggggcctgctcgtaagacatcttttggaggtgctcgttacatgatgactatcgttgatgattattcgcgaaaagtttggccttatttcttgaagcacaaatatcaagcttttgatgtgtttaaagagtggaaaactatggttgaaagacaaactgaaaggaaggtgaaaatccttcgtactgacaatgggatggagttatgttctaagatatttaaatcatattgcaagtctgaaggcattgtgcgtcactacaccgttcctcacacacctcaacaaaacggcgtagcagagcgtatgaacaggacaattatatcaaaggcccgttgtatgttgtctaatgcaagtttgcctaaacagttttgggcggaagccgtttccactgcttgttatcttataaatcgatcacctagctatgccattgataagaagactccaattgaggtatggtctggttccccagcaaattattcagacttaagagtatttggttgtactgcttatgctcatgttgataatggtaaattggagcctagagttattaagtgcatttttcttggttatctgtctggtgtaaaaggctataagttatggtgtcctgaaactaaaaaggttgtgattagtagaaacgttgtcttccatgaatcaattatgttacatgacaaaccttctactaatgttcctgttgagagtcaggagaaagtaagtgtgcaggtggagcacttgatcagttcagggcatgcaccagaaaaagaagatgttgctattaatcaagatgcacctgttattgaagattcagattcttctattgttcagcagtctccaaaacgttctattgcaaaagataggcccaaaagaaatactaaacctcctcgaagatatattgaagaagcgaacatagttgcttatgctttgagtgtggcagaagaaattgaaggtaatgccgaaccttctacatattctgatgctattgtttctgatgattgcaatagatggataactgctatgcatgatgagatggagtcacttgaaaagaatcattcttgggaattggagaagttgccaaaggagaagaaacctatccgttgcaagtggatcttcaaaagaaaggaaggtatgtctccaagtgatgaggcaagatacaaagcaaggctagttgctaaaggttatagccagattccaggtattgatttcaatgatgtcttttcccctgttgtgaagcatagttcaattcgcactctactcagtattgttgcaatgcatgattatgaactagagcaaatggatgttaagactgcatttttacatggggagttagaagaggacatttatatggagcaacctgaaggttttgttgttcctggaaaagagaacctagtctgtaggttgaagaaatctctttatgggttgaagcagtcacctagacagtggtataagagatttgactctttcatgctttctcagaagtttagaagatccaattatgatagctgtgtttatctcaaagttgttgatggttcagctatatatttgcttctttacgtcgatgatatgttgattgctgcaaaagataaatcagagatagcaaagttgaaggcacaattgagtagtgaatttgagatgaaggatttgggtgcagcgaagaaaattctcggtatggaaattactagagaaagacattctggcaagttatatcttagtcagaaatgttatattgaaaaagttcttcatcgtttcaatatgcatgatgcaaaactagtgagtactcttttagctgcacatttcagattatcttcagatttatgtccacagtcagcttacgatattgagtacatgtctagagttccttattcaagtgcagttagttcacttatgtatgcaatggtatgttctcgtcctgacttatcacatgcattaagtgttgtcagtagatacatggctaatcctggcaaagagcattggaaagctgttcaatggattttcagatacctacgtggtacatctagtgcttgtctgcagtttgggagatctagtgatggacttgttggttatgtggattcagattttgctggagatttggataggagaagatcgctcacaggttatgttttcactgttggaggatgtgctgttagttggaaggcaagtttacaagcaactgttgccttatctactactgaagcagagtacatggctatttctgaagcttgtaaagaagttatttggcttagaggtttgtacactgagctttgtggagttacgtcttgcattaatatattttgtgatagtcaaagtgcaatatgccttacaaaggatcagatgttccatgagagaacaaagcacattgatttgagatatcactttattcgaggtgtgattgctgaaggtgatgtcaaggtatgcaagataagtactcatgataacccagttgatatgatgacaaagccagttcctgctactaagtttgagctttgctcaagcttggttggtgttacagtatag

SEQ ID NO: 94766 - DNA, 2952 bp, Oryza sativa
  Clone ID: PAT_MRT4530_93024C.1
atggcgagtttgaagtatgatctaccgcttttggaccgagacacaagattctcactttggcaagtgaagatgcgagccgttcttgcacagcaagacctcgatgatgcgctttctagatttgacaagaggactcaggattggtccaacgatgagaagaaaagggatcgtaaggctatgtcatatattcatcttcatctatctaacaatattttgcacgaggtgcttaaggaggaaacagccgctgggctgtggttgaagctggaacagatatgcatgactaaggatctgaccagtaagatgcacctgaagcaaaagttatttttgcacaagttgcaagatgatgagtctgtgatggaccatctctccgctttcaaggaaattgttactgaccttgagtctatggaggtaaagtatgatgaagaggatttaggccttattctattgtgttcattgcctagctcatatgcaaacttcagggatactatactttatagccgtgatactctaactttgaaagaagtttatgatactttgcatgccaaagaaaagatgaagaagatggtaccctctgaaggttcaaattcacaagcagaaggcttggttgttcggggcaggcaacaggagaagaacacaaatagcaaatcaagagataaaagttcaagtagttaccgtgggagatcaaagtccagaggcaagtataagtcatacaaatactacaagagagatagacatgatatctctgagtgttggaagctacaggataaagacaagagaaccggaaaatatgtaccaaaaggtaagaaagaaaaggaaggtaaagccgtagttgttactgatgggaagtctgatgcagaattgcttgttgcttatgctggttgtgcacaaactagtgaccagtggattcttgatactgcatgcaccaatcacatgtgcccgaatagggattggtttgccacctatgaagctttgcaaggtggtactgtttttatgggtgatgatacaccatgcgaggttgcagacattggaacagttcagatcaagatgtttgatggctgtatcagaacattgtcagatgtgtggcatattccaaatttgaagagaagtctcatctctttatgtactcttgatcgcaaagggtacaaatattccggtggagacggaattttgaagttttgggcggaagctgtttccactgcttgttatcttgtcaatcgatcacccagttatgccattgataagaagactccaattgagcctagagctattaagtgcatttttcttggttatccgtctggtgtgaaaggctataagttatggtgtcctgaaaccaaaaaggttgtgattagtagaaatgttgtcttccatgaatcagttatattacatgacaaaccttctactaatgttcctgttgagagtcaggagaaaacaagtgtgcaggtggagcacttgatcagttcagggcatgcaccagaaaaagaagatgttgctattaaccaagatgcacctgttattcaagattcagattcttctattgttcatcagtctcccaaacgttctattgcaaaagataagcccaaaagaaatattaaaccacctcgaagatatattgaagaagcgaacatagttgcttatgctttgagtgtggcagaagaaattgaaggtaatgccgaaccttctatatattctgaggctattgtttctgatgattgcaatagatggataactactatgcatgatgagatggagtcacttgaaaagaatcatacttgggaattggtgaagttgccaaaggagaagaaatctatccgttgcaagtggatcttcaaaagaaaggaaggtatgtctccaagtgatgaggcaaggtacaaagcaaggttagttgctaaaggttatagccagattccaagtattgatttcaatgatgtcttttcccctattgtgaagcatagttcaattcgcactttactcagtattgttgcaatgcatgattatgaactagagcaaatggatgttaagactgcatttttacatggggagttagaagaggacatttatatggagcaacctgaaggttttgttgttcctggaaaagagaacctagtctgtaggttgaagaaatctctttatgggttgaagcagtcacctagacagtggtataagagatttgactctttcatgctttctcagaagtttagaagatccaattatgataactgtgtttatcttaaagttgttgatggttcagctatatatttgcttctttatgtcgatgatatgttgattgctgcaaaagataaatcagagatagaaaagttgaaggcacaattgagtagtgaatttgagatgaaggatttgggtgcagcgaagaaaattctcggtatggaaattactagagaaagacattctggcaagttatatcttagtcagaaaggttatattgaaaaagttcttcgtcgtttcaatatgcatgatgcaaaaccagtgagtactcctttagctgcacatttcagatcatcttcagatttatgtccacagtcagattatgatattgagtacatgtctagagttccttattcaagtgcagttggttcacttatgtatgccatgtttgggagatctagagatgaacttgttggttatgtggattcagattttgctggagatttggataggagaagatcgctcacaggttatgttttcactattggaggatgtgctgttagttggaaggcaagtttgcaagcaactgttgccttatctactactgaagcagagtatatgtctatttctgaagcttgtaaagaagctatttggcttagaggtgtgattgctgaaggtgatgtcaaagtatgcaagataagtactcatgataacctagctgatatgatgacaaagccagttcctgctactaagtttgagctttgctcaagcttggttggtgttacagtatag

SEQ ID NO: 94767 - DNA, 2151 bp, Oryza sativa
  Clone ID: PAT_MRT4530_93025C.1
atggcgagtttgaagtatgatctaccgctcctggaccgagacacaagattctcactgtggcaagtgaagatgcgaaccgttcttgcacagcaagacctcgatgatgcgctttctggatttgacaagaggactcaggattggtccaacgatgagaagaaaagggatcgtaaggctatgtcatatattcatcttcatctatctaacaatattttgcaggagttgcaagatgatgggtctgtaatggaccatctctccgctttcaaggaaattgttgctgaccttgagtctatggaggtaaagtatgatgaagaggatttaggcctcattctattgtgttcattgcctagctcatatgcaaacttcagggatactattctttatagccgtgatactctaactttgaaagaagtttatgatgctttgcatgccaaagaaaagatgaagaagatggtaccctctgaaggttcaaattcacaagcagaaggcttggttgttcggggtaggcaacaggagaagaacacaaagaaccaatcaagagataaaagttcaagtagctaccgtgggagatcaaagtccagaggcaggtataaatcatgcaaatactgcaagagagatggacatgatatctctgagtgttggaagctacaggataaagacaagagaaccggaaaatatgtaccaaaaggtaagaaagaagaggaaggtaaagccacagttgttactgatgagaagtctgatgcagaattgcttgttgcttatgctggttgtgcacaaactagtgaccagtggattcttaatactgcatgcacctatcacatgtgcccgaatagggattggtttgccacctatgaagctgttcaaggtggtactgttttgatgggtgatgatacaccatgcgaggttgcagctgatattaaatctgccaacctgtaccatctgcgaggtacaactatattaggtaatgttgcagcagtttctgattcattatctaattccgatgctactaatctttggcatatgcgtcttgggcatatgagtgaaattagtttggcagaattgagcaagcgaggattgctagatggacaaagcatcgggaagctcaaattttgtgagcattgcatctttggcaagcataagagggtgaagttcaacatatctacacatactactgaagctaattattcagacttaagagtatttggttgtactgcttatgctcatgttgataatggtaaattggagcctagagctattaagtgcatttttcttggttatccgtttggtgtaaaaggctataagttatggtgtcctgaaaccaaaaaggttgtgattagtagaaatgttgtcttccatgaatcagttatgttacatgacaaaccttctactaatgttcctgttgagggtcaggagaaagcaagtgtgcaggtggagcacttgaccgggaggaggagcggcggcgcgggcggtggcagccgacgccgccgcagcagccggggatctcccgccgccgcgccagccaccgccgccggggatgcatcccgccgccgtgaggggttggagagagggagagtgggctctgcggccgccgaggacgagccgccggccggatctactccccacctcctcctcctcccggccggcgccttggccaggtcgacgccgagctcgtcgacgctgaggacgccgccgccaccgcttgttcgaggacgccgccgccgctgcaatcgaggtcgccgccaccgcctggaggcctccgccaccgaggccaccacgccggcggagggagaagaggagccagcgccggtggggaggagtggatttggggggaggagaggatttggggatttgggggaggaggagccggttgagggaggtgggaatctgtgggccccaccagcagatatttgtgggtcccaccagtggtgcttgcactgtgaagtgagggtcttcaaagctcttttatcctacgtgtcatctcatggtaactcaaggagagaccatattgctggtcacttgaggttttctgatccatcttcccatgattctctgactaaacagtctacaaaattctcaagggcagagatgcttatgcttgtcacacatactggagcagatgatcttgcaaaatgcagtatattgaagggcatgtga

SEQ ID NO: 94768 - DNA, 1497 bp, Oryza sativa
  Clone ID: PAT_MRT4530_93026C.1
atggcgagtttgaagtatgatctaccgctcctggatcgagacacaagattctcactttggcaagtgaagatgcgagccgttcttgcacaacaagacctcgatgatgcgctttctggatttgacaagaggacacaggattggtccaacgatgagaagaaaagggatcgtaaggctatgtcatatattcatcttcatctatctaacaatattttgcaggaggtgcttaaggaggagacagccgctgggctgtggttgaagctggaacagatatgcatgactaaggatctgaccagtaagatgcacctgaagcaaaaattatttttgcacaagttacaagatgatgggtctatgatggactatctctccgctttcaaagaaattgttgttgaccttgagtctatgagggatactattctttatagccgtgatactctaactttgaaagaagtttatgatgctctgcatgccaaagaaaagatgaagaagatggtaccctctgaaggttcaaattcacaagcagaaggcttggttgttcggggcatgcaacaggagaagaacacaaagaaccaatcaagagataaaagctcaagtagctaccgtgggagatcaaaatccagagacaggtataagtcatgcaaatactgcaagagagatggacatgatatctctgagtgttggaagctgcaggacaaagacaagagaaccggaaaatatgtaccaaaaggtaagaaagaagaggaaggtaaagccgcagttgttactgatgagaagtctgatgtagaattacttgttgcttatgctggttgtgcacaaactagtgaccagtggattcttgatactgcatgcacctatcacatgtgcccgaatagggattggtttgccacttatgaagttgttcaaggtggtactgttttgatgggtgatgatacaccatgtgaggttgcaggtattggaacagttcagatcaagatgtttgatggctgtatcagaacattgtcagatgtgcgacatattccaaatttgaagagaagtctcatctctttatgtactcttgattgcaaagggtacaaatattccggtggagacggaattttgaaggtaattaaaggctctcttgttgtgatgaaagctgatattaaatctgccaacctgtaccatctgcgaggtacaactatattaggtaatgttgctacagtttctgattcattatctaattccgatgctactaatctttggcatatgcgtcttgggcatatgagtgaaattggtttggcaaaattgagcaagcgaggattgctagatggacaaagcatcacgaagctcaaattttgtgagcattgcatcttttgcaagcataagagggtgaagttcaatacatctacacatactactgaaggtattcttgattatgtgcattctgatttatgggggcctgctcgtaagacatcttttagaggtgctcagtacatgatgactatcgttgatgattattcgtga

SEQ ID NO: 94769 - DNA, 3396 bp, Oryza sativa
  Clone ID: PAT_MRT4530_93027C.1
atggacccatcaaaaggtgaggccatccatgatgagcacttcggcctgtcactggtggctggtgggctgtgcaaggaggtgcttaaggaggagacagccgttggactgtggttgaagctggaacagatatgcatgactaaggatctgaccaataagatgcacctaaagcaaaagttatttttgcacaagttgcaagatgatgagtctgtgatggaccatctctccactttcaaggaaattgttgctgaccttgagtctatggaggtaaagtatgaagaagaggatttaggtcttattttattgtgttcattgcctagctcatatgcaaacttcagggatactatactttatagccgtgatactctaactttgaaagaagtttatgatgctttgcatgccaaagaaaagatgaagaagatggtaccctatgaaggttcaaattcacaagcagaaggtttggttgttcggggcaggcaacatgaaaagaacacaaacagcaaatcaagagataaaagttcaagtaactaccgtgggagatcaaagtccagagactggtataagtcatgcaaatactgcaagagagatagacatgatatctctgagtattggaagctacaagataaagacaagagaaccggaaaatatataccaaaaggtaagaaagaagaggaaagtaaagccgcggttgtaactgatgagaagtctgatgcagaattgcttgttgcttatgctggttgtgcacaaactagtgaccagtggattcttaatactgcatgcacctatcacatgtgcccgaatagggattggtttgccacctatgaagctatccaaggtggtactgttttgatgggtgatgatacaccatgcgaggttgcagctgatattaaatctgccaacctgtaccatctgcgaggtacaactatattaggtaatgttgcaacagtttctgattcattatctaattccgatgctactaatctttggcatatgcgtcttgggcatatgagtgaaattggtttggcagaactgagcaaacgaggattgctagatgaacaaagcgtcgggaagctcaaatttcgtgagcattgcatttttggcaagcataagagggtgaagttcaacacatctacacatactactgaaggtattcttgattatatgtattctgatttatggcggcctgctcgtaagacatcctttggaggtgctcattacatgatgactatcgttgatgactattcgcgaaaagtttggccttatttcttgaagcacaaatatcaagcttttgatgcgtttaaagagtggaaaactatggttgaaagacaaactgaaagaaaggtgaaaatcctctgtactgacaatgggatggagttctgttctaagatatttaaatcatattgcaagtctgaaggcattgtgcgtcactacaccgttcctcacacacctcaacaaaacggtgtagctgagcgtatgaacagaacaattatatcaaaggcccgttgtatgttgtctaatgcaggtttgcctaaacagttttgggcggaagccgtttccactgcttgttatcttatcaatcgatcacctagttatgccattgataagaagactctaattgaggtatggtctggttccccagcaaattattcagactcaaaaatatttggttgtactgcttatgctcatgttgataatggtaaattggagcctagagctattaagtgtatttttcttggttatccgtctggtgtgaaaggttataagttatggtgtcctgaaaccaaaaaggttgtgattagtagaaatgttgtcttccatgaatcagttatgttacatgacaaaccttctactaatattcctgttgagagtcaggagaaagcaagtgtgcagtctccaaaacgttctattgcaaaagataagcccaaaagaaatactaaacctcctcaaagatatattgaagaagcgaacatagttgcttatgctttgagtgtggcagaagaaattgaaggtaatgcagaaccttctacatattctgaggctattgtttctgatgattgcaatagatggattacagctatgcatgatgagatagagtcacttgaaaagaatcatacttgggaattggtgaagttgccaaaggagaagaaaccaatccattgcaagtggatcttcaaaagaaaggaaggtttatctccaagtgatgaggcaaggtacaaagcaaagttagttgctaaaggttatagccagattccaggtattgatttcaatgatgtcttttcccctgttatgaagcatagttcaattcgcactttactcagtattgttgcaatgcatgattatgaactagagcaaatggatgttaagactgcatttttacatggggagttagaagagaacatttatatggagcaacctaaagctatatatttgcttctttatgtcgatgatatgctgattgctgcaaaagacaaatcagaaatagcaaagttgaaggtacaattgagtagtgaatttgagatgaaggatttgggtgcagcgaagaaaattctcggtatggaaattactagagaaagacattctggcaagttatatcttagtcagaaaggttatattgaaaaagttgttcgtcgtttcaatatgcatgatgcaaaaccagtgagtactcctttagctgcacatttcagattatcttcagatttatgtccacagtcagattatgatgttgagtacatgtctagagttccttattcaagtgtagttggttcacttatgtatgccatagtatgttctcgtcctgacttatcacatgcattgagtgttgtcagtagatacatggctaatcctggcaaagagcattggaaagctgttcaatggattttcagatacctacgtggtacatctactgcttgtttgcagtttgggagatctagagatggacttgttgattatgtggattcagattttgctagagatttggataggagaagatcgctcacaggttatgttttcactattggaggatgtgctgttagttggaaggcaagtttgcaagaaactgttgccttatctactattgaagcagggtatatggctatttctgaagcttgtaaagaagctatttggcttagaggtttgtacactgatctttgtggagttatgtcttgcattaatatattttgtgatagtcaaagtgtaatatgccttacaaaggatcaaatgttccatgagagaacaaagcacattgatgtgagatatcactttattcgaggtgtaattgctgaaggtgatgtcaaagtatgcaagataagtactcatgataacccagctgatatgatgacaaagccagttcccactactaagtttgagctttgctcaagcttggtaggtgttacagtatag

SEQ ID NO: 94770 - DNA, 461 bp, Oryza sativa
  Clone ID: PAT_MRT4530_93028C.1
gccgaaaaaaaaaaaaaaaaaaaaaaaaaaaaaaaaaaaaaaaaaaaaaaaaaaagaaaaacaaaataaaaaacacaagcatggaaaacacatacatacagaaaaaaaaactattgggtcgggctttttgggggtcccttctttgccccccgttctgcaaaaaccttactgttttctatcgtgaccccacatgcattacacgcgccggacgtcatccacctttggactggggaaacccttgcggttccccctttacatctcttgctcaccatcacttttttacccggtgggccaaatggcaaaaaccctgtaccggttcctctttccaaacggttctcccgcctacttgcaaattggcccccccttttgccggcgccttaaggcccggtgcttggggtgtttccccttactttggccctttcccttccggctttccctagggcgctctatttagggttctt

SEQ ID NO: 94771 - DNA, 614 bp, Oryza sativa
  Clone ID: PAT_MRT4530_93029C.1
ccggccgggaccacacgtgacgtgcccacccctcccctctcactgacgccacgggccccacctcctgacccctccatccagccacaggaccaaagccgtctcctctcggcgtcggcagcagcccagccgtcgagtcatcgcctacaaatagatagcaccaccacgccgcgccgccgtgagctgattgccaacgaattccccgtgcgccgtgcgcctcgccctctcctccctccctcctcgtgccgttgccccccggttggactcggcgcgcttgcttctcgctcgcggctgctcgtaacctcgcctcgcctcgccctcctgcagcacgcgcggctggctgcccgacccagatccggagcgccatgtcgaggaatccgggctgcaccgtcttcataggtaacttggatgaaaaggtacctgagagggtcttgtatgagattcttattcaggtaggtcgtgttgtagacctacacataccacgtgacaaggaaactaatcgctccaaaggttatgcttttgctgagtatgaaacagaggagattgcccagtatgctgttaagctattttctggccttgtcgcctcatatagacacttagattgcgatttctggcaa

SEQ ID NO: 94772 - DNA, 546 bp, Oryza sativa
  Clone ID: PAT_MRT4530_9302C.1
atggccgtgaacggaagtggctttgactcgacgcggcttgatggcgtcctcgcgctgttggacagcaaggcgcgcgcggcggccgaggacgaactgaggaggcaatctcgggaggagcaggcgtcggtgccggcaccgccggcctgctacacgcgctccacttcccgcagcattgggcggtgtcggggatgctgtcgacgacggccgcggggttgggcggcgcacgcgtggcagccgtcggtgatggagacggtgaccgccgcgctcgcccgacgagtcctgggcgacaacaccgaagcaacgaggaccgtcggctccgatgagattctggcacgtggcattgaaggaataaaatttctcaatttgcaggtcgatgataagaaggacgaaggaagtggagtagttgatggtttctgcccactgtcatgcatttgtggagagagggagagaggctgctcgattcttgatggggtttgtgaagttgtgatgacattagtgtccaccgactaccgggtgaagaactccggaacgagaggctgtagttga

SEQ ID NO: 94773 - DNA, 2697 bp, Oryza sativa
  Clone ID: PAT_MRT4530_93030C.1
atggcaagtttgaagtatgatctaccgcttctggaccgagacacaagattctcactttggcaagtgaagatgcgagctgttcttgcacaacaagaccttgatgatgcgctttctagatttgacaagaggacacaggattggtccgtcaatgagaagaaaagggatcgtaaggctatgtcatatattcatcttcaactatctaacaatgttttgcaggagatgcttaaggaggagacagccgttgggctgtggttgaagctggaacagatatgcatgaccaaggatctgaccagtgagatgcacctgaagcaaaagttatttttgcacaacttgcaagatgatgagtccgtgatggatcatctctccactttcaaggaaagtgttgctgaccttgagtctatggaggtaaagtatgatgaagaggatttaggccttattttattgtgttcattgcctagctcatatgcaaacttcagggatactattcttaattgccgtgatactctaactttgaaaaaagtttatgatgctttgcatgccaaagaaaagatgaagatggtaccctctaaaggttcaaattcacaagcagaaagcttggatgttcggggcaggcaacaggagaagaacagaaagaaccaatcaagagataaaagctcaagtagctaccatgggagatcaaagtccagaggcaggtataagtcatgcaaatactgcaagagagatggacatgatatctctgagtgttggaagctacaggacaaagacaaaagaaccggaaagtatataccaaaaggtaaagccgcagttgttactgatgagaagtctgatgtagaattgcttgttgcttatgctggttgtgcacaaactagtgaccagtggattcttgatactacatgcacctatcacatgtgcccgaatagggattggtttgccacctatgaagctatccaaggtggtactgttttgatgggtgataatacaccatgcaaggtagcaggtattggaacagttcagatcaagatgtttgatggctgtatcagaacattgtcagatgtgcggcatattccaaatttgaagagaagtctcatatctttatgtactcttgatcgcaaagggtacaaatattccggtggagacggaattttgaaggtaactaaaggctctcttgttgtgatgaaagctgatattaaatctgccaacctgtactatctgcggggtacaactatattaggtaatgttgcagcagtttctgattcattatctaattccgatgctactaatctttggcatatgcgttttgggcatatgagcgaaaatggtttggcagaattgagcaagcgaggattgctagatggacaaagcatcgggaagctcaaattttgtgagctttgcatctttggcaagcataaaagggtgaagttcaacacatctacacatactgctgaaggtttgcctaaacagttttgggcggaagccgtttccactgcttgttatcttatcaatcgatcacccagttatgccattgataagaagactccaattgaggtatggtctggttcccccgcaaattattcagacctaagagtatttggttgtactgcttatgctcatgttaataatggtaaattggagcctagagctattaagtgcatttttcttggttatccatctggtgtgaaaggctataagttatggtgtcttgaaactaaaaaggttgtgattagaagaaatgttgtcttccatgaatcagttatgttacatgacaaaccttctactaatgttcctgttgagagtcaggagaaagcaagtgtgcagttaccaaaggagaagaaacctatccgttgcaagtggatcttcaaaagaaaggaaggtatatctccaagtgatgaggcaaggtacaaagcaagggagttagaagaggacatttttatggagcaacctgaaggttttgttgttcctagaaaagagaacctagtctgtaggttgaagaaatctctttataggttaaagcagtcacctagacaatggtataagagatttgactctttcatgctttctcagaagtttagaagatccaattataatagctgtgtttatctcaaagttgttgatggttcagctatatatttgcttcgttatgtcgatgatatgttgattgctgcaaaagacaaatcagagatagcaaagttgaaggcacaattgagtagtgaatttgagatgaaggatttgggtgcagcgaagaaaattctcgattatgatgttgagtacatgtctagagttccatattcaagtgcagttggttcacttatgtatgccatgtttgggatatctacagatggacttgttggttatgtggattcagattttgctggagatttggataggagaagatcgcttacaggttatattttcactattggaggatgtgccgttagttggaaggcaagtttgcaagccactgttgccttatctactactgaagcagagtatatggctatttctgaagcttgtaaagaagctatttggcttagaggtttgtacactgagctttgtggagttacgtcttgtgttgatatattttgtaatagtcaaagtgcaatatgccttacaaaggatcagatgtttcatgagagaacaaagcatattgatgtgagatatcactttattcgaggtgtgattgctgaaggtgatgtcaag

SEQ ID NO: 94774 - DNA, 3501 bp, Oryza sativa
  Clone ID: PAT_MRT4530_93031C.1
atgacgagtttgaagtatgatctaccgctcctggaccgagacacaagattctcactttggcaagttaagatgcgagccgttcttgcacaacaagaactcgatgatgcgctttctggatttgacaagaggacacaggattggtccaacgatgagaagaaaagggatcgtaaggctatgtcatatattcatcttcatctatctaacaatattttgcaggaggtgcttaaggaggagacagccgctgggctgtggttgaagctggaacagatatgcatgactaaggatctgaccagtaagatgcacctgaagcaaaaattatttttgcacaagttgcaagatgatgggtctgtgatggaccatctctccgctttcaaggaaattgttgctgaccttgagtctatggaggtaaagtatgatgaaaaagatttagcccttattctattgtgttcattgcctagctcatatgcaaacttcagggatactatactttatagccgtgatactctaactttgaaagaagtttatgatgctttgcatgccaaagaaaagatgaagaagatggtaccctctgaaggttcaaattcacaagcagaaggcttggttgttcggggtagccaacaggagaagaacacaaacaacaaatcaagagataaaagctcaagtagctaccgtgggagatcaaagtccagaggcaggtataagtcatgcaaatactgcaagagagatggacatgatatctctaagtgttggaagctacaggataaagacaagagaaccggaaaatatataccaaaaggtaagaaagaagaggaaggtaaagccgcagttgttactgatgagaagtctgatgcagaattgcttgttgcttatgctggttgtgcacaaactagtgaccagtggattcttgatactgcatgcacctatcacatgtgcccgaatagggattggtttgccacttatgaagttgttcaaggtggtactgttttgatgggtgatgatacaccatgcgaggttgcaggtattggaacagttcagatcaagatgtttgatggttgtatcagaacattgtcagatgtgcggcatattccgaatttgaagagaagtctcatctctttatgtactcttgatcgcaaagggtacaaatattccggtggagacggaattttgaaggtaactaaaggctctcttgttgtgatgaaagctagtattaaatctgccaacctgtaccatctacaaggtacaactatattaggtaatgttgcaacagtttctgattcattatctaattccgatgctactaatctttggcatatgcgtcttggtcatatgagtgaaattggtttggcagaattgagcaagcgaggattgctagatggacaaagcatcagtaagctcaaattttgtgagcattgcatctttggcaagcataagagggtgaagttcaacacatctacacatactactgaaggtattcttgattatgtgcattctgatttatgggggcctgctcgtaagacatcttttggaggtgctcgttacatgatgaccatcgttgatgattattcgcgaaaagtttggccttatttcttgaagcacaaatatcaagcttttaatgtgtttaaagagtggaaaactatggttgaaagacaaactgaaaggaaggtgaaaatccttcgtactgacaatgggatggagttctgttctaagatatttaaatcatattgcaagtctgaaggcattgtgcgtcactacaccgttcctcacacacctcaacaaaacggcgtagctgagcgtatgaacaggataattatatcaaaggcccgttgtatgttgtctaatgcaggtttgcctaaacagttttgggcggaagccgtttctactgcttgttatcttatcaatcgatcacccagttatgccaataagaagactccaattgaggtatggtctggttccccagcaaattattcagacttaaaagtatttggttgtactgcttatgctcatgttgataatggtaaattggagcctagagctattaagtgcatttttcttggttatccgtctagtgtgaaaggctataagttatggtgtcctgaaaccaaaaaggttgtgattagtagaaatgttgtcttccatgaatcaattatgttacatgacaaaccttctactaatgttcctgttgagagtcaggagaaagcaagtgtgcaggtggagcacttgatcaattcagggcatgcaccagaaaaagaagatgttgctattaaccaagatgcacctgttattgaagattcagattcttctactgttcagcagtctccaaaacgttctattgcaaaagataagcccaaaagaaataaagaacttgaaaagaatcatacttgggaattggtgaagttgccaaaggagaagaaacatatccgttgcaagtggatcttcaaaagaaaggaagagcaaatggatgttaagactgcatttttacatggggagttagaagaggacatttatatggagcaacctgaagctatatatttgcttctttatgtcgatgatatgttgattgctgcaaatgataaatcagagatagcaaagttgaaggcacaattgagtagtgaatttgagatgaaggatttgggtgtagcgaagaaaattctcggtatggaaattactagagaaagacattctgacaagttatatcttagtcagaaaggttatattgaaaaagtttttcgtcgtttcaatatgcatgatgcaaaaccagtgagtactcctttagctgcacatttcagattatcttcagatttatgtccacagtcagattataatattgagtacatgtctagagttccttattcaagtgcagttggttcacttatgtatgccatgatatgttctcgtcctgacttatcacatgcattaagtgttgtcagtagatacatggctaatcctggcaaagagcattggaaagatgttcaatggattttcagatacctacatggtacatctagtgcttgtttgcagtttgggagatctagagatggacttgttggttatgtggattcagattttgctggagatttggataggagaagatcgctcacaggttatgttttcactattggaggatgtgctgttagttggaaggcaagtttgcaagcaactgttgccttatctactactgaagcagagtatatggctatttctgaagcttgtaaagaagctatttggcttagaggtttatacactgagctttgtggagttacgtcttgcattaatatattttgtgatagtcaaagtgcaatatgccttacaaaggatcaaatgttccatgagagaacaaagcacattgatgtgagatatcactttattcgaggtgtgattgctgaaggtgatgtcaaagtatgcaagataagtactcatgataacccagctgatatgatgacaaagccagttcctgctactaagtttgagctttgctcaagcttggtgggtgttacagtatag

SEQ ID NO: 94775 - DNA, 410 bp, Oryza sativa
  unsure (1)..(410): unsure at all n locations
  Clone ID: PAT_MRT4530_93032C.1
cggacgcgtgggcggacgcgtgggttcaataatcaatatactcttctcctcgatctcttctcttgtccatctccaataatgctgcatgtacgccgccatgtacccggagaccttcggcttctctgcttacccncagcagcagcagccgtcgtccgacgccgtcttctgcatctacaccaccgncttgccgctcatcgccgacccgcctgacatcctcgtgagctgcctnctnctcctncttccttgcacactagctaatccgcatgcatgtatccatggaatnggatttcctctaatcgctctatctcttacccatggttcatgcatctgctctctctctctctctctttctctcatcacatcacacgtatgaagatatgaaatgaatgaagaaaaacaagcgctttctc

SEQ ID NO: 94776 - DNA, 2835 bp, Oryza sativa
  Clone ID: PAT_MRT4530_93033C.1
atgatgcgctttctggatttgacaagaggacacaggattggtccaacgatgagaagaaaagggatcgaggtgcttaaggaggagacagccgctgggctgtggttgaagctggaacaaatatgcatgtctaaggatctgaccagtaagatgcacctgaagcaaaagttatttttgcacaagttgcaagatgatgggtctgtcatggaccatctctccgctttcaaggaaattgttgctgaccttgagtctatggaggataaagacaagagaaccggaaaatatgtaccaaaaggtaagaaagaagaggaaggtaaagccgcagttgttactgatgagaagtctgatgcagaattgcttgttgcttatgctggttgtgcacaaactagtgaccagtggattcttgatactgcatgcacctatcacatgtgcccgaatagggattggtttgccacctatgaagctgtgcaaggtggtactgttttgatgggtgatgatacaccatgcgaggttgcaggtattggaattgttcagatcaagatgtttgatggttgtatcagcacattgtcagatgtgcggcatattccaaatttgaagagaagtctcatctctttatgtactcttgatcgcaaagggtacaaatattccggtggagacggaattttgaaggtaactaaaggctctcttgttgtgatgaaagctgatattaaatctgccaacctgtaccatctgcgaggtacaactatattaggtaatgttgcagcagtttctgattcattatctaattccgatgctactaatctttggcatatgcgtcttgggcatatgagtgaaattggtttggcagaattgagcaagcgaggattgctagatggacaaagcatcgggaagctcaaattttgtgagcattgcatctttggcaagcataagagggtgaagttcaacacatctacacatactactgaaggtattcttgattatgtgcattctgatttatgggggcctgctcgtaagacatcttttggaggtgctcgttacattatgactatcgttgatgattattcgcgaaaagtttggccttatttcttgaagcacaaatatcaagcttttgatgtgtttaaagagtggaaaactatggtggaaagacaaactgaaaggaaggtgaaaatccttcgtactgacaatgggatggagttctgttctaagatatttaaatcatattgcaagtctgaaggcattgtgcgtcactacacacctcaacaaaacggcgtagctgagcgtatgaacaggacaattatatcaaaggcccgttgtatgttgtctaatgcaggtttacctaaacagttttgggcggcagctgtttccactacttgttatcttatcaatcgatcacccagttatgccattgataagaagactccaattaaggtatggtctggttttccagcaaattattcagacttaagagtatttggttgtactgcttatgctcatgttgataatggtaaattggagcctagagctattaagtgcatttttcttggttattcgtctggtgtgaaaggctataagttatggtgtcctgaaaccaaaaaggttgtgattagtagaaatgttgtcttccatgaatcggttatgttacatgacaaaccttctactaatgttcctgttgagagtcaggagaaagcaagtgtgcagtttccaaaacgttctattgcaaaagataagcccaaaagaaatactaaacctcctcaaagatatattgaagaagcgaacatagttgcttatgctttgagtgtaacagaagaaattgaaggtaatgccgaaccttctacatattctgaggctattgtttctgatgattgcaatagatggataactactatgcatgatgagatggagtcacttgaaaagaatcatacttgggaattggtgaagttgccaaaggagaagaaacctatccgttgcaagtggatctttaaaagaaaggaagctatatatttgcttctttatgtcgatgatatgttgattgctgcaaaagataaatcagagatagaaaagttgaaggcacaattgagtagtgaatttgagatgaaggatttgggtgcagcgaagaaaattctcagtatggaaattactagagaaagacattctggcaagttatatcttagtcagaaaggttatattgaaaaagttcttcgtcgtttcaatatgcatgatgcaaaaccagtgagtactcctttagctgcacatttcagattatcttcagatttatgtccacagtcagattatgatattgagtacatgtctagagttccttattcaagtgcagttggttcacttatgtatgccatgtttgggagatctagagatggacttattggttatgtggattcagattttcctggagatttggataggagaagatcgctcacaggttatgttttcactattggaggatgtgctgttagttggaaggcaagtttacaagcaactgttgccttatctactactgaagcagagtatatggctatttctgaagcttgtaaagaagctctttggcttagaggtttgtacactgagctttgtggagttacgtcttgcattaatatattttgtgatagtcaaagtgcaatataccttacagaggatcagatgttccatgagagaacaaagcacattgatgtgagatatcactttattcgaggtgtgattgccgaaggtgatgtcaaggtatgcaagataagtactcatgataacccagctgatatgatgataaaggcagttcctgctactaagtttgagctttgctcaagcttggttggtgttaaagtatag

SEQ ID NO: 94777 - DNA, 1989 bp, Oryza sativa
  Clone ID: PAT_MRT4530_93034C.1
atggagtccggccggctacttgcacattccgacgagccatcgtccgccgcctccaaacacggcgacggccgcggcggctggcgcgccgcgctcttcatcatcgccgtcgggttcctggagcgcgtcgggttctacggcgtgcagggcaacctgatgatgtacctgacggggctgatgggcatgtccatggcggcggcggccgcggcggacaacgcctggggcgggacggtgatggtgctgacgctcgtcggcgcgctcgccgccgactcgcacctcggccggtatcgcgccgtcgtggccgccggcgtgctctaccttctgagcttagggatgctgacggtctcatccacgctgcaaccaaagcaccctcgcccggcgagctgcaatggcggagccaccgcctgcctgccgccgccgtctcccacctcccgcctcgccttcttctacgccgcgctctacctgctggcgctggcgcagggcttccacaagccctgctccgaggccatcggcgccgaccagttcgccgacgacgccgaccccggcgcgaacgcgtcgcggagctcctacttcaactggttccacttctccacatcctggggctacgccgtcgccacgacattgctgagctacgtcgaggacaacgtcagctggaccgtcgggttcgccgtgtgctgggccacgatggtgttgtacctcgccgtcttcctgctcggcacggggacgtaccgtgccactgccgagcgacccatcgacggcgcgccgctcgcgcgactcgccgagacgtccgccgcggccgcgcgcgcgtggacgaagagggtgttttgccgcaaggatgccatttgcacagaacggtccggtgtcagtgcttatgggagaagcggctgtgcaaagagagctggcggcggtgcgtcgtttttctcgttgccggtcagcaccctctcccttcttgagcttctccccttctttgtggggagtttcggttgggttgaggcggctgctggtcagtggaggaagctcaagcggccgaagcgatgttgtctagtcccgggttctcctttggccgaacatggcgagaggccggcgggcggcgggacggaggtggcctgggccagctctcaggggaggagcggtgggatgcagcgagctggcggcagggttctgcagcaagttcggaagtcggccggtggaggggcgccggtgcggtcttggtggaagccacgcgctgccaatgcttgtgtagtggttaatgagttgatgggcgacaaactacttgaaaggttgcaggggttccaggccatagtgttcgccatcatcgcctcgcaggatatcaccctgttcaccaagcagggcagcacgatgaaccggaacgtcggcgggggcctcgtcgtgccgcccgccgcgctgcagttcgccatcagcgtcaccatcgtcacgctgttgccggtctacgaccgtgccctcgtgccgctcgcgaggcgtctcacaaggcacctcgcgggcatcaccacgctccagcgcgtcggcgccggcatggccatgtcgggcctcgccatggccgtggcggcgctcgtcgaggccaaacggctccgcgccgcgagcgacgccgggctggtcgacaggccagacgcgacggtgccgacgagcgtgtggtggctggtgccgcaattcgtcctcctcggcacatcgaaggtgttcggcctcatcggcctcgaggagttcttctacgaccaggtgcccgtcgagctctgcagcgtcgggctcgccgtgtccctgagcgtgctgggcgtcgggagctacgccagtggcgtgctcgtgtcagcgatcgactgggtgacaaggggagaaggagagagctggttctccgataacctcaaccgcgcgcacctcgactacttctactggatccttgccacacttgccgcattggaggtcgccattttcgtgtacattgcaaagcgatatgtctacaagaacaaaggcgagcaataa

SEQ ID NO: 94778 - DNA, 6972 bp, Oryza sativa
  Clone ID: PAT_MRT4530_93035C.1
atgaggagctccatgaagcccgaggctgggcatcgtgctggaccagctagccccatgcggcagtccacgccggcgaggatgtctctaagacatggacattcgataaaagcagtggaggcaaccatagaaatcaagatcaccgaaggctcaagcgatttcggtgcacggtttgctgcacgcatgggcggtatcgctgatgaagtggtgctgatcgactacggtgaccggccggtgcccgtcgatggcgacggcgtcgttcagatctcacggcgggtggttgtcgtcgacaaagatggagtgctcaagctcaatgcaagagcttggagaggcaactcagatggggttgatgttgctggagaagatgatgccgagttcaccgctcagagtgctagaacatcaggtgctatacttgatgttggctttgcgaagttattgaagccggcaatcggcacaaacaaacgagagatccatatggagaaccacccattcccaaaacgacgccgtctgatggcgccgccgccgcggtcagcttccgccgccgccgccgccggcggtggctttatccctgatgatatacttttctccgaaatcctcgtccgacttcccgcgaagtgccttgtgcgattccaatccgtgtgcaagctgtggcgcgccaccataatcagcaccagcttcgcgcgccgccacctggagcattccaggcccaggccatccatggtcgtcatgccacggatgtttctgagtaaccccaagaagtttaaacttcagggtgtcactttctacaggttccagccagggcagagcaaggttgccgagctcatcctagagaagagatttccccgtgggatcccaatgttcagcatgcctctgcactgcgacggcctcatcctgatcccttgcgtctcgggagagatcttcgtgtgcaacctgacgaccagcgagttcgttgagctgccgagaggaagccacagtgttgcactggagcacagggtcgccttcgggttcgacccttggagtggcaagtacaaggtggctaggcacttcctccgctcatcacacagcggaggagaatcccgggctggacatgagatcttgactcttggtgatggagaagattgttggaaatggaaggcgaccatagatccgccatatcctatcaatgctaggactccgatctgtctcccagggttcttctactggagcgctctccactccacgaccggccatggccttagcaaggggctttctgagcaacaacgacatgctatgccagcttggtggcaagttgtgctatgtccactccgcctcgccatatttgataagaggacacaggattggtctgttgatgagaagaaaagggatcgtaaggctatgtcatatattcatcttcatctatctaacaatattttgcatgaggtgcttaaggaggagacagccgctgggctgtggttgaagctggaacagatatgcatgactaaggatcttaccaatgatgagtccgtgatggaccatctctccgctttcaaggaaattgttgctgaccttgagtctatggaggtaaagtatgatgaagaggatttaggccttattctattgtgttcattgcctagctcatatgcaaacttcagggatactatactttatagccgtgatactctaactttgaaagaagtttatgatgctttgcatgccaaagaaaagatgaagaagatggtaccctctgaaggttcaaattcacaagcagaaggcttggttgttcgaggcaggcaacaggagaagaacacaaacaacaaatcaagagataaaagctcaagtagctaccgtgggagatcaaagtccagaggcaggtataagtcatgcaaatactgtaagagagatggacatgatatctctgagtgttggaagctacaggataaagacaagagaaccggaaaatacataccaaaaggtaagaaagaagaggaaggtaaagccgcagttgttactgatgagaagtctgatgcagaattgcttgttgcttatgttggttgtgcacaaactagtgaccagtggatacttgatactgcatacacctatcacatgtgcccgaatagggattggtttgccacttatgaagttgttcaaggtggtactgttttgatgggtgatgatacaccatgcgaggttgcaggtattggaacagttcagaacgagatgtttgatggctgtattagaacattgtcagatgtgcggcatattccaaatttgaagagaagtctcatctctttatgtactcttgatcgcaaagggtacaaatattccgatggagacggaattttgaaggtaactaaaggctctcttgttgtgatgaaagctgatattaaatctgccaatctataccatctgcgaggtacaactatattaggtaatgttgcagtagtttctgattcattatctaattccgatgctactaatctttggcatatgcgtcttgggcatatgagtgaaattggtttggcagaattgagcaagcgaggattgctagatggacaaagcatcgggaagctcaaattttgtgagcattgcatctttggcaagcataagagggtgaagttcaacacatctacacatactactgaaggtattcttgattatgtgcattctgatttatgggggcctgctcgtaagacatcttttggaggtgctcgttacatgatgactatcgttgatgattattcgcgaaaagtttggccttatttcttgaagcacaaatatcaagcttttgatgtgtttaaagagtggaaaactatggttgaaagacaaactgaaaggaaggtgaaaatccttcgtactgacaatgggatggagttctgttctaagatatttaaatcatattgcaagtctgaaggcattgtgcgtcactacaccgttcctcacacacctcaacaaaatggcgtagctgagcgtatgaacaggacaattatatcaaaggcccgttgtatgttgtctaatgcaggtttgcctaaacagttttgggcggaagctgtttccactgcttgttatcttatcaatcaatcacctagttatgccattgataagaagactccaattgaggtatggtctggttccccagcaaattattcagacttaagagtatttggttgtactgcttatgctcatgttgataatggtaaattggagcctagagctattaagtgcatttttcttggttatccgtctggtgtgaaaggctataagttatggtgtcctgaaaccaaaaaggttgtgattagtagaaatattgtcttccatgaatcagttatgttacatgacaaaccttctactaatgttcctgttgagagtcaggagaaagcaagtgtgcaggtggagcacttgatcagttcagggcatgcaccagaaaaagaagatgttgctattaaccaagatgcacctgttattgaagattcagattcttctattgttcagcagtctccaaaacgttctattgcaaaagataagcccaaaagaaatattaaaccttctcgaagatatattgaagaagcgaacatagttgcttatgctttgagtgtagcagaagaaattgaaggtaatgccgaaccttctacatattctgaggctattgtttctgatgtttgcaatagatggataactgctatgcatgatgagatggagtcacttgaaaagaatcatacttgggaattggtgaagttgccaaaggagaagaaacctatccgttgcaagtggatcttcaaaagaaaggaaggtatgtctccaagtgatgaggcaaggtacaaagcaaggttagttgctaaaggttatagccagattccaggtattgatttcaatgatatcttttcccctgttgtgaagcatagttcaattcgtactttactcagtattgttgcaatgcatgattatgaactagagcaaatggatggtaagactgcatttttacatggggagttagaagaggacatttatatggagcaacctgaaggttttgttgttcctggaaaagagaacctagtctgtagattgaagaaatctctttatgggttgaagcagtcacctagacagtggtataagagatttgactctttcatgctttctcagaagtttagaagatccaattatgatagctgtgtttatcttaaagttgttgatggttcagctatatatttgcttctttatgtcgatgatatgttgattgctgcaaaagataaatcagagatagaaaagttgaaggcacaattgagtagtgaatttgagatgaaggatttgggtgcagcgaagaaaattctcggtatggaaattactagagaaagacattctggcaagttatatcttagtcagaaatgttatagtgaaaaagttcttcgtcgtttcaatatgcatgatgcaaaaccagtgagtactccgttagctgcacatttcagattatctttagatttatgtccacagtcatattatgatgttgaatacatgtctagagttccttattcaagtgcagttggttcacttatgtatgccatggtatgttctcgtcctgacttatcacatgcattgagtgttgtcagtagatacatggctaatcctggcaaagagcattggaaagctgttcaatggattttcagatacctacgtggtacatctagtgcttgtttgctgtttgggagatctagagatggacttgttggttatgtggattcagattttgctggagatttggataggagaagatcgttcacaggttatgttttcactattggaggatgtgctgttagttggaaggcaagtttgcaagcaactgttgccttatttactactgaagcagagtatatggctatttctgaagcttgtaaagaagctatttggcttagaggtttgtacactaagctttgtggagttacgtcttgcattaatatattttgtgatagtcaaagtgcaatatgtcttacaaaggatcaaatgttccatgagagaacaaagcacattgatgtgagatatcactttattcgatgtgtgattgctgaaggtgatgtcaaggtatgcaagataagtactcatgataacccagctgatatgatgacaaagccagtttctgctactaaatttgagctttgctcaagcttgctcaatgtatccgtctgcgtttctctggccgatcgagaacaggttttcctatccattgatggctgttcttggcatgtccatgattcatcatcaccatgtgcgtcgagctggagctgggccagtcaggttggtgacaggattcagctgcggccattctcggccgctccggcgatcgtcggggatgggattgaggatgtggatgatcggagggtcaagcagatgcggaggaggcgcgacgcccgcatcgcgcagaaggcattcatggagtacctccatgtcacgcgtgggatttgcttcagtgatgccgagcacatgagcaagcgctcgccgatcttcatcagcaagctgctggagaaggtgaaggatgcggcgaaggagcccacggaggagggggaggaggtgcccttcaggtcgaaggtgaagaagagggagatgagggatgagagggtcagcaaggcgttggtgcggctgttcaacttccaccctatcaacgagttcgagccgttcttcgagagtatcggcatcgcgccgggcgagtatgagccattgttgcctcgtgatctcatgtttctcaatgatgatgagacgatgctcgacaatttccgggtgctttgcaactatggcatcgcgcgcaccaagatagggaggatatacagggatgctaccgaagtgtttagttttggccatggagttcttgcgtcgaagctgaaggcccttgaggatcaagggttgagtaagaccagtgtgatcaagctagtgatgtcgagccctgtcatactggtccgtgatccaaatgtggaattgaagattctgcgctggctagatgatgttggaattcagagagactggcttggccgattcttatctgtaaagaagtcttataactggggaaagatggtccaagtccctcagttcttcagtgatttaggattcactaatgaaggtattggcaaattggtcagacagaatcccgatttcttgtttagtggttcaggaaagatgctgttctcggcagtcctcgtcatgctaaaagctgggtttggaaaaaaggaattggttgatctttttctgaatttcccaaatttgtcagtcgacaatttcacgaggaacctgcgaaggggcatattcttcttagctgagattggtgttagtgaagaggacattaagaaatttgtggtgtctaacggttcaatacttggttccgtccaattgaagaaaccaaacagcattatgacacatctcagtgtagggaagaagcgcctttgcaggatggtaatggaggatccacaactgttgatgaaattctcattaggggcaaaggtcagccgcataccgaaagttgatctccatgaagcatccttcaaggagaaggtgaaatttttacagaacttaggatttatggaaggatccgaacgaatgacgaggggactcaaagcatttcgtggtaaaggtgacgagctaaaagatcgctacgacttcttggtcaagaccggtttggacccggaacatgtggtgcagatgatcactatggctccacatgttctgaatcagaagatccatgtccttgaatccaagatatccttccttgtaaatgatatgggatatcctctgagtaccctggtaattttcccttcattcctctcgtttaccgtggagagaaccaagcttaggtttttgatgtacaattggttgttggagaaaggagtgattgctactggactagctcttagcactctcctagccactgcagacaaacatttcgtaaaacgttatgtagtaaggcaccccatgggtttagaagtctgggagaaattcaagacagagggtacagatgaatga

SEQ ID NO: 94779 - DNA, 774 bp, Oryza sativa
  Clone ID: PAT_MRT4530_93036C.1
atggcggatatggctccagctcgagcactcgccttggtgttgctcgcagttgcagtcggcagcgcgttgatggccgcggcccaggatgcgccgtcgccaccgacaccgatggctccgtctccgtctaccgatgaaactccgcccgtgtggctgaaggcgcacgcgacgttctacggcggggcggacgcgtcgggcaccatgggcggggcgtgcggctacgtcgacctgtactcgcagggtgctacaagatcgcctgcgaccgcaagagggcgccccagtggtgcaagcccgagggtcaccgtcaccgtcaccgccaccaacttctgcccgcccaactggaacctccccagcgacaacggcggctggtgcaacccgccgcggccgcactttgacatggcgcagcctgcttgggagaagattggcatctaccgtgctggcatcatcccggtcatgtaccaaagggttccgtgtgtgaagaagggtggggtgcggtttaccatcaatgggcatgactactttaatcttgtgctcgtgacaaatgttgcaaccactggttcgatcaagtcgatggacatcatgggctccaactcaaccgactggatgccaatggtgaggaactggggtgcaaactggcactcgctgtcgtatctcaccgggcagatgctctccttcagggtgacgaacatggatggccagacactagtctttaggaacattgtgccctctggatggaagttcgggcaaacatttgcaagcaaactgcagttcaagtaa

SEQ ID NO: 94780 - DNA, 231 bp, Oryza sativa
  Clone ID: PAT_MRT4530_93037C.1
atggaagaatcaccggaggatgatgcagagggaaataggtttacctggcgtggcggcgagatggaggcggggaggagcggaggaggagaggagctgagccatggtggtgaggtgatgcaggagtggagactggagacaggagcaggggaaggggaaggggaagaggagcttcttgattcttatccgcgggtagcgaactcggtcagtttcagtggcctgatccgggtctaa

SEQ ID NO: 94781 - DNA, 789 bp, Oryza sativa
  Clone ID: PAT_MRT4530_93038C.1
atggcttcatcgcctcgagctttcgcgttggtgtttttcgcaatcgcggccgtcggctgcactcagctgaccacggccgacgacgcggctccgcccgtgtggcagaaggcgcacgcgacgttctacggcggcgccgacgcgtcgggcaccatgggaggcgggtgcgggtatggcgacctgtactcgcaggggtacggcacgcggaacgcggcgctgagcacggcgctgttcaacgacggcgcgtcgtgcgggcagtgctacaagatcgcctgcgaccggaagagggcgccgcagtggtgcaagcccggcgtcacggtcaccatcaccgccaccaacttctgcccgcccaactgggacctgcccagcgacaatggtggctggtgcaacccgccgcggccgcacttcgacatggcgcagccggcgtgggagaagattggcatctacagcgcgggcatcatcccggttatctaccaaagggttccatgcataaagaagggtggggtgcggtttaccattaacgggcacgactacttcaatcttgtgctcgtgacaaacgttgcaaccactggttcgatcaagtcaatggacatcatgggatccaactcaaccgactggatgccaatggtgagaaactggggtgcaaactggcactcactatcgtatctcacagggcagacgctctccttcagggtgactaacatggatggccagacgcttgtcttcaagaacattgtgccatctggatggaaatttgggcaaacatttacaagcaagctgcaattcaagtaa

SEQ ID NO: 94782 - DNA, 837 bp, Oryza sativa
  Clone ID: PAT_MRT4530_93039C.1
atggcggatatggctccagctcgagcactcgccttggtgttgctcgcagttgcagtcggcagcgcgttgatggccgcggcccaggatgcgccgtcgccaccgacaccgatggctccgtctccgtctaccgatgaaactccgcccgtgtggctgaaggcgcacgcgacgttctacggcggggcggacgcgtcgggcaccatgggcggggcgtgcggctacgtcgacctgtactcgcaggggtacgggacgcggaacgcggcgctgagcacggcgctgttcaacgacggcgcgtcgtgcgggcagtgctacaagatcgcctgcgaccgcaagagggcgccgcagtggtgcaagcccggcgtcacggtcaccgtcaccgccaccaacttctgcccgcccaactggaacctccccagcgacaacggcggctggtgcaacccgccgcggccgcacttcgacatggcgcagcctgcttgggagaagattggcatctaccgtgctggcatcatcccggtcatgtaccaaagggttccgtgtgtgaagaagggtggggtgcggtttaccatcaatgggcatgactactttaatcttgtgctcgtgacaaatgttgcaaccactggttcgatcaagtcgatggacatcatgggctccaactcaaccgactggatgccaatggtgaggaactggggtgcaaactggcactcgctgtcgtatctcaccgggcagatgctctccttcagggtgacgaacatggatggccagacactagtctttaggaacattgtgccctctggatggaagttcgggcaaacatttgcaagcaaactgcagttcaagtaa

SEQ ID NO: 94783 - DNA, 935 bp, Oryza sativa
  Clone ID: PAT_MRT4530_9303C.1
cccgcgccgcgcggcagggatacggcacgaggcaaagaacttcccttgcaccaccacctgatcagagaagtagctagctgcaggagagaaaccgaccaacaatgacggagtactactccagcaccgtggacgagtgctacgagaccaccggcaggcagcacggccacgggcacggccacggtcacgggcacgggcacgggcatggtggcatgagggtggagtcccacaccgacgactactacagcgagggcggcgagatcgaccgtgggaggaggaacaactccatgcactcgcaggagtacctgatgaggcagcagagcggccatggcggctacggctacggcggcggccagcagcaggagtactacaagcgggaggagcgcgagcacaagcagcgcgagcgcgtcggcgagatcggcgccctcgccagcggcgccttcgctctctatgaggggcaccaggcgaagaaggacccggcgaacgcgcagaggcacaggatcgagcagggcgtggcggcggtggcggcggtgggcgccggcggctacgcctaccacgagcaccgcgagcagaagcaggccagctacggcgccaaggagcagcagtacggctacgccaggatgccgcagcagcagggctactactgcaactgattaattattaatcacccccaaattattaataatccatgcgtacgtacgtaccactaaataaatactggctactacgtacgtatatatacggtacaataagatgagcaaggatgtacgtacgtacacgtatatacgttgctcacccacaatttcgccgccgcggccgcgcgccttattccaaaccagtgtatgtgtgtacgtacatctatatatgtactgtgatttctgtaaacgtgtggccatcggatcgatgaattctaccgtgatgatagaaacggcttcctc

SEQ ID NO: 94784 - DNA, 975 bp, Oryza sativa
  Clone ID: PAT_MRT4530_93040C.1
atgccggaactggcacaccgggttgccgccgcctcctctcctgctggatccgacggaggggagggcaccgccgccgccgtgacaccgggctgccaccgcctcccctcccctcctgttggatccgggacgtcgggtcgctgccgcctcccctcccactggatcagtggaggggagggcgccgcccgtgcccgccgcctcccctcccgccgtaagggagggcgccacccaccaccgtcaagcacctgcggggtcactgggttggagaacgtctctggtgatcaacaaggctcaaggctgtccgccaaatgggacgcggagaggcacgcaacagcgaccacacggtggagtgtgctgaagcctgcagccctggcggtgagggacccaggcaacggcaacaataatcaagcaggctgcggactcacggtggaagggctcggggttggcagccttggtggggtgtcgatggtggagttgatgcgtggcgaatcagcggcggcggctagggacgaccttggctccgtcagtggcagcggtggtggatgggaggaggacgcggcggacatgccggtggacgcggcggcggtggcggagcgggcggagtggcggtggccgaagcatgccggcaatagcggggcgggcagagaggaaggaggtgaggaggccagggagcgggctgaggagggaggagaccggcgagggagcgtggaggccggaagagtcgtcggagtcatcccccagccgtcgccgtcgtcgttcgagctgctcccgccggagtacgatgagtccaggctcccctccgctgtcccctcctcctgccgcctcgagctccggtgggcgcggtggggtgtgcgcgccgacctcccgacggggggcacgagcgacgtccggcccgccggccaccgccgcctctccaccacgcccgccgcctaccccgaccccaccactccccgccgcgcccgctgcccgtccgcgtga

SEQ ID NO: 94785 - DNA, 576 bp, Oryza sativa
  Clone ID: PAT_MRT4530_93041C.1
atggccgccgaagagggggtagtgcctttggcccccgtcgtcgaagctggtgtggcatcattggcttcggcacccgcgccgcaaccaccatcttcagctcccgcaattcatgggttggagccgcgggctcggcagtcatcggagacggcgcgctgcggtggaggcggcagcgcagtcacggacgggacagggcccaggctggggtcacagctagcggcagatcagggcaagcgacggctaccatgtccagatttgcgactgactccgcccgccaggaagaagcggccgacggtcgagggagaagtcacggtggccggatccgtggttggcggtggggtggcggaggaggaagtggccgacggtcgggggagaggctgcggtggccggatccggcggttggtgatgtggtgctggagaaggaagcggctgacggtcgggggagaggccgcggtggccgaatctgtgcgtcgtaggccagatccggtggtgggcggggaggcggcggctgccaacggtcgggaggcggggaggcatcagcggccggcgctcgggagggggccacggcccgatctgtga

SEQ ID NO: 94786 - DNA, 461 bp, Oryza sativa
  Clone ID: PAT_MRT4530_93042C.1
atggcaacagcccgacggaatcaaataatgccaagcaatatacctaagaaatatcaggagatcgatcaggccaaccaccatctacagacctcgcccccacattgcgtcgggttccgcgggagcgggagatcgagcgagaagatgsccgccacsywmgsckaacacacackkkccckkcrtwksgyygssyksssyyyysrrcccrrcccrrccsyakkkkkcckaygskkcsmrrrkyssmrcrmmwkcgscccccgsssccsmgmcgcagcgaggcggcgggggcggggcggcggctcggagcgtgccgctgggcattcgtcgtcgtcggcggcggcggcgccaacacgcccgcgcgcgcggcctacgcgcggcggctgtgggctcgtgtggtggggaagggagatagctcaagttgtgggcccgacaacgcgtgcgccgcggccgggctgagttgggaa

SEQ ID NO: 94787 - DNA, 1248 bp, Oryza sativa
  Clone ID: PAT_MRT4530_93043C.1
atgccgttcggcggtaccgccgcggggctgagggcgctatcgctcccgcgcatcggtaatgtggtaccgactcggtcgcgcatcccggttctgcgcgaccggctcgggttccgctcccgcatccccaaattcgtgtactcaataattgacctcaagctgtcaatgcttaccatatttctgttggacatttactcaaggtcgcgctgccggctgtggaacaaagacgacgaaggccagaaagccgcgtggttgtcgcttcgacaacagctggcgccgactgtggggacctctgagcgaaaccacggagagcgaatgtcaccgaagagggtcgcgaaggagaaggttgctaagcgaaaggagagtgaagcaggaggggagatggccgccgaagagggggttggagccgcgggctcggcagtcatcggagacggcgcgctgcggtggaggcggcagcgcagtcacggacgggacagggcccaggctggggtcacagctagcggcagatcagggcaagcgacggctaccatgtccagatttgcgactgactccgcccgccaggtgatcaggatccgacggtggtaccgtaccggcagaaagggttgcacagcaggaaggaagcagcgccggatggtgcgcggcagggtcagcaacgggagggttgtgcgtgaatgtgcggctggatggttcgtcgacggcaaagtcggactgtggctgccgatcgagcagaacgggaacgtcttattgttggaggtacactacgaagggtcttcggttggacctaccgaaaccaagaacataggtgacacgctcagaccggaagcaagcggcgaaggacaaaaagggaaccatatgggcgaaagccacatggagaaagcagtggctcggaacacacagacttgggcaggcaaaaggcctcgtcagaaggccgcacgggcgaagatggtgaggaagaagcggccgacggtcgagggagaagtcacggtggccggatccgtggttggcggtggggtggcggaggaggaagtggccgacggtcgggggagaggctgcggtggccggatccggcggttggtgatgtggtgctggagaaggaagcggctgacggtcgggggagaggccgcggtggccgaatctgtgcgtcgtaggccagatccggtggtgggcggggaggcggcggctgccaacggtcgggaggcggggaggcatcagcggccggcgctcgggagggggccacggcccgatctgtga

SEQ ID NO: 94788 - DNA, 550 bp, Oryza sativa
  unsure (1)..(550): unsure at all n locations
  Clone ID: PAT_MRT4530_93044C.1
ttcgacaaaactggaactccacgcggtggcggccgctctaaactactggatcccccgggctgcacgaattcggcacgacacaacaacaacacgaccgacgaatgcgccgctcgccgccggctgccggtgaggccgcgaccacccttcccgccgctacccccgccctggaaggcagcccccgacaggatcgcggaggtctccatcagttctggcggagactatgttcggagcaaagcacaactgcacaagggcaacagtactgacatggataatcgcatacaggttgaaatcacaacatgccacgattttcatgacactgagtttggccaaacttttgttccctaattatgtatggatttttctgttacattttctactttatatatattccaattttaaaaaaaaaaaaaaaaaaaactccaggggggggggcccggtaccccatttccccccaatgtttaattccttttttccatttcccttggccctcctttttttacaaccttcctttgatttggggaanacccnttgcctttnccccactttantc

SEQ ID NO: 94789 - DNA, 474 bp, Oryza sativa
  Clone ID: PAT_MRT4530_93045C.1
atgtggtggccggcgcgatggcgagctcgggcgcggagatgttcgaacgcgccaggtgctcaacctcgggccctgccgccggcgagcggcgcgctttccccgtcgaccctttctccctccctcgccttctcgtcctacaccgccatcctctccgcgcactcccgccacggccgcctccgggaggccctctccctcttctccacctccgcggtcgtctgccctgacatcgcctcttttctctcctctcttctcttcttcttcaatgagggaggccgacggccagcgggcggagccgcgacgggcccgcgcgatttccctaacgaatgcgggcggcagatgcgggcacggcggcgtgtggggaagaagcgggagagggggccggtgcggcggtgggcggcatggagatggggagaggaggcgggcgcggtggcaggcggcgcggagagggggagagaggcggccgggacggcatga

SEQ ID NO: 94790 - DNA, 2266 bp, Oryza sativa
  Clone ID: PAT_MRT4530_93046C.1
cccgttttttgcgtgcgtgtggtttccaactttggctcgcccctccgggcgcaaacaccacaacacctcgcgcccatgcgaggacgcagccatccatccatccacccagcccccacactccttcggcgcgcgcgtccgtcctcgatcgcgcgcgcgtcgacgagctaagccggcccgggaaacccaaggcccctctcccttcctcaagcgcgccggcgggcctcgccggcgcgcgacattgagctcaacccccccgtcgtagtcgcacgtcgagcgccaccaccaccgccagcgcgtcgcatcgtacgtcctccacgcgcggcgccgtgctaggcaacctcctctgctgatcgcccgcctcctcatgagcgtgtgacctgctgtcgaatggtgcggcggcacctgctgcgcggacacagcctggacaggttcctgccgatcaggagcctcatcatgtcgtccagctcttccttctcgtcgtcgtctccgtcgccgccgccgccgtcgtcgtcgtcgtcacggggaagcagcagcggcaggtggtgcggcgtcagcgtggccgaggaggacgaggacgatgccgccgtctccgcgacgacgaccccgccactgccgccgctgcagaagcgggtgctgtcgaggagccacgggtccaaggccaagccgctgggcggctccgtcgaccacctgccgccggtggtgccgccatcgtcgaagaacgtccgtgacagtggaccgccttcagagattgatctggtgaaggagaagttcgccaagctgctgctcggcgaggacatgtccggcaccggcaaaggtgtctcctccgctcttgctctctccaacgccatcacaaatctcgcagcttcggtattcggggagcagcgccggctcgagcccatgtctgccgaccggagagctcgatggaacaaggagatcgactggctgctgtcggtcaccgaccacatcgtcgagttcgtcccttcgcaacaggcgtccacggatggaaccagcatggaggtgatgggtacccagcagcgcagagatcttctcatcaatatcccggcattgcgaaaactcgacgccatgctccttgagtatcttgacaatttcaaagatgaacaagaattctggtacgtaaaaaaagacgcagatgagggtgaaaagggcgatgcgccaagacagggcgacaagtggtggatccctacagttcgagtccctcccgagggtctgccagatgcgtcgaaaaaatggattctgcaccagaaagaccttgtagggcaggtgctgaaggcagccatggctatcaatgctgatgttcttacagagatggagatcccgggagagtacattgaaactctgcctaagaatggaaggtctagtcttggagactcgatatacaaaattataactgatgatcatttcgatcccaatgagctcttaagttctgtagacttgtcgacagagcacaagatcgtcgatctcaaagaccgaattgaggcctccgttgtaatttggcagaggaaaatttccaataagctttcctggggccccggtgttagcttggagaagcgagagcagtttgaagagcgggcgcaaactgtcctactcatcctcaagcaccagttccctggggttcctcagtcatcacttgacatcagcaagatacaatacaacaaggatgttgggtatgccatcttggagagctactccaggactcttgagagcttagcctttgcagttttatctcggatcgaggatgttcttcacgctgatgccattgctagagacccaaagcgcacgaaatcaaggagaaggcccagtctagttgacatccccgagatcattgacaatgcactggaggaagaggagactgtgaacagcatagatgccaattcacaagtgaccaacaactctattcactggcaagagcaagaacacgaggacaaaggcgcgaggctgaggaaagtccaccgcatggtcacaaagaaacttttgcacattgagaaagttgataatttggggggtgggttgaaaagcttttctcataggtagctgtagcctgaaaaaatggtcagacagctgcatgcttggttgtgctaccggggggagcacctgtaaatagctcaaacttcagagaggctggatgggttgtattggcgatttggcggtgtaatctgctcatctcagttgagatgaaatcagtatgcatatttcacggcctcattttggttggaaaaaaaaaaaaaaaaaaaaaaaaaaaaaggaa

SEQ ID NO: 94791 - DNA, 341 bp, Oryza sativa
  Clone ID: PAT_MRT4530_93047C.1
attgctcctcctccgctcgctcctccgcctcgtctcgctgctgtcggcgccggcgcggggagggagggagaccgacgagcggcgtcgtggaggactggaggtgaacggcggcggggcggtggggctgccggaggcgtggtcgcacgtgaggtcgccggtgatcgtgccactgctgaggctggcggtggcggtgtgcctgaccctgtcggtgctgctgttcctgcggaggatgtgcctggcggtggtcgtctccggcgtccagattctgcgccggcggcccgtccgccgtttccgttgcgaccccttccccgacgaccaccccgaggtcggctcctgcgcct

SEQ ID NO: 94792 - DNA, 333 bp, Oryza sativa
  Clone ID: PAT_MRT4530_93048C.1
atggccgacggctcgaaacgtgatcgtttcagcctcgggccgaggaagaggaaggagacgagcgcccggagtccacgtcatgggtggctatgtcggttcgggaaccgaccttggggcagtgctggggcgagggagcttcgaggagaaggaatgggctcacgggtgcggggtcaaacaacatgggcgacggctggcgcggcgcggctgctcctctgcgtccaggcgctggaatcgagcgagggaacggagggagggcgaggcgtcgggcgcggcgcaggcggcgcagcatggcagggcgcggggccggacggcgcaggcacgggcagcaagtga

SEQ ID NO: 94793 - DNA, 1155 bp, Oryza sativa
  Clone ID: PAT_MRT4530_93049C.1
atggcggccgcaggcatcgggcacatcccctcggacgccgtcgtggagatcctggtgcgcctcccgccgagctcgcggcggcggtgccgcctcgtgtgccggcactggcgcgacctcgtcgacgaccgcacgccggagatgcggagccgcgccaaggcgctcgtcctggtccacgccgtcgcgcacgtgttcgacgacctgccggaggggcggcgccggcagctgctgcccaactgccgcggcgtcgacatcgtcggcacgtgcaacgggctggtattcctgtgcgagtggtccaggggcttcgccctggtgaacccgttcaccggcgagagggtggacggcgccggcgtcccgccgccgccgtgtccgcgcggcgaggagccacccttctaccagccgacgcacgcggcgtacgccttcggctaccacccgacgacggggaggtacaagatcgtgcacttccccatccaggacagacggaccgagacgttcgacgcggtgcgcgtgctcacgctcggggcggaggaggacgcgtcgacgtcgtggcgagacgtgccgatgcccgccggcggatcgagccgccgcggcagctgcggcgtcgtcagcgtagacggctccacgtactggatcaccagggacaccgagagggtcatgtcgctggacctcggcgacgacgagcgcgtcgccgccgtcacgccgctgctcccggcgcgcacggcggggccgggctgcacctgcaagctgacggacgtgcgcggcaggctcggcgtcgccgtcagcgtcagcatggcgacgagcaccgacaccgacgtgtgggtgctcaaaggaggaggaggcggcggcggcgagcggcggtggagccggcggtacagcgtgcgggtgcacggcgtggagcagcagctggcgtggccgcacttcgcccacggcgagcacgtcctgacgacgtcgacgcactgtagcatccgggggttcttgtacgcgcaccggctgagcgacgacgggaggcggcggctgcagtgcagcgcggtgaggatcaacgagcggcggccggggaaggtggtgggctcgttcggcgcttgttaccgccgggatctccggaccttcgcctacgtcgagaccaccgagccggtcagcgtgttcagcctccggggatga

SEQ ID NO: 94794 - DNA, 520 bp, Oryza sativa
  Clone ID: PAT_MRT4530_9304C.1
tcggaacttcgcttggaccaccacctgatcagagaagtagctagctgcaggagagaaaccgaccaacaatggcggagtactactcgaacaccgtggacgagtgctacgagaccaccggcaggcagcacggtcacggccacggccacggccatggcggcatgagggtggagtcccacaccgacgactactactgcgagggcggcgagatcgaccgtgggaggaggaacaactccatgcactcgcaggagtacctgatgaggcagcagagcggccatggcggctacggccacggcggcggccagcagcaggagtactacaagcgggaggagcgcgagcacaagcagcgcgagcgcgtcggcgagatcggcgccctcgccagcggcgccttcgctctctatgaggggcaccaggcgaagaaggacccggcgaacgcgcagaggcactaggatcgagcagggcgtggcggcggtggcggcgggtggcgccggcggctactcctaccacgagcaccgcgagcaga

SEQ ID NO: 94795 - DNA, 153 bp, Oryza sativa
  Clone ID: PAT_MRT4530_93050C.1
atggaccttgggaacaaggatcagtggcaaatccagggggcaaaaggaggtggagctgtgagggtcgtgctggagatggctggggttgaaaatgctctggggaaacagctgaggagcaagaaccccctcaacaatgcaagagctaccatctag

SEQ ID NO: 94796 - DNA, 243 bp, Oryza sativa
  Clone ID: PAT_MRT4530_93051C.1
atggagcggagccgagccagcggcatcaccaagctcgacaacacggcgacagctatggatcttgagctcgaggtcaccatgatgcagacgccgagcaaccttggcgagctcactggggagcaaggattcgggacaacaaccgtcggcaccacggaagacagtcaaggtgggggcaaccgccgtgcctctctactcttgcttcggcttctagatccaagaggtcgaggcgatggccgaggttaa

SEQ ID NO: 94797 - DNA, 159 bp, Oryza sativa
  Clone ID: PAT_MRT4530_93052C.1
atgcgaaaaaagacaacaggaactgcgggccaggcgaaaatcggcctaggggagggcggcaagaggtctaccttcacatcccatcgacgaccggaagtaagagagagaatggcggtctgccaagtcaacatcgccgccctctgggagggcgatttttaa

SEQ ID NO: 94798 - DNA, 390 bp, Oryza sativa
  Clone ID: PAT_MRT4530_93053C.1
atgggtcgacggtgctaccgtgatgtgttctggctggtggtgctcctgttccacctgctcgtcttcgtcggggcgcttgcggtcactggcctcaaccgcttcgcccaggccgaccgcttcaccaacctcactgctacacatcgcttcactgaatcgctggagcccgtgagggagttgctccagcgcccgacgctcgaggttgaggaggtcaccccactaagctcacggagtcgtagtagccctactatggcaccacggggctgtggggtctattatcgcatgggcatggttggtggcaactattgggagcctaggaggaaagatgcggagagggtggtcatgagggccgccacgcacaacctcaccacgtacctcacggtgttgacttag

SEQ ID NO: 94799 - DNA, 251 bp, Oryza sativa
  Clone ID: PAT_MRT4530_93054C.1
gagttggaactgtaccaaacagacccttagagaaaagtggggctctttcactttacgttaaaggagctccgtccccggggacatggacggttggatgcggttttgccgccaatctcctcgcgctgcatgaccaaagcttcggcggcggaaacgcccacggcgcggctcggctcggctctgcggaaaccgggaaaactttcggtgttatcaagggcaaagatgccggtggaatcttagaccgtggcggtggc

SEQ ID NO: 94800 - DNA, 381 bp, Oryza sativa
  Clone ID: PAT_MRT4530_93055C.1
atgaagaagatggtaccctctgaaggttcaaattcacaagcagaaggcttggttgttcggggcaggcaacaggagaagaacacaaagaaccaatcaagagataaaagctcaagtagctaccgtgtgagatcaaagtccagaggcaggtataagtcatgcaaatactgcaagagagatggacatgatatctctgagtattggaagctacaggacaaagacaagagaaccggaaagtatataccaaaagttgtgcacaaactaagtgaccagtggattcttgatactgcatgcacctatcacatgtgcccgaatagggattggtttgccacctatgaagctgtccaaggtggtactgttttgatgggtgatgatacaccatga

SEQ ID NO: 94801 - DNA, 3510 bp, Oryza sativa
  Clone ID: PAT_MRT4530_93056C.1
atggcgagtttgaagtatgatctaccgctcctggaccgagacacaagattctcaatttggcaagtgaagatgcgagccgttcttgcacaacaagacctcgatgatgcgctttctggatttgacaagaggacacaggattggtccaacgatgagaagaaaagggatcgtaaggctatgtcatatattcatcttcatctatctaacaatattttgcaggaggtgcttaaggaggagacagccgctgggctgtggttgaagctggaacagatatgcatgactaaggatctgaccagtaagatgcacctgaagcaaaaattatttttgcacaagttgcaagatgatgggtctgtgatagaccatctctccgctttcaaggaaattgttgctgaccttgagtctatggaggtaaagtatgatgaagaggatttaggccttattctattgtgttcattgcctagctcatatgcaaactttagggatactatactttatagccgtgatactctaactttgaaagaagtttatgatgctttgcatgccaaagaaaagatgaagaaaatggtaccctctgaaggttcaaattcacaagcagaaggcttggttgttcgggatagccaacaggagaagaacacaaacaacaaatcaagagataaaagctcaagtagctaccgtgggagatcaaaatccagaggtaggtataagtcatgcaaatactgcaagagagatggacatgatatctctgagtgttggaagctacaggataaagacaagagaaccggaaaatatataccaaaaggtaagaaagaagaggaaggtaaagccgcagttgttactgatgagaagtctgatgcagaattgcttgttacttatgctggttgtgcacaaactagtgaccagtggattcttgatactgcatgcacctatcacatgtgcccgaatagggattggtttgccacttatgaagttgttcaaggtggtactgttttgatgggtgatgatacaccatacgaggttgcaggtattggaacagttcagatcaagatgtttgatggctgcataagaacattgtcagatgtgcgacatattccaaatttgaagagaagtctcatctctttatgtactcttgatcgcaaagggtacaaatattccggtggagacggaattttgaaggtaactaaaggctctcttgttgtgatgaaagctgatattaaatctgccaacctgtaccatctgcgagaattgagcaagcgaggattgctagatggacaaagcatcgggaagctcaaattttgtgagcattgcatctttggcaagcataagagggtgaagttcaacacatctacacatactactgaaggtattcttgattatgtgcattctgatttatgggggcctgctcgtaagacatcttttggaggtgctcgttacatgatgactatcgttgatgattattcgcgaaaaatttggccttatttcttgaagcacaaatatcaagcttttaatgtgtttaaagagtggaaaactatggttgaaagacaaactgaaaggaaggtgaaaatccttcgtactgacaatgggatggagttctgttctaagatatttaaatcatattgcaagtctgaaggcattgtgcgtcactacaccgttcctcacacacctcaacaaaacgtcgtagctgagcgtatgaacaggacaattatatcaaaggcccgttgtatgttgtctaatgcaggtttgcctaaacagttttgggcggaagccgtttccactgcttgttatcttatcaatcgatcacccagttatgccattgataagaagattccaattgaggtatggtctggttccccagcaaattattcagacttaaaagtatttggttgtactgcttatgctcatgttgataatgttatgttacatgacaaaccttctactaatgttcctgttgagaatcaggagaaagcaagtgtgcaggtggagcacttgatcagttcagggcatgcaccagaaaaagaagatgttgctattaaccaagatgcacctgttattgaagattcagattcttctattgttcagcagcctccaaaacattctattgcaaaagataagcccaaaagaaatattaaacctcctcgaagatatattgaagaagtgaacatagttgcttatgctttgagtgtggcagaagaaattgaaggtaatgccgaaccttctacatattctgaggctattgtttctgatgattgcaatagatggataactgctatgcatgatgaaatggaatcacttgaaaagaatcatacttgggaattggtgaagttgccaaaggagaagaaacctatccgttgcaagtggatcttcaaaagaaaggaaggtatgtctccaagtgatgaggcaagatccaaagcaaggctagttgctaaaggttatagccagattccaggtattgatttcaatgatgtcttttcccctgttgtgaagcatagttcaattcacactttacttagtattgttgcaatgcatgattatgaactagagcaaatggatgttaagactgcatttttacatggggagttagaagaggacatttatatggagcaacctgaaggttttgttgttcctggaaaagagaacctagtctgtaggttgaagaaatctctttatgggttgaagcagtcacctagacagtggtataagagatttgactctttcatgctttctcagaagtttagaagatccaattatgatagctgtgtttatctcaaagttgttgatggttcagctatatatttgcttctttatgtcgatgatacgttgattgctgcaaaagataaatcagagatagcaaagttgaaggcacaattgagtagtgaatttgagatgaaggatttgggtgcagcgaagaaaattctcggtatgaaaattactagagaaagacattctgatttatgtccacagtcagattatgatattgagtacatgtctagagttacttattcaagtgcagttggttcacttatgtatgccatgtttgggagatctagagatggacttgttggttatgtggattcagattttgctggagatttggataagagaagatcgctcacaggttatgttttcactattggaggatgtgctgttagttggaaggcaagtttgcaagcaactgttgccttatctactactgaagcagagtatatggctatttctgaagcttgtaaagaagctatttggcttagaggtttgtacactgagctttgtggagttacgtcttgcattaatatattttgtgatagtcaaagtgcaatatgccttacaaaggatcaaatgttctatgagagaacaaagcacattgatgtgagatatcactttattcgaggtgtgattactgaaggtgatgtcaaggtatgcaagataagtactcatgataacccagctgatatgatgacaaagccagttcctgctactaagtttgagctttgctcaagcttggtgggtgtgacagtatag

SEQ ID NO: 94802 - DNA, 3414 bp, Oryza sativa
  Clone ID: PAT_MRT4530_93057C.1
atgcatctgaagcaaaagttatttttgcacaagttgcaagatgatgggtctgtgatggaccatctctccgctttcaaggaaattgttgctgaccttgagtctatggaggtaaagtatgatgaagaggatttaggccttattctattgtgttcattgcctagctcatatgcaaacttcagggatactattctttatagtcgtgacactctaactttgaaagaagtttatgatgctttgcatgccaaagaaaagatgaagaagatggtaccctctgaaggttcaaattcacaagcagaaggcttggttgttcggggcaggcaacaggagaagaacacaaacagcaaatcaagagataaaagttcaagtagctaccgtgggagatcaaagtctagaggcaggtataagtcatgcaaatactgcaagagagatggacatgatatctctgagtgttggaagctacaggataaagacaagagaaccggaaaatatacaccaaaaggtaagaaagaagaggaaggtaaagccacagttgttactgatgagaagtctgatgcagaattgcttgttgcttatgctggttgtgcacaaactagtgaccagtggattcttgatactgcatgcacctatcacatgtgcccgaatagggattggtttgccacctatgaagctgttcaaggtggtactgttttgatgggtgatgatacaccatgtgaggttgcagctgatattaaatctgccaacctgtaccatctgcgaggtacaactatattaggtaatgttgctgcagtttctgattcattatctaattccgatgctactaatctttggcatatgcgtctcgggcatatgagtgaaattggtttggcagaattgagcaagcgaggattgctagatggacaaagcatcgggaaactcaaattttgtgagcattgcatctttggcaagcataagagggtgaagttcaacacatctacacatactactgaaggtattcttgattatgtgcattctgatttatgggggcctgctcataagacatcttttggaggtgctcgttacatgatgactatcgttgatgattattcgcgaaaagtttggccttatttcttgaagcacaaatatcaagcttttgatgtgtttaaagagtggaaaactatggttgaaagacaaactgaaaggaaggtgaaaatccttcgtactgacaatgggatggagttctgttctaagatatttaaatcatattgcaagtctgaaggcattgtgcatcactacaccgttcctcacacacctcaacaaaacggcgtagctgagcgtatgaataggacaattatatcaaaggcccgttgtatgctgtctaatgcaggtttacctaaacagttttgggcggaagccgtttctactgcttgttatcttatcaatcgatcacccagttatgccattgagaagaagactccaattgaggtatggtctggttccccagcaaattattcagacttaagagtatttggttgtactgcttatgctcatgttgataatggtaaattggagcctagagctattaagtgcatttttcttggttatccgtctggtgtgaaaggctataagttatggtgtcctaaaaccaaaaaggttgtgattagtagaaatgttgtcttccatgaatcagttatgttacgtgacaaaccttctactaatgttcctgttgagagtcaggagaaaacaagtgtgcagtttccaaaacgttctattgcaaaagataagcccaaaaaaaatattaaacctcctcgaagatatattgaagaagcgaacatagttgcttatgctttgagtgtggcagaagaaattgaaggtaatgccgaaccttctacatattctgaggctattgtttctgatgattgcaatagatggataactgttatgcatgatgagatggagtcgcttgaaaagaatcatacttgggaattggtgaaattgccaaaggagaagaaacctatccgttgcaagtggatcttcaaaagaaaggaaggtatgtctccaagtgatgaggcaagatacaaagcaaggttagttgctaaaggttatagccagattccaggtattgattttaatgatgtcttttcctctgttgtgaagcatagtttaattcgcactttactcagtattgttgcaatgcatgattatgaactagagcaaatggatgttaagactgcatttttacatggggagttagaagaggacatttatatggagcaacctgaaggttttgttgttcttggaaaagagaacctagtctgtaggttgaagaaatctctttatgggttgaagcagtcacctagacagtggtataagagatttgactctttcatactttctcagaagtttagaagatccaattatgatagctgtgtttatctcaaagttgttgatggttcagctatatatttgcttctttatgtcaatgatatgttgattgttgcaaaagacaaattagagatagcaaatttgaaggcacaattgagtagtgaatttgagatgaaggatttgggtgcagcgaagaaaattctcggtatggaaattactagagaaagacgttctggcaagttatatcttagtcagaaaggttatattgaaaaagttcttcgtcgtttcaatatgcatgatgcaaaaccagtgagtactcctttagctgcacatttcagattatcttcagatttatgtccacagtcagattatgatattgagtacatgtctagagttccttgttcaagtgcagttggttcacttatgtatgccatggtatgttctcgtcctgacttatcacatgcattgagtgttgtcagtagatacatggctaatcctggcaaagagcattggaaagctgttcaatggattttcagatacctacgtggtacatctagtgcttgtttgcagtttgggagatctagagatggacttgttggttatgtggattctgattttgctagagatttggataggagaagatcgctcacaggttatgttttcactattggaggatgtgctgttagttggaaggtaagtttgcaagcaactgttgccttatctactactgaagcagagtatacggctatttctgaagcttgtaaagaagctatttggcttagaggtttatacactgagctttgtggagtcacgtcttgcattaatatattttgtgatagtcaaagtgcaatatgccttacaaaggatcagatgttccatgagagaacaaagcacattgatgtgagatatcactttattcgaggtgtgattgctgaaggtgatgtcaaggtatgtaagataagtactcatgataacccagatgatatgatgacaaagccaattcctgctactaagtttgagctttgctcaagcttggttggtgttacagtatag

SEQ ID NO: 94803 - DNA, 384 bp, Oryza sativa
  Clone ID: PAT_MRT4530_93058C.1
atggacgagggcgcggagctcttctccgattctcctggcgagaaatttaggattataccatccggcggcggcggctgcggctgcggcatgcccctcgcaggcggcgatgtgcaattgtgcatcgccgtgcggccgtcggagtcgcggaagttggggtctgctccgccgcaccggcgacgatgctcgctcgccgtggccctggcggatgcagatgaggggaacccgttgcctcgcgggtgcgggagtaacactattcctacaacatccaatttggggtctgttgtgggtgtggatacgctggtgcttggacaggagggtgaggcctgcagcctcgccgccctggagcctggtgagacaaacagagaagggggagaccagagatag

SEQ ID NO: 94804 - DNA, 1026 bp, Oryza sativa
  Clone ID: PAT_MRT4530_93059C.1
gatcccccgtgcgcggtggacgggtgcaaggaggacctgagcaagtgccgcgactaccatcgccggcacaaggtgtgcgaggcccactccaagacccccctcgtcgtcgtctccggccgcgagatgcgcttctgccagcagtgcagcaggtttcacttgcttcaggagtttgatgaggccaagcgcagctgtagaaagcgactagatgggcacaaccgtcgccgcaggaagccacagccagatcccatgaactctgcaagttatcttgcaagccaacaaggggcaagattctcaccgttcgcgacgccgagaccggaggcaagctggacagggatgatcaaaaccgaggagagcccatactacacgcaccaccaaatccctcttggcatcagcagcaggcagcagcatttcgttggctccacctctgacggcggccgccgcttccctttcctccaggaaggcgagatcagcttcggcaccggcgccggcgccggcggcgtgccaatggatcaggcagcagctgctgctgctgcttcagtgtgccagccacttctgaagacggtagctcctcctcctcctcctcatggcggcggcggcagcggcggcggcaagatgttctccgatggtgggttgacacaagtgctcgactccgattgtgctctctctcttctgtcagctccggcgaactccacggccatcgacgtcggcggtggccgggtggtcgtccagccgaccgagcacatccccatggcgcagcctctcatctctggccttcagttcggcggcggcggcggcagctcagcctggttcgcggcgcggccgcatcatcaggcggccaccggcgccgccgccaccgccgtcgtcgtctcgacggccggtttctcctgcccggtggtggagagcgagcagctgaacacagtcctgagctccaatgacaatgagatgaactacaatgggatgtttcacgtcggcggcgaaggctcatcggatggcacgtcgtcgtctctgccgttctcatggcagtag

SEQ ID NO: 94805 - DNA, 957 bp, Oryza sativa
  Clone ID: PAT_MRT4530_9305C.1
atgacaatgtcaacttccgctagtccaccgagctcatcggccgccgaatacgttgagcatctcacccaccaagttgcaatccctagcataaccgataagtttcagtttttcctcggaccaatcggtgacttagatcccacagagttcattaatggtgagaccaaccacattcccttccgatttgccaacccagatctcagttgttggaaaaacaccttcaagtcttggctatcggctgaaaacagttggcctgcttggtacaagaggtccaaactgtggtccaactacaaactggcaacgggtagccgaaacctgatagataagaaacaatttcctcttggaaagtatttgctaggatatctgtaccaaaccttgaacactgtcgtaaccaagatagcttctggaaagaaggttatcgatcggccgccattagccaatgcagaatttccaagattcgagccgatcactgatgatgatggagaaaccagcaccacacgccgatgtaggtccttcggagaagcagcatcggttaatattgcatccaaactatcggctgagccctttggagagtggttcaacaacttctatgatgggttccccaagaatgcaagaatctggtttgcatatgaaggacatagtgtttttgagctaccagaagatttttggtttgatgaggtcaactccgaaaaatatgacaaatccagggaggtattttcagcagctatcagaccttgcatcattcctgtcggcattcatcagggcaagaacatcaagatgacctatgaattttatcatccaacatgtgctgcaagacaattcggcataggtcagctgccgatcagcctattctttgccgacaagatccaaagtagaggagagatcacatcattgcttatgatggatcagctgctaaatctaccaggaccacctttgcagcatcaacaatatcaaatttag

SEQ ID NO: 94806 - DNA, 2823 bp, Oryza sativa
  Clone ID: PAT_MRT4530_93060C.1
gtttatggtgctttgcatcccaaccgtagagaaagaagattggccccctctgaaggttcaaattcacaagcagaaggcttggttgttcgggccaggcaacaggagaagaacacaaacagcaaatcaagagataaaggtgcaagtagctaccgtgggagatcaaagtccagaggcaggtataagtcatgcaaatactacaagagagatggacatgatatctctgagtgttggaagctacaggataaagacaagagaaccggaaaatatgtaccaaaaggaaagaaagaagaggaaggtaaagccgcagttgttactgatgagaagtctgatgcagaattgcttgttgcttatgctggttgtgcacaaactagtgaccagtggattcttgatactgcatgcacctatcacatgtgcctgaatagggattggtttgccacctatgaagctgtgcaaggtggtactgttttgatgggtgatgatacaccatgcgaggttgcaggtgttgaaacagttcagatcaagatgtttgatggttgtatcaaaacattgtcagatgtgcggcatattccaaatttgaagagaagtctcatctctttatgtactcttgatcgcaaagtgtacaaatattccggtggagacggaattttgaaggtaactaaaggctcttttgttgtgatgaaagctgatataaattctgccaaccctgtcccatgtgcgagggacaactatattagatataccattgataagaagactccaattgaggtatggtctggttccccagcaaattattcagacttaagagtatttggttgtactgcttatgctcatgttgataatggtaaattggagcctagagctattaagtgcatttttcttggttatccgtctggtgtgaaagactataagttatggtgtcctaaaaccaaaaaggttgtgattagtagaaatgttgtcttccatgaatcagttatgttacatgacaaaccttctactaatgttcctgttgagagtcaggagaaagcaagtgtgcaggtggagcacttgatcagttcagggcatgcaccagaaaaagaagatgttgctattaaccaagatgcatctgttattgaagattcagattcttctgctgttcagcagtctccaaaacgttctattgcaaaagataagcccaaaagaaatattaaacctcctcgaagatatattgaagaagcgaacatagttgcttatgctttgagcgtggcagaagaaattgaaggtaatgccgaaccttctacatattctgaggctattgtttctgatggttgcaatagatggataactgctatgcatgatgagatggagtcacttgaaaagaatcatacttgggaattggtgaagttgccaaaggagaagaaacctatccgttgtaagtggatcttcaaaagaaagaaaggtatgtctccaagtgatgaggcaaggtacaaagcaaggttagttgctaaaggttatagccagattccaggtattgatttcaatgatgtcttttcccctgttttgaagcatagttcaattcgcactttactcagtattgttgcagtgcatgattatgaactagagcaaatggatgttaagactgcatttttacatggggagttagaagaggacatttatatggagcaacctgaaggttttgttgttcctggaaaagagaacctagtatataggttaaagaaatctctttatgggttaaagcagtcacctagacagtggtataagagatttgactctttcatgttttctcagaagtttagaagatccaattatgatagctgtgtttatcttaaagttgttgatggttcatctatatatttgcttctttatgtcgatgatatgttgattgctgcaaaagataaatcagagatagaacagttgaaggcacaattgagtagtgaatttgagatgaaggatttgggtgcagcaaagaaaattctcggtatggaaattactagagaaagacattctggcaagttatatcttagtcagaaaggttatattgaaaaagttcttcgtcgtttcaatatgcatgatgcaaaaccagtgagtactcctttagctgcacatttcagattatcttcagatttatgtccacagtcagattatgatattgagtacatgtctagagttccttatttaagtgtagttggttcacttatgtatgctatggtatgttctcgtcttgacttatcacatgcattgagtgttgtcagtagatacatggctaatcctggcaaagagcattggaaagttgttcaatggattttcaaatacctacgtggtacatctagtgcttgtttgcagtttgggagatctagagatggacttgttggttatgtggattcagattttgctggagatttggataggagaagatcgctcacaggttatgttttcactattggaggatgtgctgttagttggaaggcaagtttgcaagcaactgttgccttatctactactgaagtagagtatatggctatttctgaagcttgtaaagaagctatttggcttagaggtttgtacactgagctttgtggagttacgtcttgcattaatatattttgtgatagtcaaagtgcaatatgctttacaaaggatcagatgttccatgagagaacaaagcacattgatgtgagatatcactttattcgaggtgtgattgctgaaggtgatgtcaaagtatgcaagataagtactcatgataacccagctgatatgatgacaaagccagttcctactactaagtttgagctttgctcaagcttggtgggtgttacagtatag

SEQ ID NO: 94807 - DNA, 2889 bp, Oryza sativa
  Clone ID: PAT_MRT4530_93061C.1
atggaggtgcttaaggaggagacagccgctgggctatggttgaagctggaacagacatgcatgactaaggatctgaccagtaagatgcacctgaagcaaaagttatttttgcacaagttgcaagatgatgagtctgtgatggaccatctctccactttcaaagaaattgttgctgatcttgagtctttggaggtgaagtatgatgaagaggatttaggccttattctattgtgttcattgcctagctcatatgcaaacttcatggatactatactttatagccatgatactctaactttgaaagaagtttatgatgctttgcatgccaaagaaaagatgaagaagatggtaccctctgaaggttcaaattcacaagcagaaggcttggttgttcggggcaggcaacaggagaagaacacaaaaaaccaatcaagagataaaagctcaagtagctaccgtgggagatcaaagtccagaggcagggattggtttgccacctatgaagctgttcaaggtggtactggtttgatgggtgatgatacaccatgcgaggttgcaggtattggaacagttcagatcaagatgtttgatggttgtattagaatattgtcagatgtgcggcatattccaaatttgaagagaagtctcatctctttatgtactctttgtcgcaaagggtacaaatattccggtggagacagaattttgaaggtaactaaaggctctcttgttgtgatgaaagctgatattaaatctgccgacctgtaccatctgcgaggtacaactatattaggtaatgttgcagcagtttctgattcattatctaattccgatgctactaatctttggcatatgcgccttgggcatatgagtgaaattggtttggtagaattgagcaagcgaggattgctagatggacaaagcatcgggaagctcaaattttgtgagcattgcatctttggcaagcataagagggtgaaattcaacacatctacacatactactgaaggtattcttgattatatgcattctgatttatgggggcttgcttgtaagacatcttttggaggtgcttgttacatgatgactatcgttgatgattattcgcgaaaagtttggcctcatttcttgaagcacaaatatcaagcttttgatgtgtttaaggagtggaaaactatggttgaaagacaaactgaaagaaaggtgaaaatccttcgtactgacaatgggatggagttctgttctaagatatttaaatcatattgcaagtctgaaggcattgtgcgtcactacaccgttcctcacacacctcaacaaaacagcgtagctgagcgtatgaaaaagacaattatatcaaagacccgttgtatgttgtctaatgcaggtttgcctaaacagttttgggcggaagccgtttccactacttattatcttatcaatcgatcacccagttatgccattgataagaagactccaattgagccgtctccaaaacgttctattgcaaaagataagctcaaaagaaatactaaacctcctcaaagatatattgaagaagcgaacatagttgcttatgctttgagtgtagcagaagaaattgaaggtaatgccgaaccttctacatattctgaggctattgtttctgatgattgcaatagatggataactgctatgcatgatgagatggggtcacttgaaaagaatcatacttgggaattggtgaagttgccaaaggagaagaaacctatccgttgcaagtggatcttcaaaagaaaggaaggtatatctccaagtgatgaggcaagatacaaagcaaggttagttgttaaaggttatagccagattccaggtattgattttaatgatgtcttttcccctgttgtgaagcatagttcaattcgcactttactcagtattgttgcaatgcatgattatgaactagagcaaatggatgttaaaactgcatttttacatggggagttagaagaggacatttatatggagcaacctgaaggttttgttgttcctggaaaagagaacctaaagtttagaagatccaattatgatagctgtgtttatctcaaagttgttgatggtttagctatatatttgcttctttatgttgatgatatgttgattgctgcaaaagacaaatcagagatagcaaagttgaaggcacaattgagtagtgaatttgggatgaaggatttgggtgcagcgaagaaaattctcagtatggaaattactagagaaagacattctagcaagttatatcttagtcagaaaggttatattgaaaaagttcttcgtcgtttcaatatgcatgatgcaaaaccatcagattatgatattgagtacatgtctagagttccttattcaagtgcagtttcacttatgcatgccatgtttgggagatctagagatagacttgttggttacgtggattcagattttgctggagatttggataggagaagatcgctcacaggttatattttcactattggaggatgtgctgttagttggaaggcaagtttgcaagcaactgttgccttatctattactgaagcagagtatatggctatttctgaagcttgtaaagaagctatttggcttagaggtttgtacactgagctttgtggagttacgtcttgcattaatatattttgtgatagtcaaagtgcaatatgccttacaaaggatcagatgttccatgagagaacaaaacacattgatgtgagatatcactttattcaaggtgtgattgctgaaggtgatgtcaaggtatgcaagataagtattcatgataacccagttgatatgatgataaagccagttcctgctactaagtttgagctttgctcaagcttggtgggtgtgacagtatag

SEQ ID NO: 94808 - DNA, 7023 bp, Oryza sativa
  Clone ID: PAT_MRT4530_93062C.1
atgggtgtgccgtctttctaccggtggctcgtcggcaagtacccggccatcgtttcccccgccaacgacgacgacgacgatgtcggcagcagcagtaattgcgccgccgcaccacctgtgtaccacaagctctacgtcgacatgaacggcgtcatccacccttgcttccaccctcaagaccaggtgtgccctccgagtccggttccgacgacgctagaggaggtgttccactccatgttcgactagatggaccgccgaatccgcatcgtcagacccaccagcctcctctacttggccgtagatggtgtcgcgcctcgcgccaagatgaaccagcagcgagccaggcgcttcagatccgctatggccgccaaacaagccgaggtggtgagggaaatcctggagaacaggtgctgcacgggggggaagatggggtgtccccggggtactgcctctacgaccgagacttctggaacgaacgccatcacacggaggacggagttcaaggacaagcaggcgggtgcgcgcaagaactgaatcagagcctgctagaacaccaacctgcactggaaggacagcaccgttcaacgaactttctttcacccacatgaatgattaaattccgaggcgatccaaaagtatggtgtaccgccctgctaccgagagccgataaacgtgatctgcccagggaagttgttagctgttctcatatgtgatgattgagctgatgcgtgtgcttgatttgagaatacgacacatgatagtgtcatggtttagaacataagtggtggttaggctatgtcgtgtattgaagatcatctatctaataacattgtgcaagaggtgattaaggaggagatagctgctgggctgtggttgaagctggaacagatatgcatgactaaggatctgaccagtaagatgcacctgaagcaaacgttatttttgcacaagttgcaagatgatgggtctgtaaaggaccatcactccgctttcaaggaaattattgctgaccttgagtctatggaggtaaagtatgatgaagaggatttaggccttattctattgtgttcattgcctagctcatatgcaaacttcagggatactattctttatagtcgtgatactctaactttgaaagaagtttatgatgctttgcatgtcaaagaaaagatgaagaagatggtaccctctgaaggttcaaattcacaagcagaaggtttgattgtttggggtaggcaacaggagaagaacacaaagaaccaatcaagagataaaagctcaagtagctaccgtgggagatcaaagtccagaggcaggtataagtcatgcaaatactgcaagagagatggacatgatatctttgagtgttggaagctacatgataaagacaagagaacgggaaaatatgtaccataaggttagaaagaagagcaaggtaaagccgcagtcgttaccgattagaagtcttttgaagaattgcttgttggttataccggttgtggacagaagagtgacctggtgattcttaaacttgcatgcatctatcacctcagcgcgattagggagtgctttgccacctatgaagctgaggaaaagggtactgttttgctgggaaatgatacaccatgcgaggttgcaggtattggaccagttgggatcacgatgtttgagggctgtatcagaacattgacagatgtgcggcatatacaaaatttgaagaaaaataaaatctctttatgtactcttgatcgcaaagggtacaaatattccggtggagactgaagttcgatggtaactaagggctctttttatgggaggagaattgatagaacttatgtaaacctgtatcatctgtgagttacatttattttacgtattgtttcagtaatttctgatacatgatcaatttccaaaactactaatcttaagcatatgcgtcttaggcatatgaatgaaattggtttggcagaattgagtaagcgaggattgctagatggacaaagcatcgggaagctcaaattttgtgagcattgcatctttggcaagcataagagggtgaagttcaacacatctacacatactactgaaggtattcttgattatgtgcattctgatttatgggggcctgctcgtaagacatcttttggaggtactcgttacatgatgactatcgttgatgattattcgcgaaaagtttggccttatttcttgaagcacaaatatcaagcttttgatgtgtttaaagagtggaaaactatggttgaaagacaaactgaaaggaaggtgaaaatccttcgtactgacaatgggatggagttctgttctaagatatttaaatcatattgcaagtctgaaggcattgtgcgtcactacaccgttcctcacacacctcaacaaaacggcgtagctgagcgtatgaacagaacaattatatcaaaggcccgttgtttgttgtctaatgcaggtttgcctaaacagttttgggcggaagccgtttccactgcttgttatcttataaatcgatcacctagctatgccattgataagaagactccaattgaggtatggtctggttccccagcaaattattcagacttaagagtatttggttgtactgcttatgcccatgttgataatggtaaattggagcctagagctattaagtgcatttttcttggttatccgtctggtgtaaaaggctataagttatggtgtcctgaaactaaaaaggttgtgattagtagaaatgttgtcttccatgaatcagttatgttacatgacaaaccttctactaatgttcctgttgagagtcaggagaaagcaagtgtgcaggtggagcacttgatcagttcagggcatgcaccagaaaaagaagatgttgctattaaccaagatgaacctgttattgaagattcaaattcttctattgttcagcagtctccaaaacgttctattgcaaaagataggcccaaaagaaatattaaacctcctcaaagatatattgaagaagcgaacatagttgcttatgctttgagtgtagcagaagaaattgaaggtaatgccgaaccttctacatattctgaggctattgtttctgatgattgcaatagatggataactgctatgcatgatgagatggagtcacttgaaaagaatcatacttgggaattggtgaagttgccaaaggagaagaaacctatccgttgcaagtggatcttcaaaagaaaggaaggtatatcttcaagtgatgaggcaaggtacaaagcaaggttaattgctaaaggttatagccagattccaggtattgatttcaatgatgtcttttcccctgttgtgaagcatagttcaattcgcactttactcagtattgttgcaatgcatgattatgaactagagcaaatggatgttaagactgcatttttacatggggagttagaagaagacatttatatggagcaacctaaaggttttgttgttcctggaaaagagaacctagtctgtaggttgaagaaatctctttatgggttgaagcagtcacctagacagtggtataagagatttgactctttcatgctttctcaaaagtttagaagatccaattatgatagctgtgtttatctcaaagttgttgatggttcagctatatatttgcttctttatgttgatgatatgttgattgctgcaaaagacaaatcagagatagcaaagttgaaggcacaattgagtagtgaatttgagatgaaggatttgggtgcagcgaagaaaattcttggtatggaaattactagaaaaagacattctttcaagttatatcttagtcagaaaggttatattgaaaaagttcttcgtcgtttcaatatgcatgatgcaaaaccagtgagtactcctttagctgcacattttagattatcttcagatttatgtccacagtcagattatgatattgagtacatgtctagagttccatattcaagtgcagttggttcacttatgtatgccatggtatgttctcgtcctgacttatcacatgcattgagtgttgttagtagatacatggctaatcctggcaaagagcattggaaagctgttcaatggattttcagatacctacgtggtacatctagtgcttgtttgcagtttgggagatctagagatggacttgttggttatgtggattcagattttgctggagatttggatagggggagatcgctcgcaggttatgttttcactattggaggatgtgctgttagttggaaggcaagtttgcaagcaactgttgccttatctactactgaagcagagtatatggctatttctgaagcttgtaaagaagctatttggcttagaggtttgtacactgtgctttgtgcagttacgtcttgcattaatatattttgtgatagtcaaagtgcaatatgccttacaaaggatcaaatgttccatgagagaacaaagcacattgatgtgagatatcactttattcgaggtctgattgctgaaggtgatgtgaagatatgcaagataagtattcatgataacccagctgatatgatgacaaagccagttcctgctactaagtttgagctttgctcaagcttggtgatactatctgacgcaaatgttcctggagaaggggagcacaagatcatgtctttcatccgtgcgcaacgcggcagggaaggctatgaccccaatactcgccactgcctctatggattggatgctgatttgatcatgcttgctttggcatcacatgaagtccacttctcaattttgcgcgaggaagtgttacatcaaaacaaccaagaaaacaccattcctataaccccaaaaaccttcacatcccaagaggcagaaaagttcaagtgtagagcatggttccctcggataacagaagcaagacctgagggcaagttaaccaagaaaccatatcagtttctgaatatatgggtacttagagagtatttggagcttgatatgaagataccgaacccgatccagactcttgatgttgagaggatgatagatgactttgtgttcatttgtttcctgaccgggaatgatttcattccgcacattccttcgcttgaaattcatgagggcgccattgacctacttattgaagtgtacaaaacgtctttcaacaaaatggggggttatattgtcgacacagacaaagttaaagataagcatgctgcatatctgaaagtttcaaggttggaaaagtttttccatgaactgtctttatatgaagagaaaatatttcttaaatgttacgatctagcaagggggtttgaggattttggaagaaaagttggggaagaagcagaagaacagcaagaacaggggagctgggttgcccacccattcgggcccagcgagccagacattggcgcgccggttgcgtgcaacacgtgggctgtgccggaccgggttggtgagtgtcggattaatttccagcgcaaaatagagcgtcaagccgcagaaaatacgtggaatgaaaggaacaccgaaaatgtggaagaaaaccttgatgaccaatgcatcatggtcaagtcttctcagacagatggccaagtttctgacgaacaagatattacaatgaataccttggagctgaggaagaatttgaaggatattctacataataagcaagaccttataaaaaccggagcttgtaaacatgacaagataaaactaggatcacctggatggaaatctcggttcttcaaggaaaagtttgatgctgagaccaaagatgaaattgcaaagctgcagaatgaaatggttacaatttcctgcttccttaattatgcaaatggaatactgtacttgacggtccaaaagtatttggaaggactttgttgggtactatgctactactttgctgatgtaccatcatggagttggtactatccattttattatgccccttttgcatctgatgtcagaggtctttcccgctcatttgcgctaccaggatgttacagcaagctgatggactgtgatgagtccgcgatacaagcattttatccatctgagctggatattgacactgatgggaaacgttacttgtggcaaggcattgcaaaattgccgttcatagaggacaagctgctcctttcagtcaccaaaacagcagagaaagaccttgcggtgcatgagttaaggcgcaatactgttcggcaagagaagatctttctgaggaactcaaatgcccttgcgaaaaatgaagcatttgcgcaaacatcagattgttcgctgcaaaagcttccaattgatcctgctacaagtgaaattggaggatggctatcgcctgacgatgatgatttcagcaatggtttctgtggctctcccatagaaaatgatctgtcaatatcagcaaagttcttcaaccctgaggcagtgaagccagccacaaggttacttcagaatgtcacagtgccttacaagactgtaactgaagctgacatttgtgcaaggccgctctggcacacgcacccgtacccgaaacatcctgccctttccatgcacaacgtgcagcagcagaggctgcagagcagcaggccggagacgccctgctggaagccgagcacgccgccgccgccgcggcgcgaggagatcaggagcgccggcacggggtggctgggccgagggagaggtggaaatatccccgtcgccgtcgccgcctcaaccgccgtcgccggagagacgcggcagtcgtggagcagcagcaggtacgggcgcgggcgagggagcggcgccaccgccgtcggccacggccagatgacgacgacgcggcaccagtggagcggcggcggcggctacgggagatcatcaggggtggacaatggcggtggccgtggctcctacaacctccggcctggaggcggcggcggcggcggtggggggtaccagtggcagcagcagcagcagacggcgtggcggccggtcgggtcgccgtggggcagaggcggcggcggcggagatggcgggaacggccagccccgtggtcggtag

SEQ ID NO: 94809 - DNA, 1434 bp, Oryza sativa
  Clone ID: PAT_MRT4530_93063C.1
aatcataattaaactatagtacataatatcaatcactcacacttacaaaaacaggttattggcttaattacatgtaattaacagccatcatcatcatcatcatgatcacaagcaccccaaaggttaaacaaaaaagttacaaaaggtaaaaaaaaaaagaaaagtaaaaaaaggagggtaaaaaagagaggagaaaattaaaagttatttggatctctagctaaggtgaaagaaaggcttccatggctcaatgcaccttcttggagaagaaccccttgatgccgaagagcccgccgccgccgccgccgccggcggaggcgcgggcgactccggcgtcggcgcggcggcagctcacctggtggcggtacccgatgcaggagttgatgctcaggttgatgccgcgtatcccgccgccgccggtggcggaggtggtgtggggtttcttggcgccgccggttggcttgtccttgtggtgcggcggcctcctgtccgcggcggcgtgcttcgccgccggcgatggcgggcgcctgatctgccagaccgggctagacggcgagggacatggagaggtcggcgtcgcggcgggggtaggggaggggttggagggggaggaggacgccgccggagaagagctcgtcggcgcaggagggggatgcggcggggtcggcgtcgaggggccagaagcggaactccggggaggcgctgctgctccgccgcctctgcgctgctgcggccatctcggatcggcgtggagactgcttcttggagatggaggagagatggttgggggggaatggcgaggctttgtatggcgtggcgtgcggggagggagggacacatggggaggtgggacccggggaagtggctctgtgggtggggtagagggaggggaagcgtgagggcattttggggaactttcgggcggcggtggcggagcgagccggccgcgcgacaggcggccgtgcggcgaacggggtgcggcagccggtcgggcggcggcggccgcgtggcaggcgacgtgcggcggacgggtggcggcggcggccagtggggccacgcccagcagcggcgggcaggcggcgggtggccggcggggccgcaggtggcggctgtggtggagcgggaggagctaaaggcggcatcggcgggcggcgccctcccctccgccagatccggcgggaggcagcggcagcggcgtcggcgggaggtggcggtggcgtcggcgggaggtggcggcagcgggcgacggcaggaagagaggtgatagtggcgggcggcgccctcccttccgccagatctgacgggaggggaggtagcggcggtgccccacgagtgagcacggccgccgccaatggaggcgctcgtcggcaactattctccgtgccttgccaaaggtcggcaagctatcggaatccatctaggcactctatagat

SEQ ID NO: 94810 - DNA, 3369 bp, Oryza sativa
  Clone ID: PAT_MRT4530_93064C.1
atggcgagtttgaagtatgatctaccgctcctggaccgagacacaagattctcactttggcaagtgaagatgcgagccgttcttgcacagcaagacctcgatgatacgctttctggatttgacaagaggactcaggattggtccaacgatgagaagaaaagggatcgtaaggctatgtcatatattcatcttcatctatctaacaatattttgaaggaggtgcttaaggaggagacagccgctgggctgtggttgaaactggaacagatatgcatgactaaggatctgaccagtaagatgcacctgaagcaaaagttatttttgcataagttgcaagatgatgggtctgtaatggaccatctctccactttcaaggaaattgttgctgaccttgagtctatggaggtaaagtatgatgaagaggatttaggccttattctattgtgttcattgcctagctcatatgcaaacttcacggatactatactttatagtcgtgatactctaactttgaaagaagtttacgatgctttgcatgccaaagaaaagatgaagaagatggtaccctctgaaggttcaaattcacaagcagaaggcttggttgttcggggcaggcaacaggagaagaacacaaagaaccaatcaagagataaaagctcaagtagctaccgtgggagatcaaagtctagaggcaggtataagtcatgcaaatactgcaagagagatggacatgatatctctgagtgttggaagctacaggacaaagacaagagaactggaaagtatataccaaaaggtaagaaagaagaggaaggtaaagccacagttgttactaatgagaagtctgatgcagaattgcttgttgcttatgctggttgtgcacaaactagtgaccagtggattcttgatactgcatgcacctatcacatgtgccctaatagggattggtttgccacctatgaagctgtgcaaggtggtactgttttgatgggtgatgatacaccatgcgaggttgcaggtattggaacagttcagatcaagatgtttgatggctgtatcagaacattgtcagatgtgcggcatattccaaatttgaagagaagtctcatctctttatgtactcttgatcacaaagggtacaaatattcctgtggagacggaattttgaagataactaaaggctctcttgttgtgatgaaagctgatattaaatatgctaacctgtaccatctgcgaggtacaactatattaggtaatgttgcagcagtttctgattcattatctaattccgatgctactaatctttggcatatgcgtcttgggcatatgagtgaaattggtttggcagaattgagcaagcgaggattgctagatggacaaagcatcgggaagctcaaattttgtgagcattgcatctttggcaagcataagagggtgaagttcaacacatctacacatactactgaaggtattcttgattatgtgcattctgatttatgggggcctgctcgtttgcctaaacagttttgggcggaagccgtttccactgcttgttatcttataaatcgatcacctagctatgccattgataagaagactccaattgaggtatggtctggttccccagcaaattattcagacttaagagtatttggttgtactgcttatgctcatgttgataatgataaattggagcctagagctattaagtgcatttttcttggttatccgtctgctgtgaaaggctataagttatggtgtcctgaaactaaaaaggttgtgattagtcgaaacattgtcttccatgaatcagttatgttacatgacaaaccttctactaatgttcctgttgagagtcaggagaaagcaagtgtggaggtggagcacttgatcagttcagggcatgcaccagaaaaagaagatgttgctattaaccaagatgaacctgttattgaagattcaaattcttctactgttcagcagtctccaaaacgttctattgcaaaagataggcccaaaagaaatattaaaccttctcaaagatatattgaagaagcaaacatagttgcttatactttgagtgtggcagaagaaattgaaggtaatgcagaaccttctacatattctgaggctattgtttctgatgattgcaatagatggataactgctatgcatgatgagatggagtcacttgaaaagaatcatacttgggaattggtgaagttgccaaaggagaagaaacctatccgttgcaagtggatcttcaaaagaaaggaaggtatgtctccaagtgatgaggcaagatacaaagcaaggctagttgctaaaggttatagccagattccaggtattgatttcaatgatgtcttttcccctgttgtgaagcatagttcaattcgcactttactcagtattgttgcaatgcatgattatgaactagagcaaatggatgttaagactgcatttttacatggggagttagaagaggacatttatatggagcaacctgaaggttttgttgttcctggaaaagagaacctagtctgtaggttgaagaaatctctttatgggttgaagcagtcacctagacagtggtataagagatttgactctttcatgctttctcagaagtttagaagatccaattatgatagctgtgtttatctcaaagttgttgattgttcagctatatatttgtttctttatgttgatgatatgttgattgctgcaaaagacaaatcagagatagcaaagttgaaggcacaattgagtagtgaatttgagatgaaggatttgggtgcagcgaagaaaattctcgattatgatgttgagtacatgtctagagttccatattcaagtgcagttggttcacttatgtatgccatgtttgggagatctagagatggacttgttggttatgtggattcagattttgctggagatttagataggcgaagatcactcacaggttatgttttcactattggaggatgtgctgttagttggaaggcaagtttgcaagcaacggttgccttatctactactgaagcaaagtatatggctatttctgaagcttgtaaagaagctatttggcttagaggtttgtacactgagctttgtgaagttacgtcttgcattaatatattttgtgatagtcaaagtgcaatatgccttacaaaggatcagatgttccatgagagaacaaagcacattgatgtgagatatcactttattcgaggtgtgattgttgaaggtgatgtcaaggtatgcaagataagtactcatgataacctagctgatatgatgacaaagccagttcctgctactaagtttgagctttgctcaagcttggttggtgttacagtatag

SEQ ID NO: 94811 - DNA, 594 bp, Oryza sativa
  Clone ID: PAT_MRT4530_93065C.1
atggcgaggctttgtatggcgtggcgtgcggggagggagggacacatggggaggtgggacccgcgcacgccctcccatttttctgatgcagttatgagaggtgggggtgtgggacccaccgggaagtggctctgtgggtggggtgctcagaacgtatggcaagccatcaaatacaacgctaaggaggcggccgtgcggcgaacggggtgcggcagccggtcgggcggcggcggccgcgtggcaggcgacgtgcggcggacgggtggcggcggcggccagtggggccacgcccagcagcggcgggcaggcggcgggtggccggcggggccgcaggtggcggctgtggagacggcggtagcaggcggcgatgggaggagaggcagtatcggcgggcggcacactcccctcagccagatccagcgggaggggagacagcgataccggcagcagcgggaggagctaaaggcggcatcggcgggcggcgccctcccctccgccagatccggcgggaggcagcggcagcggcgtcggcgggaggtggcggtggcgtcggcgggaggtggcggcagcgggcgacggcaggaagagaggtga

SEQ ID NO: 94812 - DNA, 3711 bp, Oryza sativa
  Clone ID: PAT_MRT4530_93066C.1
atggcgagtttgaagtatgatctaccgctcctggaccgagacacaagattctcactttggcaagtgaagatgcgagccgttcttgcacagcaagacctcgatgatgcgctttctagatttgacaagaggactcaggattggtccaacgatgagaagaaaagggatcgtaaggctatgtcatatattcatcttcatctatctaacaatattttgcaggaggtgcttaaggaggagacagccgctgggctgtggttgaagctggaacagatatgcatgactaaggatctgaccagtgagatgcacctgaagcaaaagttatttttgcacaacttgcaagatgatgagtccgtgatggaccatctctccgctttcaaggaaagtgttgctgaccttgagtctatggaggtaaagtatgatgaagaggatttaggccttattctattgtgttcattgcctagctcatatgcaaacttcagggatactatactttatagccgtgatactctaactttaaaagaagtttatgatgctttgcatgccaaagaaaagatgaagaagatggtaacctctgaaggttcaaattcacaagcagaaggcttggttgttcggggcaggcaacaggagaagaacacaaagaaccaatcaagagataaaagctcaagtagctaccgtgggagatcaaagtccagaggcaggtataagtcatgcaaatactgcaagagagatggacatgatatctctgagtgttggaagctacaggacaaagacaagagaaccggaaagtatataccaaaaggtaagaaagaagaggaaggtaaagccacagttgttactgatgagaagtctgatgcagaattgcttgttgcttatgctggttgtgcacaaactagtgacaagtggattcttgatactgcatgcacctatcacatgtgcccgaatagggattggtttgccacctatgaagctttgcaaggtggtactgttttgatgggtgatgatacaccatgcgaggttgcaggtattggaacagttcagatcaagatgtttgatggctgtatcagaacattgtcagatgtgcggcatattccaaatttgaagagaagtctcatctctttatgtactcttgatcgcaaagggtacaaatattccggtggagacggaattttgaaggtaactaaaggctctcttgttgtgatgaaagctgatattaaatttgccaacatgtaccatctgcgaggtacaactatattaggtaatgttgcagcagtttctaattcattatctaattccgatgctactaatctttggcatatgcgtcttgggcatatgagtgaaattggtttggcagaattgagcaagcgaggattgctagatggacaaagcatcgagaagctcaaattttgtgagcattgcatatttggcaagcataagagggtgaagttcaacacatctacacatactactgaaggtattcttgattatgtgcattctgatttatgggggcctgctcgtaagacatcttttggaggtgctcgttacatgatgactatcgttgatgattatttgcgaaaagtttggccttatttcttgaagcacaaatatcaagcttttgatgtgtttaaagagtggaaaactatggttgaaagacaaactgagaggaaggtgaaaatccttcgtactgacaatgggatggagttctgttctaagatatttaaatcatattgcaagtctgaaggcattgtgcgtcactacaccgttcctcacacacctcaacaaaacggcgtagctgagcgtatgaacaggacaattatatcaaaggcccgttgtatgttgtctaatgcaggtttgcctaaacaattttgggtggaagctgtttctactgcttgttatcttatcaatcgatcacccagttatgccattgataagaagactccaattgaggtatggtctagttccccagcaaattattcagacttaagagtatttggttgtactgcttatgctcatgttgataatggtaaattggagcctagagctattaagtgcatttttcttggttatccgtctggtgtgaaaggctataagttatggtgtcctgaaaccaaaaaggttgtgattagtagaaatgttgtcttccatgaatcaggtatattacatgacaaaccttctactaatgttcctgttgagagtcaggagaaagcaagtgtgcaggtggagcacttgatcagttcagggcatgcaccagaaaaagaagatgttgctattaaccaagatgcacctgttattgaagattcagattcttctattgttcatcagtctccaaaacgttctattgcaaaagataagcccaaaagaaatattaaacctcctcgaagatatattgaagaagcgaacatagttgcttatgctttgagtgtggcagaagaaattgaaggtaatgccgaaccttctacatattctgaggctattgtttctgatgattgcaatagatggataactgctatgcatgatgagatggaatcacttgaaaagaatcatacttgggaattggtgaagttgccaaaggagaagaaacctatccgttgcaagtggatcttcaaaagaaaggaaggtatgtctccaagtgatgaggcaagatacaaagcaaggctagttgctaaaggttatagccagattccaggtattgatttcaatgatgtcttttcccctgttgtgaagcatagttcaattcgcactttacttagtattgttgcaatgcatgattatgaactagagcaaatggatgttaagactgcatttttacatggggagttagaagaggacatttatatggagcaacctgaaggttttgttgttcctggaaaagagaacctagtctgtaggttgaagaaatctctttatgggttgaagcagtcacctagacagtggtataagagatttgactctttcatgctttctcagaagtttagaagatccaattatgatagctgtgtttatctcaaagttgttgatggttcagctatatatttgcttctttatgtcgatgatatgttgattgctgcaaaagataaatcagagatagcaaagttgaagacacaattgagtagtgaatttgagatgaaggatttgggtgcagcgaagaaaattctcggtatggaaattactagagaaagacattctggcaagttatatcttagtcagaaatgttatattgaaaaagttcttcatcgtttcaatatgcatgatgcaaaaccagtgagtactcctttagctgcacatttcagattatcttcagatttatgtccacagtcagattatgatattgagtacatgtctagagttccttattcaagtgcagttggttcacttatgtatgccatgtttgggagatctagagatggacttgttggttatgtggattcagattttgctggagatttggataggagaagatcgctcacaggttatgttttcactattggaggatgtgctgttagttggaaggcaagtttgcaagcaactgttgccttatttactactgaagcagagtatatggctatttctgaagcttgtaaagaagctatttggcttagaggtgatgtcaaggtatgcaaaataagtactcatgataacccagctgatatgatgacaaagccagttcctgctactaagtttgagctttgctcaagcttggtgggtgttatagtatag

SEQ ID NO: 94813 - DNA, 701 bp, Oryza sativa
  unsure (1)..(701): unsure at all n locations
  Clone ID: PAT_MRT4530_93067C.1
gattcggncgagacncgacgcaccaatggcgctcgtctccgcctcctctccaccaccgccgtcgcggcgctccccggngccgccagggcctcctccttcctccgcggcgccggcangancggcangctgctgctgaagcaagccgantcgtcttccgcgcgggcgtcttcgccgtgcgcgccgcggcgcccganaagccaatctggttccccggcagcacccgccgccgtggctcnacagcagcctccccggcganttcggcttcnanccctgggtctcggatnggancggaaaattgcngtggaacgttcaagcggaactggtgcactgccngtgggcgatctgggcgcngcgggcatcttcatcccngaattcctgaacaaaatnggcatcctcaacaccccgtcntggtncaccgcccgggaacaacaatacttcaccganaccaccacctcttcatcatcnaactcatcctcatncgctgggcccaaggcccccgttggntganatcatcaaacccgggttgcgttnacaccnanccatcttccccaacaacaaactcaccgggcaccnaattcgggtacctgnttgtcttttgttttaacccctccggttgggcaccggtccccggaaaaaatnaaggaacttcccccccanggaaattaaaaaagggngggtcnccatnctccccntcntnggaa

SEQ ID NO: 94814 - DNA, 3939 bp, Oryza sativa
  Clone ID: PAT_MRT4530_93068C.1
atggtggtggtagatggggcggtggcgagagcgacctctaccagatctggtggaggggaggcaggcgacgtctcctccctcatggcggcagagggattaattcctatggcgagtttgaagtatgatctaccgctcctggaccgagacacaagattctcactttggcaagtgaagatgcgagccgttcttgcacagcaagacctcgatgatgcgctttctggatttgacaagaggactcaggattggtccaacgatgagaagaaaaaggatcgtaaggctatgtcatatattcatcttcatctatctaacaatattttgcaggaggtgcttaaggaggagacagccgctgggctgtggttgaagctggaacagatatgcatgactaaggatctaaccagtaagatgcacctgaagcaaaagttatttttgcataagttgcaagatgatgggtctgtaatggaccatctctccactttcaaggaaattgttgctgaccttgagtctatagaggtaaagtatgatgaagaggatttaggccttattctattgtgttcattgcctagctcatatgcaaacttcagggatactatactttatagtcatgatactctaattttgaaagaagtttatgatgctttgcatgccaaagaaaagatgaagaagatggtaccctctgaaggttcaaattcacaagcagaaggcttggttgttcggggcaggcaacaggagaagaacacaaagaaccaatcaagagataaaagctcaagtagctaccgtgggagatcaaagtctagaggcaggtataagtcatgcaaatactgcaagagagatggacatgatatctctgagtgttggaagctacaggacaaagacaagagaactggaaagtatataccaaaaggtaagaaagaagaggaaggtaaagccgcagttgttactgatgagaagtctgatacagaattgcttgttgcttatgctggttgtgcacaaactagtgaccagtggattcttgatactgcatggacctatcacatgtgccctaatagggattggtttgccacctatgaagctttgcaaggtggtactgttttgatgggtgatgatacaccatgcgaggttgcaggtattggaacagttcagatcaagatgtttgatggctatatcagaacattgtcagatgtgcggcatattccaaatttgaagagaagtctcatctctttatgtactcttgatcgcaaagggtacaaatattccggtggagacggaattttgaaggtaactaaaggctctcttgttgtgatgaaagctgatattaaatctgccaacctgtaccatctgcgaggtacaactatattaggtaatgttgcagcagtttctgattcattatctaattccgatgctactaatctttggcatatgcgtcttgggcatatgagtgaaattggtttggcagaattgagcaagcgagaattgctagatggacaaagcatcgggaagctcaaattttgtgagcattgcatctttggcaagcataagagggtgaagttcaacacatctacacataccactgaaggtattcttgattatgtgcattctgatttatgggggcctgcttgtaagacatcttttggaggtgctcgttacatgatgactatcgttgatgattattcgcgaaaagtttggccttatttcttgaagcacaaatatcaagcttttgatgtgtttaaagagtggaaaactatggttgaaagacaaactgaaaaaaaggtgaaaatccttcgtactgacaatgggatggagttctgttctaagatatttaaatcatattgcaagtctgaaggcattgtgcatcactacaccgttcctcacacacctcaacaaaacggcgtagctgagcgtatgaacatggcaattatatcaaaggcccgttgtatgttgtctaatgcagatttgcctaaacagttttgggcggaagccgtttccactacttgttatcttatcaatcgatcacctagttatgccactgataagaagactccaattgaggtatggtctggttccccagctaattattcagacttaagagtatttggttgtactgcttatgctcatgttgataatggtaaattagagcctagagctattaagtgcatttttcttggttatccgtctggtgtgaaaggctataagttatggtgtcctgaaactaaaaaggttgtgattagtagaaacgttgtcttccatgaatcagttattttacatgacaaaccttctactaatgttcctgttgagagtcaggagaaagcaagtgtgcaggtggagcacttgatcagttcagggcatgcaccagaaaaagaaaatgttgctattaaccaagatgcacctgttattgaagattcagattcttctattgttcagcagtcttcaaaacgttctattgcaaaagataagcccaaaagaaatattaaacctcctcgaagatatattgaagaagcgaacatagttgcttatgctttgagtgtggcagaagaaattgaaggtaatgcagaaccttctacatattctgaggctattgtttctgatgattgcaatagatggataactgctatgcatgatgagatggagtcacttaaaaagaatcatacttgggaatttgtgaagttgccaaaggagaagaaacctatccgttgcaagtggatcttcaaaagaaaggaaggtatgtctccaagtgatgaggcaagatacaaagcaaggttagttgctaaaggttatagccagattccaggtattgatttcaatgatgtcttttcccctattatgaagcatagttcaattcgcactttactcggtattgttgcaatgcatgattatgaactagagcaaatggatgttaagactgcatttttacatggggagttagaagaggacatttatatggagcaacctgaaggttttgttgttcttggaaaagagaacctagtctgtaggttgaagaaatctctttatgggttgaagcagtcacctagacagtggtataagagatttgactctttcatgctttctcagaagtttagaagatccaattatgatagttgtgtttatctcaaagttgttgatggttcagctatatatttgcttctttatgttgatgatatgttgattgctgcaaaagacaaatcagagatagcaaagttgaaggcacaattgagtagtgaatttgggatgaaggatttgggtgcagcgaagaaaattctcggtatggaaattactagagaaagacattctggcaagttatatcttagtcagaaaggttatattaaaaaagttcttcgtcgtttcaatatgcatgatgtaaaaccaattatcttcagattatgtccacagtcagattatgatattgagtacatgtctagagttccatattcaagtgcagttggttcacttatgtatgccatgtttgggagatctagagatggatttgttggttatgtggattcagattttgctggagatttggataggcgaagatcgctcacaggttatgttttcactataggaggatgtgatgttagttggaaggcaagtttgcaagcaacggttgccttatctactactgaagcagagtatatggctatttctgaagcttgtaaagaagctatttggcttagaggtttgtacactgagctttgtggagttacgtcttgcattaatatattttgtgatagtcaaagtgcaatatgccttacaaaagatcagatgttccatgagagaacaaagcacattgatgtgagatatcacattattcgaggtgtgattgttgaaggtgatgtcaaggtatgcaagataagtactcatgataacccagctgatatgatgacaaagccagtttctgctactaagtttgagctttgctcaagcttggtgggtgttacagtatag

SEQ ID NO: 94815 - DNA, 2738 bp, Oryza sativa
  Clone ID: PAT_MRT4530_93069C.1
ggccaccacgctggcggtcgagcagtgagcaggcgacagcgatggacatggtggaggggaaggatgcggcggcgtgatggtgatcctgattgtcgtctcctccccagatctgacgaggccgaggacggcgagggcaggacgaggatgcccttgggcgtgggatgcgggtccatggctggagccgtgtgctcttggtctcctgaccccgcagcgatcagcgagcacggcgcacggttgatggcccgggctcgtcaccacgcagcctggatgcgtcgcccgcctcccggaggagtagtcggcgctgggggaggaacaacgaccatgagcagctagccacaggactccacgaggtagcgggcaagcacctccccttgccccagcatggtcggcctccatcgcgacgtagttgacgaagaagaggcggatcggggaacatgttgccaccacgaagcaatcgtcctcgctgtcgctccactctgaatctggcgacaactgagctctatagtgcagcgtagaggacggttgggcccgcctgtaggtcgaaatatcgccgcccgccgcccatccagccatcccgcgtccgagacagcgcccgcccccaatctttcccgcacgcttgcatcgctgttgtgcctcgcccgcgtccggccgtcgccgcgagcgcgagccagctaggaggctcgccaccgctacgcctgccctaggccgtcgtgctcgccacgactggggaggggtccgggcggccaccgcgcgaggccaactccctgccctgccctgcatcagcacatcatcaggcccggtggccggccgcctccacgcgcccccggtcgcggcggcctggcgcctctctgggatcacaacagcggcgcaggtgcctctccactcgcggctggcccggcggcctggcgcttctccggtcgcggcggcggccggacgagggcgaggtgaagcgccggcgtacgcggatctgagggcgagacgaagctgagtccgtctcaggctaagcgcgtcttgtgcgcgtgcgggcctcctgataggctgaaaccgagatatttcgacctgtaggcgggcccaagcgccatctccattggattcgttttggacagccgagatgcatggtatgtctcgttgtgacttgcctacgctaagtaaccaaagctgagtcccgctggtgaggcgcgctgacagcagtgcccgctgttgttgactggatcgccgatccggaaaaaaaggacgaatttggggaaatggatagatggtactccctcgagccgctgttgctagctccgctttgccgagccgcctccattggacctcctcgtcagtgccgagcctcgccgagccgccaccaggcggcctccttgccaaaccgcactgaccccgccgacatctttccgccttgccgagccaccgcctctggaacactcctcgccgagccgcaccgaccctgacaccgaccctcctcctcctcctcgccacgctaccgccggccctccctgccgaaccaccgccggacctcctcctcctgtcctagctgccaccgaccccgccgccggctctcctccttgtaggctggcagcggctatggccaagagtgacggcggtggtcgcgaccggtaggcggtgaccctcggcggccaggcgtcggagttgaggagtagaggattcccacccttgttgtctctcactccctcaactctcaggctctcctttccccaaagagcggcggcagcggcaatggttgtgtccgggagcggcggcgggcaccgtttgcgaccgacgatagtggcggcgctaacggtttgacctgcagcaacagcggctcctcccctcgagaagtggcggcgagctggcgacattgaactgctgcaccaacggtggctgctgcttcccctggcggcggcagaggcttttccccgacgatggtaggcaccattcccccatttcaccattcctcctctcccccgcctaggccatcggccaccagcagaggcctctctcttcccgctgcgccggccaccgcctccacgcctgcaagccacatcgcgccgcacttgcaatttggttgcgcctccacgcaccgcggccacctcctccgccaccagccgcgcctcaccggcctctgctgtcgccagtcgctccactatgcgcgagctgcctccagccagccgttgctcctcctcctgccagcgtggcatcagccagattgcttcaccgcctccaccttcgcacggccgtgcgaccacctccatatggtcgagcctctgcctccacacggccgcgccaccgcttccgcctccatacgaccatgctgccaccagcaccacacggccgcaccttgccgccttgtcgcctgggggtcggagctcggacaccctgccgcctccacgtgcttcaccaccgccagcggctcgggacggcacccacgctagatccacaccaggagagcgccggatccggcaccgccgctgccgccacgtcactgctgtggttgtcgtcgccttggaactaggtcggggttgtcggctccaagcgtcgcgacctcgggggagaaggccccgcgccgccgtcgtccttgcggccgcgtggtttccatcgggccgcttgggcggcggcgaggaggaaggagggcggcaaggggtggtgtcgcggcggcggctcagtcgcccctgccctaggagcgacgcgaggcccagtgacctcagaattgcacaacatccaatagatatacaatacat

SEQ ID NO: 94816 - DNA, 887 bp, Oryza sativa
  Clone ID: PAT_MRT4530_9306C.1
atgacggcggcggcggcggcagcggcggtgaccctcctccgcctccctctcgcccgactctcctcccacctccgctccctccctccccgtcccataccgccccctcggctccgcgtctacacctcccaccgcctcctctcctccctcctagctcccagccacgtccccgccgtctcgtccctggccgaggcggtggctgcgccggatggtgagggggtcgaagtggaggaggaggaggacgaggaggaggaggcagaggcgcgccccaccaccttcgtgctgccgcggctgccgcggccgaagctgagcgtgaaggagcggaaggagctcgcgtcgtacgcgcacggcctcggcaagcggctcaagtcgcagcaggtcggcaagggcggcgtcacgccgtccgtcgtcgccgccttcaacgacaacctcgagtccaacgagctcctcaagctaaaaattcatttgaactgccctggagagctgcctgacgtgatactacaacttgaggagtcaaccggatccattgctgttgaccaaattggtcgatctgtcattctatatcgtcctagcaccagtaagatgaaaaagagagaagaaagtgctaggaatagaacaagatttgtaagatctagagaaccatcagaagaacaacctagaagcagcacaagcaagagatttataaaatctggaggagcatttaggccacaacagaagagaagaccattagcatctaaggaatcgtcgtatgggcgaagatagatgccacattcaatccttcatcttgttttttttcattgtctagacttatggaaatcatgtaaactttagaccatctaatttgataatagatattagtgctgagtttttatcaaaaaaaaaaaaaaaaa

SEQ ID NO: 94817 - DNA, 2367 bp, Oryza sativa
  unsure (1)..(2367): unsure at all n locations
  Clone ID: PAT_MRT4530_93070C.1
atgggagatcaaagtccagagccaggtataagtcatgcaaatcctgcaagagagatggacatgatatctctgagtgttggaagttacaggacaaagacaaaagacccggaaagtatataccaaaagtggattcttgatactacatgcacctatcacatgtgcccgaatagggattggtttgccacctatgaagctatccaaggtggtactgttttgatgggtgataatacaccatgcaaggtagcaggtattggaacagttcagatcaagatgtttgatggctgtatcagaacattgtcagatgtgcggcatattccaaatttgaagagaagtctcatatctttatgtactcttgatcgcaaagggtacaaatattccggtggagacggaattttgaaggtaactaaaggctctcttgttgtgatgaaagctgatattaaatctgccaacctgtactatctgcggggtacaactatattaggtaatgttgcagcagtttctgattcattatctaattccgatgctactaatctttggcatatgcgttttgggcatatgagcgaaaatggtttggcagaattgagcaagcgaggattgctagatggacaaagcatcgggaagctcaaattttgtgagctttgcatctttggcaagcataaaagggtgaagttcaacacatctacacatactgctgaaggtttgcctaaacagttttgggcggaagccgtttccactgcttgttatcttatcaatcgatcacccagttatgccattgataagaagactccaattgaggtatggtctggttcccccgcaaattattcagacctaagagtatttggttgtactgcttatgctcatgttaataatggtaaattggagcctagagctattaagtgcatttttcttggttatccatctggtgtgaaaggctataagttatggtgtcttgaaactaaaaaggttgtgattagaagaaatgttgtcttccatgaatcagttatgttacatgacaaaccttctactaatgttcctgttgagagtcaggagaaagcanaagcgaatatagttgcttatgctttgagtgtggcggaagaaattgaaggtaataccgaaccttctacatattctgaggctattgtttctgatgattgcaatagatggataactactatgcatgatgagatggagtcacttgaaatgaatcatacttgggaattgatgaagttaccaaaggagaagaaacctatccgttgcaagtggatcttcaaaagaaaggaaggtatatctccaagtgatgaggcaaggtacaaagcaagggagttagaagaggacatttttatggagcaacctgaaggttttgttgttcctagaaaagagaacctagtctgtaggttgaagaaatctctttataggttaaagcagtcacctagacaatggtataagagatttgactctttcatgctttctcagaagtttagaagatccaattataatagctgtgtttatctcaaagttgttgatggttcagctatatatttgcttcgttatgtcgatgatatgttgattgctgcaaaagacaaatcagagatagcaaagttgaaggcacaattgagtagtgaatttgagatgaaggatttgggtgcagcgaagaaaattctcgatttatgtccacagtcagattatgatattgagtacatgtctagagttccatattcaagtgcagttggttcacttatgtatgccatggtatattctcgtcctgaattatcacatgcattgagtgttgtcagtagatacatggctaatcctggcaaagagcattggaaagttgttcaatggattttcagatacctacgtggtacatctagtgcttgtttgcagtttgggatatctacagatggacttgttggttatgtggattcagattttgctggagatttggataggagaagatcgcttacaggttatattttcactattggaggatgtgccgttagttggaaggcaagtttgcaagccactgttgccttatctactactgaagcagagtatatggctatttctgaagcttgtaaagaagctatttggcttagaggtttgtacactgagctttgtggagttacgtcttgtgttgatatattttgtaatagtcaaagtgcaatatgccttacaaaggatcagatgtttcatgagagaacaaagcatattgatgtgagatatcactttattcgaggtgtgattgctgaaggtgatgtcaaggtatgcaagagaagtacgtatgataacccagctgatatgatgacaaagccagttactgctactaagtttgagctttgctcaagcttggttggtgttacagtatag

SEQ ID NO: 94818 - DNA, 1689 bp, Oryza sativa
  Clone ID: PAT_MRT4530_93071C.1
atggaggagaagaggcagcggctggtgatctctctctcggcgctctgcctcgccgtcgccgtgatgtccggcgcgctgctgccgccgcgggcgtcggcggcgggaggggtcgggaggaagcggcggtgggccgggttcgactactacgtgctggcgctgcagtggccgggcaccgtctgccgccagaccagccattgctgcagctccaatggctgctgccgctcacatccgctcaaattcttcacgatccatgggctgtggccgcagtacagctatgggggatggccatcctgctgcaggccaaccacattcgacggcaacaagatctcgaggttgaagacgatactcgaggagtactggccgtccttgtactgcggctctttctcaacctgctttggtgggaaaaggccattttgggtgcatgagacagttcagaagctgcatgaaaaggatgaatacgactacttctctacagcactgtacctttacagcaaatataatgtgacgaaagctctgaagaaagcacatatttatcctagaggaggcaggaaatacttagttggtcatatcgtctctgctattgaattttcctttggggcaatgccatctattgtgtgtaaaaacggctcagttcaagaactgaggctctgcttccacaaggattatcagcatttggcaattctacagaaggaatcagtaaccaagtcaacgaatgagatgtacagcaagaaacccactaggcacacatacacgaatatttcgctgaagtctgggagcttcgtgctctctgttccgttcactttacgcatctcaacctatcgctagaagaggaaggcggaatcagtcgagggcgaggcggcggcggcggcggcgatggcgacggcgaggaaggcgccgcgcatggtggcgatctgggcggtggtggtggtggtggtcgccgccgatctgttcggagcggcggtcgcgcggtcggcgtcggcgcgtcacgcggtggggaagaagcagcgggagttcgactacttcgcgctggcgctgcagtggcctggcaccatctgcgcctcaacccgccactgctgcgccatcaacggatgctgccgctcggagccgctccagacgttcacgatccatgggctgtggccggactacgacgacgggacctggccggcgtgctgccgccacaccagcttcgacatggacaagatattgcccctgaagccgacgcttgagaagtactggccgtccctctactgctcatcctcttccacttgcttcagtggcaaggggcccttctgggctcatgaggatgaattagagtatttcaccactgctcttgacctctacttcaaatacaacgtcacggaaatgttggcaagtggtggtatccatgtttcaaatggtaaacaatatgcgctaactgatgtcattgatgccatcaaatgtgcttttggggcctcaccgcaaattgtttgcaagaagggctcagttgaagaactgaggttatgctttgacaaagatttgaagccccttgattgccttactactactgctaccaatgaaaacgtatcgaagaagaagtattgccctcgatacatcaccctgccaacatatgaccccatagtacatgctaattctactcgggagatcataacagtcgaaagtgaggtctatggatatctttacacatcctaa

SEQ ID NO: 94819 - DNA, 1070 bp, Oryza sativa
  Clone ID: PAT_MRT4530_93072C.1
cccacgcgtccgcccgaagaagcagcgggagttcgactacttcgcgctggcgctgcagtggcctggcaccatctgcgcctcaacccgccactgctgcgccatcaacggatgctgccgctcggagccgctccagacgttcacgatccatgggctgtggccggactacgacgacgggacctggccggcgtgctgccgccacaccagcttcgacatggacaagatattgcccctgaagccgacgcttgagaagtactggccgtccctctactgctcatcctcttccacttgcttcagtggcaaggggcccttctgggctcatgagtgggagaaacatggaacatgctcatccccggtagttaaggatgaattagagtatttcaccactgctcttgacctctacttcaaatacaacgtcacggaaatgttggcaagtggtggtatccatgtttcaaatggtaaacaatatgcgctaactgatgtcattgatgccatcaaatgtgcttttggggcctcaccgcaaattgtttgcaagaagggctcagttgaagaactggccttatgctttgacaaccccctgaagccccttgattgacttactactactacgaccaatgaaaacgtatcgaagaagaagtattgccctcgatacatcaccctgccaacatatgaccccatagtacatgctaattctactcgggagatcataacagtcgaaagtgaggtctatggatatctttacacatcctaagatacgattaccgcgagcaagaattacatggccatgatgaagccggtagttcagggctcttagctgcttaagacatactggggccggcattgaggttcaaggaaatgtatatctagataactcgattattacatttgtaagcacggcacgccagaacaacggagaatgtgattgtgtctgaaaaatcaattgctttatgtactatgcaaggttggaaaatagttcgtccatgtatatagtcattggtcagggtcatctgcgactgcaatctgctgaattataatggacagtggcaatcggtctgaacttttctggctctgtg

SEQ ID NO: 94820 - DNA, 490 bp, Oryza sativa
  unsure (1)..(490): unsure at all n locations
  Clone ID: PAT_MRT4530_93073C.1
aacctggtttttgtttttttatttaatttttttttttttttttttttttaaaaccaaaccaaacggtacatacatattattaccaacctcnatacaaaaaacaaaagtttacataccgaaagtatattaacagcgtttttctttctttgccattgcatgtagcagcaatgcaccagcgggaaacactaattaaaaaaattaccaaaaaatcaaagctcgatcacacccaaatatataggcagtcctttgcattatggatggcatccatcgattggcccgtgtttcggggtcaaattcaattaaacccttgccccggcggcgggcttttggtggtggtccgcggggtattcccccccctaacccccggccccggcggcgtggtttcccgaaaaaaagcccccgtggagcatggcgacataaaacaactgcgtgaaggcgaggattattaccaaggcctcnagcacccggaggccccacccccggtagcccc

SEQ ID NO: 94821 - DNA, 290 bp, Oryza sativa
  Clone ID: PAT_MRT4530_93074C.1
cagatttatagaaagaagagatggaccacacacgggggagaggttggatctggatctgagtctcacggggtcgcgtgtcgctacctgtgtccttggactactcctcgtgctttcgttgcgatgcacatactggcgaagcgcctgctggagtcgcaggcaacctgactgcagccgtggagcatctgcacgaggagctgcatgcacaagacccgctgggctgccacgacacctgccaagggcgccttgagaggggtgagcaggtgtgattcggcgagcactttctgcacccc

SEQ ID NO: 94822 - DNA, 230 bp, Oryza sativa
  unsure (1)..(230): unsure at all n locations
  Clone ID: PAT_MRT4530_93075C.1
acatataagtntcctttttgacaantnntacaatatatttattacaangtgtatgtgcatatgattagcctgntgctaacattcacatatncatgctcttcaacctatgttgaanacatacatntntncatacatncncnnctnatgttgacncanncnngatgaanaaaaaannctgaacctncnaactgggaaaaggggaanccaatgcncggtggcccctattctaa

SEQ ID NO: 94823 - DNA, 252 bp, Oryza sativa
  Clone ID: PAT_MRT4530_93076C.1
atgaggacttctgggttctcgttcacaccagaaaacgggaacccgggtcagttcagagtggttggaccagctctgaccgggccgccgcgccaccccgggctcgacccccctcgggggagccacgtgggtttgggggcaacccaaccccaagctgggagggggcagccgccgcaacaccccgggctcgacccccctcggggagagccacgtgagtttgagggcggcctcctccctctagctgggagggggtag

SEQ ID NO: 94824 - DNA, 248 bp, Oryza sativa
  unsure (1)..(248): unsure at all n locations
  Clone ID: PAT_MRT4530_93077C.1
aattcgaggctaggggttggtcggasagngcgyatggtgtgctagctacttkgaamsgacgtcgcatmgttgctctcragtatgaggtcgctmatctatacctgatcatgattttcgcatgtgttgctgacctsagamggyggcgtgbtaatcgtaagacggtcatgcgggacgctgaatctaagccagggmattwcgtgcatatcgagraagtatacagctggcgagwcgcgcgcggatatcctcga

SEQ ID NO: 94825 - DNA, 421 bp, Oryza sativa
  Clone ID: PAT_MRT4530_93078C.1
cgtggtctttcgccattgctcggtctgcacgcacaggcgccgcattttgtactccaacgactcccgagcggatatcgacgatctcagctgctcgcccatgcaggcctaccgcgccgatctctactccaggtactgctagaacaaggacgccttgggcgtcgtcttctccttagctgtattggccgacttcgcggatataccaacctgctatttgagctcggaattgaccgccgtgagtatggcgacctccatgtgctcaaacatcagatcgcccaactagttggcggacctcctggttctctttctcggcgacaacaatgggcgctgcgtgaatgatctgctctccaatcatcgtgagttgtctctagcttctgcagtttcttatcagacacagcggtctttgtgccacaggtcacgtcct

SEQ ID NO: 94826 - DNA, 117 bp, Oryza sativa
  Clone ID: PAT_MRT4530_93079C.1
atggcgtgtatagcacggttccgcaagtggttgactccatcattgcaatgtgcaaagccttcgatgaagctcagctttgatcctccgtatgcctcaaagcagatgaacaaacattaa

SEQ ID NO: 94827 - DNA, 1527 bp, Oryza sativa
  Clone ID: PAT_MRT4530_9307C.1
atggaggaggcggcgaggcggacgctggtgctggtcaacctggcggccatcatggagcgcgccgacgaggcgctcctcccggcggtgtaccgggaggtcggggaggcgctgcgcgccacgcccgcggcgctcggcgccctcacgctgtgccgctcctcggtgcaggccgcctgctacccgctcgccgcctacgccgccgtccgctacgaccgcgcccgcgtcgtcgcgctcggggccttcctctgggccgccgcgaccttcctcgtcgccgtctccgacaacttcgcgcaggtagctgtagcaagaggaatgaatggtattgggctagcacttgtaacccctgctattcaatctttggtggcagactactccgatgacaattcacggggatcagcatttggatggcttcaacttactggaaatttggggtctctgataggagggttgttctccatcatgctagcatctactacattcatgggcattgctggttggcgcattgcctttcatgttgttgctctcatcagtgtcacagttggtatattggttcgcctattcgcggtggatcctcattatatcaattttggaaacaaaaagcagcatgtccgcaagtctgcttggagagaaatgaaggatttggtggtggaagctaaggctgttgtgaaaataccatcttttcaaatcattgtagcgcagggaattacaggttcatttccatggtctgccttatcatttgctccaatgtggctggagttgatgggttttacgcataagggaactggaattctcatggtcacatctgcagtagcaagctcactgggaggactgtttggtggaaaaatgggggattatcttgctaagcactatccaaattttggtagaatagtcatatctcagataagctccgcttctgcaattcctcttgcggctcttttactgctaggcttgcctgaagacccatctacaggttttttgcatggttcagtcatgttcattgtgggattttgcatctcctggaatgctcctgctacaaacaaccctatatttgcagagattgttcctgagagatcaaggactagtatttatgcactcgatcgttcccttgaatctttatttgcttcattcgctccaccagttgtcgggtatctagcagagcatgcatacggctacaacccaatcacttatggagttggcataagcagtgttgagagggacaaggaaaatgccgctgccctagccaaggctctttacacggcaatagccatcccgatgctactctgttgcttcatctactccctgttgtaccaaacatatcctcgagacagggagagggcaagaatggattcgctgataacttcagagctgcagcggattgaaccggacagatctcatcggaccagtgattattacaatggggaaggtgtgtcggtgatcaatattgagtatggggaggaaggggtggatgctgacgatgatgagaaaccattaatgcagttccgaattgaacaaagcgcggctgacaaatga

SEQ ID NO: 94828 - DNA, 692 bp, Oryza sativa
  unsure (1)..(692): unsure at all n locations
  Clone ID: PAT_MRT4530_93080C.1
tttttttttttttttttttttctttcaacttactttagacaattgccaagccttggaactaatacagaagagaaaaagaggggaacaaataccttgagagatcgaacaaatgattgcccttatcgcggctttatactagcagcaggaggcaaatgcagcaaacaactttcttacagagctaaccaaattaaccccttgcagaagcatgaaacagaagaactctaatcaattctcccagcaatgcacttccattgcattgcaatttcaaaaacagcttcttctcttctatcatgagaaggtttctggcagaggccttccctgaaggaatgccctgaagagcacgagagaccgctcgggctgcgagaacggcgcctcgtgggaggcccctctgatggtggcaaaggacagcatgtctccataaacctgagtccatccaccaacctgctgcccttcaaaccaaacccggtacgggaccgacgtcttgaggcccaaatcgcgcgccaagttctgcacaagagtcctgctcccggttagcgggatcaccgagtcttgatcaccgctgtaaactagcacccggatgccagactttacaagtgatcccactatgttaatggttggaatctgcaaattgagtagctcatactcaagaacactgctgncaactgcccaattctttacaccgatgagcttcg

SEQ ID NO: 94829 - DNA, 1964 bp, Oryza sativa
  Clone ID: PAT_MRT4530_93081C.1
atggcggcagccgccgcccctctccccaccctccccctcctcctcctcctcctcaccttcctctccgccgcctccgcgtcgccgcacatctccgccgtcatctcccagtcgggcctcgacttcgtcaaggacctcctcgtgtcccgcgccgcggaggccatcgtgcccctggaggtgcccgacatcgagaggtccgtgagcatcccggtcatcggcaccgtggacatggtcgcctccggcatcgtcctccacggcgtggcggtcgacgactccaccgtcgccgtcggggacgacgggatcgtggtggccgcgtcgctgtccagcgttaatcttactatggggtggagctactcctatagcgcctgggtcgtcacgatctctgacagcgttcgagagatgatgctagattggagggggacttccatgattgacaagttaatgttcaaaattagtggtttagtgtctgaatttgcgcttattggcatgtatggaatgaaacatgttgatggaatggatgttgggatttccatggggatgaagaatcaaaatgggtctctcaagctgttcgttacagaatgtggctgtaatatgaagagcttggacatatcactgaacggaggagcatcttggttttatcaggggtttgtagatggtttcagtaatcatatcagatcatcagtagaaaatgcaattacgaagaaaataatggagggtgcatcaaagcttgactcattccttggaagccttccaaagaaaatcgatgttgatagcatcgctgctatgaatgtgacatttgttagtgatccactcttcaagagttcctctgtggagtttgatatcgatggactgttcattccatctgataaaactgcagtttcaagacacatgcattttagaggtgtaaaatatgtaccacctcttggtagctcttcaaaaatgctatggatttcattggatgaagatgttttcaactctgtttcagctctctatttcaaggctggttcactacaacgtatggtggataaaattcctgatcagctcttcctgaatactgctagttggaggtttttgattccaaggttatatcagaagtaccccaatgatgatatgctgctgaatatttcagctacttcacctccttccgtgaggattaatgtgggtaggattgatgccgcagttgacttagatgtcacagttaatgttttggattttgatgagatagttccagtggcgtgcatatcagtgtcagttactgtctctggagctgcagtggtttctgggaacaatcttgctggaagagtcgagttagattatttctcattcaccttgaagtggagcaaagttggcaaacttcataccttcatagttcagagtgtgatgcagatcttgttgaaaaaattgtttgtgccctatgtgaattcatatctcaaaagaggcttcccattgcctatcatcaaggggttctccatcagcgatgcatacatcctcacttcccagtcaagaataattgttagctctgatgttgccttcatcggaggtcatactccctatttaagccaatgaaagcatctggcaagaagtaggcttgttgctcaatcagcaaagcatcagaaatcgccatgtcccatggaacgtgtagtgctacttcctcaacatgttagcattatttcgttctgctgtataatgttcttttgtaaataaccgtaggagttgtacatatgtaaatctaggaaccatagaactgtagaaataggctgctgctatactggagaaatggtgggttggttgtgatgtacccacaattcttccaaatgaactggcaatatacttgtacacgttctgtcaaaaaaaaaaatgtacactccactgtatagtgttcagttctgtaatctatgctgaatttgctgtatttaaccataatctggaaatgtatcatcgttccagtatcaaaaaaaaaaaaaaaa

SEQ ID NO: 94830 - DNA, 450 bp, Oryza sativa
  Clone ID: PAT_MRT4530_93082C.1
atgacagttggtgtagatggcagccggatatccatggctaagcacctcctgactcgtcatgtcccttatacaacagggacttgtaacgaagatgttgatgaagaagttggtgcagacaataaccgaacaaacgtggctttggcacctccttcggatgatgaatctactattgatccggttgatatgatgacgagcctgcaaaaggggctctatgagtgtgccgatagtaacggcgaccttggaagaagtaaatgcctcatcggcggaatagccgaggacattggttggtgtagatctaacacgaacggtacattggcatcacagacggcactattctttcttcatgttgatatagacgagcgacgctccaatacacaaacaagcggcggcatattgatctcgatgaagagggagagaatcacggacggacaacatctcatcttggcgtga

SEQ ID NO: 94831 - DNA, 341 bp, Oryza sativa
  Clone ID: PAT_MRT4530_93083C.1
cagccggtgaaagcatcacctggttcccgtcgtcactgggtgaaaagaaaaaccacccctggcgcccatatacggcataaccgcctgctgcccccgcggcgttggccagattgcaattaatggcagctggcacagacaggtttgcccgactggaaagcagggcagtgagccgcataccgcaatttaatgttgaagtttagctcactcattgagggcaacccccaggccttgtaaccactgttaattgctgttccccggcttccgttaattgtttgttgttggaaatttgttgaaccggaattaaccaattgtcaaccaacaagggaaaccaagcctaattg

SEQ ID NO: 94832 - DNA, 363 bp, Oryza sativa
  Clone ID: PAT_MRT4530_93084C.1
atggagatcgcaagattcgtccacatgacgacaacattcagggcgagtcccgacatatacgacctcgcatcagcggttgacagccgacacggcctggtcctcttctacgtgagggtttgctccgacgaggaggagcgattcgtagtctgggatccaatggtggaagaagaagaagaagaggagcagtggatcgatggatttcccttccccgtcgagacgcagtactggacggcggccgtgatgatgtactcttcctacaccgatggctggagcgatgagattctgcacaaggagaaggatcagattgataccaaggcctgcgtccttgtgggaaggaagcttttcctccccactagagtatga

SEQ ID NO: 94833 - DNA, 1233 bp, Oryza sativa
  Clone ID: PAT_MRT4530_93085C.1
atggctgatcccaacggcccccgccacctccccaccccgttcgagccacggcccatcgatggcctaatcggcggcgacaccgccgactccgacagcgggggcaccgccattgtcggcaacatgatgaccaccggtcccggcgcggcgctggtgctggcggcggcggggacgacgacgacctccacctccctcgccgagagcagcgggatcggtggccgcctcgtccaggatcaggaggaggccggctccagtgttttaggcggcagctacatcgtccccttccccaacggccacggcgtcctcgatcacgatggcctcaccggcaaggcgacgccatacgagccgccgccgtcgtggattccgtggattgagagccccagcttgttcggcgggtggaggttcgggtcagacgccgtggccggcggtggcgacaaggacatcgtcgacctctctccggtcggcaatgctcatgatgagctcccaagtgacggcctcaacttgagctccgccggcgacgccatcatcaacaccacggcctcaagcagccgctgcggactcgtcgatgtgctcaatgaagatatggtgaccgagattctccttcgccccccaccggaggacccagccctgttcgcccgactccagctggtttgcaagcaatggcatgcgatcctcggcgacccctgcttcatccgcctcctccgcaagttccatgatccacctcctatgcttggctacttcatcaacgaggatgaacccggaaagccaatggagatcgcaagattcgtccacatgacgacaacattcagggcgagtcccgacatatacgacctcgcatcagcggttgacagccgacacggcctggtcctcttctacgtgagggtttgctccgacgaggaggagcgattcgtagtctgggatccaatggtggaagaagaagaagaagaggagcagtggatcgatggatttcccttccccgtcgagacgcagtactggacggcggccgtgatgtgtggccttttggagtgccataacgatcatcttcactgccacgggggaccatttctggtcgtcgccgcatgcactcgcacgatggactcctacagctctctcaggatgtactcttcctacaccgatggctggagcgatgagattctgcacaaggagaaggatcagattgataccaaggcctgcgtccttgtgggaaggaagcttttcctccccactagagtatga

SEQ ID NO: 94834 - DNA, 231 bp, Oryza sativa
  Clone ID: PAT_MRT4530_93086C.1
atgagttgttggtggagctcgaacgagtgggagtgcggggattatatgcgcagctcggtggggcgtcgcgtcgcgcacgggcgggtgggaggggagaaaaccgtggttccgcgccgagctgcgggcgagacggcacacgggtcggggaggcgggttcgcgcgccaaccggaggcgggatggtggcgggacgtggagtcagtactcagtaccgcccaaaaaccgtgggctag

SEQ ID NO: 94835 - DNA, 225 bp, Oryza sativa
  Clone ID: PAT_MRT4530_93087C.1
atgggttctgatgtgcatgttttgttggctaaattaagtgggtgtgcacgtgagctgttggattgccttggacgggggatattacttgactgcaggctggtgccttcacgtgtgaaggcagaggatcctaattctgtcggtggcccatccaacgcgggtgtggccggtgctgccgaggtgaaggaccttgacctcgaataccaagcgccggcagcgacgccgcgg

SEQ ID NO: 94836 - DNA, 3561 bp, Oryza sativa
  Clone ID: PAT_MRT4530_93088C.1
atggcgagtttgaagtatgatctaccgctcctggaccgagacacaagattctcactttggcaagtgaagatgcgagccgttcttgcacaacaagacctcgatgatgcgctttctggatttgacaagaggactcaggattggaaggtgcttaaggaggagacagccgctgggctgtggttgaagctggaacagatatgcatgactaaggatctgaccagtaagatgcacctgaagcaaaagttatttttgcacaagttgcaagatgatgggtctgtaatggaccatctctccgctttcaagaaaattgttgctgaccttgagtctatggaggtaaagtatgatgaagaggatttatgccttattctattgtgttcattgcctagctcatatgcaaacttcagggatactattctttatagttgtgatactctaactttgaaagaagtttatgatgctttgcatgccaaagaaaagataaagaagatggtaccctctgaaggttcaaattcacaagcagaaggcttggttgttcggggcaggcaacaggagaagaacacaaacagcaaatcaagagataaaagttcaagtagctaccgtgggagatcaaagtccagaggcaggtataagtcatgcaaatactacaagagagatggacatgatatctctgagtgttggaagctacaggataaagacaagagaaccggaaaatatgtaccaaaaggaaagaaagaagaggaaggtaaagccgcagttgttactgatgagaagtctgatgcagaattgcttgttgcttatgctggttgtgcacaaactagtgaccagtggattcttgatactgcatgcacctatcacatgtgcctgaatagggattggtttgccacctatgaagctgtgcaaggtggtactgttttgatgggtgatgatacaccatgcgaggttgcaggtgttgaaacagttcagatcaagatgtttgatggttgtatcagaacattgtcagatgtgcggcatattccaaatttgaagagaagtctcatctctttatgtactcttgatcgcaaagtgtacaaatattccggtggagacggaattttgaaggtaactaaaggctctcttgttgtgatgaaagctgatattaaatctgccaacctgtaccatgtgcgaggtacaactatattaggtaatattgctgcagtttctgattcattatataattccgatgctactaatctttggcatatgcgtcttgggcatatgagtgaaattggtttggcagaattaagcaagcgaggattgctagatggacaaagcatcgggaagctcaaattttgtgagcattgcatctttggcaagcataagagggtgaagttcaacacatctacacatactactgaaagtattcttgattatgtgcattctgatttatggggcctgctcagtggaaaactatggttgaaagacaaactgaaagaaagatataccattgataagaagactccaattgaggtatggtctggttccccagcaaattattcagacttaagagtatttggttgtactgcttatgctcatgttgataatggtaaattggagcctagagctattaagtgcatttttcttggttatccgtctggtgtgaaagactataagttatggtgtcctaaaaccaaaaaggttgtgattagtagaaatgttgtcttccatgaatcagttatgttacatgacaaaccttctactaatgttcctgttgagagtcaggagaaagcaagtgtgcaggtggagcacttgatcagttcagggcatgcaccagaaaaagaagatgttgctattaaccaagatgcatctgttattgaagattcagattcttctgctgttcagcagtctccaaaacgttctattgcaaaagataagcccaaaagaaatattaaacctcctcgaagatatattgaagaagcgaacatagttgcttatgctttgagcgtggcagaagaaattgaaggtaatgccgaaccttctacatattctgaggctattgtttctgatggttgcaatagatggataactgctatgcatgatgagatggagtcacttgaaaagaatcatacttgggaattggtgaagttgccaaaggagaagaaacctatccgttgtaagtggatcttcaaaagaaagaaaggtatgtctccaagtgatgaggcaaggtacaaagcaaggttagttgctaaaggttatagccagattccaggtattgatttcaatgatgtcttttcccctgttttgaagcatagttcaattcgcactttactcagtattgttgcagtgcatgattatgaactagagcaaatggatgttaagactgcatttttacatggggagttagaagaggacatttatatggagcaacctgaaggttttgttgttcctggaaaagagaacctagtatataggttaaagaaatctctttatgggttaaagcagtcacctagacagtggtataagagatttgactctttcatgttttctcagaagtttagaagatccaattatgatagctgtgtttatcttaaagttgttgatggttcatctatatatttgcttctttatgtcgatgatatgttgattgctgcaaaagataaatcagagatagaaaagttgaaggcacaattgagtagtgaatttgagatgaaggatttgggtgcagcaaagaaaattctcggtatggaaattactagagaaagacattctggcaagttatatcttagtcagaaaggttatattgaaaaagttcttcgtcgtttcaatatgcatgatgcaaaaccagtgagtactcctttagctgcacatttcagattatcttcagatttatgtccacagtcagattatgatattgagtacatgtctagagttccttatttaagtgtagttggttcacttatgtatgctatggtatgttctcgtcttgacttatcacatgcattgagtgttgtcagtagatacatggctaatcctggcaaagagcattggaaagttgttcaatggattttcaaatacctacgtggtacatctagtgcttgtttgcagtttgggagatctagagatggacttgttggttatgtggattcagattttgctggagatttggataggagaagatcgctcacaggttatgttttcactattggaggatgtgctgttagttggaaggcaagtttgcaagcaactgttgccttatctactactgaagtagagtatatggctatttctgaagcttgtaaagaagctatttggcttagaggtttgtacactgagctttgtggagttacgtcttgcattaatatattttgtgatagtcaaagtgcaatatgctttacaaaggatcagatgttccatgagagaacaaagcacattgatgtgagatatcactttattcgaggtgtgattgctgaaggtgatgtcaaagtatgcaagataagtactcatgataacccagctgatatgatgacaaagccagttcctactactaagtttgagctttgctcaagcttggtgggtgttacagtatag

SEQ ID NO: 94837 - DNA, 324 bp, Oryza sativa
  Clone ID: PAT_MRT4530_93089C.1
atgagggacggcggcggaggaatgtgcggccaagggtcggtgacctccattgaaatctatgcaggagtggatcggagaaaggaagggagcgagaatgcgtcgtcatcaggaacggtgaggacgccggtttggaacgcatcatcatctcaagcaacgcctcagcacgctgattcctccaggcgaacaactagggtcgcacgccctgctcaggacgatagtgatgaaggagatgagagtgacgaggacgacgccgaccacgctccagctgacgagattggaccttctcagcttgctgacgctccagaggctacacagccctcatag

SEQ ID NO: 94838 - DNA, 174 bp, Oryza sativa
  Clone ID: PAT_MRT4530_9308C.1
atggcgtcatcttcatcaagcatgcaggctttgtcaatcatgagctgcacatacattgtcaagacctttagttgtgaaccagtgaaagtaaagccatgcatgaaggtgaaggttaaagataggcgtgctaaattgccggtgagatcacctaaattcacggcccgcgttgattag

SEQ ID NO: 94839 - DNA, 2298 bp, Oryza sativa
  Clone ID: PAT_MRT4530_93090C.1
gcacacggcttctctactttccctttccgctttttctttggagcatatgcttatccttttgaagtatgatctaccgctcctagaccgagacacaagattctcactttggcaagtgaagatgcgagccgttcttgcacaacaagacctcgatgatgcgctttctggatttgacaagaggacacaggattggtccaaagatgagaagaaaagggatcggggcaggcaacaggagaagaacacaaagaaccaatcaagagataaaagcttaagtagctaccatgggagatcaaagtccagatgcaggtataagtcatgcaaatactgcaagagagatggacatgatatctctgaatgttggaagctacaggacaaaaacaagagaaccggaaagtatataccaaaaggtaagaaagaagctgcatgcacctatcacatgtgcccgaatagggattgatttgccacctatgaagctgttcaaggtggtactgttttgatgggtgatgatacaccgtgcgaggttgcagggtacagatattcctgtggagacggaattttgaaggtaactaaaggctttcttgttgtgatgaaagctgatattaaatctgccaacctgtagcatctgcgaggtacaaatatattaggtaatgttgcagcagtttctgatttattatctaattccgatgctactaatctttggcatatgcgtcttgggcatatgagtgaaattggtttggcagaattgagtaagcgaggattgttagatggacaaagcatcgggaagctcaaattttgtgagcattgcatctttggcaagcataagagggtgaagttcaacacatctacacatactactgaaggtattcttgattatgtgcattctgatttatgggggcctgctcgtaagacatcttttgaaggtgctcgttacatgatgactatcgttgatgattattcgcgaaaagtttggccttatttcttgaagcacaaatatcaagcttttgatgtgtttaaatagtggaaaactatggtcgaaaaacaaactgaaaggaaggtgaaaatccttcgtactgacaatgggatggagttctgttctaagatatttaaatcatattgcaagtctgaaggcattgtgcgtcactacaccgttcctcacacacctcaacaaaacggcgaagcagagcgtatgaacaggacaattatatcaaaggcccgttgtatgttgtctaatgcaggtttgcctaaacagttttgggtggaaaccgtatccactgcttgttatcttatcaatcgatcacccagttatgccattgataagaagactccaattgaggtatggtctgattccccagtaaattattcagacttaagagtatttggttgtactgcttatgctcatgttgataatggtaaattggagcctagagctattaagtgcatttttcttggttatccgtctggtatgaaaggctataagttatggtgtcctaaaaccaaaaaggttgtgattagtagaaatgttgtcttccatgaatcagttatgttacatgacaaaccttctactaatgttcctgttgagagtcaggagaaagcaagtgtgcaagtggagcacttgatcagttcagggcatgcaccagaaaaagaaaatgttgctattaaccaagatgtacctgttattgaagattcagattcttctactgttcagcagtctccaaaacgttttattgcaaaagataagcccaaaagaaatactaaacctcctcaaagatatattgaagaagcgaacatagttgcttatgctttgagtgtggcagaagacattgaaggtaatgcagaaccttctacatattctgaggctattgtttctgatgattgcaatagatggataactgctatgcatgatgagatggagtcacttgaaaagaatcatacttgggaattggtgaagttgccaaaggagaagaaacctatccgttgcaaatggatcttcaaaagaaagaaaggtatatctccaagtgatgaggcaatgtacaaagcaagttcaattcgcactttactcagtattgttgcaatgcatgattatgaactagagcaaatggatgttaagactgcatttttacatggggagttagaagaggacatttatatggagcaatctgaaggttttgttgttcctggaaaggagaacctagtctgtaggttgaagaaatctctttatgggttgaagcagtcatctagacagtggtataaaagatttgactctttcatgctttctcagaagtttagaagatctaattatga

SEQ ID NO: 94840 - DNA, 619 bp, Oryza sativa
  Clone ID: PAT_MRT4530_93091C.1
aaactggtttagaaagtactgcaaccatcagattggctgggcaaacccaaatccaacagttaaacagcagctgccacaaactcctaccagagatcagctcttggagaggtattggtcgcatgtcatgcagtgcaccagttgtagagctgcactgaaggggatgagggctctggagatcaccttgcaggtggcggcggtcgccgtcgtcgggttcctcgccgccggcaaggagacggcggtgatgtcgggtgtccagagagcttcgccgcctcccgctggctcgccaacttcatcgagaagaccttctatttccaggattatgtccatgctgacaaatgatgcgtccatccaggaaatctgtgatgtgttgctgttgctaggaatttgtcatgaacctgggctcaggaggggctttagactgcaccgtttggctgtctcttggcctagttggttcagggatgcagctataaatcagcagccaaaactcgaaactttatggccatgtgtgtgcgttatacatgcagaggccaggccggggatacaatcattttccttgtctaaaaataaaagaagtcaagcaacagccaaaggcatccatgaagagactgcatcagcctaa

SEQ ID NO: 94841 - DNA, 3618 bp, Oryza sativa
  Clone ID: PAT_MRT4530_93092C.1
atggcgagtttgaagtatgatctaccgctcctggaccgagacacaagattctcgctttggcaagtgaagatgcgagctgttcttgcacaacaagacctcgatgatgcgttttctggatttgacaagaggacacaggattggtccaacgatgagaagaaaatggatcgtaaggctatgtcatatattcatcttcatctatctaacaatattttgcaggaggtgcttaaggaggagacagccgctgggctgtggttgaagctggaacagatatgcatgactaaggatctgaccaatgatgggtctgtgatggaccatctctccgttttcaaggaaattgttgctgaccttgagtctatggaggtaaagtatgatgaagaagatttaggccttattctattgtgttcattgcctagctcatatgcaaactttagggatactatactttatagccgtgatactctaactttgaaagaagtttatgatgctttgcatgccaaagaaaagatgaagaagatggtaccctctgaaggttcaaattcacaagcagaaggcttggttgttcagggtagccaacaggagaagaacacaaacaacaaatcaagagataaaagctcaagtagctaccgtgggagatcaaagtctagaggcaggtataagtcatgcaaatactgcaagagagatggacatgatatctctaagtgttggaagctacaggataaagacaagagaaccggaaaatatataccaaaaggtaagaaagaagatgaaggtaaagccgcagttgttactgatgagaagtctgatgcagaattgcttgttgcttatgctggttgtgcacaaactagcgaccaatggattcttgatactgcatgcacctatcacatgtgcccgaatagggattggtttgccacttatgaagttgttcaaggtggtactgttttgatgggtgatgatacaccatgcgaggttgcaggtattggaacagttcagatcaagatgtttgatggttgtatcagaacattgtcagatgtgcggcatattccgaatttgaagagaagtctcatctctttatgtacccttgattgcaaagggtacaaatattccggtggagacggaattttgaaggtaactaaaggctctcttgttgtgatgaaagctgatattaaatctgccaacctataccatctacaaggtacaactatattaggtaatgttgcaacagtttctgattcattatctaattccgatgctactaatctttggcatatgcgtcttgggcatatgagtgaaattggtttggcagaattgagcatgcgaggattgctagatggacaaagcatcgggaagctcaaattttgtgagcattgcatctttggcaagcataagagggtgaagttcaacacatctacacatactactgaaggtattcttgattatgtgcattctgatttatgggggcctgctcgtaagacatcttttggaggtgctcgttacatgatgactatcgttaatgattattcgcgaaaagtttggccttatttcttgaagcacaaatatcaagcttttaatgtgtttaaagagtggaaaactatggttgaaagacaaactgaaaggaaggtgaaaatccttcgtactgacaatgggatggagttctgttctaagatatttaaatcatattgcaagtctgaaggcattatgcgtcactacaccgttcctcacacacctcaacaaaacggcgtagctgagcgtatgaacaggacaattatatcaaaggcccgttgtatgttgtctaatgcaggtttgcctaaacagttttgggcggaagccgtttccactgcttgttatcttatcaatcgatcacccggttatgccattgataagaagactccaattaaagtatggtctggttccccagcaaattattcagacttaaaagtatttggctgtactgcttatgctcatgttgataatggtaaattggagcctagaactattaagtgcatttttcttggttatccgtctggtgtgaaaggctataagttatggtgtcctgaaaccaaaaaggttgtgattagtagatatgttgtcttccatgaatcagttatgttacatgacaaaccttctactaatattcctgttgagagtcaggagaaagcaagtgtgcagattcagattcttctactgttcagcagtctccaaaacgttctattgcaaaagataagcccaaaagaaatactaaacctcctcaaagatattgaagaagcgaacatagttgcttatgctttgagtgtggcagaagaacttgaaaagaatcatacttgggaattggtgaagttgccaaaggagaacaaacctatccgttgcaagtggatcttcaaaagaaaggaaggtatgtctccaagtgatgaggcaaggtacaaagcaaggttagttgctaaaggttatagccaaattccaggtattgatttcaatgatatcttttcccctgttgtgaagcatagttcaattcgcactttactcagtattgttgcaatgcatgattatgaactagagcaaatggatgttaagactgcatttttacatggggagttagaagaggacatatatatggagcaacctgaaggttttgttgttcctggaaaagagaacctagtttgtaggttaaagaaatctctttatgggttgaagcaatcacctagacaatggtataagagatttgactctttcatgctttctcagaagtttagaagatccaattatgatagctgtgtttatctcaaagttgttgatggttcagctatatatttgcttctttatgtcgatgatatgttgattgctgcaaaagataaatcagagatagcaaagttgaaggcacaattgagtagtgaatttgagatgaaggatttgggtgcagcgaagaaaattctcggtatggaaattactagagaaagacattctgacaagttatatcttagtcagaaaggttatattgaaaaagttcttcgtcgtttcaatatgcatgatgcaaaaccaatttatgtccacagtcagatttatgttccttattcaagtgcagttggttcacttatgtatgccatgatatgttctcgtcctgacttatcacatgcattaagtgttgtcagtagatacatggttaatcctggcaaagagcattggaaagctgttcaatggattttcagatacctacatggtacatctagtgcttgtttgcagtttgggagatctagagatggacttgttggttatgtggattcagattttgctggagatttggataggagaagatcgctcacaggttatgttttcactattggaggatgtgctgttagttggaaggcaagtttgcaagcaactgttgccttatctactactgaagcagagtatatagctatttctgaagcttgtaaagaagctatttggcttagagatttatacactgagctttgtggagttacgtcttgcattaatatagtttgtgatagtcaaagtgcaatatgccttacaaaggatcaaatgttccatgagagaacaaagcacattgatgtgagatatcactttattcgaggtgtgattgctgaaggtgatgtcaaagtatga

SEQ ID NO: 94842 - DNA, 1929 bp, Oryza sativa
  Clone ID: PAT_MRT4530_93093C.1
atgacacttgataactactccctcaacattgccatctctgctgccgctcgcgtcccatcacttgatgttggctcccagtttcatgccctttctttgaaactcagcctagcttcagattcatttgtccttaatgcccttatcaacatgtactcatcttgtaattatccagcttctgcaaggttagttcttgattctgctccacgatgggcctctgacgtagtttcttggaacacaatcattgctggatacatacgaggtggtatgcctaataaggcgttgcaatcttttcaccaaatggccaaagagcaagttaggctggacgaggtcactctgttaaatgtgctggttgcttgtgcaaggacaggcgcaatgaaggttgggagcctttgtcatgctctagttgtgctgaatgggtttgagataaattgttatattggatcctctttggttagtatgtatgcaaagtgtggtatggttgaggaagctcgcagggtttttaatagaatgcctgaaaggaatgtagtttgctggacctcaatgattgctggatgtacacaatctggtaggtttaaagaggctgttgatctgtttagggacatgcaaattgctggtgtgaaggctgatgacgctacaattgctactgttgtatcatcatgtggccagatgggagcacttgacttgggacggtatctccatgcttattgtgatggtcatggtttagggaaagagctttctgtgaaaaattcgttgattgatatgtactcgaagtgcggggatgtaaacaaggcctatcagatatttcatggattgacaaagcgggatgtgtttacttggacagtaatgataatgggctttgctatgaatggtctctgcgttgaggcactagatttgtttgcacagatggaaggagaagataaggttatgccgaatgaggtcatttttttgggtgtgctaactgcttgcagccatggaggtttagtggaacaggggtaccatcacttccatcgcatgtccaaggtctacaaccttgtgccaagaatcgaacactatggatgcatggtcgaccttttgggacgtgccaagctgttggcagaggcagagcaattcattaaagatatgcctgtcgctcctgatgtggtagtatggcggtcattgttgtttgcctgtagagcttctggacaagtggggcttgcagaatatgcagcagaaagaattgaacagttggaaccaaaaaggtgtggagggcatgttttactctctaatgtatatgctaccacattaagatgggttgatgtgaataatgtgcggacagggatgggcaatagtaggacaagtcaaatagcacaagtgattgtggattttctagaggtagctgtcagttgtgttgtcttcctcaaaggcttctatcctcctcgtgcatttgagaggagaaggtatatgaatgtagtggtccagaaagcagtgcacccccaacttgccggttatatccactctgctacttctggcctactccctttcattcagaagggattggttgagagggttgtagtcatcttctacgacaaagcgcatgtgccagttgagaagtttgtgttcaagcttgcagttaaccaatcttatggctccaagatagaggaggccagcctggaattcgctctgcgagctttcttgatcaaactggctgttgctgaaccccttactagaacccttccatcagatggcagctgggagatcgctgcatacttccgatccctccctccagatggtgagaaggaagctcagctgtggatccctacagacaccaaacagtggatgcagcctccacagataaccccaatcaagtccatgagctgtgatcctgtgaagatgcagctttacctggaacaacctagccgcacagaacccagggatccaccaactgaaccctga

SEQ ID NO: 94843 - DNA, 3591 bp, Oryza sativa
  Clone ID: PAT_MRT4530_93094C.1
ttgcaagatgatgggtctgtgatggaccatctctccgctttcaaggaaattgttgctgaccttgagtctatggaggtaaagtatgatgaagaggatttaggccttattctattgtgttcattgcctagctcatatgcaaacttcagggatactattctttatagtcgtgacactctaactttgaaagaagtttatgatgctttgcatgccaaagaaaagatgaagaagatggtaccctctgaaggttcaaattcacaagcagaaggcttggttgttcggggcaggcaacaggagaagaacacaaacagcaaatcaagagataaaagttcaagtagctaccgtgggagatcaaagtctagaggcaggtataagtcatgcaaatactgcaagagagatggacatgatatctctgagtgttggaagctacaggataaagacaagagaaccggaaaatatacaccaaaaggtaagaaagaagaggaaggtaaagccacagttgttactgatgagaagtctgatgcagaattgcttgttgcttatgctggttgtgcacaaactagtgaccagtggattcttgatactgcatgcacctatcacatgtgcccgaatagggattggtttgccacctatgaagctgttcaaggtggtactgttttgatgggtgatgatacaccatgtgaggttgcaggtattggaacagttcagatcaagatgtttgatggctgtatcagaacattgtcattgtcagatgtgcggcatattccaaatttgaagagaattctcatctctttatgtactcttgatcgcaaagggtacaaatattccggtggagacggagttttgaaggtaactaaaggctctcttgttgtgatgaaagctgatattaaatctgccaacctgtaccatctgcgaggtacaactatattaggtaatgttgctgcagtttctgattcattatctaattccgatgctactaatctttggcatatgcgtctcgggcatatgagtgaaattggtttggcagaattgagcaagcgaggattgctagatggacaaagcatcgggaaactcaaattttgtgagcattgcatctttggcaagcataagagggtgaagttcaacacatctacacatactactgaaggtattcttgattatgtgcattctgatttatgggggcctgctcataagacatcttttggaggtgctcgttacatgatgactatcgttgatgattattcgcgaaaagtttggccttatttcttgaagcacaaatatcaagcttttgatgtgtttaaagagtggaaaactatggttgaaagacaaactgaaaggaaggtgaaaatccttcgtactgacaatgggatggagttctgttctaagatatttaaatcatattgcaagtctgaaggcattgtgcatcactacaccgttcctcacacacctcaacaaaacggcgtagctgagcgtatgaataggacaattatatcaaaggcccgttgtatgctgtctaatgcaggtttacctaaacagttttgggcggaagccgtttctactgcttgttatcttatcaatcgatcacccagttatgccattgagaagaagactccaattgaggtatggtctggttccccagcaaattattcagacttaagagtatttggttgtactgcttatgctcatgttgataatggtaaattggagcctagagctattaagtgcatttttcttggttatccgtctggtgtgaaaggctataagttatggtgtcctaaaaccaaaaaggttgtgattagtagaaatgttgtcttccatgaatcagttatgttacgtgacaaaccttctactaatgttcctgttgagagtcaggagaaaacaagtgtgcagattcttctattgttcagcagtttccaaaacgttctattgcaaaaagataagcccaaaaaaaatattaaacctcctcgaagatatattgaagaagcgaacatagttgcttatgctttgagtgtggcagaagaaattgaaggtaatgccgaaccttctacatattctgaggctattgtttctgatgattgcaatagatggataactgttatgcatgatgagatggagtcgcttgaaaagaatcatacttgggaattggtgaaattgccaaaggagaagaaacctatccgttgcaagtggatcttcaaaagaaaggaaggtatgtctccaagtgatgaggcaagatacaaagcaaggttagttgctaaaggttatagccagattccaggtattgattttaatgatgtcttttcctctgttgtgaagcatagtttaattcgcactttactcagtattgttgcaatgcatgattatgaactagagcaaatggatgttaagactgcatttttacatggggagttagaagaggacatttatatggagcaacctgaaggttttgttgttcttggaaaagagaacctagtctgtaggttgaagaaatctctttatgggttgaagcagtcacctagacagtggtataagagatttgactctttcatactttctcagaagtttagaagatccaattatgatagctgtgtttatctcaaagttgttgatggttcagctatatatttgcttctttatgtcaatgatatgttgattgttgcaaaagacaaattagagatagcaaatttgaaggcacaattgagtagtgaatttgagatgaaggatttgggtgcagcgaagaaaattctcggtatggaaattactagagaaagacgttctggcaagttatatcttattcagaaaggttatattgaaaaagttcttcgtcgtttcaatatgcatgatgcaaaaccagtgagtactcctttagctgcacatttcagattatcttcagatttatgtccacagtcagattatgatattgagtacatgtctagagttccttgttcaagtgcagttggttcacttatgtatgccatggtatgttctcgtcctgacttatcacatgcattgagtgttgtcagtagatacatggctaatcctggcaaagagcattggaaagctgttcaatggattttcagatacctacgtggtacatctagtgcttgtttgcagtttgggagatctagagatggacttgttggttatgtggattctgattttgctagagatttggataggagaagatcgctcacaggttatgttttcactattggaggatgtgctgttagttggaaggtaagtttgcaagcaactgttgccttatctactactgaagcagagtatacggctatttctgaagcttgtaaagaagctatttggcttagaggtttatacactgagctttgtggagtcacgtcttgcattaatatattttgtgatagtcaaagtgcaatatgccttacaaaggatcagatgttccatgagagaacaaagcacattgatgtgagatatcactttattcgaggtgtgattgctgaaggtgatgtcaaggtatgtaagataagtactcatgataacccagatgatatgatgacaaagccaattcctgctactaagtttgagctttgctcaagcttggttggtgttacagtatag

SEQ ID NO: 94844 - DNA, 1672 bp, Oryza sativa
  Clone ID: PAT_MRT4530_93095C.1
atgagccccgaagcttggaaatttgttatatgtaggactaaatcggatgtaggccagcagttaattatggaaaatcagtggagcatttactgtaatgatgaaagaggaattgactgggttagtattgcttcgatgcgatatttcttgtgtgatttggggtgtgcggaactttctcaaaagcataagtacggtcatttttgctctatgtgtccagcttgcagaaactacaagcctcattatgagaaggttgcaaaactattcaatggtcgggacgctgcacatccagggttaatactgatggctagggttgattgtgcatcaaagcacagctctttcagtttagaagacaaaaagtacgagaatgaaaatatgcttccaaagaatgcttcggatcctgagcagattgttcaagcaatttacgatgttgaggaagcaacagctcaagcgttacagataattttggagcgcaagacgatcaaaccaaagaatcgtgattcgctcatcagatttttacaaattttggtggctcgtcacccatccaagaggtgccgaaggggatctgctgagctacttattaacttcgatgatcactggtcatcgaatctgtcgttaagttcacaagagggttctaaattgttggaaagtgttgcggaagagaaccactggatctgtggaaaagaggtgccacgtggatattggctgttctgccgcggcagtaaaagtgaaacaagaggatttagctgtggtctatgggttttgatgcattcactaaccgtccgaattggggatggagagagccagtcaacctttacatcaatatgtgattttattcacaacttcttcatctgtgaggaatgccgcaagcacttttatgaaatgtgttcaagcgtgtcagcccccttcagaactgctcgtgagctcagtctctggttatggagcacacataacaaagtcaatatgagattgatgaaagaagaaaaggatatgggaactggtgatcccttgtttccgaaggttacctggcctccaaatcagctctgcccatcttgctaccgctcaagcaaggtcaccgatggagctgtggactggaacgaggatgcagtgtatcaattcttggttaactactatggaaagaagcttgtatcatcctacaaggagacctacatggagtctcttcagcaacaagagaagaagatagtttcagaggattcatcgatttctaatgctgcaagcgtcccaattggagctgccctgggtgttgcgattgccagctgtacatttggggcgctggcttgcttctggagggcccagcagaagaacagaaagtactcacaccatttacgctctttaaagaaaatatgataccagttgctcaccctgcacttcatcagaggggctcatcaatgaatgtgtatttttctggacggattaaaatcttggtaagtgctccaaacagtgtgggaaaggaaatggtcgggcagtcagttacagatgaaaaactcgcagaagtacgatgattaactcaagtgtattttttgtgcaacgatgtgagctttgttgcatcatgtcatagatcaacgtgtaatagtttgacatatagatttcggatgattggtgtatacgttcggatgttactatccatttaacgagtgaaattttgaattcagttcgt

SEQ ID NO: 94845 - DNA, 515 bp, Oryza sativa
  Clone ID: PAT_MRT4530_93096C.1
gcacgaggccctttccccacttcacctaagagctcactacactaaccggcggtcgttgaggcggaggaggagagcgtcggcgtgccgtgcagcactgcgtccgctgctcgttgtcaacagtggtgtgcagccgcgcaacgaggcgggtgatattgacctctcgtgtgcagtcacttggagaccgcatctcgtggaaaggggcgtcggcgtgctgtgtcgccgacagcgattccagcatcgattgcttcaggcaggcatcgattcttgctgcgcaggagcatcgattcttgatgcgcaggagcagccttccaaggtgatttgatcgatcgatctcgtgcaatacagtagggacatgtggcgacttaggagcgttcgtagaatgacatgtggcggtttgagagcatttgtaggaagtttaatggactttttagtatataatagatagatagatagatagatagatagatagattttattttgaaggaaaaaagagaataaagtggtcgtgcttttct

SEQ ID NO: 94846 - DNA, 1224 bp, Oryza sativa
  Clone ID: PAT_MRT4530_93097C.1
gcatttttacatggggagttagaagaggacatttatatggagcaacctgaaggttttgttgttcctggaaaagagaacctagtatgtaggttgaagaaatctcttaggttgaagaaatctatttataggttgaagcagtcacctagacagtgctataagagatttgcctctttcatgctttctcagaagttcagaagatccaattatgatagctgtgtttatctcaaagttgttgatggttcagctatatatttgcttctttatattgatgatatgttgatagctgcaaaagacaaatcagaaatagcaaagttgaaggcacaattgagtagtgaatttgagatgaaggatttgggtgcagcgaagaaaattctcggtatggaaattactagagaaagacattctggcaagttatatcttagtcagaaaggttatattgaaaaagttcttcatcgtttcaatatgcatgatgcaaaaccagtgagtactcctttagctgcacatttcagattattttcagatttatgtccacagtcagattatgatattgagtacatgtctagagttccatattcaagtgcagttggttcacttatgtatgccatggtatattctcgtcctgaattatcacatgcattgagtgttgtcagtagatacatggctaatcctggtaaaaagcattggaaagctgttcaatggattttcagatacctatgtggtatatctagtgcttgtttacagtttgggagatctagagatggacttgttggttatgtggattcagattttgctggagatttggataggagaagatcgctcacaggttatgttttcactattggaggatatgctgttatttggaaggcaagtttgcaagcaactgttgtcttatctactactgaagtagagtatatggctatttctgaaggttgtaaaaaagctatttggcttagaggtttgtacactgatctttgtggagttacgtcttgcattaatatattttgtgatagtcaaagtgcaatatgccttacaaaggatcaaatgttccatgagagaacaaaacacattgatgtaagatatcactttattcgaggtgtaattgctgaaggtgatgtcaaggtatgcaagataagtactcatgataacccagctgatatgatgacaaagccagttcccactactaagtttgagctttgctcaagcttggtgggtattacagtatag

SEQ ID NO: 94847 - DNA, 3714 bp, Oryza sativa
  Clone ID: PAT_MRT4530_93098C.1
atggctttctctactcgccatcgtctccacgtcctcctgctggttctcgccgtcgtcgcgttggccttgcactccggccagtccggcgcccacgcggcccgagtccccgccgctctccaagaagacgagacgacgacgacgacagcggcgcccctcggcgtcgagcacgccgcgggcgacggacacggtgtgccatcaaccgaaatcttcaacgtgggcgacgccgcgccttcgccttcgccctcgccaggcgacggcggtcatgccatcttcggcgacggcgccgaacgtgccagtttacgcggtggtggcggccacggcggcggtgggcacagcagtggcgggcacagcagcggtggcggcgacggtcgtgctgcgggtggaggcggctacgtcggcggcgccggcgccggcgttccgcaccgccgctccggcagtggttcgacgaagccagccatcatacccgccttcgtatcgttgctaggaggaatcgccatggaagtgcaccgaggtttcgcgtttttgctagtttaccctaatttcttaccagcaaattcaggattaattcccatggcgagtttgaaatatgatctaccgctcctggaccgagacacaagattctcactttggcaagtgaagatgcgagccgttcttgcacagcaagacctcgatgatgcgctttctggatttgacaagaggactcaggattggtccaacgatgagaagaaaagggatcgtaaggctatatcatatattcatcttcatctatctaacaatattttgcaggaggtgcttaaggaagagacagccgctgggctgtggttgaagctggaacagatatgcatgactaaggatctgaccagtaagatgcacctgaagcaaaagttatttttacacaagttgcaagatgatgagtctgtgatggaccatctctccgctttcaaggaaattgttgctgaccttgagtctatggaggtaaagtatgatgaagatgatttaggccttattctattgtgttcattgcctagctcatatgcaaacttcaggggtactatactttatagccgtgatactctaactttgaaagaagtttatgatgcttttcatgccaaagaaaagatgaagaagatggtaacctctgaaggttcaaattcacaagcagaaggcttggttgttcggggcaggcaacagaagaagaacacaaagaaccaatcaagagataaaagctcaagtagctaccgtgggagaacaaagtccagaggcaggtataagtcatgcaaatactgcaagagagatggacatgatatctctgagtgttggaagctacaggacaaagacaagagaaccggaaagtatataccaaaaggtaagaaagaagaggaaggtaaagccgcagttgttactgatgagaagtctgatgcagaattgcttgttgcttatgctggttgtgcacaaactagtgaccaggattggtttgccacctatgaagctttgcaaggtggtactgttttgatgggtgatgatacaccatgcgaggttgcagttgatattaaatctgccaacctgtaccatctgcgaggtacaactatattaggtaatgttgcagcagtttttgattcattatctaattccgatgctactaatctttggcatatgcgtcttgggcatatgagtgaaattggtttggcagaattgagcaagcgaggattgctagatggacaaagcatcaggaagctcaaattttgtgagcattgcatatttggcaagcataagagggtgaagttcaacacatctacacatactactgaaggtattcttgattatgtgcattctgatttatgggggcctgctcataagacatcttttggaggtgctcgttacatgatgactatcgttgatgattattcgcgaaaagtttggccttatttcttaaagcacaaatatcaagcttttgatgggtttaaagagtggaaaactatggttgaaagacaaactgaaagaaaggtgaaaatccttcgtactgacaatgggatggagttctgttctaagatatttaaatcatattgcaagtctgaaggcattgtgtgtcactacaccgctcctcacacacctcaacaaaacgacgtagctgagcgtatgaacaggacaattatatcaaaggcccgttgtatgttgtctaatgcaggtttgcctaaacagttttgggcggaagctgtttccactgcttgttatcttatcaatcgatcacccggttatgccattgataagaagactccaattgaggtatggtctggttccccaacaaattattcagacttaagagtatttggttgtactgcttatgctcatgttgataatggtaaattggagcctagagctattaagtgtatttttcttggttatgcgtctggtgtgaaaggctataagttatggtgtcctgaaaccaaaaaggttgtgattagtagaaatgttgtcttccatgaatcagttatattacatgacaaaccttctactaatgttcctgttgagagtcaggagaaagcaagtgtgcaagtggagcacttgatcagttcagggcatgcaccagaaaaagaagatgttgctattaaccaagatgcacctgttattgaagattcagattcttctattgttcatcagtctccaaaacgttctattgcaaaagataagcccaaaagaaatattaaacctcctcgaagatatattgaagaagcgaagatagttgcttatgctttgagtgtggcagaaaaaattgaagagcaaatgaatgttaagactgcatttttacatggggagttagaagaggacatttatatggagcaacctgaaggttttgttgttcctggaaaagagaacctagtctgtaggttgaagaaatctctttatgggttgaagcagtcacctagacagtggtataagagatttgactctttcatgctttctcagaagtttagaatatccaattatgatagctgtgtttatcttaaagttgttgatggttcagttatatatttgcttctttatgtcgatgatatgttgattgctgcaaaagataaatcagagatagaaaagttgaaggcacaattgagtagtgaatttgagatgaaggatttgggtgcagcgaagaaaattctcggtatggaaattactagagaaagacattctggcaagttatatcttagtcagaaaggttatattgaaaaagttcttcgtcgtttcaatatgcatgatgcaaaaccagtgagtactcctttagctgcacatttcagattatcttcagatttatgtccactgtcagattatgatattgagtacatgtctagagttccttattcaagtgcagttggttcacttatgtatgccatgtttgagagatctagagatggacttgttggttatgtggattcagattttgctggagatttggataggagaagatcgatcacaggttatgttttcactattggaggatgtgctgttagttggaaggcaagtttgcaagcaactgttgccttatctactactgaagcagagtatatggctatttttgaagcttgtaaagaagctatttggcttagaggtgatgtcaaggtatgcaagataagtactcatgataacccagctgatatgatgacaaagccagttcctgctactaagtttgagctttgctcaagcttggttggtgttacagtatag

SEQ ID NO: 94848 - DNA, 348 bp, Oryza sativa
  Clone ID: PAT_MRT4530_93099C.1
atgcgggtgcgtggcccggaggtggaggcgtcaccagcggctgcgggtaccaaaggtggaggcgcggcaccggtgtcgacgcttgttggatgcgaaggtggaggaggtgggagatcaggaaaggaggccgcgtggacgccagtaggagctcggcagtggaggccgcctcttgaggtcccaacgtcgtccgtcctccgcctccagcgcgtcgggaaccgcctccgcccatggtctagtcgccacctccgcctccgcctttgcccgtgggctgtctgccgcctctgccaccgcctccacctccgtcggcccaagcaagccggaggttggcttctccaccacgagggctga

SEQ ID NO: 94849 - DNA, 384 bp, Oryza sativa
  Clone ID: PAT_MRT4530_9309C.1
atgtcagaccgtcctaaactgcatttcctggcgaaagttgcagcgagactttcccttattctagctatcatgatgctagagatcccattcattcagatggctgcaggattatctgcccttgtgttcgcgccgattcttatggtgattacgctcattatactgggatgtatctggtggtggagcgagcctgaaattgtgtgcaggttcaggttattcctgagcccgctgccgacaatgtgtgaagaaccgaagaaatcaaacttcaggttatcttcatgtctttctattggcttcatttttttttctacgatgctaccacatgaggagcatgatactgcgcacaatggtgctacactcttggaatcggtagccaagggtctctaa

SEQ ID NO: 94850 - DNA, 1245 bp, Oryza sativa
  Clone ID: PAT_MRT4530_930C.1
ttaacgtccgccgccacccgcgccaccaccagcaccggcaccaccaccaaaaccaacgccaacgccgacaccaacgccgacgccgaagccgcccccaccaaggccgccgccgtgcccgagtccgccacctaatccaccgccatggccaaggcctcctccagcaccaccacccaagccaccaccggcgccaccgcctccgcctaggccaccgccaccgcctccgcctagaccgccgctgccgccttgaccagcacctccgccagctccaccaccgaaacctccaccggcgccaccacccattccacctcctccgccgccacccatgccgccgccaccaccaccaccaagaccgccgcctccgccagcgccacctcccatgccaccgccggcgccaaaccctccacctttgcccccgccgcctccaaacccgccacctccaccgccgcccattccgccgcctccgcccgctccaccgccaacaccaccaccagctccaaatcctccttccttgccacctccaccaccaagcccgccaccaccgtctcctccaaagccaccaccgcctccaccgccaagcccgcctcccgtaccacttccaccgccgacaccaccaccggctccaaaaccaccgccttgaccacctccaccaccaacccctccgccgccacctcctccaaggccaccaccacctccgcctccaaggccacctccttcaccaccaccaccgcctcccactccgccgccaaagccacctcccttaccacctcctcctcctagaccgccgcctcctccagcgccacctccgcctccaaacccgccacctccaccaagcccaccaccgcctccgcctccgaagcctccatctcctccaaatcctccaccgccgccgcggcaccggccgaagcggcagtcatggccaaagccagggccgcgtccgaaccccttggggccatggccgaacccaccgggcccgaacccgtcgtcgtcgaagtgatgagcacgagcgaagcagctcaagcacagcgccgcggcgaggagagcgcacacgagcttgccggcacgaaaagccattgcctcccggcgcacgccggacagctggagtacgttgccgcgccggccggtgccggagcaatgtcgtagcagctgcatggctgactttccgctgatcattcttcctcgtttgtcagtgaagtccatagttgaaccgagcgcgtcatccaaatcaggttgaacccgcgaggtcat

SEQ ID NO: 94851 - DNA, 2814 bp, Oryza sativa
  Clone ID: PAT_MRT4530_93100C.1
atgcgagccgttcttgcacaacaagacctcgatgatgcactttctggatttgacaagaagacacaggattggtccaacgatgagaagaaaagggatcataaggctatgtcatatattcatcttcatctatctaataatattttgcaggagatgcttaaggaggagatagccgctaggctgtggttgaagctggaacagatatgcatgactaaggatctgaccagtaagatgcacctgaagcaaaagttatttttgcacaagttgcaagatgatgggtctgtaatggaccatctctccacttttaaggaaattgttgctgaccttgagtctatggaggtaaagtataatgaagagaatttaggccttattttattgtgttcattgcctagctcatatgcaaacttcaaggatactatactttatagtcgtgatactctaactttgaaaaaagtttatgatgctttgcatgccaaagaaaagatgaagaagatggtaccctctgaaggttcaaattcgcaagcagaaggcttggttgttcggggcaggcaacaggagaagaacacaaacagcaaatcaagagataaaagttcaagtggctaccgtgggagatcaaagtccagaggtaggtataagtcatgcaaatactgcaagagagatggacatgatatctctgaatgttggaagctacaggacaaagacaaaagaaccggaaagtatataccaaaagtgaccagtggattcttgatactgcatgcacctatcgcatgcacctatcacatgtgcccgaatagggattggtttgccacctatgaagctgtccaaggtggtactgttttgatgggtgatgatacaccatgcgaggttgcaggtattggaacagttcagatcaagatgtttgatggctgtattagaacattgtcagatgtgcggcatattccaaatttgaagagaagtctcatctctttatgtactcttgatcgcaaagggtacaaatattccggtggagacggaattttgaagcatatgcgtcttgggcatatgagtgaaattggtttggcagaattgagcaagcgaggattgctagatggacaaagcatcgggaagctcaaattttgtgagcattgcatctttggcaagcataagagggtgaagttcaacacatctacacatactactgaaggtttgcccaaacagttttgggcggaagccgtttccactacttgttatcttatcaatcgatcacccagttatgccattgataagaagactccaattgaggtatggtctggttccccagcaaattattcagacttaaaagtattttgttgtactgcttatgctcatgttgataatggtaaattggagcctagagctattaagtgcatttttcttggttatccgtctggtgtgaaaggctataggttatggtgtcctgaaaccaaaaaggttgtgattagtagaaatgttgtcttctatgaatcagttatgttacatgacaaacattctactaatgttcctgttgagagtcaggagaaagcaaatgtgcaggtggagcacttgatcagttcagggcatgcaccagaaaaagaaaatgttgctattaaccaagatgcacttgttattgaagattcagattcttctatagttcagcagtctccaaaacgttctattgcaaaagataagcctaaaagaaatactagacctcctcaaagatatattgaagaagcgaacatagttgcttatgctttgagtgtggcagaagaaattgaaggtattgatttcaatgatgtcttttcccctgttgtgaagcatagttcaattcgcaccgtactcagtattgttgcaatgcatgattatgaactaaagcaaatggatgttaagactgcatttttacatggggagttagaagaggacatttatatggagcaacctgaaggttttgctgttcctggaaaagagaacctagtttgtaggttgaagaaatctctttatgggttgaagcagtcacctagacagtggtataagagatttgactctttcatgctttctcagaagtttagaagatccaattatgatagttgtgtttatctcaaagttgttgatggttcagctatatatttgcttctttatgtcgatgatatgttgattgctgcaaaagacaaatcagagatagcaaagttgaaggcacaattgagtagtgaatttgagatgaaggatttgggtgcagcgaagaaaattctcggtatggaaattactagagaaagacattctggcaatttatatcttagtcagaaaggttatattgaaaaagttcttcgtcgtttcaatatgcatgatgcaaaaccagtgagtattcctttagctgcacattttagattatcttcagatttatgtccacagtcagattatgatattgagtacatgtctagagttccttattcaagtgcagttggttcacttatgtatgccatggtatgttctcgtcctgacttatcacatgcattgagtgttgtcagtagatacatggctaatcctggcaaagagcattggaaagctgttcaatggattttcagatacctacgtggtacatctagtgcttgtttgcagtttgggagatctagagatggacttgttggctatgtggattcagattttgctggagatttggataggagaagatcgctcacaggttatgttttcactattggaggatgtgctgttagttggaaggcaagtttgcaagcaactgatgccttatctactactgaagcagagtatatggctatttctgaagcttgtaaagaagctatttag

SEQ ID NO: 94852 - DNA, 573 bp, Oryza sativa
  Clone ID: PAT_MRT4530_93101C.1
atggctgctgacaagttcttgtgcttcgccttcgcctcgctcgtttccatggtggtcttggccgccggatcgaaatcaccggacggcgtggcggcgctgccgcgccgtggccagctggtcgccggcggggacaacgacaagaacgagtgcgtgtacacgctgtacgtggagaccgggtggatctggaaggccggcacggacgcggcgatcggcgtggagctcgcggcggcggacggcagcggcttcgccgtcggggacctggagcggtggggcgggctcatgggcgccgggcacgactactacgagcgcggcaacgtcgacgtgttcagcgggcgcgcgccgtgcctgccgtccccgccgtgccggatgaacctgacctccgacggcgccggcgcgcaccacgggtggtactgcaagtccgtggaggtcaccgccacgggcccccacgccgggtgcgccaaggcggcgttcgacgtcgagcagtggctcgccaccgacgcgccgccttaccagctctacgccgagcggagcgtctgcgccaagagccgccccggcggcgaggaggagcgctga

SEQ ID NO: 94853 - DNA, 388 bp, Oryza sativa
  unsure (1)..(388): unsure at all n locations
  Clone ID: PAT_MRT4530_93102C.1
cagttatttttttctttttcatgtttgcattntcagtttagttttatatatataacggtgtgggtaaaacaatgattttttaaaatgaaactctaatatcctttttgcatacttctgttaaaaaaacaaaagattattgtgcaatcctctctttatatttagtaacttctcctttttgaattcccgtatgattgtaatgctacatttaattctgcaaatcatacaacctactggcaccaggctacttatctatagggaatcaatcaccacaagcttatctatttgtactgcatagatccagcacaatccttcagaaaaatgtttcagttaaaagttttgccttacaagggacaatattgacatatcccacatggctgcagaaactacc

SEQ ID NO: 94854 - DNA, 3636 bp, Oryza sativa
  Clone ID: PAT_MRT4530_93103C.1
atggcgagtttgaagtatgatctaccgctcctggaccgagacacaagattctcactttggcaagtgaagatgcgagccgttcttgcacagcaagacctcgatgatacgctttctggatttgacaagaggactcaggattggtccaacgatgagaagaaaagggatcgtaaggctatgtcatatattcatcttcatctatctaacaatattttgaaggaggtgcttaaggaggagacagccgctgggctgtggttgaaactggaacagatatgcatgactaaggatctgaccagtaagatgcacctgaagcaaaagttatttttgcataagttgcaagatgatgggtctgtaatggaccatctctccactttcaaggaaattgttgctgaccttgagtctatggaggtaaagtatgatgaaaaggatttaggccttattctattgtgttcattgcctagctcatatgcaaacttcacggatactatactttatagtcgtgatactctaactttgaaagaagtttacgatgctttgcatgccaaagaaaagatgaagaagatggtaccctctgaaggttcaaattcacaagcagaaggcttggttgttcggggcaggcaacaggagaagaacacaaagaaccaatcaagagataaaagctcaagtagctaccgtgggagatcaaagtctagaggcaggtataagtcatgcaaatactgcaagagagatggacatgatatctctgagtgttggaagctacaggacaaagacaagagaactggaaagtatataccaaaaggtaagaaagaagaggaaggtaaagccacagttgttactaatgagaagtctgatgcagaattgcttgttgcttatgctggttgtgcacaaactagtgaccagtggattcttgatactgcatgcacctatcacatgtgccctaatagggattggtttgccacctatgaagctgtgcaaggtggtactgttttgatgggtgatgatacaccatgcgaggttgcaggtattggaacagttcagatcaagatgtttgatggctgtatcagaacattgtcagatgtgcggcatattccaaatttgaagagaagtctcatctctttatgtactcttgatcacaaagggtacaaatattcctgtggagacggaattttgaagataactaaaggctctcttgttgtgatgaaagctgatattaaatatgctaacctgtaccatctgcgaggtacaactatattaggtaatgttgcagcagtttctgattcattatctaattccgatgctactaatctttggcatatgcgtcttgggcatatgagtgaaattggtttggcagaattgagcaagcgaggattgctagatggacaaagcatcgggaagctcaaattttgtgagcattgcatctttggcaagcataagagggtgaagttcaacacatctacacatactactgaaggtattcttgattatgtgcattctgatttatgggggcctgctcgtaagacatcttttggaggtgctcgttacatgatgactatcgttgatgattattcgcgaaaagtttggccttatttcttgaagcacaaatatcaagcttttgatgtgtttaaagagtggaaaactatggttgaaagaaaaactgaaaggaagtctgaaggcattgtgcgtcactacaccgttcctcacacacctcaacaaaacggcgtagctgagcatatgaacagaacaattatatcaaaggcccgttgtatgttgtctaatgcaggtttgcctaaacagttttgggcggaagccgtttccactgcttgttatcttataaatcgatcacctagctatgccattgataagaagactccaattgaggtatggtctggttccccagcaaattattcagacttaagagtatttggttgtactgcttatgctcatgttgataatgataaattggagcctagagctattaagtgcatttttcttggttatccgtctgctgtgaaaggctataagttatggtgtcctgaaactaaaaaggttgtgattagtcgaaacattgtcttccatgaatcagttatgttacatgacaaaccttctactaatgttcctgttgagagtcaggagaaagcaagtgtggaggtggagcacttgatcagttcagggcatgcaccagaaaaagaagatgttgctattaaccaagatgaacctgttattgaagattcaaattcttctactgttcagcagtctccaaaacgttctattgcaaaagataggcccaaaagaaatattaaaccttctcaaagatatattgaagaagcaaacatagttgcttatactttgagtgtggcagaagaaattgaaggtaatgcagaaccttctacatattctgaggctattgtttctgatgattgcaatagatggataactgctatgcatgatgagatggagtcacttgaaaagaatcatacttgggaattggtgaagttgccaaaggagaagaaacctatccgttgcaagtggatcttcaaaagaaaggaaggtatgtctccaagtgatgaggcaagatacaaagcaaggctagttgctaaaggttatagccagattccaggtattgatttcaatgatgtcttttcccctgttgtgaagcatagttcaattcgcactttactcagtattgttgcaatgcatgattatgaactagagcaaatggatgttaagactgcatttttacatggggagttagaagaggacatttatatggagcaacctgaaggttttgttgttcctggaaaagagaacctagtctgtaggttgaagaaatctctttatgggttgaagcagtcacctagacagtggtataagagatttgactctttcatgctttctcagaagtttagaagatccaattatgatagctgtgtttatctcaaagttgttgattgttcagctatatatttgtttctttatgttgatgatatgttgattgctgcaaaagacaaatcagagatagcaaagttgaaggcacaattgagtagtgaatttgagatgaaggatttgggtgcagcgaagaaaattctcgattatgatgttgagtacatgtctagagttccatattcaagtgcagttggttcacttatgtatgccatgtttgggagatctagagatggacttgttggttatgtggattcagattttgctggagatttagataggcgaagatcactcacaggttatgttttcactattggaggatgtgctgttagttggaaggcaagtttgcaagcaacggttgccttatctactactgaagcaaagtatatggctatttctgaagcttgtaaagaagctatttggcttagaggtttgtacactgagctttgtgaagttacgtcttgcattaatatattttgtgatagtcaaagtgcaatatgccttacaaaggatcagatgttccatgagagaacaaagcacattgatgtgagatatcactttattcgaggtgtgattgttgaaggtgatgtcaaggtatgcaagataagtactcatgataacctagctgatatgatgacaaagccagttcctgctactaagtttgagctttgctcaagcttggttggtgttacagtatag

SEQ ID NO: 94855 - DNA, 3677 bp, Oryza sativa
  Clone ID: PAT_MRT4530_93104C.1
atggagaatgacaaaaaatatatccgtgaaaactcatataccatgctcatctctacacgtcatgtaagatatatcttgcctgatcttgatttatggcaaagtatttctttgatctgtttctggaggcctagggtattttcttgtggtgtttgctatgtgcctatattcttagatcttggactgattgtggattggggctatgctctaaccttagaaccttacttgtcctcccctaacgcacttcaccagtcccactccccggacaggaagagtgcatataatggatacctttctgttggtcttgacaaaatcaggatcaagaatgcagcaataagtggttccaatcagccaccaaagcttgtgtaccaggaagtttcagatctacgctacgtgcacacgagaagtgtaccaagtttcgcgattttgctaggtttacatcaatttcttactagcaaattcagtattaattcccatgaccgagacacaagattctcactttggcaagtgaagatgcgagccgttcttgcacagcaagacctcgatgatgcgctttctggatttgacaagaggacacaggattggtccaacgatgagaagaaaagggatcgcaacaggcaacaggagaagaacacaaacagcaaatcaagagataaaagttcaagtagctaccatgggagatcaaagtctagaggcaggtataagtcatgcaaatactgcaagagagatggatatgatatctctaagtgttggaagctacaggataaagacaagagaaccggaaaatatgtaccaaaaggtaagaaagaagaggaaggtaaagccgcagttgttactgatgagaagtctgatgcaaaattgcttgttgcttatgctggttgtgcacaaactagtgaccagtggattcttgatactgcatgcacctatcacatgtgctcgaatagggattggtttgccacctatgaagctgtgcaaggtggtactgttttgatgggtgatgatacaccatgcgaggttgcagggtacaaatattctggtggagacggaattttgaaggtaactaaaggctctcttgttgtgatgaaagctgatattaaatctgccaacctgtaccatctgcgaggtacaactatattaggtaatgttgcagcagtttctgattcattatctaattccgatgctactaatctttggcatatgcgtcttgggcatatgagtgaaattggtttggcagaattgagcaagcgaggattgctagatggacaaagcatcaagaagctcaaattttgtgagcattgcatctttggcaagcataagagggtgaagttcaacacatctacacatactactgaaggtattcttgattatgtgcattctgatttatgggggcctgctcgtaagacatcttttggaggtgctcgttacatgatgactatcgttgatgattattcgcgaaaagtttggccttatttcttgaagcacaaatatcaagcttttgatgtgtttaaagagtggaaaactatggttgaaagacaaactgaaaggaaggtgaaaatccttcgtactgacaatgggatggatttctgttctaagatatttaaatcatattgcaagtctgaaggcattgtgcgtcactacaccgttcctcacacacctcaacaaaacggcgtagcagagcgtatgaacaggacaattatatcaaaggcccgttgtatgttgtctaatgcaggtttgcctaaacagttttgggcggaagccgtttccactgcttgttatcttatcaatcgatcacccagttatgccattgataagaagactccaattaaggtatggtctggttccccagcaaattattcagacttaagagtatttggttgtattgcttatgctcatgttgataatagtaaattggagcctagagctattaagtgtatttttcttggttatccgtctggtgtgaaaggctataagttatggtgtcctgaaaccaaaaaggttgtgattagtagaaacgttgtctttcatgaatcagttatgttacatgacaaaccttctactaatgttcctgttgagagtcaggagaaagcaagtgtgcaggtggagcacttgattagttcagggcatgcaccagaaaaagaaaatgttgctattaaccaagatgcacctgttattgaagatacaaattcttctactgttcagcagtctccaaaacgttctattgcaaaagaaaagcccaaaagaagtactaaacctcctcaaagatatattgaagaagcgaacatagttgcttatgctttgagtgtggcagaagaaattgaaggtaatgcagaaccttctacatattctgaggctattgtttctgatgattgcaatagatggataactgctatgcatgatgagatggagtcacttgaaaagaatcatacttgggaattggtgaagttgccaaaggagaagaaacctatccgttgcaaatggatcttcaaaagaaaggaatgtatatctccaagtgatgaggcaatgtacaaagcaagttcaattcgcactttactcagtattgttgcaatgcatgattatgaactagagcaaatggatgttaagactgcatttttacatggggagttagaagaggacatttatatggagcaacctgaaggttttgttgttcctggaaaagagaacctagtatgcaggttgaagaaatctctttatgggttgaagcagtcacctagacagtggtataagagatttgactcttttatgctttctcaaaagtttagaagatccaattatgatagctgtgtttatgtcaaagttgctgatggttcagctatatatttgcttctttatgtcgatgatatgttgattgctgcaaaagacaaatcagagatagcaaagttgaaggcacaattgagtagtgaatttgagatgaaggatttgggtgcagtgaagaaaattctcggtatggaaattactagagaaagacattctgacgcaagttatatcctagtcagaaaaatttatgtccacagtcagattgtgatattgagtacatgtctagagttcattattcaagtgcagttggttcaattatgtatgccatgtttgggagatctagaaatggactcattggttatgtggattcagattttgctggagacttggataggagaagatcgctcacaagttatgttttcactattggaggatgtgctgttagttggaaggcaagtctgcaagcaactgttgccttatctaccactgaagcagactatatggctatttctgaagcttgtaaagaagctatttggcttagaggtttgtacactgagctttgtggagttacgtcttgcataaatatattttgtgatagtcaaagtgcaatatgccttacaaaggatcagatgttccatgagagaacaaagtacattgatgtgagatatcactttattcgaggtgtgattgctgaaggtgatgtcaagcagatgataagtggcccctacgaaatatttgcccaagggcatagtccttccattagcgaggcttatgctaggtgttgcatatttgctatcgaacctaaggttgatccgcagaagacaaatctttcaagccataagttatggaaggcaacttgctctcggttggaaaatgttccaaaagtttttgcatgcctagtaatg

SEQ ID NO: 94856 - DNA, 2785 bp, Oryza sativa
  Clone ID: PAT_MRT4530_93105C.1
ctattgactgtataacaaactttttgtaggctcacggagatatacatccatatcatatcctacaagatgcattctccatgcaagagcttgtgcatcctgccttctgtaacagatacaaagccacctaagtaagcggttgcctacaggttgtgacaaaatgatggatttactcaatgcatacagcataatatcaactgccgcatttagatttctatcccaacataagtaattgataagaagggcacagcatgctggtgtgatgtcaatgccaaactcctgaagagtatgaaaaatcctaagtgcatcatcagttctccttacctgacaaagcccaattagccaaatggtataagggtttgaactaatataaccatattcttgatctatcttgattaactcccttactccatcatccagggaaccatcttcaatttctttgtgggcattagcaagtacttcactctccactgggaaattgtacttttttggcaggtaatccaaccagaggttgattgcttgcgacaatttcttcatcctacatagcgatctcatcatagaattgtagattgacaaactcggggagctaccgctctgcaaaatgttctgaaacaacatcatggcatcattttctctgtgcgccctcaacagcccatcaataagagtcccgtaagtgatttcatcaggagaaattcctttgagttgaagctctttgaagagccttactgctccatcaagattcctcgctttacagagtccatttatcaatgtgttatacgtgacaacatcaggaacgactccactgtctattatacttcgaagaagtttgtatgcttttagcacctggccagattggcacatatcatgaaccagtttacggaggctctcactgtcacacacctggtttgcaccgagggtcaaccgaaggaacaaggaaggattatttcccatctccatcttatggaaaagcatacgagcttcctccagtctgccctccctgtagaatccgtcaatgagtgcgttgtatgtcataactgttggatcacaaccatgctctcccatctcatcaaaaatctgcattgcctcatcaacaagtcctcgcttgcacagtccacatatcatgatagtttgtgtagtggagtctaggaccaagttattctgcaacatctctgacctcaacgtgtgagctctctctagatcaccgtgatcacatagaaccttgagcactgtgttataacaaaaggtgtcaggcacgaaacctttctttttcattacatcaaggaatgataaggcatcctcaattctgccggcctctgcacaaccacggatcattatcgtatacagaacaacgtctggtgagatgttgcgctctaacattgtcttgtaatagccaaagccctcatcaaaacgcctggcctggaacagaccatcaatcaaacagctatacccttttaaccccagtgcaaatccaccatcttgcagcatcaccaggcgctgaaatgcctcattgaccctaccaactttgcacagaccactcaagaaggcgttgtaagtgacctcgtcgggcaggcaccccttgtccttcatcgaccccagaagctgcacggcttcgtcaatcttccctgcattgcacagggacgagagcaggacggtgtagatcttcacattgggcatgatccccctgtcaagcatttcgtcgaacatcttgagcgcatcccccgccataccctgcttgcacagcccgtccatgagtacattgtacgtggccctgttgggcgcgcagccggcggcgaccatccggttgtagagagccagggcgaggaggatgaccccgctgtcgacgagggccttgaggatggtgttgtagacgaaggcggtggggcggctttggaactcatccatccgggagaacgcctggacggcatcggcgtggcggccggcggaggagtgcgcggcgacgagtgccgcgaaagcggaagaggaggccgggaggccggcggcgcgggcgtcggcgagggcgtcgaacatggcctcgtcggcatgggaagagagtcggaggaggagggatacggcgtgggcgtggagcgggcgggagcggaggcgcggcgagagggcggagaagaggaagaggcggaggcgggaggcggcggggatggcggcgcagaggagggcatccgagacggcgtgcggggtgagggttggcgagaggagggagaggcaggggagcagcgcggggagcgagggcgggagcgtggagaggagcgtgtggagggcgtcggcggcgtcgagctcggcggcgagagatggagacgatgcggtggcggtggtgtggatgcgggtggtggaggggagagggaggaaggaccgtgccgccgccgcacatctcatgcggtcatcgagggaaggaatgggagtaaggctcggcgcggcggcggcggcggcggtggcgggttactttggaatgacaactactaccgccacccagatcccatcaagcctgatcgaggatgccaatatcaggcatggccgtagacggcgacacaagcccgaacacaaggttgccgagaagatcgtcacagtccatggtgcttgtatctcctacaccgaagctttcgtcgttgactctgtgaagccctccgagcaaaagccatccatggagctgcaagtgatcgaggccctcaacaacaggagtggctccaacagtgcagagatcaagggctacatcagtggcgaatccaagatgaaaatagagcggtgccttgttcaaatgagagtttcagatatgtag

SEQ ID NO: 94857 - DNA, 206 bp, Oryza sativa
  Clone ID: PAT_MRT4530_93106C.1
atggatccctcgaagcgaatcatgatgccggtggtggcggcgtcgctcttggcttcggtaatgattgtagcagatgctatcgccggtgagggatcgagctggcggagcaatggactgttgataccagagctggagcacacggtgacggactacaatttagaagagaagaccgcagagatacaatacatgaacatgacaaagtacag

SEQ ID NO: 94858 - DNA, 253 bp, Oryza sativa
  unsure (1)..(253): unsure at all n locations
  Clone ID: PAT_MRT4530_93107C.1
gcacgaggcggcggcgaggcggtgaccgaggcccacttgccgtggntgccgtacctnaacnccttgttccacgagacgctgctgaatgtactccccggtgccgatgctgcaccgcgaggttcgtctacaactacaccacgctcgccggctacgacatcagcggcggtcacccagatgatgatcaacagtgtacgcgtgccacatggacganaaggtgtgtaagtcatcaggggattgatcgactggataggtt

SEQ ID NO: 94859 - DNA, 180 bp, Oryza sativa
  Clone ID: PAT_MRT4530_93108C.1
atgtcgtctgcagacagccatgttcccacgttgcgcctgcttccggcggaagtggaggtcaaccttgccacgatcagcctgacgcgcgtcggccgcgaccacgttcagcgccgccacagggtcctgcagtgcagcgccaccgggtcgagcgaccggtgcgtctccgcgaacgcaacgtga

SEQ ID NO: 94860 - DNA, 1350 bp, Oryza sativa
  Clone ID: PAT_MRT4530_93109C.1
atggaggccctcctccggtgggcggcggagctgggcgtctccgactccccgtccgcgccctccccctcctcctgcctcggccgctccgtcctcatcgccgacttccccgacgccggcgggaggggcttggcggcggcgcgggacctccggcgcggcgagctggtgctgcgggcgccgcgcgccgccctgctcaccagcggccgcgtcatggacgatgaccccaggatcgcctcctccgtcgccagccacctcccccgcctctcctccgtccagtttggacaaaaagattggatggatttggcaattttggggagggttgatgaggctatttgggttgctcaaaaggctcttcgtggaataagatcagactgggaagaagcaacaccactgatgaaagggttgggatttaaacctaagcttttgatgtttaaatcatggatctgggcttttgcaacggtatcttcaagaacattgcatatagcatgggatgatgctggttgtctatgtcctataagtgattagttcaattatgttgctcctaatgatgacaattcacccacggaacactatcttgactatcttctataatatgaaaaatgtagctctccaagtaaaacagattttatttcactagataagttgacagatggggtatttgtggatgataatgagaaccgtctgtatgcacagaaaagataaaaaaaaggagagcaggtacttctggcttatggaacgtatacaaacttggaacttcttgagcattatggttttcttttgggtgagaaccctaatgagaaaatctacattccattagatttggatttatgcatgatcggttcttggccaagagattccttgtatattctgccaaatggacatccctcatttgcattgctgtgtgcattaaggctttggacaactcccagaaatcgtcggaaagccttaagtcatcagatctactctggatcattgttatctgttgaaaatgagctggagattctgaaatggttggtcaagaagtgcaaggaaactttgcagcaattacctacgactatagaatttgatgataatttgctcgtccttttatgcaagctacagaacagcactagctgcataacagaaatgaaccggtcaatctttgagcaagaatttgctccattcttcagatttcatggcttcaagctggattgttctatacacagtaaactcccagttcgtcttctacgatccctggaaagatggggattagctgtccagtggagatgcaactacaaaagaaccctaaccaagtgtattgtgcactgtaaaagtttagttcacgagctttcgttgcaacaaaatcaacaatag

SEQ ID NO: 94861 - DNA, 528 bp, Oryza sativa
  Clone ID: PAT_MRT4530_9310C.1
atgacgagaaaagttgttcatggtagtccaaaccgcaatgacggctctccgctgtcgttcggctgtctcgtggaattgggcttttggcaccgaagcaggttcctcgccggcagctacccgctggccgctgttcgcctgtgccgctccggtcgtattcgtgcacacacgtcaaacagccaaactcttggagaggctggaactgggcactatgtggcattcatcgtcactttaattgccatgcaggctgtattgaagcgaatttatctgcaagtgtgctgctatctattcggccatgtttcaattcatggtggtgtcgacatcgtaggtaaagccgtagtaatagtcgagtatagtaccgctactaatactccaaacttccagttggcaaaattgttaggcagaggacatgacttaattccgtgtgcagcagacgtggagcaacgcaacctggtaacagcctgcgaagttcgccgcatctggcgagcagagctgttgcttcttcggaaccgatcgatcgatcgatcgttg

SEQ ID NO: 94862 - DNA, 252 bp, Oryza sativa
  Clone ID: PAT_MRT4530_93110C.1
atggtcttggcttttgtccccatgaaagtcgaccatgcaagtgccgttgtgaatggcaaacaatgcttgacgttcggcaaggaagggactgctacacatgcgaaagaagaggttttgtccaagttagaccaggggcccggaggtttcatgattttcgctaggaacttccgtgagagctcctctaatcggaaagttccattcagcgttatcgaggactccatgtctctacgattctacaccgggaacgactaa

SEQ ID NO: 94863 - DNA, 300 bp, Oryza sativa
  Clone ID: PAT_MRT4530_93111C.1
atggagcgagtagttagatttagagtcagcctcctcaggtctgaccatgaggctcctggtcagattgaccacatgctaccagctggatcagtcttaagctaccagtcgacactcaagcacttgggagtactgagtaccccattatgtgggatcttgtccatggctgcttcacccatggtggattttgagagatccactggacgcctggtgaaaatggagatggttttggctacggttttacctggtgcacataaggtaatgctacaacaataccatgctagagaggcaatactgggataa

SEQ ID NO: 94864 - DNA, 232 bp, Oryza sativa
  Clone ID: PAT_MRT4530_93112C.1
atgcggacacgcatccaagctaattaagcgcaagacggatgatagcaaagaagaagaatagtatgccgaccggtgctatcatggtaaggggatcgtcctgcgtattgaccgttgttgtgaaggggcgcagcctgtacattcaggctcctcgccgggttcagttggagcgttcgtgcggtggactacagcctgtagcagtgtaggcgtgtgcaggtggactacagctctaaca

SEQ ID NO: 94865 - DNA, 271 bp, Oryza sativa
  Clone ID: PAT_MRT4530_93113C.1
gttgctatattagagacctaccgatcccacacatgggatgatctggaggggaggtggggtattaacccgctagcaaggtttggtgactcacaggatcactacgtgcctgtcgatgggcctgatttatatgaacaggttaaagactgctcagtcactgctggactagagcagtatcggcatgtatagggatgctatgcatgaagctaaggtcaagcatggcacgaccttatcaggccaattgatgtatacaatttgcagaccgctgactgat

SEQ ID NO: 94866 - DNA, 300 bp, Oryza sativa
  Clone ID: PAT_MRT4530_93114C.1
atggcgggcggcggtgtcgcgcgggggtgtgcagatgatcctgcgggcgccgctagaggcgggaccgccgccggcgttgggccgggcgcaacggcgggagagtcgacgccgcggtggattggatacggggacgacggcgcggcgcggcttcggctggaattcggcctcgatcctgggcgaggttacgcgtggaaaggattccttcagaaattcctccaatccaaacgggaccagccatctccgattgatagggattatccacgatcgaatttgtctgctccgaaattccctgagaagtag

SEQ ID NO: 94867 - DNA, 484 bp, Oryza sativa
  Clone ID: PAT_MRT4530_93115C.1
tgctccttcttccccttctcacgttgagctcgagcggcggtcatggcgggcggcggtgtcgcgcgggggtgtgcagatgatcctgcgggcgccgctagaggcgggaccgccgccggcgttgggccgggcgcaacggcgggagagtcgacgccgcggtggattggatacggggacgacggcgcggcgcggcttcggctggaattcggcctcgatcctgggcgaggttacgcgtggtggattcggggactgttatcccgtgaaatcgtctagcgatgaaaggattccttcagaaattcctccaatccaaacgggaccagccatctccgattgatagggattatccacgatcgaatttgtctgctccgaaattccctgagaagtagtgcagagtacagtccatacatgttcatgttcatgttcatattattaaaggataggagtactctttcaaagtttcaatgatttgtttttgaagatctttggc

SEQ ID NO: 94868 - DNA, 141 bp, Oryza sativa
  Clone ID: PAT_MRT4530_93116C.1
atggtggaggggtcagccaggctaggcaagcctcgggccgccgaggaatggcggctgaagtgcggcatcgacggcgaccttgcctttgacatcaaggcggtaaagataaaaattatggggaaaatgaagaggatagaatag

SEQ ID NO: 94869 - DNA, 318 bp, Oryza sativa
  Clone ID: PAT_MRT4530_93117C.1
tcatgccccttcgtcctcaacaccacaattggtgagtagcgactcctctcgataggccggcttggtgatagggttggcggcacccttgaaagagttcccagtggcggtgcacatggaggagcaggcggcagcacaacccgtcctcccctcctcttgcatctccttctccacaccttcgaagtttcccctctcactcccaaacggccggccagcatcctcacttgtccgggcggtgacggtgggcttcagaattggagcagaggtagcctctggagcccatgggagcgggagcggtgaccacgaccatggtggcgacat

SEQ ID NO: 94870 - DNA, 287 bp, Oryza sativa
  unsure (1)..(287): unsure at all n locations
  Clone ID: PAT_MRT4530_93118C.1
atnannaacaaggaacgatttataaacacgaaaattttcgaaatcattcgcattatatacagaatacaccaaagtttgtgtaacatggttgtcaagaagatagtgaaggttactagattattataataacatcttaaatatggttgtgatataaagagcttttttacaatatttttttgttttattgaccttttttaaatttaaatgtgaaaactttaaaacttttttaatccaattttttttgctttataatttgttgggtttatttttggatatgcaaacttgaa

SEQ ID NO: 94871 - DNA, 807 bp, Oryza sativa
  Clone ID: PAT_MRT4530_93119C.1
atggtagggaggtgcccatcacggtgtcaaaaccgcatcagctacgcgcccgagtactcctcccaagccccctactcccactgcagctgggcccaacgcgcatccaacggctgcgaggcgatctcgcggagcggcgacgaggccgtgctgtttcgagtagtactacgtggatcgcttcgtggacctcggggaaatccgggcccgcatgtcagcgtctctggtgggccgcggctggcagtgggcataggacaacgggaaagaaacgaacaaactccaataaagcgagccctcctcccaccgacatgtggggccgatatggtgtggacccacctgtcagctacagcgtcgggcgtgggaccatgggatgatggggacagtggctctcagactggtggacagtgggcacgcgaaacgaggagggggatgcggggcccggagcgtgacgtggcgcagcaacggtcaaatttcgcgggcaccacgaccagaggcgaccggcggaagcagcggcgagcaggcgagagaatggtttggtcgtgttgtggagaggagagtagggcgtggctcggggtggattgggtgtggtggcccccctgcgcgggcgcggcgctcgtggcaaaaactgggcacgccgcccgcacgcacggcacgatggcttcgcgcggctttcggcatcagccccaacggtcgtcttcgcaggccggcctcggcgagtacaaacgactactgggatgggatgcagcgcttttttttgctctgctttctgcctgggcgacagcacttgattggtactccaacgatgatatttga

SEQ ID NO: 94872 - DNA, 331 bp, Oryza sativa
  Clone ID: PAT_MRT4530_9311C.1
ttgtttttttttttttttttgttttttttttttttttttttttacaacagcacaccatccatatatccatgcaggcagcctgtttgtgcccttgggcaaatgcatttcatttatacaaggagaagggactcaaatcagcccccacatgaacacacacatgttccattattgatcgatctacacatgcattacccgggcatgcacttacaaacaaaagatctacttgaaaaaaaaccggaggtcgagcccgtaaaggaggaagtaggcccaaaggacgccggagatgcccccaaaaaaaaagccgccggggaacttggcccaaaccgcgggg

SEQ ID NO: 94873 - DNA, 360 bp, Oryza sativa
  Clone ID: PAT_MRT4530_93120C.1
atgccccgtccccacctcctcccccattgcttccccatgttgcccctcaccggcagcgtgacaacgagagcgagagagagagagagagaagagagaggcgacggcgacgggcggagacggcttgaggcgcccgtgctcgccgccgaggagcacaaggacgacgtcgtggtggtggtcatcgcgctcggggacgacggcgacgacggccaccgtgcgccttgcccggccttcttcgctgacaccttgctcgccaccgctggcgccgtgcccgctaccgccggcgctgccactgtatcctccccgatctggccgcgtggagctcagatccgcccactacggtgccggatctggcgcccctga

SEQ ID NO: 94874 - DNA, 171 bp, Oryza sativa
  Clone ID: PAT_MRT4530_93121C.1
atggcgaaggcgacgggcgcgctgattgcgagggaggccgagaacagcatccataatccaatgaaagcggtgtcaaccgcaggggacgcgatgtttgggaacatcgcatcggttgtcgagagggacgccaaagggagagagaggagcaatctcctcttctctaccggttag

SEQ ID NO: 94875 - DNA, 154 bp, Oryza sativa
  Clone ID: PAT_MRT4530_93122C.1
gcgcgtcgtgtggagcgcgggctgtgcgatcggcttcgagagcgttcaacacggcttgcatcaccaagctcttcccacgcgtcgacaccgtcgcgcgagggtgcataaatgctgctcttgaaacatgacgagatgactgagatgcatatgatga

SEQ ID NO: 94876 - DNA, 330 bp, Oryza sativa
  Clone ID: PAT_MRT4530_93124C.1
atggttaggctcgccgtggacgccggccttggccgaggcttcgccggcggcggcggcggcggctccgtgcccgacatgagcaggagtgttgtcggcattgcgctggtcttcgtggcgaccgtagcgatcgtggcgttcgtcgtgtttaactgcgccgatggcatggatagctccggtggacggaagcggctcaccaatccaggaggcggtactgttggcgttggcgccgtctgtggaggtagtgcttgcggtggccccgcctgtggaggtggtggaggtggcggtggcggtggcggtggttgcggcggcggcggtggaggtggctgttaa

SEQ ID NO: 94877 - DNA, 315 bp, Oryza sativa
  Clone ID: PAT_MRT4530_93125C.1
aaaaggtcaaacggccccccaggaggaggcaggacttttttttaaacattggaccctttttccttttacaattcagccccaaccccccccaagggggggaatgctcctgggggcaagggagtatttgggaaaaaacccccattgggggggcaggttaaaggccaccaaagcttgaccttgaccttgggtttgataaaagaaaacaacccccccctgctgcacctgaatttgttaaaaaatccccggaaccctacaaagggccgggaagggaaaattgtcccctcccaccctggggtgggggcaaaactgggggtc

SEQ ID NO: 94878 - DNA, 294 bp, Oryza sativa
  Clone ID: PAT_MRT4530_93126C.1
ttttccgttacggagcactccgcccttgggcacggagccggccattgaagccatggggcagggtcaggctccaccgcctgatccaagacatcggccaccgagactccggcgactacctcaccagggcgcacgggagacacaagaatcccaaccacgaccggaccttcaacgacaacaacgcgacggtacttgacctaaaggacagctaacccgccggggacaaggtgattgctattgagcataagcacgagggttaagcagggaccatgccaagcattggcctggggacagaat

SEQ ID NO: 94879 - DNA, 162 bp, Oryza sativa
  Clone ID: PAT_MRT4530_93127C.1
atggaaggagtcgcccggaacgtggtggtggtgatgacggaactacggaatccaggggagggcggcgaaagggtggggaaaactgtgaacggctacaagcagcacagctttttcatagggaggcgcaaaataattagtagtgtcggctacggccatgaatga

SEQ ID NO: 94880 - DNA, 1788 bp, Oryza sativa
  Clone ID: PAT_MRT4530_93128C.1
atggtggaggtggggggaagggtgagggggttcgtgcggaacaggtggctggtgttcgtggcggcgatgtggatgcagtcgttcgccggggtggggtacctgttcgggagcatctcgccggtgatcaaggcctcgctggggtacaaccagcgggaggtggcggggctcggggtcgccaaggacctgggcgacagcgtcggcttcctcgccggcacgctctccgccgtgctcccgctctgggccgcggtcctcgtcggcgccgcgcagaacctcttcggctacggctgggtctggctcgccgtcacccaccgcgcccccgtgcccccgctctgggcgatgtgcattcttatctttattggtactaatggtgagacatacttcaatacggctgctctcgtctcatgtgttcagaacttccccaagagccgtggaccgattgtcggtatcctcaagggatttgctggtttgagtggtgcaatcctaacgcagatgtatgcgatgatacattcacctgatcatgcggcattgatcttcatggttgctgttggtccaacaatggtggttattgcgctaatgttcattgtcagaccagttggaggacacaggcaagtgcggccttctgatggtacaagtttcacgtttgtatacagtgtctgcttgcttttggctgcttatctgatgggtgtgatgatactgggggaccttgtcgacttgagccacacagtgatggtcttgttgaccatcattctaatcgtcctcttgatagttccaatagtcatccctgtgatactcagcttcttctcagataacgatgagagtgcctatgcatcactgttgcaatcaccagggaaagaagaagcaagtgcgtcaacaccatctgaagagcaaactgaggttatattcagtgaggtggaggatgaaaagccaaaggaagtggatctacttccagcctcagagaggcagaagaggatagctgaattgcagacaaagctattccaggcagctgctgttggcgctgtcagggtcaagaggagaaaaggtccacgaagaggagaggatttcacattgatgcaggcattgatcaaggcagatttttggctactattcttctcccttctgttgggatcaggatcaggtcttactgtgatagataatcttgggcaaatgagccagtcattgggttatgaggatagtcacatttttgtctcgatgattagcatctggaacttccttggacgcattggtgggggctacttttcagagcttattgtcaaggactatgcatatccaagggctattgcgttagcgacagctcaagtatttatggcatttgggcacttctcctttgcaatggcttggccgggtgcaatgtacatcggcacactgcttgttggtcttggctatggtgcccactgggcaattgtgccagctgcagcctccgaactcttcggcctgaagaacttcggagcattgtacaacttccttaccgtcgcgaatccagcaggctcccttgtattctcaggcattattgccagtggcatatacgactctgaagctgagaagcaggctcaccagcaccataactcgacattgctggcaatgcctgggagattgcttgccatggcctcggatgctactcagccattgaagtgtgagggggccatctgcttcttcctttcgtctctgatcatgtctgggttctgcattgttgctgctgtcctgagcttgatcctcatctaccggacgaagattgtgtacgccaatctgtatgggaaccccaggacatga

SEQ ID NO: 94881 - DNA, 351 bp, Oryza sativa
  Clone ID: PAT_MRT4530_93129C.1
attgctatttgttggaattcctgatgctgtgaagatctgggatacaggagctgagatgagcatagaggagcgaactgtcatggtacctcatcctgccggaggagatggttaatgtgtcacacttagaaggtgaacaagatggacccgggtgtcaacccgaagcaggttaggtactcgctgcggacgtgaccggagtggatgtgctcgcagatgaagttcatccgaggggccaccaagatccatttagtgcaatgtgaactccatgaacgaaaaccttgttatcaacttttactgcaccaatgcgctgtaagcaggctaatatcattggactcccatgggagtgtccatgta

SEQ ID NO: 94882 - DNA, 160 bp, Oryza sativa
  Clone ID: PAT_MRT4530_9312C.1
agactatgtagctttttttttcattgggttttatatgctgccccagacaaaggtcattaccacaaacttgttttacagggcaagggtcgtgattttataacaacgtaacacactcgctttgctcaattaacttgctcaagatgaatagtaggatttgccc

SEQ ID NO: 94883 - DNA, 260 bp, Oryza sativa
  Clone ID: PAT_MRT4530_93130C.1
atggcggtggatcaagcggcggcgcagcgcatcgaggcgcggcggcggtgcatcgaggcactgcggcggcggatcgagctgtcagatcaaggcgggggcagcgaatcgagcggcagcagtggtggatcgatcatgcggcggcggatcaagcggcggaggtggcagatcgaggcggcgacagcagatcgagccacggcggcgctgggatccatcttcttcctcatctaccttttcggctcctcgccatcttcacacgggag

SEQ ID NO: 94884 - DNA, 1273 bp, Oryza sativa
  Clone ID: PAT_MRT4530_93131C.1
accggtggggcccgcacgagggggaaagtaagaaagaaagaaaagaaaaaaaaaaggaaaatcgtgtctcgtctcgtctcgtcttcgtctcccccgattcccgagcagcttctcgaaaccctcgcggcctcgattccggcgatggcggagcccaacccgcaagtggagagggaggtggaggtggaggaggtgaggaggccgaagctgaggtacttggagttcgtgcaggtggcggcagcgcaggcgacgatctgcctcgcggggctctacgcgcttgccaaggaccacgccggcccgctccgccccggcgtcgacgccgtcgagtccgccgtcaagggcgtcgtcggccccgtctacggccgcttccatggcgtccccctcgacgtcctcgtccttcgtcgaccgcaaggtggatgacacggtgcaagagctggaccgacacctcccgccgacgctgaaggccgcctccgccaaggcttgcgcggtggcccgcggcgtgccggacgtggcgagggagctcaccgcggaggtgcagcagtcgggcgtcaccggcgccgcgcgcgtcgcgtacgccaaggtcgagcccgtggccaagggcgtgtacggcaggatccagccggcggccaaggacctctacgtgcgctacgagccggcggcggagcacctcgccgtctccacctggcgctcgctcaacaacctgccgctgttcccgcaggtggcgcagatcgccgtgcccaccgccgcctactgggccgagaagtacaacaaggtgatcgccgccgcggccgacaagggttacaccggagcacagtacctccccgccatccccaccgagcgcatcgccaaggttttcggcgagttatcgccggaggcccagccgtcgaagagcgagtcggcgaagacccagtaggtgaggtcaccgcgcctgaaggtgagaggtagccttcgcctgaagtcctgaactgaataagtaagagtggggcgcttatggcagcagaaaaatggtgttttagatgtatgcatgtgacgacattttcgtggatgatgatgttctacttagctcttttactttgtgttgtggcgtacgtttaatcctcctggttttgtataaaagctgtggttgatgtcgcaatcttttagctaaaaaaatgcaattaggcttgaaaaaaaaaaaaaaaaaaaaaaaaaaaaaaaaaaaaaaaaaaaaaaaaaaaaaacaaaaaaaaaagaaaccacaagcgcttcctgcccattgtaaaaaaaaaaaaaaaaa

SEQ ID NO: 94885 - DNA, 152 bp, Oryza sativa
  unsure (1)..(152): unsure at all n locations
  Clone ID: PAT_MRT4530_93132C.1
gggcaaaccccaacttttttcagtttttgaattctggatggatcatttcagattcatcacagctttgtacaatttgtgcaagcattggtacattnagcgatggaaagagagagttttttacaatggcgggtgggccattcacgagcccgggg

SEQ ID NO: 94886 - DNA, 777 bp, Oryza sativa
  Clone ID: PAT_MRT4530_93133C.1
tcacgaccacccaacccaacccacccacgaagacgtcaacacgaacgcgaacgcgcgcgcgacggcgcgagccgtatgtaaggttcgctgcggcttcttcttccgctcgcccgcgcgctcatggccgcactccgccacgcgacgcggcgcgcgtaggaggcaggcggctcgtgcgtataagaggcgacgagacgagacgacgacaagaagacgccggaagcagaggcaggtagcgtagcggcggcagtgaagcgagggacgactagcgacgatgagttctcgctcggcggcgcgaggaggggtgccgcggccgaggaggccgagcagcggcggcggcggcggcggcagtaacacgccgaggccgggcggtgggggtggcgtgttccccgtggcgagctggaggggttcaactgtgtggggcgcgggcgggcgagcgggggcggcggcatcgacggcgccgttggcgaggcggcaggcgtgcggcagggcaggcagggcgtcggcgatggctcgggtgccgacggggaaccgggaggtggtgcggcgggcgctgtcgccgcccgccacgcgcagccgcggcgccggcgcgctgaggaggtggagcttccggccggcgccgagccggctccgcaacgcgtcgtcgtcgccgtcctcccctgcctcgccacggtcgccgtgatttttctcctctgccgccatggcggcggttctgaccggattttggcattcttccgttggtgacttggggtaggcaccggagattactgtcctttgtaa

SEQ ID NO: 94887 - DNA, 540 bp, Oryza sativa
  Clone ID: PAT_MRT4530_93134C.1
atggtgcacaggttcttctcctgcacgggcgccacccggccgccggcgcccgagaacgctgacatcaccctcgtctcgggcccttcgtgctggctaagcatatggtctgtgatcgtattgaaatgcctatttgtgttacttcatgacaaaaagatggggatttatgctctaatttatgtactccgtgcttgtagatacattgaagatgatgagggcatcagaaagtacttcgcggcatttcatctgcttggcagcttccctgctgcagtaattattgatgattttgcagatttcttctcagaaaggagctgtcagcaaagatatggaaatgctagggctcgggatctagcagtggttcgcatattagctctgtgtcaaaatgctgttgcgcatgcaaatttggacatttactcgttgcattttatatccatctttgaaatcttatttgatgaggtgatgggcatggatcctacatactcaagagcattagcagttcagattgtgggtccagggaaggaagagcagccaagtactcaatag

SEQ ID NO: 94888 - DNA, 165 bp, Oryza sativa
  Clone ID: PAT_MRT4530_93135C.1
aaattttctaaattacaagcaaatcagaagctcatgcggggttgctatggcattggcgtcgggggggttcgtctctccttcgctttgctgccttcgtcgcccctgcccgctcgcgtctcgtcggtcctgttgttccgctctctcccgtgctgtgccctctcctgg

SEQ ID NO: 94889 - DNA, 524 bp, Oryza sativa
  Clone ID: PAT_MRT4530_93136C.1
gtatataatttaataaaatccttaatttttaaaataaattaataattacaacaaccctccaaaccaaattaacacattaaatccccaatcatttcataatcacaactcccaacatttttagccctcttaaagagcaccttgaaccccccacaccaaaaaaaaaaaaaagggcctgccatttaaaccatccaaacttacctacccgtcccttcaacacaataacattcttataatgacaacaaaatacaactaccccgccctcattttacaacccataaacacgaaaaaccctgtcgctacccaacttaacacccttaaaaaacatccccctttcaccagaaggcactaaatcaaaaaaacccccccacaccttacttacaaacaatttcacaaccctaatcacaaatctcccaccccctttacccccttaaaaaacacaacaagatttgctttcaccacccaacaaaccccctacatttttccaactccccaaccccccccatccttttaaatattttaccctt

SEQ ID NO: 94890 - DNA, 270 bp, Oryza sativa
  Clone ID: PAT_MRT4530_93137C.1
atgggattggacaaatgcaccatagaactgtcccccaaagctgtagtggttcgggacgttggattaaaaggtggtcgattgactccacactttgatcgcagaagacacacttctgcagaccacttggtcagtggaatgcctacatttgcccttcctgttcaagatggtggggttggttttgattatcgccttcatatggctgttcctgacaaatggattgaactcctcaacttcgcgaggcttctactggaagctgctagcgtcttttga

SEQ ID NO: 94891 - DNA, 399 bp, Oryza sativa
  Clone ID: PAT_MRT4530_93138C.1
catacttctaatttacatacttatatttttttatttttaggggattgaatcaaaactttacatttttttttttaaaaaaaaaaacaactgggttaaaaaatttttcaaaaaaactgcctccaaaaaaaaggaaacccaaaattttttttacccaaaaaccacacaaaaacccccaaaaacattctccccgccccccggggcaaccccggaaattccgaccctgacccttgaagatacacaatttttaccaaaaaaaagcgcaataaaagtgaaagaaaacaagggcaaatgctgtacctggtggaaaattgttacccaaacaaaatccacaaaaaaaaccaccccgaaagaaaaaagataaaacccggggggcctaaaaaggggcccaacccacaataa

SEQ ID NO: 94892 - DNA, 504 bp, Oryza sativa
  Clone ID: PAT_MRT4530_93139C.1
atggccgggggcaggccagttgggggcgacgtaacattatcccagaagattcgccaaaaatacgacaactttgacctccttatgttcgtggaaatatatcgtgatgagatctatgcgggaggtatcactagtaatggccccaaccagtatggttaccgcaacatacagcagaagctcaaggcacagctgaacgaggacttctcgaaacaaaaaatcaagaactcgtgggatgtcactcaccgtcgttatgcaaattggtgtcaccttcaatcatctgcaacagatcttggccgggaccctgagagcggcactattattgccccagatgagtggtggaaaggggtattgatggtcaaatattatgatttaaggaccgtcgacactaacaatggtgggaaagggacaacagtgaaatacattacctctaagcaactactatctggtgctcaaatgcgagcaagcaaaaggaagcaattggagattctagctcgggcgagacaataa

SEQ ID NO: 94893 - DNA, 243 bp, Oryza sativa
  Clone ID: PAT_MRT4530_9313C.1
atgggggtggtgcgctcgatgacggtgacagcggtggcctcctatctgtgtgtgttcttggatgttgattttgttcttaattctatgattgtgctcttggatgtctttggattgggaatctcatatgttgatttcgttcttaattctaggattgttttcttggatgtcttcgaatcgaggatctcaggggtgctggttgagaaatacaacacctatatggggttctcaaccggcacacattaa

SEQ ID NO: 94894 - DNA, 468 bp, Oryza sativa
  Clone ID: PAT_MRT4530_93140C.1
atcgtagctctacggtttgcgccaggtcctctgcttccaaatgctattatacgctggtctggggatgcatacctctggcgaagacatcatggcgtccacacataggaccactgtatgatgacccatccgataccactcatattgcggatgctacaaagcaaaatgcgcatgcagatctggctgaccaagcagaaggaattttggatggagggccggatcatggtgtttgaagacttcatgactacggcccttgaagaggctgaagacttcaacgtgaacaacgactctaggaagtcatggggatggatgctattgctaggagagaacatacctttgatgatgaacactgggaagcgaactctatccacaacgttggggtctgtaactttgagtagatgagatccgtgatactccagtactcgatctatattatccgagaatgaactgcatgaaggatgtactcttgct

SEQ ID NO: 94895 - DNA, 571 bp, Oryza sativa
  Clone ID: PAT_MRT4530_93141C.1
atccttactgaagaagcacgaacatcagaacgctataagagcctctctagcatccatcacatatccatgaacatctttgacatcctctctctcctcgacctcgcagagaggagcgcctcggcacagattgatgcttgcacctatgggcaatgccagcagaagccgattatgcaaccgataatgaacccgtgcaatgagctcgcgaggacaacagtgcaggccgatgagcctaccttgccagcagtcacgcaaggtacaactgagcagctgtcaggtgaagcgacaacaatgctgtcaacagatgaggatgatggcgcaacaatatcattgccaggctagtttgcaccatggtgcaggctatcatgcaaaaagtgcagcttgatgctgactttgctgatgagccccaagctcacgaccacgaccacgaggatctcaatttgccctccatgtgcgaagactaccctaggaactgcaacactccatgcaaagatgctactgatcattgcgactcttgggaatgtgaaccatcatatatatatagctggatagataaagagtcacacatcatcga

SEQ ID NO: 94896 - DNA, 1971 bp, Oryza sativa
  Clone ID: PAT_MRT4530_93142C.1
atcattcctataagaggcctgcgtcaaggggatcccatctcgccatatttattcctgctatgtgcagaggtgttctcgtccctgctgaatgcggcagaagaaaggggtgatctatccggggtgaaggtttgtcaacaagcatttactgtttgcggatgactcgttgttactcctaaaggcagatgaacggagtgctgagtgtctgcagaatgttctttccttgtatgaacgatgctcggggcaaaccattaataaagagaaatcttcagtaatgttcagcatgaacaccaaggaaaatgacagggagaagttcagaggggcactggatattggagttgaagcatggaatgaaaagtatctaggtttgccggtgtatatggggagatcaaaatcaaaaaccttcagttatctgaaggagagggtgtggaggaaaattcaaggttggaaggaaaaacttttgtcacgggctgggaaggacattttaatcaaggcggttgcacaggcgattccctccttcgcgatgtcttgtttcgatctgacaaaaactttgtgtgatgaaattagcagtctcatttgccgcttcttttgggcgcaacacgatcgggaaaataagatgcactggatagcctgggataggttgtgcagtcggaaggagaagggggggctgggttacagagacctgcatccgtttaatctcgccaggcttggcggcttctgtccaacccagactctctatgtgcaagagttttaaaagctaagtattttccagatttggaggtgaaggaaggcccaggtatttcctattcatggaggagtatcgtgcgtggtgtacaggcgctgaagtctggtctgatatggcgggttggcgatggttctgaaattgatatatggaaggatccttggattccatcaggtataacccgacggccaattactccaagaggaggcacaatactgaaccgggtagcagacttggagaatgggacaaagaattgatccaggatattttctgggaggaggatgtgaggaatatcctagctataccgctgaatatggggtcagaagattttgcagcatggcaggtatcttcacggttaaatcggcatatcatactctagaggatcagcgagagcatctagcgtctcgacaaacgggagaatcctcgtcgggtgttgctcgcacggcgagcctggattgggggaagctatggcgtctacattatttcccgaaggtgaagcacttcctctggcgttttgcccacaataccctgccactgcgcatgaacattgacagaagaggcatggagattgacacacgatgccctgtctgccatcgtctgaatgaggatggtggccactgcttcttcaaatgcaaatatgttaaagctggctggagagtgatgaatttgaagcatatcaggttagagctgatgcagtacagttctgctttggatgtgtgcaaacatattctgaatatgaaggaggataaaatgctgaccactgtgctgtttctttggaactggtgggatgcaaggaataaaaaatctcgaccaaacgttcaagcgcagaggaaatggcatccccctatcctgggcgaactgaagctgaattttgatggggctttctttgatgaaggcaagaccggtggatggggatttgtagtacgggaccactagctggagctgggagaattgagctggtgcatgatgctttgtgtgcagaggctacggcatgtctttatgctctgcgcgccgcagcaaacaacggaatttctcatgtctcagtagaaactgattgctctgtcctatctttcgcctatcgatcttgtaatagttgtgctcatgaactggctcgtcgaggggctaattgggacccggtctggacactggcatcttgccctcaggctccagagtccagtctcgtcagcgactcagcctcattgaccacgactctacgagcgaggggagagagc

SEQ ID NO: 94897 - DNA, 314 bp, Oryza sativa
  Clone ID: PAT_MRT4530_93143C.1
tctcgtcaccgcgatcgatcgatcgccgccggtttagatttccttcctacgcggaccgcacccacgcgctaggtttagctagctagtttgcttgcgcgcaagcgtcgatcgagctagctagtgaagatagatatgtgcggcggcgccatcccgctgatcagcagccgcggccccggcggcaagaggagcctctccgccgccgatgagctctggccgccgccgccgcagcacgccagcgacgacccggccgagcaagcggcggcggatgttgaggagcaggagcagcagcccgcgtcgaggaggcagcggcgagg

SEQ ID NO: 94898 - DNA, 496 bp, Oryza sativa
  Clone ID: PAT_MRT4530_93144C.1
tccccctatcctgggcgaactgaagctgaattttgatggggctttctttgatgaaggcaagaccggtggatggggatttgtagtacgggaccatggtggccactgtgtgctagctggagctgggagaattgagctggtgcatgatgctttgtgtgcagaggctatggcatgtctttatgctctgcgcgccgcagcaaacaacggaatttctcatgtctcagtagaaactgattgctctgtcctagtgcgagctctcaaatcagctgattatgatcaagctacggctggtgtcatcttcaagtaaatcagattgatgtctttggtggactttgtaaaggttgatttgtctttcgcctatcgattttgtaatagttgtgctcatgaactggctcgtcgaggggctaattgggacccgggtcagatgtccatttggactaaccccctcccgtgttttataagatcttttgtggttcgtgattacactgaaccagcgtat

SEQ ID NO: 94899 - DNA, 111 bp, Oryza sativa
  Clone ID: PAT_MRT4530_93145C.1
agttattaatttcaacacgggtggggccattccagggaatttccgtccaattggccttcgccattggttcccaagctaaaaggatgaattaactttccaaaaaaggtaccc

SEQ ID NO: 94900 - DNA, 324 bp, Oryza sativa
  Clone ID: PAT_MRT4530_93146C.1
ttgtcgtggctcttacccgttggacgtgggtgcccaaatggcttataggctttccaagggaggacttctaggcgtgtgaaagttgcaaaccagcggcgatggagatgcctgtctttgctccgaggctgggcccacaacagtatgctgagtgccaagatcaacgagaagtgaaactgaaatggtggtaacgatgctgtgactggtgaatggaataatgggaagaagatcgcctacacctcttttccataatatcataaccattactaagaacatggataatactctcaatgggaggttacaaattggagaacaaaaaaaaaaaaa

SEQ ID NO: 94901 - DNA, 428 bp, Oryza sativa
  Clone ID: PAT_MRT4530_93147C.1
gaaaaagacccccgcgtcgcccacacgcaggcgacatgggggcgaaccctaccaccggcgccgaccaccctagtaccctcccctacctcgccgtcggcggagctcaccgccggcaaagccggccggcgagctaggaaggcagcggcggggctttctccgcagtggtgccccctctcaggcgcgggggagtgacagactccttagagccgacacacacagtgcgtgctgttagacgacgcaggcatgcccaccgagtaccgccacatggacggctgggtgcgaaacacgtacacactggcaacccgagacgccgagggcaggaacagcaagtcccactggaagcccacctgcagagtcagatgatcgatggacgaccaggccacgctcgtctgcaggatgacgacaggcacgccacccacgacctgtac

SEQ ID NO: 94902 - DNA, 459 bp, Oryza sativa
  Clone ID: PAT_MRT4530_93148C.1
ataagcctttgtttagtactagtatgtatcaaatttctctgtagtattcacgatcaaaccagttatttctctaactgcaatttattggagctgaactactccagatgttcgctgattgattgagagctgcagttatttgctttgaaaatcgtatatctataccgagtaacttcattgtgtaaggtatttgcagcatatttcccttgctagtgtggctgacagactatgaaaagtttctttcagaactaggttgacaagcttacttgcaaactccattactttctgctttatcaagttgtgtgacgaggaacgggatttctgattattgatgtttgcggctcatgcctgttagtagttccaataaattataatacttgagtaaccggcaattcggtactttgtgcctatgggaggatgctaccctaacatctatgtcttgcctgataacagggagaacct

SEQ ID NO: 94903 - DNA, 491 bp, Oryza sativa
  Clone ID: PAT_MRT4530_93149C.1
ctgaattgtgtagactaatcacatgtgtgtttttagggtaacacatcaaactattcaccgactcttacaatcgtctactaataaaaaaaaataaaaccaagggaaccgaaaccaagatcgagatacaatttttttgaaacgctttctttcacaagtctgtgtgctaccatattcgcgacgaacccacctcagtttcacctcagtttcaaaccctagaaataaagccaggggaaccgaaacttgacccctggtcaagatacaattttttgaaacacctttttttcgcatgtctgtgtgctactatattcgccaaacccacctcagcttcaaaccctagaagtcatcaaaatggctgagatcttggatgatcaccccatggaccgaccttttaagctcactttgtttcaccatattggcaccctcccaaggagacaattttctcaaaatgtgtagtttaacgttacaaacgaaaacagattcccctttcgatt

SEQ ID NO: 94904 - DNA, 1139 bp, Oryza sativa
  Clone ID: PAT_MRT4530_9314C.1
cattaactcgccccccaaaattcctcctgcttggggtcgaaggcggcgaaccccatggattcctcttcctcctccgccgcacgcgccccaatccgattcaaccgccggcggcggcggcggcggcggcggtggcggcgatggaggtcggggacctgcacaaggtgtgggagatccgcgcgctcaagagaaagcccgacgagcccgccgcccgcgcgctcctcgaccgcgtcgccaagcaggtccagcccatcatgcgccgccgcaagtggcgcgtcaaggtcctctccgagttctcgccgaagaacccgaggctgctggggctcaacgtcggcgggggagtcgaggtgaagctgcggctgcggcacgcgggacgggactacgacttcatcccctacgaggaggtgctcgacaccatgctccacgagctctgccacatcgcgcggggcccccacgacgcgcagttctacaagctctgggatgagctccgcaaggaatgtgaagaacttgtttccaagggtatcactggatcaggccaaggatttgatggtacaggtcggcggttaggtgggtttacagtacacccaccgccaccatctttaaggcaagcaacattagctgcagcacagaaacgggcaaggaatggagctcttttgccatccggtcctagaaagcttggtggaaataatgatattatgagtgctcttagtccaatacaagccgctgcaatggctgctgaaaggagaatgtatgacgatttgtggtgtggatcgcacgatcaatctggcattgatgattcagaagacgttgttattcttgaggatacacctaacttgccaacgcagcttgggaaaagcacaaaggatggcttttctagcagttctgagaatcccagcacatcttcgggatttcccacagcagcacagaatggatcctcttcttgtaggataacaaccgatgcaggagatagttctctatgggagtgtgttgcttgcacacttctaaatcagctaacgcttgaaccattttcaatccttcctgctcctgaagtcctgaagcatgaccgagcacgctggtactatcatgagtcgctgttgctgcagttgagcgatataagctgtcacttcattctaatcaactaa

SEQ ID NO: 94905 - DNA, 2076 bp, Oryza sativa
  Clone ID: PAT_MRT4530_93150C.1
atggaggccaacggcgtcatcccagatgtgatgatgccgtcgctcctcgccgacgtcgaggtgtcacacctcgccggcttcgatgtcacgccgagcccgcacgctgaacccagcccacgccctcagctccgccacgacaatccgtcccgctcccgggttccgccgctggaacgcgtgtcgcggcgcagcgaggttgtgttcccgccgctggactcgccgttccaggctccaggataccgatcggtgcagcccgtgtccatcagcctgccggcgtcgccgacaggcttcggcgtgcccgtggccctccccatcgccgtgggcgacgccggcgagccggccgacctccggaggcaggctatgtcgaacgcggcacgcgatgcggaagaacagcagctggcggcgcagggcaagggaagcaacaataacgttaggttcgtgcagccggacaaggtggtgttccggtcgcagccgatccctggcggcaagccggcacgccgcgcggcatcgaaccgcggcggccggatgatgtcccgggacaggcgctacgactcgttcaagacgtggtccgggaagcttgagcggcagctcacccatctggctggcgccgggccggaggtccccgaggaggaggaggacggctgcgacggcgacgccatcagcagccaccacaccaagtccatgcctcaggttgatcgcttcttcgccgcactggagggccccgaactggacaaactccggtcatcggaggagctggtgcttccgtcggacaaaacgtggccgttcctgctccggttcccggtgtcggcgttcggtatctgcctcggcgtgagcagccaggcgatcctgtggaagacggtggcgacgtcaacgccgacgagattccttcacgtcactaccaaggtgaacctggtgctctggtgcgtttccctcgcgctcatgtgcgtcatcgcggccatctacgcttgcaaggtggtcttcttcttcgaggccgtccgccgggagtattaccacccgatcagagtcaacttcttcttcgcgccgtggattgcctgcctcttcctcgccatcggcgtgccgccgtccgtcgcgacggagctgccacgctggctctggtacgcgctcatgacacctatcctctgcatggagctcaagatctacgggcagtggatgtccggcgggcagcggcggctgtccaaggtggcgaacccgtcgaaccacctgtcggtcgtcggcaacttcgtcggcgcgctgctcggcgcgtccatgggtctcaaggaggggcccgtcttcttcttctccgttgggctggcgcactacaccgtgctgttcgtgacgctgtaccagcggctgccgacgaacgagacgctgcccaaggagcttcacccggtgttcttcctgttcgtggcggcgccgagcgtggcgtgcatggcgtgggccaagatcaccggcgagttcggcctcgggtcaagggtcgcctacttcatcgccatgttcctgtacgcgtcgctcgccgtccggatcaacttcttcagggggttcaggttctcgctggcgtggtgggcgtacacgttcccgatgaccggcgccgccattgcgtccatccgctactccacggaggtggacaacgccttcaccaaggcgctctgcgtcgcgctctccgtgctggccatgctcaccgtgctggcgctcctggcgaccaccatcgtgcacggcttcgtgctccgcaacctcttccccaacgacatctccatcgccatcaccgagcgcaaggtcaaacccatcgtggagctgcatgagatgctcggcagcaatgacagcgccgccggtcgtagcaacgacgacatcgaggccgcccgtcagcccttcgcgcaggccttccctgccaccatcgccggatctggctgggtgcgggcggctgccacatccatgccgctgcccgagcttgcaccggcgctcctctcttctccgcacgccgctcgtccgttctcgcccccggtgcagcatagaggaggagatgctatcgcggcactgctgccacctggtggcgggatctggcggcccccgacctccatgtga

SEQ ID NO: 94906 - DNA, 1266 bp, Oryza sativa
  Clone ID: PAT_MRT4530_93151C.1
atggtcgagctcatagcgcaaggtgttaagactgacaagggtttcaaggaagtgcacttgaactatgggcttgctaagaatttgactgaccactatgggcttgacaccagtggaacccaagtatacaaccatcttcgcaaatggcgttcaatgtgggttcgtatcggtaggctgaaagatctaagtggggctttatgggatgatcagaacaacatgattgtcctagaagatgaacactatatgggccatacaaaggacaaatctaaagatgttgagttcttgaatgtgcctctagagaactacacaccgatggctattatctttggtggaacccaagccacaggaagatttgcaatgggctctaatgaggcccttggtggtcctgctgacatggctgacggtggcttgggtgttatggatggggatatggagggtgggaatggggttggtgctggatgtgaaagtgttgcaggggctagtgctgctgggcctgttagtggtaactttattcctactgtgaatgacattgctggtggctcaacctcatctgggaagagaaagcgaacccctgttgtgactgaagaagaaggggctttcctgactaacatgactgcggccatccccggacttgcgcaagaagacctgcccctcgcagggagggagaagagagaggagggggcgttgagagggagagaatcgagcgtcgacgtcggcatgtccccttccactgtcggcatgtccccttccaccgtcctcggctccccctccgccatccccgccgagccactccatcgtcgtcagctccccctctgctatccttgcccaccgctgccaccgtctcgggtccccctccgccactccgagctgcagctgctgtccccacccatcaccgctgctccgagctgcctccctcgtccccgcccgccaccgttgcttcgagctgcttccaccgtccccgtccgccgcagcggtcctcagttccccctctgctgctccgagttggcgtcgccgtcaccacccgccccagtcgctgtccccacccgccactgccgctttgagctgccacccccatccccgcccgccaccgccgtcctcagctccccctccgctgtccttgcccatcgatgcccactgccgccatcctcggctccccctccgtgcggcggcttggtgatggagagaaatggaggtgaggggagggagaagagtgagaggattggggagagagataaagaggccgtcgtcacaagccacggcaaacgatag

SEQ ID NO: 94907 - DNA, 910 bp, Oryza sativa
  Clone ID: PAT_MRT4530_93152C.1
accccctctctctctctctcccgttagatgccagcggctgcggctcacgcgccggcggcagtgggcgcctcctccgccgccgtcctaatggcctccctgagacggcacaacgatggtcagagcggcggcggcaggccatgggtggagcggttgtggcggcaagccgcaggcaaagcggcggggcgaaccagtggtggcagagcgggacgggcagagaggaaggaggtgactaggccagggagcgggctgaggagggaggagaccggcgagggaacggggaggctgggagagtcatcggagtcatcccccagccgccgccgtcgtcgttcgagccgctcccgccggagtacgatgagcccaaccatactcgttgctgcgacgaccacctctggcccgatgacgaccactatgccccgctacccttccccgacgcctgctgttgctcggatctagcgcggcggcggagagaagcgccgcccgcctcctccctctcgacgcgctcgccgcatcccctccgcgggcgcttgccggcatcccagctcgtcttgacagcctcccctcttttgtcccctcctcccgccgccccgagctccggcgggcgtggtggggaaagcgagacgggcgacaggtgccgaggacattgaagatgatgacggcgagctcgggcgcgcgcgctgacctcccgacggcccgagagagaggggtgacattggggcacttcgccgccctcgccactttgccgccctccgcctcgacaggggggcacaggcgccgtcacgctcactggccaccggccgcctttccaccacgcccgccacgcccgccgcttgcctcggccccaccactccctgccacgctcgctgcccgtccgcgcaccgctgctgctgccaattgcctgtcgacacgcgcc

SEQ ID NO: 94908 - DNA, 323 bp, Oryza sativa
  Clone ID: PAT_MRT4530_93153C.1
gccaggcgatcggctagctgaacagtgactccaggccggaggacatggtggttgcgatcatccaacatgcccggaggcgggccggtaacaaaccctcgaccgttcgaaccctgcggtggcaacgctaactaagttcatctgcggaaggctataatcgtcggatggatggagaaggtgctgggaggaacgaatgacgccgtgtgatctcggccagcgaacgccgacctctgtcgagatggtgcactcctggaccctcccctgcgaggacaccaccaccgtgctcgtccccggttgcggagaccgatactatgaggctcgactga

SEQ ID NO: 94909 - DNA, 297 bp, Oryza sativa
  Clone ID: PAT_MRT4530_93154C.1
cccacgcgtccgaagagtagaatcctctgtatgttgtgctgcacaccaccacaacgcggtacaactggcggggcaccggccctatcaatatggaggaccgggttaactggggcgcgccggccgacggtatggccggaggggagcatgaccaggcgcagggcatggtggagcaccaagccgagcgcgtgggcaagatccagggcccgaccctacgggttgctctagctggggccgttgtccaggcagaggacgagctacgtgaccgcggagatctccagcaactaccggtgggacacc

SEQ ID NO: 94910 - DNA, 499 bp, Oryza sativa
  unsure (1)..(499): unsure at all n locations
  Clone ID: PAT_MRT4530_93155C.1
ttnaaannntttttnttntttaaaaattgatcatgagaaacaagcatagtgtaaaaatcacacatgacagtttagcggccaatatgctcggaatttctgtctgagcctacttgggccttattgtaaccgagacaaccattattacaaaccacactatataaattcttgagaaaaaacagggaaagaaaaccaacagcaacaaaaaaataaaaaaaaaggcccagcgaaggagatgagtttctcttcaattccgctctactcttctcccttttattcttctccttgccctgcagctgccgctgaaagcatgaccgaatgagtgaagagatccggttcaagattggttcgtagcctcctcctcttcctcctctttggctaaatcattgtccggctagaacaggcgactaattaacctccggtcagtaaccaagagcatgtaattaatcatgcaaccaggatcgaatagttatgcatggcaagcgcaagcgcaacacctctt

SEQ ID NO: 94911 - DNA, 312 bp, Oryza sativa
  Clone ID: PAT_MRT4530_93156C.1
atggccgtcgggagctgtgaggttggcggcgcactcgaccaatccccctcctgcgcggcggcggccgaggaggggaagttgtcggcggttcacggcggcgaagccgtcgctagaaagagggggctgagcaggtggtcgaatcagggagttctccgagtaaatcaggaagaagaagaggtcataccggcgcaatcagacggcgagctctccgggccttcgccgccgccgccgccgtcgtcgtctccggcggcgactcgagagagagagcgggggtggagcggaggagaggcggcggcgcaactcaaccaatga

SEQ ID NO: 94912 - DNA, 2028 bp, Oryza sativa
  Clone ID: PAT_MRT4530_93157C.1
atgtcgacctccaccgatccatcgaccacggcaaccgccgaaaatgctgagcatctctctcatcaagttgcaatccctagcatagtcgatgagtatcagttttatcttggtccaatcggcaacttagatcctactgaattcatcaatgccaaaaccaaccggatccccttcagatttgccaaccccaacttaggtctttggaaaaacaccttcaaatcttggccgtcagctgagaagagttgcccagcttggtatatgcgggttgttgttcggccaccattatcagaagcagagttctcaagatttgagctgattattaatgaagatggagaggaagttactaagcgccgatgcatgtcctttggagaagcaacatccaccaatgccggatccaagttatcggttgatctttttagggattggttcaccaatttctatgatggctttccaaggaataccagaatctggtttgcatacgaaggatttgccagttttgagctcccagccgattttcagtttgatgagatcaattttgaaaaatatgataaatccagagaagtattctctacagtcatcaacccttgcatactaccagtcggcattcatcaaggaaagaacatccaagtctcctatgagttctatcatccgacaagtgctgcaaggcaactagggatgggccaagtgctgatcagcttattttttgccgataagattcaaagtaggggagagattacatcagcacttacgatggatcggttactgaacataccaggaccaccattgggcagcattgataacattaagctgaggatgttgagaagtgcagcatttgaccgatgtgatagcggcttggagatccaatatgccccagggctccttcctaatggtggtggtttagctcgtccagtcatcggctaccatgcccccaagacttcaacattgccacatggtctaccgcgtgtaccgactgcccctgtagctggcaagaaaaagaggacgaaatcggctgctgctccatcggctgcatcaaagaaatccaagaagcaaaagactgctgccgatgatcttccatctatagacccagatgtagaacaatttctgaatggtgaagaattagaagaagctatagatgaagcagctgaaaacatcagtgaaataaaagaacagacatctccagcgatattcctgctcctcaaagaactccatcacctccatctcgtcccacttaccaaccaacgcctcgtcattctccaactcctgtttctgaatcaagtgatcacactccatcggctacagatagccatcacgttgcaggaagaagtagcaccacctccagccatccctgttttagccgatatgttttccttcgacatcaggcaatttatggatgaagaagatgaaaccacaagcaaagctttagtgcccttagccgatgatttgaaagcaaccctgctagatatctcaaaacggctcgaaggttctttggagactctagtagtctgctgtggatcaatcagggacagattcctcgaaatccataataaactcccagatgaattagccgatgtcattaccccagtggcatatctcgaacaacatcggctcaaacttaagaaggcaaagcaaagaattgccgatcgctgtgaaagaagggacctggaagcaacaatccaaactagcagggcctctatcaatgaggaaaaagcaaaacttgatgagttggaagctggtccaagttctactcaagccaacatcgatcggctgaacactcggcagataaaactactagctgaattggagcaatgcagtgcacagattgcccttgaagaacagaagcttgccgatctgcccaaagccatcgaagatcaaaaatcaaagctaaaatcttctgtcaaatacttagctggtctgacaaaatctctgaaggtgatctctgggactgatgcagccgatgcccagattatagatgaagtagaccagattaggcaaagggctatatcggctatccaaaaatatgtgtctggataa

SEQ ID NO: 94913 - DNA, 202 bp, Oryza sativa
  Clone ID: PAT_MRT4530_93158C.1
aaacagcaaaaaacccatttatataaccacgagtgcgtttcttacaaaataaataactccaaaacaaatacaaagcaccatctttattcagaaacaatctgtctcttaagattccatgctccatctcaaataaatacacctaccatccctttttctcatcctcataaatatccacacttgtcttccctccatatcctatatt

SEQ ID NO: 94914 - DNA, 238 bp, Oryza sativa
  Clone ID: PAT_MRT4530_93159C.1
gaatatgtatgtagtattgttattatttcttaggataatggaataaatatcccgaccgcgacgaccgaagaacttaaaaaacaaagccatatctgaatatgtatacaaatatatcacagcacaatagcatgatgctggagttgtttatttatccagcacagggtctgatatgatcaatcttgggttaagcattggtgcctttgcttaccctgaagaacagaaagaggtaggcccaatt

SEQ ID NO: 94915 - DNA, 338 bp, Oryza sativa
  Clone ID: PAT_MRT4530_9315C.1
cccacgcgtccgaaatcaccaattacaaatcgagaatccagtcggtgaacgataaaatgtatgacgattgcgtcaaaacattcaaaatgctgttgcacgcattacgcattagggagcgacatctcgtatgtcctgaatattgatacgattatggtgtcttcgacgctctactgattggtgatgaggtactggcgtatggagaagttgtagtgatgtccgactcgaacgacgcggtggtggactggactgtatgtacgacacgaacaacttgccgatgtaggacgtccgctagatcgacgacagcttcacactataatgcatcgatttgttcggcgctc

SEQ ID NO: 94916 - DNA, 459 bp, Oryza sativa
  Clone ID: PAT_MRT4530_93160C.1
atgcaggcccatgctacgatcaagacgacgctgagcgtcgtccggaactggaacatcgactatgctgcaggcaatctagcgccgccgtcgccgccgttcgtccagccgtgcgccgccgtccttccggtcgtcgtcgtcgctcgggaaagccgccgttgtgatcgtcaaatcgtcgccgacctcgtccgcctctccgccgtcgctgtagatcgccggagccccgccgtcgtcgtcgagctgaaggtgaccaccgcttcttcctcgtcgccgtcgccgtgtccttcattcgcgccgtcgcgccgtcgttcgccggcgagcacgcgaggccgagccgccgtcggtgatgacgtcactgctgatatcatcgacgccgtccaccgtagaccggtcgtagaccagtccgacgttcctggagagtccgaatttgcaggagaagactttgaagagttccaaggctag

SEQ ID NO: 94917 - DNA, 1124 bp, Oryza sativa
  Clone ID: PAT_MRT4530_93161C.1
atggcttcagctccactcccacaggcagctcaactggggtataagccaaacgtcttctccttctggatcctttttcttcaactgaggttgattgattattgcaagaatgagcatatgacatactcaacaagccacacagcaaatatgcaacactgtacccacaagacacagccccacaacatgtcaccatgtgcctcagtaccaccacggtacctcggaaaggagctgtgacaataccccttgcacaacacaatccaccacagcgcacctttcctggatcataatcacccccttataaacaaggcatggactccccagcgacccccgtgggcttatctccgccacttcatactctggtgctctactatgaaccatactatatagaaatggttcacggaaacgaacggccgagatcgatctatccaaaacggaccaagatctaacggtctacgaccggtctacggtggacggcgtcgatgatatcagcagtgacgtcatcaccgacggcggctcggcctcgcgtgctcgccggcgaacgacggcgcgacggcgcgaatgaaggacacctacgggttgcgggcgacacggcgaactcaccggtgaccaaagcagcggcggaaggtcaacggacggcgacggcgacgaggaagaagcggtggtcaccttcagctcgacgacgacggcggggctccggcgatctacagcgacggcggagaggcggacgaggtcggcgacgatttgacgatcacaacggcggctttcccgagcgacgacgacgaccggaaggacggcggcgcacggctggacgaacggcggcgacggcggcgctagactacacgacgctagggctctaccggcgacaagagacttaggcgagggtggcggcgggtagaggagacaccgggggtccttttatagcggctagggggtggcggcgaaggtccacagcgaccggcggcagcgatggaaagtctagggttcggggagagagacgaatccgatttgagttcgaatccatggatttccgaacgattttagccgatgattccaaaagagaaaaggtagaggggatctcggggatcatttccctgtatatatactacattcctcattgaaggagtata

SEQ ID NO: 94918 - DNA, 601 bp, Oryza sativa
  unsure (1)..(601): unsure at all n locations
  Clone ID: PAT_MRT4530_93162C.1
cgaggcctcctctcttcactcgagaagcgcggcggggcaccggtgagacccaagtgaagtgccgcctcggcgactgaggcggcggcggcggtgcccgccagatccgcgccgctccggccagatctggcggggtggcggctggtggcgaggaaggcgacggtggcggaggtggcgacggcgacggtgatggcgagctgtgtcggatgttggggaccgtcggcggtggggatggatatggcgctccggggatggagngtggtggtgaggctggcgacggcgggccggatccaggcgcgccggaggcgaatccggccccttcccccccccccccccccccgggggcggatctggtgcggggagagccccacgtcctcgctggtggcggtcgnggagccctgctttaagcggcggccgtggaggccagatccgtgccggtggggagtgaaggaggcgacggcggcgcctaatgatggccgtggcgcctaggtgctcgtcggggacgggggcggtgtccctcatattcgcgccnccttggcctaatctgcaagatgtgcagngggtgctggtcctgacacccgcaattttccccttcttactcttg

SEQ ID NO: 94919 - DNA, 302 bp, Oryza sativa
  Clone ID: PAT_MRT4530_93163C.1
tacggatcctcgggtcgagccacgcctcacgccaccgcttcggtgttcttacctaataaggggggttctttttccggcttgggccccaaaaggtgggggggccctacattgaaagaaccacccaaccgtagcattctatccaggctttaacgggaccttaggacaaggtcaacttgtatcaaggttacggaaggtggcccccctggaaaatgactaacaagctgtggccgtctgggatcttgacatctgaagcttgacatatgaagcaagattataacactttgctgtcaacacctgtgctc

SEQ ID NO: 94920 - DNA, 235 bp, Oryza sativa
  Clone ID: PAT_MRT4530_93164C.1
aagcacaatgcaaatgaaaacctcgttagatacttactcatattttttacaacatttctcccaactcattcccatttttacacacacatcttaccacctaaaccttttatttcaccattattatttaaaccaaccataccttccaatatcaaaacacattcttacaatctaaaattctaatatcctttcttacttcttcacatattaaccaaacaacatcctcaacaaatataaa

SEQ ID NO: 94921 - DNA, 369 bp, Oryza sativa
  Clone ID: PAT_MRT4530_93165C.1
atggaggaaggtcgcacccctggctccaacgctgctccccggccgcgcaagcgaggatccggcagtggggagaagagaaggctacgttgggggtgggacaacgataggaggccggccgcacacagcgcctctgggtgttcgccggccgtgcgcttgaggaggcggggcgcgggggagcaaggaggaggacgggaagaggcggagactcaccgagagattatgggaaggagcgggggactcaccggcggtgaagatccgggggaggagggggtggccggcgccgtactccggtggagatccggcggcggaggagggtgccgcgacgggggcctcgaagttttggtgtgggaggacttcggttcagaatag

SEQ ID NO: 94922 - DNA, 1628 bp, Oryza sativa
  unsure (1)..(1628): unsure at all n locations
  Clone ID: PAT_MRT4530_93166C.1
tcaaaagaccccagtcaactcatcatcgacgctctcaactctagatgggctccctttctcgtacgcttgtcggggccacgggacagtgacaccctccgccatcttccgcaagaccgaatccccaacccacccaccatcttccgccgcccccgtccccgtccccggccatggatccgtcgccggccgtggatccgtcgccggccgtggatccgtcgccggctgctgaaacccggcggcgtgcaaccgggaaaggaggcaaacagcgcgggggcaagcaactaggattgaagaggccgccgccgatttctgtcccggccaccccgcctcctgctgcgacgtcttcatcccctgctgcgccgacggccatcccaccacgaccaccgcaatcttcgccgattttcgtccccgattcgccgaatccgtcaccggctgcgccgacctcctctcttgcttcggggacatcgacggcaaggccaccgcaaccacaaggaggaggatggggaccaacatcgaccatttccccaaactttgcatctttctttggaaaccaacaagacccaaattcatgtttggtcaggggttatcctccaggagggtttgtcaattttattcaacaaaattgtccgccgcagccacaacagcaaggtgaaaattttcatttcgttggtcacaatatgggattcaacccaatatctccacagccaccaagtgcctacggaacaccaacaccccaagctacgaaccaaggcacttcaacaaacattatgattgatgaagaggacaacaatgatgacagtagggcagcaaagaaaagatggactcatgaagaggaagagagactggccagtgcttggttgaatgcttctaaagactcaattcatgggaatgataagaaaggtgatacattttggaaggaagtcactgatgaatttaacaagaaagggaatggaaaacgtaggagggaaattaaccaactgaaggttcactggtcaaggttgaagtcagcgatctctgagttcaatgactattggagtacggttactcaaatgcatacaagcggatactccgacgacatgcttgagaaagaggcacagaggctgtatgcaaacaggtttggaaaaccttttgcgttggtccattggtggaagatactcaaagatgagcccaaatggtgtgctcagtttgaatcagagaaagacaagagcgaaatggatgctgttccagaacagcagtcacgtcctattggtagagaagcagcaaagtctgagcgcaatggaaagcgcaagaaagaaaatgttatggaaggcattgtcctcctaggggacaatgtccagaaaattataaaggtccacgaagaccggagggtggatcgtgaaaaggccaccgaagcacagattcagatatcaaatgcaacattgttggccgctaaggagcagaaggaagcaaagatgttcgatgtgtacaatactctattaagtaaggatacaagcaacatgtctgaagatcaaatggctagccaccagagggcaatacggaaattagaggagaagctatttgcggattaaggtgagttttatanactgacccactattttcttgaaatgtatgaattctganatttatataca

SEQ ID NO: 94923 - DNA, 255 bp, Oryza sativa
  Clone ID: PAT_MRT4530_93167C.1
atgaggggagaggccgttgtcggcgccagaggggagaggcagccgctcgtcgccagcgccgctagatccgtcccgctgagctgttgggaggccgtgctggtaccggagaggagaggggagaggccgccaccggcaccggaggggagaggccaccgctcgtcgctggcgtcgcttgcaaatctcagccgcttgaagagggagagagagagatgggaaggagccgatcacgcctacgcgtgcacgtgcactgaggag

SEQ ID NO: 94924 - DNA, 759 bp, Oryza sativa
  Clone ID: PAT_MRT4530_93168C.1
agatttccgcccgagcatgcatttgatggtacatttccgttggtgcctccgtttcttctccagctccagcgcatacagtagtaagcgacaaatcttcagcggcgctcgggctcgtagacagtggcgcggaggggacttgtcgacggcggcttgtgggcttgagaagcaggggcggcaattcgtgggcttctcctcctgcccacaccaacgccgatacttgtgcccaactccggcgagcgaggcagaggaggcatgcggcggcgatgtaaatccaacaatggtggcgagcttagcacccggtgaagagaggtggagctggaagggagcggcagccgcagccaccaaatccgacaagcctgacatcgcgtcaccggtggtgttggaggggagtgcaagtgtcgccgccgccgccacgggctggccctcgccaacgacctcctcgttgtcgccatcttgtgcttggcagcggtatcgcccggtgctcgtttcccgtcgacagcgaggcgcctgtggtgacttcgtcaatctctccagaatttgccgacccagtcttcgaagatgctcataggggtagggtttgcgtgcgcgtgcattgtgagtgtcaacgttgtactgtgtaattctcggtaacgtctcgtctgtcgttttcgtccaggttagggtaccgtgcgaggtaggccggcacgtcgatccgatccaccggtgcatttgcccgtcccccttgcggattcccgtgtatagtcccagtccccgccccat

SEQ ID NO: 94925 - DNA, 138 bp, Oryza sativa
  Clone ID: PAT_MRT4530_93169C.1
ctagtccaagtggatgacgacaatgcttccacggtgcctatgcaagacagtggcactcttcatgatgacgctgagcatcaccctttcattttgcagcccatgttttgtaacagatttgccaaataggccttgctccat

SEQ ID NO: 94926 - DNA, 436 bp, Oryza sativa
  Clone ID: PAT_MRT4530_9316C.1
ttttgttttttttttttttttgggtttttttttttttttttttgttttttttttttttttttttttttttacaaaaaaaggggaatcccttggatctttggggggctcccaaaagggcaaaggtgcaccccgggcccaaaccatagtgcattttcccacccacaacaaaaatttattttcctccaaaaatttaaacaactttttttaagagaaattaagctggcccggtacaaaaaatgggccgcaatttacccccccaaccatgttacaaaaacttgggggaacgaagaccccatccccattgccaagcttgacaaaatttaagggggtttttcaccccccattttgtggaaaaacctgggggattgccccatgtaccctaaaagggggacatggggggggatcaacgggatttttccccgcgggaatgggggga

SEQ ID NO: 94927 - DNA, 308 bp, Oryza sativa
  Clone ID: PAT_MRT4530_93170C.1
gctttcttttgacgctttgtcttctcctcgccggcgacgagcggtttgcccctcgagctttgttgccgtccatcacgcgagggtggacggggtaattgaaaaggatcaacacgttctatgacataattactatgcacatagcatacaatttcaatctctactgaattccgcggtaagaaaagccttaattttacaacatcaatctggctatattgtaatccttgactttcttggatacgacttatttatcactggcttcttgggtctttttttatccaaacatatctactcttactccaccgtaaaaa

SEQ ID NO: 94928 - DNA, 810 bp, Oryza sativa
  Clone ID: PAT_MRT4530_93171C.1
cctccacacgcacggacttcgcttctcctcctcgctcgctcctcctcctccccgcatgtagcgccgccgcatcctcgccgtcgccggagctcctccccgcgcgtactgctgccgcatcctcaccggagccgctgcccacgccgacatcttctgctgccgccgccaaatccggcttcttccctaccgtcgcggccagatccgacctcagccccatccgccgccgccggggtcggcccctcccgtccctgccgccggagtacatccatgtttcccttctcgctgtcgtccacaggctccgccaatgcaatgattggcctctaccttccctcgaccaccgtcttctggacaaaaaagcagaagtaccaacagggttgtgttctccaaaaattggaactacaccaagcagtagcaacaccaagtgatgtatccagcgtcactggcagaatcattcgtgacctatcaatgatggtcatccccattgagcatcacatggttcacagaggccatggcatctttgatttccaacagggtttgaagatctccagatgctcggcacagccttgcaattgcgttggccgctgctgcaatggaagcaccctcgagcatccatggtgcggactgaagccagtgcgggacaaggcgatcgacgactgttttagaactgccacgcccacaaggatcaagttgggggatggaggaacatctttctgggtagatgattggttcccagacagtggtgcagttgctaacctggtgccaatcgtctccacttctgtcaaaccggagaaatggacggtggcaagtatctga

SEQ ID NO: 94929 - DNA, 473 bp, Oryza sativa
  unsure (1)..(473): unsure at all n locations
  Clone ID: PAT_MRT4530_93172C.1
gaccccgcgnccgaggcaccccccnggcagagaagggcgaggagagcgccgncccgcaccccgcggcgggaggagccgcagcaacgggggaggccaagcagcggagcccggcgaagggcaaggaagaggcccgggcggcagacagcccgcaaggcaggaccaagcgnggcacggagacggacacggggaaagccgccgagggggggaaggacgcgnngaaccagaagacgcggacacagggctncactcacgncaccncgccgacccgcgcgagcccngaagagcggacgacccacangagccacgagagacaccaggagnncgccggcacgaccagggcggcgagcgacaaggccgccgccgccgacnnccccgccgncgcccccaagcccgcaccaccggcggcaccggcggcggcggcgngangaagacgacaccaacgggccancaagcaaccacccgccacggcacca

SEQ ID NO: 94930 - DNA, 266 bp, Oryza sativa
  Clone ID: PAT_MRT4530_93173C.1
ctctgaaaaaaagagaagacaaaaaggaaaagagggccatggtgaagaggcctccgtgggccgtggcggcccagataagagctcaaagaagctcgccgccgccgccgcgacagctcgcctcgccgacgagcggcgtcacccgccactccgcatcgatccggccggcgtcggtgagatccgttccaccgggccggcgccgccgatgtgtgtggccggcggcgagacgccgggtggagatatcgccgacaggcaatgggggaacgagg

SEQ ID NO: 94931 - DNA, 1350 bp, Oryza sativa
  Clone ID: PAT_MRT4530_93174C.1
atggacaacgcggcggcgccgccgtcatctggagcggcggggaaggagatggccacggcgggggcgctaccggacgacctgctcgacgagatcctcctccgcatgccggcgcgttccatcctccggtgccgcgccgtctgcaaggcttggcgctcgcgcacctcccatccctacttcctccgagcccacgccgcccgttcccggataatcgccgccgccgtggttgacacaactgcaattcccgacggcgaattccgcaccaccatcagcatcagacctctcggcgacggcgacggcgaccgctcgggggcggccgtgtcgtcgtcgtcgtcgttcgcctcggtgcggttcggatcacggccttttgtcctcggctcctgggatggcgtcgtgtgcctggtgcccgccggtgtcgttcgccctctcagccgcatcgaccgatacgtgctcgtcaatccgctcaccaaggcctgcaccagcgtgccaccgccggcaacccgcggcatcgtcatctgcggttacgcccacccgaccacgtcgcgctaccacctcctccacgccgacgacgcctatccctacaaccatatggcggcggcgaccatccggattctgcgagtcggggagaagaacaacgtgtggcgcaagatcgcccgccaccctgcgcctgcgtgcgtggagtcgaggacctacattcgattcggcggcgctccacccgtcagcctccacggctgcctgcattggctggtcgccccgttgtcggcggcgtcggcacggcctctcctatcggtgttcgacatggaacgggaggagttccggcagatggacgcccccgaacaatgggctcgccatgggaacctgccgcacatgatgggtgtacagatcgctcggctctccggcaagctgtgcgcgttcgtcaacgagccgagcgccagcgcgttggggatgtggacgctcgaggactactccgacccgagcagctggcggatggagcggagtatcgactactcgcgccacggcgccggcagccggaacatcgcgcgcacgttccgcaaccggttctcggcggccaccaccgcggtggaggtgctacccgatggcgtcagcggcaacggcgatgtcggtggcggtggcgaggaggagatcatgttcctgttcaaccagttcgacacgagggaggctgtgtacaacgttgggcgcgcggcgtggcggtggcgaaggattttgccaccgccgacgaggcgcgtgatggcgcacaaggagtgcatgttgccgcgtgaggtgagcttcggtggggcggcgcattttgtggaggagagtgacatcggcggccaccgttgcatttgcatatga

SEQ ID NO: 94932 - DNA, 2004 bp, Oryza sativa
  Clone ID: PAT_MRT4530_93175C.1
atgccgccgccgccgcggaagcgcctcggccgcgcggccctgctcctcgccgccgccgcctacctcgccttcctcctcctcttcgagctcccctccctcgacctcttcccctcctccgacgccgcggcgggcgcggcgatgcccacccaccgcccacgccgccgcgagctcgaggcctcgtcgtcgtcttcggcgttcgcttcccccgtcctccgccgccccgccacggcggtgtctcccgcgccggcttctgctgctgccgcggcggctggggcgctcccgatcttctcgtcgctgctcctcctcccccggcccaacgcgacggccaccccgttcgacgggaccgccgcggaggcgttcgccgcggcgaggccgcacctcgaccacctcaggactgctgctgctgcggcggcggaggaagcttcgtcgtcgtcgacggcgccgacgtgcccgacctcgatctcggtgcacgcggacgggttgcccggggacggggtgaggacggtggagctgccgtgcgggctcgcggtggggtcgcacgtgacggtggtggcgcggccgagggcggcgcggccggagtacgacccgaagatcgccgagaggaagtccgggcaggagccgctcatggtgtcgcagttcatggtggagctggtcgggaccaaggccgtggacggggaggccccgcccaggatactccacttcaaccccaggatccgcggcgactactccggcaagccggtcatcgagatgaacagctgctaccggatgcagtgggggcagtcgcagcgctgcgagggctacgcctcccgccctgccgacgagacagttgatggccaacttaagtgtgagaaatggattcgtgacgacgacaagaagtctgaggaatcgaagatgaagtggtgggtaaagcgtctaattgcagccagccattttgctgagcggatggctgtacggaagtcgtggatgatgtatacaaggaaatcgactaatatagtagctcggttctttgtggctctgaatgggaaaaaggaggttaatgcagagctgaaaagggaagcagagttctttcaagacattgttatagttcctttcatggatagctatgaccttgttgttttgaagaccattgctattgctgagtatggggtgcgagtcatacccgcaaaatacatcatgaaatgtgatgatgatacatttgttagaattgactcagtactggatcaagtgaagaaagttcgaagtgataagagtgtgtacgtaggaagcatgaactacttccataggccactaagatctggcaagtgggctgtaacttatgaggaatggccagaggaggcatatccaaattatgccaatggacctggctatgtaatttcagccgatattgcacgctacattgtatctgaatttgacaatcagacacttcggctatttaagatggaagatgtaaacatgggcatgtgggtcgagaagttcaacaacacgcttcggccggtcgaataccggcacgatgtcaggttctaccagtctggctgcttcgacggctacttcacggctcactatcagtcccctcagcacatgatctgcctctggagaaaactgcagtccggaagctcacggtgctgcaacgaatttttgaggctggtggtggtggtggtggcggcggtggaccggccagcgttgcggcgagcgggcacccgccataggggagccattggggagctggagtgggcacccgccgtgctgccccctgaggagtggaccaacctcaccgccgctgtcgcgcacgagggctccggcttctacgtcctcgccgtcctccgccgtgagcgccgcggcggtcgctcctgccgttctctgccatgagcgcacgcgacgatggtggtggaggtgggttacggtggagggtgtgtgccgctccctcctctcccgccggcgccgctccctcctctcccaccactgacgccgccgcacgtcgctccctcttctcccgccggcggccat

SEQ ID NO: 94933 - DNA, 644 bp, Oryza sativa
  unsure (1)..(644): unsure at all n locations
  Clone ID: PAT_MRT4530_93176C.1
ggctctactggccccacacacatantagagcttccnccaaccagtcgtagttctcccgtgttgcttctcgccgtcgtctccgtgctcgcggcgccaggcgccaccntaggcggccgatccacccacccacccaaccacacgagttgggttctcccaccacccccgggggcccccgcctcctggttcccgaccccgagccctaggggcctccaccgcctagtccccgctcccgcgttgccgggcgttggtgccaacgcccgatgcgtcggccgtggcccaggccgccgccgccgngccggtccggcgcgacatgctgccggccgctcgccgccgtcggcagcacactggtgccggtgcgcagcgcaccgccccctgctgggcagcctctccgggcactcggcgcccccgcagtcgggccccccagtccgcagtgttccgcggctgccggcacagggcattggcacgcgcggcggcgcacctcccggcgttctgccaagtggccactcccccaaggcgggcagtggtgtctgcctcatggcctggccgcaacanatggcctccattcacctcaagcctccatggtcaacctcgacctgggtgcccctgttcttgtttgggtgttggggtntcatcccaaaaacata

SEQ ID NO: 94934 - DNA, 700 bp, Oryza sativa
  unsure (1)..(700): unsure at all n locations
  Clone ID: PAT_MRT4530_93177C.1
gcacgaggcacaagcccaagtcgcgtcgcaccgaagcagagtagagaaggagaggagcggagcgccatcagccgtccgatcgagtgatccgatgggtcttgctctcttcacctctgctgctgctgccgccgcggcgcgggcgctcgcggcgagggtgacgaccaccaccaccagggggtacccggcgtcggcggcgtcctccgcgattaagcgtgccgcggcggcggtggaaaggaaaggcgccgcggggattacccaagcgaaagaacggtcgttcttncccgcggggaaggaagggttctgggtgccccaccccctgaccgggcacctcccggccttcaactttggcggggagagccaaggccccgaacttccgggcgtccacctttgccgcaggttcccccgcgcgtggtgggggggaacctccccgctgtccaaccaagacaacatccttcaatcatttttttttttgttcccgggaaatcaccttttaatctcttttaaccggggaacccgggccggtcccacaagcactttttgcttctcgtggaccctttacacacaccaccacctattttttccccggccggggggtctcccggcgggggggggcctccctccccgcttccttgtgggggtggggtgggatatctttttttcggggcgggtttttctgaccctctctttataacccgagggg

SEQ ID NO: 94935 - DNA, 168 bp, Oryza sativa
  Clone ID: PAT_MRT4530_93178C.1
atggcgacgaaaccagctactcctagttctagggctgcgctactaggaagcaagcaagaaccgactccgtcgacggatccgccgccaaacccccaattccggcggccccagatctcgccgaccaccgccgattcccagcaaaaacgttactactactactactactga

SEQ ID NO: 94936 - DNA, 299 bp, Oryza sativa
  Clone ID: PAT_MRT4530_93179C.1
cttccacttgacatgcagctctcggaacacagtgcgtccagtgtgacatggggcaatcggggcgcaacatctctggagggccttggtttacatgacccgagcaatctcaaacaggcagagtacattttagcccatgatactgaagccctgtgtctacctctaagcgatccattatgcaaaagccttgaggagctcgagcagggtctaatgctatccctagaaaagcgactgccaatggaagaagctaaccctgaatatgtgactgttgagccaccaaatccgagagtcatgcctggcac

SEQ ID NO: 94937 - DNA, 414 bp, Oryza sativa
  Clone ID: PAT_MRT4530_9317C.1
atgaagagcttttttgttctcactggatctttcaaagtgtcgcacttcgtcacagcagcgtacgtgaagagagctcgcaccggccatcacggtgataacggcaccgtcagatcacctcgcttgcagtggcgcggtagcagctttcctccatcgctggccatcgttcctcccgggagagccgcggcgccggtgggcggcggcgagatagtgagcataaagacggcgtggccggaggtggtggggtgggatggcatgtcggcggtgatgaagatccaccgcgaccgggcggacgtgcgggtggaggtgcacaccgtcggcgagagcgtcccgccggggttcgacggcgagcgcgtcctcgtcttcctcaacgacgacaacgccgccaccgtcgcccagacgccagtcgtcggctag

SEQ ID NO: 94938 - DNA, 192 bp, Oryza sativa
  Clone ID: PAT_MRT4530_93180C.1
atggatcttgggaaatgggccaatgaagctcaagctgtggatctagggctgcgtgggttggatctcgttgttgaggtgccgcaagctacgtcctttaactacggcctgatcgtgcttcctcaagctccacagacaacccctgattgccgagttccttacaacaacccgtcatggctgtccaaccggaaatga

SEQ ID NO: 94939 - DNA, 223 bp, Oryza sativa
  Clone ID: PAT_MRT4530_93181C.1
atgaagcttggcattgtttccgaccgccggttcatttctcctctaagttcagctcggttcctttccgctactcagcagcgggttattcctatgaagagtgtttttgatagattaaaggagtccttgaaggtgactggcggtgatactccggcaatcactgttccggtgaccaaagttccggagactaagctggtggctaatcccaaaattcaaaatgttagag

SEQ ID NO: 94940 - DNA, 381 bp, Oryza sativa
  Clone ID: PAT_MRT4530_93182C.1
atgccgctcattccgtccccgccgctcctaatgctgctcgcgatgccgccgcttaccaccgctgcagctcgctgctgccaccgcgtcgctgctgctgctggcgccgccgctattcaccgcgccgccacaaatacattcaaggcaatggagggtgcagcagccggcggtagttcggcggcggggttcagcttgtcggcggtggcgagccttctcttcctcttctctatgcttcaagagcacatccccttccaactccaggactgcctcgccgcactggccgcccgcctccacgccctcctctccccctacgtcaccgttgttggagttaatttatttctagaacataccagcctactctctaactctctctactactcatga

SEQ ID NO: 94941 - DNA, 1969 bp, Oryza sativa
  Clone ID: PAT_MRT4530_93183C.1
tttttttttaataaccaattgaggcagcttgttgcttctctttggcaactgcaataaaactatgcatttgatttcaagatctcaggcaatataagcgtggcatcaccttaaatttctcaaatctcaaaacacagctcggatttaaccacttctatcgaaagtccaatggccatacgggcctacaactgaataccatacagttccactaacatacttttgaggggtcactcattacattgctttagaaagactgatgccttcccttatcttcagcgtgcttcatattgaacaatccggcgggtacgcttcttgtagaggatgcgatagccacattcacggcactggatcacatctcctggcttcagtgtgttctcagctccgcaatctccacagagatagctgacgggctcaggttgttgcggatccatcggacgcagcggcgctggtggagcgcggcggtcggccggaggcggcgcgaggcaagacgacggctgcaggcgccgggcgggagaggaggcggcggcgcgcgcggctagggtttcgacgacgacgacgactattaccttgtcacgtgcgtcaaccaccgtctcccgcactcgccaccaacgcctcctcatcctcgagggtgatggtggggtcgagaggctcctcgacctcctcgacgcggctgacaccggcctcgatgcacatgctttacggggcgtatcatgtatttgcagcttagcagcagcagtcacagcaactgagccaacattttcctgagaaataaggcctgtgggacatgtgacatttttatttggtataacgttctcagagaatgtattgtcttgcatcctcgccctcttgtagaccttttttgttgaagcactagttgaaattacgatcactttgccattccgtaatcgcctgactgtactgccttctgagccttgaggaacaccaaactgtggattcatcccttcatttgtttctaatgcatccttagtacccaggtgtgttaaggatttgccacattttggtgttgcacaatctcctaagacagaggatacatgacttgtactatcattaactaataaagcatcctgctctgccttactcctcacatacttttctgcaggaactacagatggtcctacacttgatgttccatgctgaactttattcccattctcacatgtattcatgagcatacataaatgctggttattttcttgatcattaccacatgtttcactaggggttgcacgaggttcttcaggcatgtccattctgccagtgcaaaactcctcagaagtggccaatgtgcccatgaaattaacattacaatctgtatttgcagtaggatcctcaacagtaggtcttccattagaagaattagaaagcctctcgctaggaaatctgtctgcatcacttctagacccctgatatatgttgagaccatcccaagagaaaagtcccattgaatattttaagtttccccgcaaaaacttttctatataatattcagtagattttagtggagattgcggctgcttgttcatctctgccatgtttgcattaataatattctcccattgaaccggaaagccaagtgagaagtgtttggacacctcgtcaggaaatccattcagatgcattttagaaatgttcggtggacgtgcaatcattatgatgataccatcttcagtctcaaggtcaccactagcatgccgtgttttaatggaagcagaagtgaatcttctaccagctcgactcgtcgtggtgttggagccgacgacgcggaccttgccttcctcgccttcaaccctctccagccaccagtcgtcgagctcgacgcaggcctgcaagtaggacacggcgggggcctccttcgccgccgccgccgccgccgcgccgtcgccggctcggggttgggtcgccatctccggcggtggagaggggaacgagttttccccgctttttcctttta

SEQ ID NO: 94942 - DNA, 376 bp, Oryza sativa
  Clone ID: PAT_MRT4530_93184C.1
agataaaaaaaattttaaacaaaaaataagcttttatctgaaagtggggttattcaaaaatacatgcgagttgtacaaacaaccccatctatataaatacatcctgactcacatacaaatggttaatttataaacaaatttctagacataattattagtttcttttaaaaatttacctaatttcatgttaaaactcaaaaaactaatattaacaacaaccattactatttttacttgcaaaacaaactcactatacaatgcttaaattcttagcatataactgaactccttacatatgtccaaaataacacaacatctaaatccaaaaaattgaaattaccttctacatcagagctctgttttttattataaaaat

SEQ ID NO: 94943 - DNA, 610 bp, Oryza sativa
  Clone ID: PAT_MRT4530_93185C.1
tcacaaatcatttcaagaagctcacttcagcaattggctataagaatagaacttcaacctaaggaactacctgatgcaaagattgagctcctcctgccatttacaacatcagaagagaagaatgcattatgcaaatggttacatgcggtgatattgtctactggtttctcatcaaacattaggaagctagtcttgatgaaagatttgaccatatccagatacaactttcatgactgtcatgtgatgctaacaggtctttctccctaatactataagggcaatcaaaccaccttagattaaggtggtgatcacaaatatatgttactttttaaattgaatttcacagaaattatttgatactttggagttggggccattgtagaaatttgtgaaagagaccgtatgccagcttgagatgtattttgctccattatttttcaatatgatagtgcatctaattgtttagattgtctctcagattattgaacttggtcctttatacttacatcaaatatgggatacgagcgctacatgtctattatgaatggctatgtacggaatcgtgctcacctatagagatcgataatagaggaatacactactaaagaat

SEQ ID NO: 94944 - DNA, 461 bp, Oryza sativa
  Clone ID: PAT_MRT4530_93186C.1
tcaacttatagggaagctgggtacagcactggcaggtacccggtgccagggaaattcccccgggtcagacaccaacaggcggtcacagcactggaaggggcagtttaccagatggtggatgcaacaatcgtgtgtcgcacaattgccaccatgtggcagctgggctgggcaaccaagctttgttcaatggattggccgtggagtttgacaacatggtcccaccggtattgggaaaaaagagtagccggttgcaagtgatctgcaactgtgggcatcggaagtggtaccatccaggctacattgtcctttggttgcaaaaatgaatgactggtgcaatctgagcacattttggttcgctttggttggttatttgtttattatatcggatgtcaccaaattgatgctaactggtcaccaatgtgagaacactggccatcgttccatttcccaaaaaaaaaaaa

SEQ ID NO: 94945 - DNA, 387 bp, Oryza sativa
  Clone ID: PAT_MRT4530_93187C.1
atggcatacaagcctcccgaaaaaatgatagcaagaaatgtaaggcacaccgctgcagcgtcactcttccttcctctagatatgtcattggatattgtcgaggaggatggattgggagtggaggtaacatccaatgccatatctagaggaaggaagggcgatgtcgtagcggtgtgtgttcgggcaaatggggaggctgcagctgtgatcagatgtgaatgggtgacggaggatggcaattgcaacatcaggaataatcgcccaaaaagctcggccagcacgggcaaaaaatcgaagggtttgttacatatgcaaaattacaactctaccccttccacatcactatttctatggatgattatacccttctacgtttctatgtggtag

SEQ ID NO: 94946 - DNA, 411 bp, Oryza sativa
  Clone ID: PAT_MRT4530_93188C.1
gccccagcaacatattaaactgcgccatcttaaggctttttcccccactggggggcggggtcaatccccaaaggaacgtttgtttcgggcagaaaaaataccccaaggccacccagacaagtggtgaaagtctgaaccttgagggagaaaacccggtttaaatgctatcttatttcgggggcagccttccgggtgggaccgctgtcccgctatgtgcctaacccttgaccttagaaaaggtttggcccttccaatattaggcaggggcctgcccttaaagcccattgatagggctggctctcaaggcttcttgagttcccgggttttgggaactgccgcctcttggttaggccaggaagagaaaagggcatttgggagctccattgtgttaacggacaaaacacctaagcc

SEQ ID NO: 94947 - DNA, 1249 bp, Oryza sativa
  Clone ID: PAT_MRT4530_93189C.1
ccggccgggctctctctctctctccaccctcagccgccacactcccatgtcccatccactctcctctcctctccggcggtgggtacaggcgatgacagcgtgcggcggcgtcctcctcctctattgccgctcgcggtgccggcttactctcccccaccgcttaccacgccgcctccgtctccgccgtcgccaggctcgggagcggcggatctgccgccgatagcgccggcttccgggccggcatccgtctccgccgctgctgggcacgggagcggtggatccgccgccaccatccactcccccaccaccgccgatcccctctctatgcatgcctcacgccgtcgcataccctcccgatttccctctccaatgatggatggtttggtttgggtttggtttgtctgcttgcgagcagcttctggttgctgtgcgtgttcggatgtttctagtttctctcccccaatttcgtgcgttctggagataaattagcgggaggctgtttccagtttttctcccccaatttcgtgcgtttctagtttattatttttcgcggaagtctgttcggatcaccactgggagccaggcacttgatgaggtgcttggcggtaacatagtaacatatatagtcctccgactttgttatgatcagttgttccattattttgttctaatctacttgcatttttcaaattttcaaggagggattgaagcactgcatcacagaggcatttggagagtttcggtgagcaacccacataggctgataagctcattcttcctcacacttcttccatggccacagaaacagctagccagatgaaagaaactgtatctgctgatgctaaaaaagaaaagaagcaaactaagtataaggatgctccacccactgcatttgatcttttcaagatgtgccattgcaacagcaatacgagttttaatgagcctgtaaagaatgttattgctgagatggaagttcattgataatcctgcacaagaagggcaagatatgattggactttgtagatatggtcagtgatgtagaactttgttttgctatctaggatatggtggtactgttatgttttgctcacccgactgaacctagtttggttgtaagatttgtgttgtattggatgtttgtcgggttgtgctatatgggttgttattgtgtttgattgttgggcctatatgggcttagcacacttgttatttgatactaatataaatgaatataatatgatgggctgcc

SEQ ID NO: 94948 - DNA, 815 bp, Oryza sativa
  Clone ID: PAT_MRT4530_9318C.1
aactcggaatactcttcattcaatgtctcagaccattctaaaggaaggagcatgcttgttgctgcacttatggacatcatcacttccaactgcgataatgcggattattcatcatttcagcctttattgccttcagatgctgatacaagagatattgcggcagccatcgaagtcattgagcaaggggggatgcattttgatgaccatgatgataataacagtgatgatggtgacagtggattaaaaggaatagggattaaggtacttggtgggactactgtcttgggattctctagagaaataaactcattggaggtgggcactcggatgatgctgtacccttttgctacttgggctcttgctaattgggctattgcatctgatttaaaccgttctcgtattcaagaacttgacagtgatggacatactgtcacaactgcactgaaagcacctgaaagaactgtcaagtggcatggagccatggtggcgcgagctcttttggaagaccagagcttgactttggctccttctgtccctgactggtgctcaagtcttcttttgacagcttctcgggctgctgagaatggtgacatggcattggctcaaatgtcactatcaactttcctattatccatgataaggtgtaatgagtcaaaatttgtgatcagacagaagggtcttcatcttcttcgtagtatcgcaaaaaagatagaaaatgagaatgctcagagcaggatgaaggaatcattagcagtggcactgagtttgctctatgctggtgaagttccgttgtcacttgaagaaactcaaagatg

SEQ ID NO: 94949 - DNA, 4737 bp, Oryza sativa
  Clone ID: PAT_MRT4530_93190C.1
ttagtcctgtctggttccacccctgcactggaggcaccattgtccaccgctgctccgtcttccgacgcctccacctacaagagtagccgtgatgaggatgccaccgcctcggactcttgctcctcttccagcataagtctgttcttcctccctcgagttgtcagcttcctgtagctcacccagcaacgtcaggttcctgacaatcccctctccttgagattgggcttgtccccaagccaacgctgctggaaagcgctgacgcaaatcaacaagatcttcccaagtctcctgccctgcaacatctccagaccaacaaactaaaacttgaggtattaatgacttaccccgttgaacctgacgagtgttcagaataacttcagggaccttaagttgacccatttcaggaagttgaggctgcaccactttggagaacccagcagcagatttcagttgagaaacgtgaaagacaggatgtatagaactgtcactaggaagttgaagatgataagctaccttgccaaccttggccaacacttgatagggtccaaaatagcgaaaagatagcttatgatttgccctccgtgaaacagatgattgcacataaggttgtaatttgaggtagacgaaatcacccacttcaaaagcacgaacgcttctgttcttatcagcataacatttcatttgctgctgagctctgttgggatgctgtttcaagagctgaaccataagttttctttcttgtaaccaattatccagatcaggaacagaacaagaatcatcacggataccaaaatgtcccggaggatagccatacaagacttcaaaaggagatttcagaagtgttgaataatatgaagtgttaaaccaaaattcagccaaataaagccagctgctccatttatgaggcatagagtgcacaaaacaacgcaaaaagatttccaaacactgattcacacgctcagtttgcccatcggtttgagggtgatagactgtgcttaggtgcaactgagttccagacctagcaaacagctgccaagctccatcaggaactggcaaaggttgcaaaagaccaggatatttgcttctgttaggtttcacttgcaaacaaactccacagcccttgagtgccctttgaacagtctgcttcattttgggccaggcaaaaagggatttaatcctccggcggtggaaacagcagtgtgcggtacggtggattgaatggtctgattgccgatcgatctcatctgcctgcaattcagtattgtaaccaatccagatcctacctttgtatttgataatactattatgaagagagaaaggaggtttggaattgacagatagggacagttctgctaaaagttgcttagtttgctcatctagcaagtacccagcagccacttcttggagccaaacagggacacaactagaaactgccatgaggtcaacagggtccaggttgtatttccttgaaagtgcatctgcagcagcattgctagatcccttctacagttacagtcagacgagatgctatacaaatgagaaatgagctttatgctgccaaggggtgtgtaacctttgctcatttaaatgcatcaagctgtgatgatatgtgagaataataaattcagcatgttggagataagacctccagtgatccacagctaaaagaatggccaaatattctttttcataagttgataatcccctatttttaattcccaaagccttgctcacatatgctataggatgaccttcttggcataagacagctccaattcccccatcactagcatctgtttctatagtgaatgttttagaaaaatctggcaaggctaaaactggagcagtaactaaagccaccttcaaggactgaaatgcctgattagcttcagaggaccggacaaaaggaacatccttcctgagtaactgagttaatggtttactgatgactctaaaatttttgacaaactttctgtaatacccagccagtccaagaaaccctcttagctttttgacaatgtcaggcactttccaattaacaacctcttcaatttttgattgatcagtagcaacccctttaccactgatgatgtgtcccaagtaagatagttgggactgaccaaaggaacacttactgagcttcactttccattggtgcttgtgtaacaggagaaacacttccttgagatgagtgagatgagactgcatgtcctgactataaaccaaaatatcatcaaaaaagaccaaggcaaatttccttaaaacaggtgcaagagtatcattcatggccccttggaatgtagctggagcaccagtcaacccaaatgacattaccatgtactcacaatggccagtatgggtttggaaggcagttttatgctcttcaccttcctgcaacctaatctggtgataccctgcccttaagtctaatttggaaaagacctgagccctagataactcatccaaaagttcatcaatgactggcatgggaaatttacctttgacagttatggcattaggttgtctatagtcaatacaaaccctccatgtaccatctttctttttcactaaaagtgcaggagaagaatatgcactgctgctaggtctgatcaccccagaggccaacatctctttcacctgtctctcaatttcgtccttctgtgctggattgtgcctatacggcctgatgtacacaggtttggagttaggcaacaaaggaattctgtggtcacacgctctcttaggaggtaaaccagtaggttcagcaaaaatatcctgaaattcagataaaagaggcctgaattgcaggggaacttcaacaagtttatctggaggtagatgttgcagttgaaagacctgcatgactgaaccgagatttagcatttcctgaaatttttccacttggaacttgtgagctacttgggtgtccaagaaagaatgagaactgcctgaatcgatcagcattagcacttcagttccttgaatacacccttttatcttgaaagaagtagcagactcagtaccactgatagcttgcagggatatagccatcaggttaccttcttccatttcctgctcatctgaatcaacagaattaggactcaaggtttccaatagttcctgaattacatgaagttgaacagaggtagcacatttgtgttccttactccagcgctccccacaagtaaaacacagccccttggaccttctataagatctcagagcggctagcctgtcatctctagccctggtactgtcagaccctctcctgtcatcggatggggctgatgaagtgcccttaacaacagaattagaatagccttgaggagagaaggacttcaaagagttcctgacaagaataggctgatcagactttttgtgactgacagacttggaaccttccaaaatttcttcctgcaagaaagccagtgagcaagctgaatccagatcttgtggtttctgcgtcagaactgcagacctgatttcctgtttcagcccctccacaaacttggtcacaaaataattgagaggcagtgaattgttgtaagccaacagttggtgcataatgctgtcaaatttttcagctatcctgacccaattcttagcatgtactccatagatgtcaaagtattcttcacaattccacttccacatttgaggattaacaccatcaaactgaggataagacatcggtggaacactaccccccaaacccatcacaccaacagaatttgctacatcagaaggggatcgatccaaatcagtcacatcagggaagggaatagaggtttttagagcacctgtttgattcagcatagaagcaatagcaggttgctcttgaggaaattgttgtacatccaactgcagctgctccaccttgccttgcaaatccttcaccgaaccttgtagatcatccaccctcttctcgacagctgggaaacgagattctaccactgccttgagcgccatgagctcagccctgctcttctcctcggaatgctccctcttcttctcactttcctcgcgcttcttctccgcctcctccatcttcttgagaagaagatccagtttcccatcctgatccatgatcttcgcggcttgcttggtgacatagcgaggtttctcgtaagtgcccgtggttgacgtctcgttccgctcacgctgccggcctcctctgtttgtgtttggtgaatggtgtttgatcggcgttggtgtttggtggatgtcgtgcaggtcgagcagatgcgcgcagggctggagaaagcgcaacagcgacacgtccgggcgctggcggcggccatggcgcgccggtgcgccacgacgggtagggtgcgtgcggcggaggccaagctggatcgcgagtgctgctacaacgcggagctggaggagaagctccgccggatgagcgcggaggagcatgcgtggatgggtgtcgccgccggcctccgcgccacgctcaactagctcctccagtccccttgtgccgtcgccgccgccgcgggggagggcaacgccgaggacgcgcagtcgtgatgcttcgagaccccaggcggcgccgccgccgccgctgccgccgacgccgacgcgatgtccggggcgacatcgtggaaggcctgccgtgtcgcggaggcgtccgtgctgctgctcccgtgccgccacctgtgcctgtgtggcgcctgcgaggctaccgccgacgcttgccccgtctgtgccgccaccaagaacgcctccgtccat

SEQ ID NO: 94950 - DNA, 412 bp, Oryza sativa
  Clone ID: PAT_MRT4530_93191C.1
atggcggcgccgccgcgggcctcctcgccggtgcgcgcgtgcacccgcgggtgcgcgcacggccgtcgagttgctcctaggcggtgcctctttgcccctcccccctccgttgccggcgtcaacgacggccggcgacgaggtaagattagggatgaagaggaagtcccggccatcgtcgttgtcgtcgctctgcttgacgtgggcggcggcggctatggtggtcgtgacggcgacggtgctgcgccgcagtggtggtcgtaggggatcccggcgaggtcgtggcgtggcggtggagtcttcccgtcactggctgcgccccctcgatcggttagggtttatggggtggagtggcggcggcgaccatggccgggacttaacacactcatccgatccaaaatccacagcaacaatt

SEQ ID NO: 94951 - DNA, 275 bp, Oryza sativa
  unsure (1)..(275): unsure at all n locations
  Clone ID: PAT_MRT4530_93192C.1
ctcaagctctaattccgcacgncnatcaccacagttggcggcngcaggtctnnacggccgncgctctacnggcntctgacaccggtggctcgcggccanncctccangacgnncccgtttanncacgttcntccccccccnggccgccggggnnganctgacnnctncngcgnntctgcccggttccaatnccgtgccctcgaccaccgntncggggnncncgttccgcagggnnactgatnccgcngcgggcnaaggtttnggggtgtttcgga

SEQ ID NO: 94952 - DNA, 2447 bp, Oryza sativa
  Clone ID: PAT_MRT4530_93193C.1
cgtcttttgctttgctttcaggacatggtcacctttctcaggcagcaagcgtaagcaaggcagaggagagggaaagaacctctctgcagtgctgctgctgctagcttgcagaaaaaaaaaactctcatcttttgcaggaagagacatcactgtttctgcattcgtgtgcatttggattaagctttgcttatccctttttagtggagattgttgagtatatcaggtctatatattggcagctctggttggagatagacactcacactgagccaagatggggagtttgcacaagttcagtgttattctcctcatgttatgttttgctacgttggggagcgctcagtatgtcaagtataaggatccgaagcagcccgtctctgttcgtgtcaaggatctgctcggccggatgactctcgctgagaagattggccagatgacccaaatcgagagggagaatgccacggcggagcagattgccaagtacttcataggtagtgtactgagtggtggaggcagtgtgcctgctcctcaggcatcagctcaggcttgggcttcaatggtgaatgaaatgcaaaagggtgccctttcgacccgactaggtattccgatgatctacggtattgatgccgtgcatgggcacaataacgtctacaaggctacaatcttcccccataatgtcgggctcggcgctaccagggaccccgacctagtaaagaggataggagaagcaactgctcttgaagttagagctactggaattccctacgtctttgctccttgcgttgcggtttgcagagacccaagatggggacgctgctacgaaagctatagcgaagacccaaaggttgtccagtcattgaccacactcatctctggcttgcaaggcgatgttccatcaaatgatgtaggaagaccatatgttggtggaagtaagaaagttgctgcatgcgcaaagcactatgttggtgatggtggaacggtcaagggaatcaacgagaacaatacaatcatcgatactcacgggctgttgaccattcacatgcctccttattataattctatcattagaggagtctccactgtcatggtttcatactctagctggaatggagtaaaaatgcacgcgaaccatcacctaatcactgattttctcaagaacaagctccgcttcaggggttttgtgatttctgactggcaaggcattgaccggatcacttctcctccgcataagaactattcttactcaatcgaggctggaattggtgccggcattgacatgatcatggttccttatacctacacagaattcattgatgacctgacagagcaagttaacaacaaaattatccccatgagcagaattgacgatgctgtctacaggattctccgagtcaagttcaccatgggtctatttgagagcccttttgctgactctagcctcgccgatgaacttggaaagcaagagcaccgtgagctcgcgcgcgaagcggtcaggaagtccttggtgctgctgaagaacggaaaatcctcctactctccggtgcttcccctcccgaagaaagccggtaaaattctcgtcgcgggaagccatgctgatgatttgggcagacagtgtggaggatggaccatcacctggcaaggacagcccggcaacaacatcactgctggcacgacgatcctgtcggcgatcaaggccaccgttgatcccagcacgacggtggtgtactcggagaacccggacagcagcgtggtcaccggcgacaagtacgactacgcgatcgtggtggtcggcgagccgccgtacgcggaggggttcggcgacaacctgaacctgacgatcccggagcccgggccgacggtgatccagacggtgtgcaagagcatcaagtgcgtcgtggtgctcatctccggccggcccctcggggtggaggcgtacatcggcggcattgacgcgttcgtggcggcgtggctgccggggacggaggggcagggcgtggccgacgtgctgttcggcgactacgggttcaccggggagctgtcgcgggcttggttcaagtccggggcccagctgcccatgagcgtcggcgacgcgcactacgaccttccccccacgttcgctgccggcttccgcagtaagggtcacaccgcttcctctgcgcgcgcggcggtttgtgagtggcgttggtgtggacgtgaggctgtcgtgacgcgagccagggctaggatgcagtactacatacacacggcgttggggtggatatgttggagatggggggaatgcaataacgatgagagtgtgtgacgtgccctagtcttgagtgagtcgtctgttgttagtgtctatggtgttgggttgtggaataataaaaaatcagatacagcttttgccttctgtgtgagatgttatttctttaggcagaaaaaagcaaaaaaaaaaaaaaaaaaaa

SEQ ID NO: 94953 - DNA, 2148 bp, Oryza sativa
  Clone ID: PAT_MRT4530_93194C.1
atgcttcggcgcgcggctcggttgaagcggcgtaggaggaatttggtgcaggaggactcgccgtcgtcggcgccagatccggcggcagttgctctcgagaaggacgccctatccggcgccggcggggctccggtggaacccagatctggtggctgcgcagctcggcaggcggtggacgcgagcgttcgcgcggtggcggcggcggcgagtgcccgggctgcgtgcgaggactcgtcggcggggaggcttggggggtgtcggatcagccggtacacctccgcctccgtcgcgcgtggagattttgctaacaatcagggggaaccaatggcgaagacgaagaagccgaggagctccgccccagatccgccagcgcacctcccatggcaccacccgccggcgccgccgatctccaccgcgctcctcatctccttcgccgcgctcctcctccgcgtgctcgtctccgtcgggccctactccggccagggcgtggcgcccaagttcggcgactacgaggcccagcggcactggatggagctcaccctccacctcccctcctccgactggtaccgcaacacctccgccaacgacctcgcctactggggcctcgactacccgcccctctcggcctaccagagccgcctccacggcctcctgctcaacgcgtcgctccccgacgccgtcgccctccgctcctcccgcggcttcgagtcccctgaatcgaagctgctgatgcgctggacggtgctgtcgtccgatctgatggtgttcttcccagcggcgctgtggttcgtctggatgagcctttactttgcaccggcttttttcggacatcttttggggaaatgtatcaagcggaagtatccaattgttgaggtcatgaaatttggttttgttgtactgggaacctttgcttttgtttggtggccatttttgcattcttatgaggctcctaggcggccgatctcaccaagccgccgtcgacggtgcggctcgggcgttgtgagcgcggactcgtcggcgccaggtccggcggaattcctctcgtgggcgtcccatccgcgccggcggggctcaggcgggagccggatctggtggctgcgccgccgccatccccgctgctgctgccctttgctctaggcttcgtccaagggagaggcaggggcacgaggggagcggcgctcgcttccccttcccgtccgagcgcacgcagccggagcagcgctgctagcaaactgcttcgaccgcctgatggaggaggcggaggcaaggcccgcgccgcctgaccccaacgacgcgaggcagcggttcttgttggagctcgagttcatccagtgcctcgccaaccctacctacatccactatctagcgcagaacagatactttgaggatgaggcgtttatcggttatctcaagtatctcaagtattggcagcgtccggagtacatcaagtacataatgtatccgcactgccttttctttcttgagctcctccaaaatgcgaatttccggaatgcaatggcccatccagcaagcaaggaagttgctcataggcagcaatatttcttctggaaaaactataggaacaataggctaaagcacatcttaccccgccctcctcctgaaccaactcccacgccagcacctgcaccagcagcggtgcccccatcagcatcagtgccgtcgactgtggttccacctgttgctgcacccccatcagctttgctacctatgtcagcagctggtgcatctgccatgtctcctatgcagtttgcaggaactcctggcaccaatatcccaaagaacgacatgagaaatgtcatgggtggacagggtggtagaaagagaaagataggctagtgaaactgtggaaaatgctggtcaactcaaggacaacattgtgcaagggaagagtaatcttcagatttttcttttctctgtaggcctttatttcagactcagacaatttagaagcttaacagttatttgtgctgctggagatgtaatttagataacaatatgccatgtacgcttggtccttgaatgattggctcatttatgtggccttgtagttagatagtgtactaatattttgttcaggcctacgtttagttccaacttttaaaaaaaaaaaactcgagaccctcgtgc

SEQ ID NO: 94954 - DNA, 333 bp, Oryza sativa
  Clone ID: PAT_MRT4530_93195C.1
atgctcgcgggcgatccggcggcggcagaggcgttggcaccagcgtcggtgctcgtgacggagaaagcagcggcggaggcgactctcgcaggcggatctccggcaacagcaactccatccgggtgtttcgagctttcttcccctttccatggcaaggttccattatattcttcttcccttctttcccatggcggtcaggttataagactttctagcattgcccacattcatatagatattaatgaatctagacacacatatatatctagattcattaacatatatatgaatgtggacaatgctaaaaagtcttataatacgaaaccgaagaag

SEQ ID NO: 94955 - DNA, 471 bp, Oryza sativa
  Clone ID: PAT_MRT4530_93196C.1
tttttatcaaaaggcagttgctgatggcgcagatgtcattgactgtcctgttcaagttaccaaagatggcataccgatatgcatgagctccattgacctaggggatgttactactgttgcaacttcacaatttgcttctcaaacaactgttgtaaatgatattaaggctactcccggattctactctttcaacctcacttgggaggatatttcaaagaacctgaagccaaagatatcaaacccaatgtctaagtaccaagtgtacagaaatcccagaaacaggaatgcaggaaatttcatgagattgtcggactttttggatttcacaaaaggaaaggatttgtctggagtcatgatcagtatagagcgagctgcattcatggcacagaaacttggctttggcgtttgttgatgcagtaatcaaagctcttgatgatttccgttacagcaaacaaactacccagaaagtaa

SEQ ID NO: 94956 - DNA, 175 bp, Oryza sativa
  Clone ID: PAT_MRT4530_93197C.1
tcggtgatatctcgccaaaggcagcgtgtgacgcggcaatgtttgaatcaaacaggctttactcccacataataaatataaccacaatgacatccatacttttcccagaggttatggataaacaataggaggcgggggcggtaggttactagaatctatagggaaactgcgggag

SEQ ID NO: 94957 - DNA, 530 bp, Oryza sativa
  Clone ID: PAT_MRT4530_93198C.1
ttcgttaaaggggagaactcatcaaaggttgtgtctgaccagagcaatctagacccatcttcaaatagattccaagctcttgacacaactcaacccactgagatggttactgatcatagggaagctttcaatgctgttcaaacttcacaaagttcagattcagtggctgatgagatggaccatgaccgtgatctggatggaggatttgctcgtgatggtgaagatgactttatgcacgagattgctgaagatggaactccaaatgagtccacaatggaaatcagatttgaaattccacgaaatagagaggatgatatggctgatgatgatgaggacagtgatgaggacatgtcagccgatgatggtgaggaggttgatgaagatgaagacgaggatgaggatgaagagaacaacaacctggaggaggatgatgcccatcaaatgtctcatcctgacacagatcaggaggaccgtgagatggatgaagaggagcttgacgaggatctgctagaagaggatgatgatgaggg

SEQ ID NO: 94958 - DNA, 1980 bp, Oryza sativa
  unsure (1)..(1980): unsure at all n locations
  Clone ID: PAT_MRT4530_93199C.1
atggctggtctgaagaagatggaggaggtcacagcagctgctgctgctgttgcagcgagcagtacggccgagaagcgtgcggccgccgtcgtcgtccccgacgcggcgctgacgatgaacggtgccgccggcgcggaggagaagacggcggcggctgcggcggcgccggaggatctgccggcgccagccgcattgtccggctggccgaggagggtggggctctacctcttcgtcatgaacatcaggagcgtgttcaagcttgacgagctcggatcagaggtgttgcgcattgccgtgccggcgtcgctggctctggcggcggatccgcttgcttccttggtagacacagcgttcatcggccgcttaggttcggtggagatagctgctgttggtgtttcaattgccatatttaaccaagtatccaaagtctgtatttacccccttgttagcgttacaacatcatttgtggctgaagaagacgctatcatcagtaaatgtatagaagaaaacagcagccaagatctggagaaagcttctcctgtggattcagaaaccaacaatctgcctgtatctggagaaaagaacaccgccttaattcaccacaaatctgaactcgctatttgtttattttgtcaaactttgtttccaggtcctgataaggctgtcttcctggtcttttcagcaaaatttgtattgaatatcatgggtgtcaagaatgattcaccaatgctaaggcctgcagttcgctacctaacaatcagatcacttggtgctcccgccgtattactgtctctggccatgcagggtgttttccgtggtttcaaagacacaaagacaccattgtatgccactgtggttggagatgcagcaaacatcatactagacccaattttgatgtttgtttgtcacatgggtgtcactggcgcagcagttgcccatgtcatttctcagtacctgataacgatgatactgctgtgtcggctcatccggcaagttgatgttatcccacctagccttaaatccctcaaatttgggcggtttcttggatgcgggttcctgctgcttgcaagggttgtggcagtgactttctgcgtcacgctggcgtcgtcgttagccgctcgccatggacctaccatcatggcggccttccagatctgctgccagctctggctcgccacatctcttcttgctgatggacttgccgtcgctgggcaggcagttcttgcaagcgcattcgccaagaatgataaaggcaaggttgttgttgcgacatctcgtgtactacagctgagcattgttcttggcatgggtctcactgttgtgcttggggttggcatgaagtttggggctggaattttcacaaaggacatcgacgtgatcgatgtcattcacaaaggcattccttttgtcgctggcacacagacgataaattcactagccttcgtgttcgatggcatcaacttcggagcatcagactacacatactcagcttactccatggttggtgtggctgctatctccataccctgcctagtatacctttctgctcataacggattcatcggtatatggatcgcattaacgatctacatgagcctgaggaccatagctagcacttggagaatgggggcagcaagggggccatgggtgttcctccggaagtgatgggttttcaaccttctcatggcgattattattaatcctcagcggttttgctgggtagatagccctgccatactnagtcctagctctccatggtaattaaaaataagtccaggttcttagcgncatgtcggtggtggtcgaggtttattgcttcgtgaatcggggatcgtatctgactccattgtgggggagaggatancaccggttctttggtgtttgttgtgtgccggcgatggcaattgtttctgtgatatatgatattgaagtattatacattaattagtagtacattggatcaaaaaaaaaaaaaaaaaa

SEQ ID NO: 94959 - DNA, 3583 bp, Oryza sativa
  Clone ID: PAT_MRT4530_9319C.1
ctaggattctgattctttgagacgcgatttcaatattttctccaaaaatgccaaggtgtctgcgtacgacgggtcgttcttattgaccggcttacacgaatttatatgatcagtggacgccaggacaacaagttccccgtatcctgggtatgcagattcaatcggtactatctccatccgaagtgcccaaccaccgtaaccttcaacgatcggtgtgacttgagtctcactaaaactaagaacattgagcaatcctttactatggcgttgccgcacaaaatcatttaactcaacaagtcttggggatccgcttcttaactcgccaatcgatggagctggacgaaacaccaaacccatacgccatggcatgtctgcgagcctactaccaaaatgtggacagctatagaaaactagcccattcgtattgttcaggaacttgtcataattgttcagcttcgcttgatacagcatctgcttaaccaccagtcctcccatgctatgagttacaaaaacaacaggacgactgccaatgccagcagcaattaacttccttaacagcatagagctcacctcctgaagtggcaagctggctccggtccattgtgtcagattggtcttgtacttgactgtcaaaaaacgagcttgaggaaaatctgctgaaagccattctcttggccaacatgttccctctttgccagcatcttcatctatactttccaccagacctgctttggtggttgatgacttgtcatcagctatccgccatgagttgaatggcccaccacgaagaccatggacgaacacgacatccattaaagggggtgtatatttggctctgttgcttggagcatctccagtttcagagtcaccaccttcttcagtgcaacagtcatccttaaatttctttcttgaaatttcatggccatggttgtccaaatgaacctccagcgccaactctggattcaaacgtcccaatgcatctcccacctcagcacagtcgcctttacacccgcctcttgcatccgtgtactcatcataaccgctgccgctatgtggcacatcagaacagaatgcatgtaacgacgttaacctgcattaactgtttactagtatatcgtcgcaagaaattcggtcacttgcgcatggctctagtcacttcgaccttaccacatcagaaataatttccttctttgaattgggtagaagagagagaatggtaaccagccggccagcatgccttcgaatatgagctgctggaggaacccgtacactggagggatcagaagtagtgtcattagaggagtcattagaggtagacacattcttgtcttgcacttctcgaattcgtgatgcatcatatgcttcgatcgcagcgagtttctcataatcatcaccaaggaggatgcgcctcaacagggaaagaactcctaaatcagcaattctcttttggcatgcaccatcctcagaacaaagctctgccagtgcttttattcccttcagcgtagcggatgctgagtcagcagcatcaaacttaggtgggttctttttattcaagttcttcagagctgtagcaaatggttcaagagagagaaaatcgaaaaggggtactttgtcaccagaagcaggatcatagtgtgattgaactattgccaatttcacaacagcagtagctaattgattcaagatctgagtcgcagaggaagcattatggtgatcaacttgattcttcactctctctggttgaggctgggtggttcctttcaaattctgtgtcttgttatctccaagaatctcagaaagcacgagagccaaccatccctgagaaattggtacggaagctggtccatagtcttcaagaatgcatgaaaggattttaatagctgtgagatttgtagtttctgaaacagatttatcaaagagccaacgaagaagaatgccggaccatctttgagtttcttcaagtgacaacggaacttcaccagcatagagcaaactcagtgccactgctaatgattccttcatcctgctctgagcattctcattttctatcttttttgcgatactacgaagaagatgaagacccttctgtctgatcacaaattttgactcattacaccttatcatggataataggaaagttgatagtgacatttgagccaatgccatgtcaccattctcagcagcccgagaagctgtcaaaagaagacttgagcaccagtcagggacagaaggagccaaagtcaagctctggtcttccaaaagagctcgcgccaccatggctccatgccacttgacagttctttcaggtgctttcagtgcagttgtgacagtatgtccatcactgtcaagttcttgaatacgagaacggtttaaatcagatgcaatagcccaattagcaagagcccaagtagcaaaaggtacagctacatgctccctctgcaaatcatcccagaggcctggagcagcagcagaacttagcttctccactagtggagaatcagtagcagtttcttgcatcaatattctactattcgaagctccaacaataccatcatccgagttgcccacctccaatgagtttatttctctagagaatcccaagacagtagtccctccaagttccttaatccctattccttttaatccactgtcaccatcatcactgttattatcatcatggtcatcaaaatgcatccccccttgctcaatgacttcgatggctgccgcaatatctcttgtatcagcatctgaaggcaataaaggctgaaatgatgaataatccgcattatcgcagttggaagtgatgatgtccataagtgcagcaacaagcatgctccttcctttagaatggtctgagacattgaatgaagagtattccgagttcttcttgccgcgttttggctggtaagagaagatgaattggaggaggcagggaaccgctcgtggtcgaccgagcacagcaggcgcaacccagggatcggccagcaggtgcgcgagcgcccgcgcggcctccgcctgcgtggcccgccgcacgacgctctcgagcagccagtcgacgacggcgccgccccccgccgacacgatggccgcgcggcgcgcggcgctggccgccgcgatgtcggcgagcagcgcggcgacgcggagctcgaacccggacctcacctcgtggttggcggacgacagcacggacatgagcgacctgcacaagcaccttccccgccgcgcaggtgtgctgcatccgctccaccacgcgtgccgcggacgccctggacctctccaccgtcccctccaggtcccacgcggagatgtggtagatcgtccccgcggccgtgacgagggagagcgtggatagggcgaggagcggggtcaggcggcgtcggggccccccgccgccgccgccgccgcggggcgcgaggtggtggggcgggggaggcgcggccacggggagcggcgccgacgaggacgtcgtcgaggtcgacggcgccgaggcgggaccgctcgagcagtgcgtgcgatgccgggggagacgctggaggtggacattgcggaggcgattgacgacgaggagcccgcgccgcagcat

SEQ ID NO: 94960 - DNA, 687 bp, Oryza sativa
  Clone ID: PAT_MRT4530_931C.1
atggagccggagcgggaggcggcgggcgaggcacgcagcgcgtccaccagcggtgccgccgccacgagcgggagggctccgttgccgcaacgggatgccgtcccgtttccatcgccaattcgcgcatgtggacgtacatgtggtggtggtggtggtcagttggtcacggcctcgcgagcggttttgctgcttgccgatccaacgctgaatcaggctgatgctgctgtgatccatccatcagcgtcgcgtggcgttggcagcacaaaagctagaaaaacactggagctgaaattgtctggagctgaagctggagctgtgccaaagtcccggcgtgtccaaaagcaacgcgggcggcggcgccaccaacgccgtcgacctgtgcgcattagcgcatataacacatttaccggcgtgtggcggcgagacagcggcgccggaagccgtcgccatcaacggcagcaaatcctggttagcagcagggggaggaggagtcactgcctcctgttctaccgtactgtcgaggacgacgagaaatttcaaaactttggtgtcacattttctccagtggttgcatttataatcagagttacagctgacagtgaattcagattcaccaaaagtgtctctgaaattttgcaaattgttgttctaaatctagagtatattacagtgcaagtgtacaacaac

SEQ ID NO: 94961 - DNA, 822 bp, Oryza sativa
  Clone ID: PAT_MRT4530_93200C.1
gttttagtaactgggtggtgagatctgaagaaggtagtaactgggtggtgaaaactattcctttttttccaaggacaagtgtgaaagaaacttaaccatgagaatgttccatactattctactgttccatgttccttttaactgtgaaacacagcaaaggacacggacgcgtgggcatgatgcatatgtctcacatgtcttggcatgtataactctattgttttgatttgctatgcctatgttctctttctatttaggtacttactagtactatatgttcaatttgcaatgcctatgcctatgcctgtgcctcaatttgcaatgcaggggttcaaagctttgtatggccacatgcgggggttcaaagttttgtatggttgtggttacaaatactgtgctactaatgtttgcttttctataggacaagtgtgaaagaaacttaaccatgagaatgttccatactattctactgttccatgttccttttaactgtgaaacacagcaaaggacaggatctcattgacatgccatggtaagataccagtaaattgcttcgcttcttttttactgttatatgagaaatgagtataactccatggtctactttatgcataagttacctttgatctgttcaagtagtttgcagtgtacttgaattctttgttcatggttatgtacataaataagtagtttagattagatattgtaaattttctctttcagcagctgaaactaaacatgcatttacaaattgtttgcatgtaatttcagaggtaaggccttgttgtcttgctgattcatgaagagatggcagtatgtttg

SEQ ID NO: 94962 - DNA, 273 bp, Oryza sativa
  Clone ID: PAT_MRT4530_93201C.1
ttcaaccccgacctacgcacaaacccgggggtaccttaatctgtccctctcacgctgcaccaccgccgaagagaccgtcctctactgcggacggtccgtcgatgtcgtaaccggagcctcgacggcaactatccccaacgccgggtggacctcaaccaaaccacatcggcgacgacgcatacgtaaccctcaacctacccgaggaagcatgccgcatcatcgtcgccgcgcagccgacgaccccctgtccgaccctcctgacctgattgagaa

SEQ ID NO: 94963 - DNA, 408 bp, Oryza sativa
  Clone ID: PAT_MRT4530_93202C.1
atgaagtgcccgcctgcgccggggagtggcccggagctcaaacgccgcggcagcggcgcagcagcagctggaggcaagcgtgacaaggaagatgaaccagtggagtacgtgcacgacgctcaaggggacaacgaggaagctacagctcccggtggctatggtggcggcgcatcccgcgccgagcatgagcacgagactgaggccaaggtggtctccacaacggtgaacctgcttcatgaccactgcatgaatgcaatggatctccaccggctcctcgtgctggcgatggcccgccccttgatgcttcatgatggcgccgccactggcaagaagtgcaacctcctttggtcggcccctggtgccgcggcacctccgcttcaacaaggggaaacaggaaagagaaaatag

SEQ ID NO: 94964 - DNA, 1245 bp, Oryza sativa
  Clone ID: PAT_MRT4530_93203C.1
atggccgggagccgcgccgcctcgaccctcctcgccgctgccgccatccaccgccaccgccggtatagccgccgccgcctccggccagggagaggagtagagaggagaggtgtagaggcgagaggtgtagaggggagaggggaggggaggggaggggaggggagaggccgtggtgaggtggaccacctaagcggcgtctgcattcgcggtcatttggctctaaaggacatgttcgcctgcgaaaataagacacccacatcaagaaaaatgcttagtgaggcattctataataattcccaggtcggtagagacaatctggagatgctgcagcaggtcggtagctacagtcttgagatcggcgccgccgaagccgccggagtcgctggcgaagagtaccgctccggcacgccgccgccggggcagttcgtgaaggagctcttgggagtgggctccctcaccctcgccatggctgcaggtacgcttgtttacaagccacctcatggccttctcttccagcgccacgtgcttgcctactacctcacgctcgtggggatcttcctcgccggagtggcggaggtctggacggcgttctggttgtccgaagcggccggtgacggccgccgccgccgtcgccgcgcgttggggagggccgtgctctgggcctccgtcgtgccgctcgctgccatcgccgggatcggcggctacaccgtcctgggacggcgaaacgaggaaattaaaaggcacaatctcgcaaaggtgggaacgcagattcgatacaacaagcacaagggcatcgattcagagccaaacaaaagagttcagaaaaatggaagattggtcgatagagccaacctgcaggcgacgatgcaggccgacagcaacaatcttgagattggcgcagcggacgaagcccaagacgccggcgaagaggagctcggctccgtgaggaagaagctcaatggagtgggcttcgtcactctcgccatggctgtaagtacacttgttcacaagccagctgatcatggcgagctcttccagggccacgcaatcgcctactaccttacgctcatggttatcttcctcgccggagtggtggaggtctggaccgcattgtgggtgtccaacgccggcgaatccggccgccgccgccgggcgtttgggagggtcgtgctctgcgcctccgtcgtgcccctcgctgctgtcgccggaatcggcggctacaccgtaatagtaaatatgttctga

SEQ ID NO: 94965 - DNA, 226 bp, Oryza sativa
  Clone ID: PAT_MRT4530_93204C.1
aatcataattaaactatagtacataatagggggcactcacacttacggaagcaggttattgccttaatcacatgtaattaaccaacatcgtctttattgtgttgaccacaagctccccaaaggttaatcataattgttacaatagtgtaacataaaaacaaacagtacaatctgaggctcaaattctgctataccccaaaagacaaaataatttaattagcttatg

SEQ ID NO: 94966 - DNA, 3311 bp, Oryza sativa
  Clone ID: PAT_MRT4530_93205C.1
tttttttttttttttttttttttttactgaaaattctcccattataaaacccttaattgggttcaacgagcttagagagtgcttaacaacttcatctcaaaacaggagcttaattaacaagcattgctgtctgtggccatggccatacacccagaataggggagctgagatgaatcgattgggtcagtaacagagctaactcatggcagctttgtcaccatgagtggcaagccgaacccgggttcaatggtcagcctgaacgccggcgagtgacggtacctcggcgacggcgagaaggcgaactttgtcagcagcctggccaacaccaccttcagctccgccattgccaggttctgcccgatgcacgtcctgggcccgtgcccgaacggcacgtacatgtgcgccgccctgcacgccgccgccacgccgttcgcgaaccggtccggccggaactcgtcggcgtcggcgccccaggcttccttgtccaggtgcagcatcagcctgggcacctgcacgatggtgccgcgaggcacctcgatgttgccaagcttcacgtccgtcagggcctcctgcatcatcaccgacgccggcgggtacagccgaagcgtctcctggatcaccatcgtcacctccattgcctcagagtgcgtggcgagtagcatcaggcaccagatggcggtgaccgccgtgctctcgtgacctccgaagtagatggtcttacagtttccgacgataaagtcctcagcctctgcagcgctgcgaccatcctgcgcaccatcaatgatggcgttgacaagactgttgtgtgagtcttggtagtggtgttgttcctttgcgacatccaggatcagtaagcggacttgttcatccagcatctgtatttcttggttgctcttggttggcaggtatttccacagtgcagacagaccaacaaacgaatcttgctgagcaattactttttggagctgcctaagcttgcaaaatatttcttctccttttgtgaagctactcccaaagcaagccctggcaattacatctgctgacaagttccgcaagtaatcatcgacaactatttccctacaccctcccacatcgtcaatcatatcctcccatgcttctaacactgtaacagttgcatcctcaatcagctggatcatacccttaatcttatccatgaagaactctggtgcaattatcttcctctgataggcccattcatcaccattctctgtaaataaacctcctccaaagagggccttgcgagatttctttagataattaggcttaccaagctctgatggtgtccaccggcctatatccttcaccatatctgggtgagaaacttgtagtatctccagagctccagttgagtatagaaacactgggccataagtttcccgacagaggagaaagtgtgggaagagggtggagatgaagttgttggtgccttgcttctgtgaaaatttgagttcttgtcggattcttttgatctcctttgtgttgccgtacagaaaagtaggcttgggaccccttatgccttgcctcctcaacttcttccttatcttcacagccctcagccataggatgttgcacaagtagaacagagctaagctctccactggacactgggtagaattctgacagaagcaaactggagcagcagcaataaaaagccatccactgcgcctgcgtgcactgtttggttgctcatcaacacgaacattgtgttcacttgtattagtctcttcgatcacaccagcagccatctgacgagttacctggacctcttgttcatcagaaatttcttccacaacctgaatgtctcttacattggttgtggcttgcttggacctttcatactctgcatcatctgtaggaagctcatatcggcagacaggacatgtatttctagaactaagccatggcaagatgcacgatgaatgataaagatgcatgcatggtagctgttttgctctagctctggtaggaattgggtctttgcagactggacaaataacatcaccatttgtctgatggcttgcagagataatcacggaggggagattttcaataaaggatgtcgctgctggtggagctcctcttctggaatcgttgtcctcagcaaattgctcaaggagcatctcaaactgccttgcatcaacatagtcatctggattcccgacaaaagttgtcctcatttctggctcttccatgtcatctagcaagttggtcacatttgctctttgacgtacactcacactccaattccatacaccatcttcagattcgtcctcactcaatccacttagctgaatatcatgtgattgctgctggtgctgggtcatggtgttgactatttcatcaaaaccagactcttccacatcttcctggtcatctgaatcccactgatccagtctagcattcatgggatcaatatcagtatctgtgttcatgtagctgtcattgtcaagttgaatggaaatcctcctccttgtcatcacgctatgttcctctatggaggtatctgaatctccaccatagtcaccaagactgatggcagattcaatttcaccaaacacagaatcaacataattaaggccatcgctctcatcatctgaagcatgccatctttgagattggcttggtgttgaattaaacgatgcatgttgcggcgcgaccgacgaagaatcaatatccgtttcacgaccttgtcttcttgctaagtcgatcagctgagaaaactcctgcaagaatgcgtcctccaggaaatcaatgcttgcagtcctggatatctgcctcctccgtgtgttctgccgataagtgctggttatttcatctctttcatcatcattgagtactgtcatcttgcagtccctgcatatggctaaagcttcaaaggtatcggtcacctgagcatccaaagtaaacggccttgtgcaaactaggcactgcacatctggttggccggcaaattgatggtcagacatggatatcccgacactgaagttggtcagcagtgcaccattggattggatgtgatagccttgtcaagcgttgctgcagcagagtagaggaagcatccccctcaggatcccttaaaatcaagagaaatgggatactagtcggggatggcagtagatttgggggcggcctaaactagggctcgtggtcgttggcaggagaggagggaaccaactgcagtctgcagcgatcgattgatgaaggtgacgccaatcgaatcagtggagcaacgccaaatacgggaagcaatggaattttgagattttggggattgatcctgcagcccgggg

SEQ ID NO: 94967 - DNA, 400 bp, Oryza sativa
  Clone ID: PAT_MRT4530_93206C.1
atgggtgaccgaccgggaagaatttcccgggtgcacacgagtgaggacaaaatgtgcagaaaagacatgtgttggtctgtgagggcagtctatgacctatgaaagctatcagatgtaagtgggcccggcttctcgcggtttcacgggcgcgtgtatcgcagttgcgcaggcatggtgcgcatggctggtgtagacctggagtggttacacagcatggcacatgcgctgtcattggacacatgggcgtggccaagagaggacgttcctggcctagggttgatcgacgggggcgtcaatttgggatgggtgaccgaccggaagaatttcccgggtgcacacgagtgaggacaaaatgtgcagaaaagacatgtgtggtctgtgagggcagtctatgacctat

SEQ ID NO: 94968 - DNA, 932 bp, Oryza sativa
  Clone ID: PAT_MRT4530_93207C.1
ccggcccccgaaaaaaacgggcccggagaaggagagagagagagagagagagagtgggggcatccagatcggcggcgatggcggcggtggcagcgatggtggtggtggtggcgctgctgctgggcggcggcgcggtggaggcggtgtggctcgacctgccgccgacggggaccaagtgcgtgtccgaggagatccagcccaacgtggtggtgctcgcggactacgccctcatgtacgagtcccaccccaccgcgcaccccactgtggccgtcaaggttacctcaccatatggtaatactgtacatcacaatgagaatgccacaacgggtcagtttgcgtttacaacttcagaagctggaaattaccttgcgtgcttctggctagacagtccggagaaaggatcaggagtatccctaaatcttgattggaagatagggattgcggcaaaggattgggacactgttgctaagaaggaaaaaattgagggtgtagaactagaactcaggaaacttgaagctgcggtggaatccattcatcacaatctattatatctcaaagcaagggaagcggagatgcggacagtgagtgagaaaacaaattctagggttgcatggtttagcatcctgtcactgggagtctgcatcgtggtgtccgttttgcagttgtggcatcttcaagggttcttccggaagaagaagctcatctaaaccaatcacttgtttgatatgtgtactccagggttaacttaccttaggaaaaagggagagtttttgtcatgtttaatttcgaacagctcatgtgatggtcaaatacagttggttgatactctatacatgaattcaatagcaatcaaccttgtactactaccgtgtgcagaacatgttcagaattggttctggaattattcagcccaaaaaaaaaaaaaaaaaaaa

SEQ ID NO: 94969 - DNA, 382 bp, Oryza sativa
  Clone ID: PAT_MRT4530_93208C.1
cagtgtaaagctgaattgcagagggagctgggtttacctataaggcccgctgtgcctctgtttggctttattggaagatcggactatcaaaaagcattgatctaattaaacttgccattccagatctcatgcgggacaatattcaattcgtcatgcttggatctggtggcggggggggggagggatggatgagatccacagaatcagggtccaggggtaaatttcgtggatgggttggatttagtgttccagtttcccaccgattatctgcaggttgcgatatattgtcgctgccctcccgattcgaaccttgtggtcctcttcgctttctgctgtggcttgtggtacagtgcctgttgttcttgggtctggtggcctccgt

SEQ ID NO: 94970 - DNA, 645 bp, Oryza sativa
  Clone ID: PAT_MRT4530_93209C.1
atggcggcggtggcagcgatggtggtggtggtggcgctgctgctgggcggcggcgcggtggaggcggtgtggctcgacctgccgccgacggggaccaagtgcgtgtccgaggagatccagcccaacgtggtggtgctcgcggactacgccctcatgtacgagtcccaccccaccgcgcaccccactgtggccgtcaaggaatacctggtaattggtaggaataccttgtattgggcagttcataatagtaaccaatctattctaagtgcatctctcagggtagaggcagccaaggttacctcaccatatggtaatactgtacatcacaatgagaatgccacaacgggtcagtttgcgtttacaacttcagaagctggaaattaccttgcgtgcttctggctagacagtccggagaaaggatcaggagtatccctaaatcttgattggaagatagggattgcggcaaaggattgggacactgttgctaagaaggaaaaaattgagggtgtagaactagaactcaggaaacttgaagctgcggtggaatccattcatcacaatctattatatctcaaagcaagggaagcggagatgcggacattgtggcatcttcaagggttcttccggaagaagaagctcatctaa

SEQ ID NO: 94971 - DNA, 347 bp, Oryza sativa
  Clone ID: PAT_MRT4530_9320C.1
gggggggaacctttcaattctttttaatccggtatatcaaggctaggaacaaaaaacctggaggccccccaaaccacaagcatttttgtatatcccttttgggcacacaaaaatgacaaattggggagagcagtttgaaccccggggttcacaaaagggtggtgctttaaaacccccccatggggcctcgggggatagccccaaattttttgacttcccgccctgggccaaagattaaaaccccggctggggggccctttgcccccccaaaatggttttcaacattgcaagaagctttcacttccattattgggagatccctttttgccaaaaacaccccccatttt

SEQ ID NO: 94972 - DNA, 237 bp, Oryza sativa
  Clone ID: PAT_MRT4530_93210C.1
atggcggtggcagttggaaacgacatggatttcctgattatagcctgccagagttatgggtggtggcggtggagcagatttgtcgccggcaccacggggagggcggatccgtcgccggccaccgcggggagggtagatccgttgcctaccaccacggggagggcggatctgtcgccggcgaccatggggacagcggcggcgtgcctcgggcagcgcggtggcggcagcggtctctag

SEQ ID NO: 94973 - DNA, 486 bp, Oryza sativa
  Clone ID: PAT_MRT4530_93211C.1
atgaagacagagaagatggtgaagaggagaatcagaatgacccagcgcaagagagagacgaagagaggggaggaggagagagaggaagcagaagaggagggacgcataacaccacactcacacccatcaagtggaactttgccgctgcgcacctcctcgccaccatggtttcccgctcgcaatccccctaacgagacaatcattgtcttcatcgtttgccaccgccatcgtcaccgccacatcccgcacctccccctctactccaccgtcgcagcctacacatacctcctcgccaccgtggcctctactctgtcgttgccgtcttcaaccccacacgaccttcacagcctccgtccctgcatggactcgggggccctcagctctcgttgtctcctctcaacggcgatttttacagcctttgcctccgctggcatggaggaagcccacggcaacgacagggttggggagtgtacgggacgtcagtga

SEQ ID NO: 94974 - DNA, 592 bp, Oryza sativa
  Clone ID: PAT_MRT4530_93212C.1
ctacccgccgccaccggacggcaccgacgaggcgaaagcgaggtcgtcgaggaggcctcgcggtggtggtggcttgcgctccagctcaccagcaactgttgctgcctctccaccatgtccccctccgcctccgtcaccggtgaggttcgccagcagctgaactccccggaagttcctaggaagaaccccggaagttccgggcaactttctttgctcagcataaaaagctgccaggaagttccgggccttttgccaggaagttccgggcccgtcgtcgaccgcggcgaagcgacctcgtcggagaccgtcggcgaccgcagcaaggtagtcggcggaggtggcgaggtcgagggaggggaagatgtcggaggacttgccggccacctcaccatctgggctctcccatatagcaccgttctggatgccatccatggaggaggacgaggaggaagacggtgagctgctcgtggtggacatggagatggccggcgaggacaagctcctcttcctcaatggcggcggcggaggacatgaagggcaattttgtctcatcatctggtggagaagcgaaaatgatttcgaaaatacataa

SEQ ID NO: 94975 - DNA, 568 bp, Oryza sativa
  Clone ID: PAT_MRT4530_93213C.1
gggctgcaggaatcggcacgaggaacaccagtaaccttgtgggtcaatccttgttctatgggccaaaagataacgacaactggtatgggatttattactccagctgctttggggggattaatgccactcttgcttctgggaagattgtgttatgctacaatcctaaacctatggtgacaatatttccaccattctacctgtcctctgttgtgaaagctgccaaggaggctggtgcaaaggggatcattcttgccacgtatgcttttgatatgctagatggcttgcaagactgtggcaccatgccatgcgttctagtggactttgattttgtaacgcgcttgtcacatgctctcagtgaaaactctgaactggtagttaaggtgaaccctgctgttacatggataggaaatggagtgctagctccaaaaatctcaacattctcctccagaggacccagcccactttttccacagttcctcaagcctgatgttgcggcgcctggatccaatatcttggcagctgttaaagattcataccagttcatgtcaggaacttcaatggcatgccc

SEQ ID NO: 94976 - DNA, 358 bp, Oryza sativa
  Clone ID: PAT_MRT4530_93214C.1
cggacgcgtgggataaaaaaaaaaaaatttattcaaaaaaaagaaaaacgaagatgaaactaggggggggattacaagctattgttgggttgacaatgcttatccaaggtattctaacacaagcaaagagttgtgaaagtgacaagcaatatgactccgatcctatcaagctaagcttctcttgaggacatgctaagagataactttaaagcttgtgcaacactccacggtgacgcgactttcaatgctgccattcttaggatccatccaacaggatctgctcattttgagcaggccctgactattgcatgagaagttcatatatcccttcgaaatttttggtgatcagagcaaggtt

SEQ ID NO: 94977 - DNA, 871 bp, Oryza sativa
  Clone ID: PAT_MRT4530_93215C.1
aatactcaagcttaaacactactttcaagcccacaaagtcacggtgtcatcgcagtaccctttgggcgaagtactccgaggcaaggaagttactggtcgactcagcaagtgggcggcggagctatcccctttcgacttgcattttgttgcccgcactgctgtcaagtctcaagtgctagctaacttcgtggctgaatggacactggcattcgcccctgagcccgagcccgtcgaacaaccctgggtgatgtactccgacggctcgtggtcgcacaagtgggcgggcgttgcggcggtactcacttcgccagggggtgtgccgattcggtatgtcgcaaggctgcagttcgacacaaccaacaacgcagcagaatacaaagttattcttctgggcctaaaaaaagcgaaaacattgggggttcggcgcttgctcatccgaaccgactccaagttggtggcaggtcacgttcataactcctttgaggcaaaggaagaaggaatgaagaagtatttggaggctgttcggtctatggaaaagtgcttcgctggcataatggttgaacatttatctagaggccagaacgaggaagaagacgccttggcgaaatctactgcttatgggggcccacattcgccgagcatctttttcgaagtcctatacgcaccaagtgtgcccgcagagggcctagatgtcatggcaatcgaccagacagaactgggcgaggatccaacagactggcgaaccccattcgtaagatacttcaagaacggctggctcccggaagatgaagcagaagcaaagcgcttacagctcagagccgcgaaatacaaaatggtctcgggccaactatatcgctccggcatactctaa

SEQ ID NO: 94978 - DNA, 1279 bp, Oryza sativa
  Clone ID: PAT_MRT4530_93216C.1
gaagggaaaaccttactctttctttttcaaattgaaacgtaaaaaagcactactacatgagattggaacatgcgaacaatgtcaattctactaggcttaatgtcacatcctaggatcagctcaggtgttttatctcctattttaaatggatgataagcacctggccaatttttatagtttaagaataatgtaactacggtggaagaaaaatacacgcgagttctctgctcgatttgtacactgatgaagagaaggccacattttgtcctctctttttcctaaccgcagccgccgatcaccggagcaccacggcggcgacgaagctcagcacggccatggcgctggcggcggagcagcacaggtcgatgagcgcctcgcgtcgcgccttgctctccttcctccccttcctgctcttcacgaactcgtcatacctcctcttcgcctcgtcccgttctctccccccgcctatcctctgttcctccattgccgcagcgaggaggcggaggcttcgctcgccgctcgccgcggcgccgtcggcgtcctgcacggcgaggctgacctcgctgatgttgccggccccctcggagcaggtcacggtggtctcgaacttgcacccgcccagcaccaccgcgaacctcaccagcgtctcgccggtgtaccagtgccggtccaccgccacggcgcgccggctggacacgttcaccgctcggccgcgggcagggtcgacgaccacccagctcagctccagctccgccggagacagcgccgcctccgccgccggcttcttgcactccacggcctccacccggaacggcgagccgaggaaccacggcgacgacgcgggcgtctccacgacacgggagagcaggggcgcccccctgtagtagacgtccaccgccgagacgagctccgacgggaggggacctccgccgccgccgccgagctccccggcgtccgggcgcgggaacgggaacgcgtcggcgaagagccggcgcggcgggaccacggacagcagccgcgggtgccccgccatggacggccactccgcgaggcagagcgcgcgccacgtctccgggtccgcggcgagcgcccggagccccgccgtggcgcagctcgccgccgccagcgaccgcccgtccagccgccgcagcgcgcgcgccagcacgtcggcgtgcaggtcctctatcgtagtagtcgccaccattttctcttcttctctccctggcgccatcaccctctctctcctcttttgctcgtgccgatcctgcagcccggggga

SEQ ID NO: 94979 - DNA, 463 bp, Oryza sativa
  Clone ID: PAT_MRT4530_93217C.1
cattaaccttgacctggctggattaattgagatgcttgaagcccgtcgaggtagccaaggactgtacatgggttgcatgaaatcaggaggggtcaacaatggtatgaacctgaatggtggaagtttggagattcaaaaacgtattttcgccatgcttccggtgctttgtttatcctctctaacaatttggcacgctacattaacataaacagtgcatcgctacagagctatgcccatgatgacatatcagtaggttcatggatgatggggctgaatactacttatgttgatgacgaccgtttgtgctgcggcagttctagacaagagaaagtatgttcccacgcatgagttagcagcacgcatggttatgacggtggtgtcctgatgaagaggtgacgctgtatattttgccattttgtatacaccaagcggcttctggaatgaaaaatagatacatcatttc

SEQ ID NO: 94980 - DNA, 1457 bp, Oryza sativa
  Clone ID: PAT_MRT4530_93218C.1
gcttttcttctctaccagcggcagcggcggctggtagggaggaggagatcgccaccagatcgccatggagacgctggcgagcgccatgcggcgggagaaccgccgcttcaagcccccctcctcctcctccgcctccgcctccgccgccctctcctcggggagggtccccctcgtcatggccttcctctcctgcctcgcgtggctctacgtcgccggccggctgtggcaggacgcgcagacgcggatgatcctgtctggtctcctcgagaagagctccggcaatcttccgaaggtgctgtcggtggaggacaagctgaggaatctaggatgcattggaattgggaggaagattgcggaggcagaaatggaccttacaaaggcgaagagcgaggggtatctgtgggggaatggaactgctactggtagttctgacaagaagaagctccttgctgttattggagtttacactggttttggttcccggctcaagaggaacaccttccgtggctcatggatgccgagaggtgatgctctgaagaagcttgaggagaagggtgtggtcattcgttttgtcattggtcggagtgcaaatcgaggtgatagcttggaccgcaacatcgatgatgaaaatcgtcggacgaaagatttcttgattcttgaaagtcatgaggaagctgcagaggagttaccaagcaaagttaagtttttcttcagtgcagcaattgaagcttgggacgcagagttctatgtgaaagtcgatgacaacattaaccttgacctggctggattaattgagatgcttgaagcccgtcgaggtagccaaggactgtacatgggttgcatgaaatcaggaggtgttccacttgataccaacttcaatttcaggggtcaacaatggtatgaacctgaatggtggaagtttggagattcaaaaacgtattttcgccatgcttccggtgctttgtttatcctctctaacaatttggcacgctacattaacataaacagtgcatcgctacagagctatgcccatgatgacatatcagtaggttcatggatgatggggctgaatactacttatgttgatgacgaccgtttgtgctgcggcagttctagacaagagaaagtatgttcccacgcatgagttagcagcacgcatggttatgacggtggtgtcctgatgaagaggtgacgctgtatattttgccattttgtatacaccaagcggcttctggaatgaaaaatagatacatcatttcaaacgctgctttatccgatcagtatacttaaatacaagtgtaggggaactagttgacaaaaactataaaagcgctgagcttatttttggtggaactgcttcctgtttgacatatttgtcgaaagtcgaaaccaaattcagggtgatagatgaacttctgttcgaagtttaggggatatactggccttctcttccccac

SEQ ID NO: 94981 - DNA, 416 bp, Oryza sativa
  Clone ID: PAT_MRT4530_93219C.1
gggccccggaaaaaaaaatttttttgggaaattaacctaaaattcttttagggaagggaatttttttttgggcaaaaaaagctgaagcccaatccaaaaagctttcaaccctagtggcaaggtttaggcaaacggagaaaaaaccccccaacactttttgggggaaattgggccattaaaaggggggggggcaaaaggtttggagggaccccaaagacggggggaaaaaggcccagggttttttggtggcccccaaaaaaaaggccgggggccaaaaaattttatggcccttgtttgggaggagggggggaaggaagattcgggccctccgggaaatggaaaaacccttccttttggggggggtaggagggccccttcagggggaaaaagcatggcttttcccgggcttgggcttg

SEQ ID NO: 94982 - DNA, 825 bp, Oryza sativa
  Clone ID: PAT_MRT4530_9321C.1
tttttttttttttttttaaaataatgtctttcgcaagttctccctcccaacattttcttaacacaccagttctcatttttggaatgtccattttatcagtagcctaaatacacatcgtttcgtctttgcttcggcaaatatagacgatattcagccatttacataaggtactgtacaatattagatattagataaaacgatgtctttattgtactgtcctgtgtcctcaaatatattcaaggacgcagtagacacagctatatagtattacattgtagtagtacttaataatacgatgccagttattttcgacgaatttaaagcacaatcattcccaagggaggtcgaaccaaaatctcacgccttcttaaacataattaacaggatgactgctatggccagagccatgaatgatccaccaagaatctcggcttcattgggtttgcggaacatatcttggaaaaagttggttatattgttcacaatgtcgatcaccgtcttccttgcattatccatgaagtctgcaaaaggggagctctcaggcttctccccggaggatgaattctctgaggaggcgtctgcaagcttctcaggtgaaactaccgaggcagtgccctcagggaaagtataaaccagactttgctggtgcgtcttgtaaaattccatgaccttctcatttttcaacactgcgtcccagacatttttatcagaggcaagagatgcaacaacaccctgtgcctctgggcttgatttcaacaaggtaaaagcttgcatcacatgtcctggcatagcaggaattattgcatcggctcccagcttgctaag

SEQ ID NO: 94983 - DNA, 1569 bp, Oryza sativa
  Clone ID: PAT_MRT4530_93220C.1
gaaaaaaagaaaaaaaaacgcggctcctcgcgcctccccccgaccaccacctcggcgattcgacggcgaccgctcgctgctggcctccgccggcttggtttcggctcgcggcgccatctcggtctcaaatatcttgaattcagggacaaactcaatttctcccgctttcacaaatctcaagtgatagtcatgtctacaaatgttaacaatggtaactcagagagcaaccttaagagaagttatcaagttgtggtttctgctactcgcgacatgggtattgggaaggatgggacgctgccatggaagctgccgggtgacctgaagttttttaaagatattacagtgactacgtcagacccttcaaagaaaaatgctgttgtaatgggaaggaaaacatgggaaagcataccccttaagtttagaccactccctggtcgtttgaatgtaatattgactcgttctgggagttttgattttgcaactgcagaaaatgttgttatctgtgggagtttggattctgccttgcaactgctagcaacaactccatactgtttgacagttgagaaaacttttataataggaggtggcgagattctgaggcaatctttaaatgcgcctgcttgtgaggccatccatcttaccgacatagagtccagcattgaatgtgatactttcattcctccaattgatctctccatgttccacccatggtattcatcatttccagtggtagaaaacggcatcaagcattctttcatttcctttgttcgtgttacaaaatcaattgcagaagctaatgattctagtggcaaggaattgactggaaatgattctaagaaggtcaagtttgaaattgagaatttttcctttttacctaaaatgatatttgaaaggcacgaggagtatcaatatctcaatcttgttcaagatataataagaaatggtgctaagaaaaatgacagaacaggaacagggacagtatcaaagtttggttgccagatgcggttcaacttaaggaggaactttccattgctcacaacgaagagggtattttggcgtggtgttcttgaagagctattgtggttcattagtggctcaacaaatgcaaaggttttacaggagaaaggtattcacatatgggatggcaatgcttcaaggcagtatcttgacagatatactgacatgcatgctgactacgtgggaaaaggttttgatcagttaatggatttttatgttgagaatggggagttgtcatgccagatgtaccaacgctctgctgatatggggctcggtgtgccattcaacattgcatcatattctcttctgacatgtatgattgcacaagtgtgtgatctttctcctggggattttgtccatgttataggtgatgcccatgtttaccgtacgcatgttgaagcgttagaggagcaaatgcggaagcagcctaaaccattccctattttgaagataaatcctgtgaagaaagatattgattcttttgtaacatcagacttcaaactggttcgctatgatcctcaccataagatagaaatgaagatggcagtatga

SEQ ID NO: 94984 - DNA, 384 bp, Oryza sativa
  Clone ID: PAT_MRT4530_93221C.1
ttaggccagggatgagctccactgtttgctgaatgaggatgagctacgtgatgctgtgctgatggcgtttgcaaacaaacacgaacttaataatgccatgaacggtggtgagagacaccagcaagcttggagtggactccttgagccagagggactgggacatgcagaggacatgagctacctatggtgaggggttgtatgaggggcttgactggatttgcaacaacattgacgacaaggctgggagcattttgaccgggcttaaatgaaaggaagacatgggggatatcagtgagtgaacgctgtctttgtacgtgtggaaactatatagtgatgacagataatgatgtggatggattgggaagatatagctgtttatgacac

SEQ ID NO: 94985 - DNA, 732 bp, Oryza sativa
  Clone ID: PAT_MRT4530_93222C.1
atgggagtcgcgtacggcaggacgccaccctcctcctcctcctcccccgccgcctccgcctccgcggggaacggcgccggcgcggcggaggtgaggtaccacgagtgcctgcgcaaccacgccgcggcgatgggcggccacgtcgtggacggatgcagggagttcatgccgatgccgggggacgccgccgacgccctcaagtgcgccgcctgcggctgccaccgcagcttccaccgcaaggacgacgggcagcagcagcagcagctgcgcctgctcatcccgtccccgcccacgccgcgcgtcccgctgctcatgccgccgccgcagccgcagccgcacccgcacccgcaacacccctacctgcacccgccgttcccgtaccaccacaccccaagcggcagcggcggcacgacgaccgagtcgtccagcgaggagcgggggcctccctcctcgtcggcggcggcggcgcaggggcggcggaagcggttccggaccaagttcacgccggagcagaaggagcagatgctggcgttcgcggagcgggtggggtggcggatgcagaagcaggacgaggcactcgtcgaacagttctgcgcgcaggtcggcgtgcggcgccaggtgttcaaggtgtggatgcacaacaacaagagcagcatcggcagcagcagcggcggcggcagtaggaggcagccgcaggagcaacagtcacaacagcagcagcagcagcagtag

SEQ ID NO: 94986 - DNA, 205 bp, Oryza sativa
  Clone ID: PAT_MRT4530_93223C.1
ggggaacaggaagaacacggccggcacaaaggcgtcctgattttctctctttgggttccgtactcttctcaccggagcctgaggaatccattttgtcggttcttctcttgatctgtcggtgttcttgaggaggaggaggagaggagtgaggaatctttggctttgtcaggtgaattggagcgaggtgttcgcagggcgagctctg

SEQ ID NO: 94987 - DNA, 348 bp, Oryza sativa
  Clone ID: PAT_MRT4530_93224C.1
atgtcagtgacctccgtgctcgtgctcggcgggttggggtggcgtcgacacgtggtggatcgtggggcccacgtggaggtgacggggaaacgggggaggagagacctcaacgaccctgataccctcatactggtggcttctggtctgggcatggatcccagcctacgacgtgacgtgaagcgtgcactggaggacgacgtggagcgcgaccgcgccgaggccgcagacgaggagggcgagcaggacgatggcattggtgttgaacgacacggcgactggaccgccgccgccatggccgttctcggcggtcagcagagcgcgcttatcggtcgtcgccatggccggtag

SEQ ID NO: 94988 - DNA, 168 bp, Oryza sativa
  Clone ID: PAT_MRT4530_93225C.1
ggcgattccgtcgccacgcgtcgcatctcagctgatcagagctctaatagctagctagtgatagctgcgctggatcgatcgatctcgggtcgtacaatggcgtcaagcgttcgctctgtcctggccggacctctcgtgctcgggtgcaagcgcctgcggcggagcccg

SEQ ID NO: 94989 - DNA, 659 bp, Oryza sativa
  Clone ID: PAT_MRT4530_93226C.1
cggcacgagggggtgcacactccgctcggggcttcttcatctagggttagtttcggtttttttttgtttttttttttggaggaatatttatatttcttctatagtttaatcttcagcaaaatacaagatgttacattcactagtgtagtgtagttgctaagcttcctaggggaaacatgtattgccaagcatattcagcttgtactactaaatgacagctgcctctttaggttccactgtccaccttgcatcttccctgtggcctcatcccatatgacctcgtcaatgaggtccttgtagattaatctttcgatctccaaaaccgtgcttggcgattcactatcgaagctccaatcttctattccattcagtggatcctcaaccaatagcattctttcatccccatcctcttcagagcattttatcgctgaactctcagattgaagcctgtcaacctctgtgcacaggtccttaaaaagtcgccatccgttgtacttccttaattgaagcgacttggctgactgacttgccgagcaatgaatgttcatcttctgagctgtaatttcgtttaccagatcgaatacaattcttcgatgaagcttttctgtgttagcttgggagctcttggtaacagtttggtctgctgaagcaaaatctgg

SEQ ID NO: 94990 - DNA, 500 bp, Oryza sativa
  Clone ID: PAT_MRT4530_93227C.1
atgacccaaaaccttggccatggtactccacaccattcattcacaacccaatgccgctcctccaacaacaatgttcgcaacaacctacaagcatgatcctctcatcccactgtgacaccagttccagatgatccagaccatccaacaagttattgtcctgaactcggcaccaccagatgatgaagatgccgatccagatcccatacatggcaacatggcccctgtcaaacttccaactctcttcctgtgcttgttgttgatcacaacgttggttacatgtactctataataagttccatactatcccaaacatagaaataagaaccttgaataaaatatcaatcatttcagacccaaatattggtattgaatttcgtcccacctcttgaaaccatctgtacattggatcccctggaacccaactacccagctccatgatctaaccgtccccagacagtaatttcttacctcaccgacactcgatctcatcaaaaaaaaaa

SEQ ID NO: 94991 - DNA, 549 bp, Oryza sativa
  unsure (1)..(549): unsure at all n locations
  Clone ID: PAT_MRT4530_93228C.1
ccggccgggacaaaaccattcaagttcattagtactacaacaacatggcatccataaatcgccccatagttttcttacagtttgcttgttcctcttgtgcaatggctctctagcccagcagctattaggccagagcactagtcaatggcagagttctcgtcgtggaagtccaagagaatgcaggttcgataggttgcaagcatttgagccaattcggagtgtgaggtctcaagctggcacaactgagttcttcgatgtctctaatgagcaatttcaatgtacccggagtatctgttgtccgtcgagttattgaacctagaggccttctactaccccattaccactaatggtgcatctctagtatatatcatccaagggagaggtataacagggccaactnttccaggctgtcctgagtccttaccaacaacagttccaacaatcaggccaagcccaattgaccgaaagtcaaagcccaagtcaaaagttaaaggatgaacatcaaaagatccaccgtttcagacagggagatgtaattgcattgcctgc

SEQ ID NO: 94992 - DNA, 589 bp, Oryza sativa
  Clone ID: PAT_MRT4530_93229C.1
cgggccggccgggaacaaaacctttcaagttcattagtaccacaacaaccaggcatccataaatcgcctcaaagttttcttcacaatttgcttgttcctcttgtgcaatggcttttcttaccccagcagcctattaaggcccagagcaccaagtcagatgggcagaagttcttcgtgtgaagtccaagaaaatgcaggttcgataggttgcaagcatttgagccaattcggagtgtgaggtctcaagctggcacaactgaattcttcgatgtctctaatgagcaatttcaatgtaccggagtagctgttgtccgtcgagttattgaacctagaggccttctactacctcattaccactaatggtgcatctctagtatatatcatccaagggagaggtataacagggccaactttcccaggctgtcctgagtcctaccaacaacagttccaacaatcaggccaagcccaattgaccgaaagtcaaagccaaagtcaaaagttcaaggatgaacatcaaaagatccaccgttttagaaaggaagatgtaattgcatggcctgctgtgtagctcattggtgctacaatgatg

SEQ ID NO: 94993 - DNA, 426 bp, Oryza sativa
  Clone ID: PAT_MRT4530_9322C.1
tatatattcctcttgtaatcgaattcttagctctcttctcatcagaatttgggtgtgcctcgtattctgttgtgcgtggcaacaaagtttttgccttggtcatttctcctagtttccacctctttcatatcgttaaaaacaagtggaaaatttgagatgtaaacaagtaaaaaaaaagaagtaacttttattttctctttgctggtctctattctctagctagtcatctcaggtcattttatctcgtctttcagtgtgattacaaagcaaggaaccctcctaccgtgttggtgagctgataaaggagctctgacgactcggatgcatggctttgccatcaatcaattgattcaacatggcaacttcgatcggatttgtgtttgttgaacttcttcaattgactcccttcaagttttctttcttctt

SEQ ID NO: 94994 - DNA, 195 bp, Oryza sativa
  Clone ID: PAT_MRT4530_93230C.1
atggaaaggttttgcaaaaatatacccgttccacgacggtcccgcatttccaaaacgctggaccgacggtcccgcgggatggccatgcagtaccgcaattgtcccatagctccaaaacgcggaaccgttgcggtcccagctccaaaacacaccaccgtgctaatcagcgattttgacattgttttgcactgttca

SEQ ID NO: 94995 - DNA, 631 bp, Oryza sativa
  unsure (1)..(631): unsure at all n locations
  Clone ID: PAT_MRT4530_93231C.1
gtacnncctcgaggccnnggccgggaaaaccattcaagttcattagtactacaacaacatggcatccataaatcgccccatagttttcttcacagtttgcttgttcctcttgtgcaatggctctctagcccagcagctattaggccagagcactagtcaatggcagagttctcgtcgtggaagtccaagagaatgcaggttcgataggttgcaagcatttgagccaattcggagtgtgaggcctcaagctggcacgactgagctcttctgtgtctctaatgagcaatttctgtgtaccggagtatctgtggtccgtcgagttattgaacctatagggcttctactaccccattacactaatggtgcatctctagtatatatcatccaagggagaggtataacagggccaactttcccaggctgtcctgagtcctaccaacaacagttccaacaatcaggccaagcccaattgaccgaaagtcaaagccaaagtcaaaagttcaaggatgaacatcaaaagatccaccgcttcagacaaggagatgtaattgcattgcctgctggcgtacctcattggtgctacaatgacggtgaagtgccagccgctgccatatatgtccctgcctctccc

SEQ ID NO: 94996 - DNA, 801 bp, Oryza sativa
  Clone ID: PAT_MRT4530_93232C.1
atggccgccgccgccgccgatcccctcgtcgccggcgccaccgtctcctccgactccgactccgactccgacgatctccacctcctcctcccgaatctcctcccttccgccgccaccgccgcatcagacgcgcagctccaccacttccacctccccgcgctcccgtcccctatcaccgtccgcaccctcccttccctcggcctcaccttccagctctggccatcggcctccaccctcctccgcgtgctccccgcctcgccgctcctcctctcgcgcgcgcccaccccggagagcccgctgggcatcctcgagctcggctccggcaccggcgccgcgggcctcgccctggccgcggcgctgcccgcccacgccgtcctctcggatctccccgcggcgctccccaacctccgccacaacgcgtccctcaacgcgcccctcctcgacgcccgcggcggctccgtctccgtcgtcccgctcccgtggggcgacgccgccgcgatggaggccgtcgctgctccgccgccggcttctcggttcgacctcgtcgtggcgtcggacgtggtgtactacgaggcgttggttgaccccttgattgagacgatgcggttcttcgtcaagggggaggtggtgttcgtgatggcgcacatgagaaggtggaagcgcacggacaagaagttcttcgccaaggcgaggaagctgttcgacgtcgaggtggtacacgaggacccgccgctcgaagggtggcgccatggcccggtggtctacctctttaccgagaagaagcggcgtgacaagaagtga

SEQ ID NO: 94997 - DNA, 424 bp, Oryza sativa
  unsure (1)..(424): unsure at all n locations
  Clone ID: PAT_MRT4530_93233C.1
gtcgccccatagttttcttcacagtttgcttgttcctcttgtgcaatggctctctagcccagcagctattaggccagagcactagtcaatggcagagttctcgtcgtggaagtccaagagaatgcaggttcgataggttgcaagcatttgagccaattcggagtgtgaggtctcaagctggcacaactgagttcttcgatgtctctaatgagcaatttcaatgtaccggagtatctgttgtccgtcgagttattgaacctagaggccttctactaccccattacacttaatggtgcatctctagtatatatnatcccagggagaggtattaacagggcccacttttnccaggttgtcctgagtcctaccaacaacagtttccaacaatnaggccaggcccatttgaccgaagtcaaagccaagt

SEQ ID NO: 94998 - DNA, 264 bp, Oryza sativa
  unsure (1)..(264): unsure at all n locations
  Clone ID: PAT_MRT4530_93234C.1
tttttgcaccggccgccactaatctgcgggagagagcgttcgttcgttcgccggggattggnagngccagcaagngcaagatccctcgtgaagacgntcaccgggaagacgatcacgctggaggtggagagcagcgacaccatcgacaacgtcaaggccaagatccangacaaggaaggtatcccgncggaccagcagcgtctcatcttcgcggggaagcagctcgaggatggncgnaccctggccgactacancattcagaag

SEQ ID NO: 94999 - DNA, 503 bp, Oryza sativa
  Clone ID: PAT_MRT4530_93235C.1
cagagcactagtcaatggcagagttctcgatctggaagtccgagaggatgtagatttgataggttgcaagcatttgagccaattcagagtgtgaggtctcaagctggcacaactgagttcttcgatgtctctaatgagttgtttgaatgtaccggagtatctgttgtccgacgagttattagaacctagaggcctactactaccccattacactaatggtgcatctgtagtatatatcatccaatggagaggtataacacgtccgactttcccaggctgtcctgagacctaccagcatcagttccaacaatcatggcaagcccaattgacccaaagtcaaagccaaagccataagtccaaggatgaacatcgaaagattcaccgcttcacacaaggagatgttatcgcgttgcctgctggtgtagctcattggtgctacaatgatggtgaagtgccggttgatgccatatttgtcactgatatcaacaacggtgctaatgaac

SEQ ID NO: 95000 - DNA, 1475 bp, Oryza sativa
  Clone ID: PAT_MRT4530_93236C.1
gcacgagggtggcccagaagaacatcgctgcgctgtacggcgaggcgaagccatggcgcccctttcggtgtcggccatcctcgcgccgtcgccgccgccagcccaggcggccgcaagggcctcgccgcgccgcgcgccagcgagcgccgcgcctgtcgccgccgccatttcgacggcattgcttgctttgactcctgccgcgcacgccgcggcgttctccaaggaggacgtcgccggctccgtgaccaaggtggtggacacggtggaccaggtcatcggcgtcggcggcaaggtggccgagcagtccgccggcgtgctcaaggcgctgggcgaggccgcgaagccggccctgcctgcgctgaagagcgccggcgagcaggcgctgaagctcgcctcgccggtggtctccggcgcctccaagcaagccacggaggcgctccagggcgccggcgtcgaccccgcccccgttctgtccgccgctaagaccgtcgcggacgcggcgcagcagggcacgaaggtcatcgacgccgcgaagcccatcgcgtcggcgacggtggagaccatcgggtcgctgggctccgcggactacgtcgtggtcgccggagcggcgttcctcgcgtacctgctcctgccgccggcatggtccctgctttctttcactctccgcggctacaaaggtgacctgaccgctgcacaagctctggacatggtgacctcgcaagattacgtgctgatcgatgtgaggaccgagaaggacaaggccaaaaccggcgtgccacagctcccctcgaacgcgaagaacaagctcatctctatcccgctggaagagcttccaagcaagacgaagagcatggtgcgcaacgcgaaacaagccgaggcggagatcgccgcgctgaagatctcctacctcaagaggatcggcaagggctccaacgtcatcatcatggactcgtattgcgacagctcgaagatcgtggcgaagacgctcaacagcgtcggattcaagaactgctgggtcatggccggcggcttctccggcaggaaagggtgggcgcagagccggctcgggacggactcgtacaacctgtcggtcgtcgaagtcgtcacgccgtcgcgggtaattcctgcggccgctgatcggctcgtgacggcttcgtcgtcggcttcacggacgaccacgagtcgtaagcttcttcccggcagcgtggacggctgaaagaggctggaatagtcactgtaaatcccatattcacctcatgttctagttgcaactctcgtttttttttttggggtttttcagtaattgaaaagggagaatccgtataaacaatagttgtgccatgtgtgatattccaaatcggtttgaatcctgtgaaaaaaaaagattggccccagctttccaaaaaaaaaaaaaaagggcggccggacgcgtggggacgcgtgcgtagatccgcgaatttcgtactctgacccgt

SEQ ID NO: 95001 - DNA, 477 bp, Oryza sativa
  Clone ID: PAT_MRT4530_93237C.1
cgcgtccggtactacaacaacatggcatccataaatcgccccatagttttcttcacagtttgcttgttcctcttgtgcaatggctctctagcccagcagctattaggccagagcactagtcaatggcagagttctcgtcgtggaagtccaagagaatgcaggttcgataggttgcaagcatttgagccaattcggagtgtgaggtctcaagctggcacaactgagttcttcgatgtctctaatgagcaatttcaatgtaccggagtatctgttgtccgtcgagttattgaacctagaggccttctactaccccattacactaatggtgcatctctagtatatatcatccaacggagaggtataacaaggcccactttcccaggctgtactgagttctaccaacaacaattgcaacaattatgccaagcccaattgaccgaaagttaataccaaagtcaaaagtttcagggatgaaca

SEQ ID NO: 95002 - DNA, 537 bp, Oryza sativa
  Clone ID: PAT_MRT4530_93238C.1
atgggtgacacggcgactgagttagcgtgggacccatgtgggcctcacattgaattgtgggagaggaggagggcgtcggtggccagcgaagggcgacgcgtcggcggtgggggaaggagctgcgggcggccggcgggggaggagcagtgcgcgggcgacggggggaggagcgacggacggcggagtggagttgggcggcccctccgtccctgccgccgccgccaacacggcgctcgcggcgctccccttcccgtcctggtctcctccgccgccctcgactcgctccccttcccttcccctgccgtttccatccccacccccgccgccgccaccgcccacctcgccgtctccgcgcccgacttcgacgccgcgggggccctcttcgcgtgcctcggcggccacgtgcaccgcacggtcgaggagggtggggcctccgtgctcgcctccgacgaggccgatgccgtgtcgtcgctcgccgccgtgtcgcccgccactgcctcctctcccgcctcgtcccggttcctccccagccgctag

SEQ ID NO: 95003 - DNA, 653 bp, Oryza sativa
  Clone ID: PAT_MRT4530_93239C.1
ccggccatggtgtgtgtacgtgcgtgcgcttgaataaaaaggacgtgagtttgaattaatagttatatatatatccagcacgcgtgtttgatcgaaaaaaaaaaaaaaaaaaaaaaaaaaaaaaaaaaaaaaaaaaaaaaaaaaaaaaaaaaaaaaaagaaaaaaaaaaaaaaaaaaacaaaccctttcaggttctttagtactacaacaacatggcatccataaatcgccccaaagttttcttcaaagtttgtttgttcctcttgggaaagggttctctagcccagcagttattaggccaaagcactagtcaagggcaaagttctcgtcggggaagtccaaaaaaatgcaggttcaataggttgcaagaatttgagccaattcggagggggaggtctcaagttggaacaactgagttcttcaatgtctctaaggagaaatttcaatgtaccggagtatctgttgtccgtcgagttattgaacctaaagaccttctactacaccattacactaagggggcatctctagaatatatcatccaagggagaggtataacagggccaattttcccaggttgtcctgagtcctaccaacaacagttccaacaatcaggccaagcccaattgaccgaaagtcaaagccaaagtcaaaag

SEQ ID NO: 95004 - DNA, 2576 bp, Oryza sativa
  Clone ID: PAT_MRT4530_9323C.1
ggcaaggactccctcggtttactactcgtgggtgtgtgatattattgcgcggtatctatctccctctcctctctctcggcctctctccattactcgccgcgtgcaatggcgaggcagtggtggtagtaggctggtagtggtagcgaagacagtggagtgggcgggcgagtgcggcgtccgcgggtgtgctattgcggaattgctgcgctccggttgtgtctggtttccatgcggctgtggttggggccgtgagatccgcagcgatgtcgcgggcgctgtaccggggggcgtcggggatcggcggcaagccggtggcggggtatgacgcggccgacgaggcgcggtacgaccccaaggagcccagcgagaacggcattggcggcgccggcgggagggggaggaagcggcacctcgcggtggcggcggttaagatcggggtcctcgtgctcgcggcggccgcgctcgtggggtcggtggcgtgggcggggtcgctgtacgccgggcgaggggctgccgcggctgcggccgcggccgccgccagccgtgggtaccgccggctgcaggagcagctggtcacggacctgctcgacatcggcgagctcgccggcggcggggtccgcgcgcgggaggcggaggtgtgcgttcctgagtacgagaactacgtgccgtgctactacaacgtgtccgacgccgtcgacgtagcggatctgggcggtggcgtcgtgataagctacgagcggcagtgctcgcgcgagggcaaaatcgcgtgcctcgtcgcgccgccacggagctaccggatccccgtgcggtggccgagtggcaaggggttcatctggaaagacaacgtgcggattagcgggcaggagttctcgtcggggagcctgttcaagaggatgatggtggaggaggaccagatctcattcccatcggacgcacatatggctgatggtgtggaggattacgcacatcagattgcagagatgattggtctgcggaacgagttcaatttcaatgaggccggggttaggacagttcttgatatagaatgtggatttggtaccttgggagcacacctttttcagagagatctcttgaccatgtgcattgctaactatgaggcgtcaggcagtcaagtgcaaataacactagagagaggaatccctgcaatgattggttcatttgcatcgaaacagcttccatatccctatctttcttttgatatggtgcattgtgcaaaatgcaatattgaatgggacaaaaatgatggtggtttcttggttgaagtggatagattattaaggcccagtggatactttgtgtggacatcaagtctgaatacacacagggctttgcgtgacaaagaaaatcaaaagaagtggagaaccattcgcgactttgctgatagcctctgttgggagatgttgtcacaacaagatgagacaattgtgtggaaaaagacaaataaattggattgctacagttcaaggaaatcaggccctgtgctttgtactcatgatccagaatcaccatattaccaaccactaaatccctgcatagcaggaacaagaagtcagcgatggatttccattgaacatcgcactacatggccttctcagtctaggttgaactcaacagaacttgatatacatggggtgcattcagaagactttgccgagaatactgcaaactgggactcaatggtgcgaaactactggtctttgctgtctcctcttatattttctgatcatccaaagagacccggtgatgaggacccacaaccaccatttaacatgctaaggaatgttctagacatgaatgctcacttcggtggatttaatgctgctttacttaaggctggaaaatctgtatgggtgatgaatgttgttcctacaaatgctccaaactatctgccgctaatttttgatcgtggttttattggggttcaacatgactggtgtgaagcatttccaacttatccaagaacatatgatatggtccatgctgatggctttctatcacttgagaagcaccaaaagcatagatgttctactcttgatatattcttggaagttgatcgcatcctacgtccagagggttgggttataatccgtgacactgcccctcttattgaagctgcaagatctgttgtaacacagctcaggtgggatgcccgtattttggatcttgacatagctagtgatgaaaaacttctggtctgtcagaagccatttattagaaaacaatgaacaggacagctgacatgagatatgaacttattctttaccacctacatggctacatactgtaaaactattgtccaagaacagttgagaacagaattcagtttcaacactagaggcatggtcagctaactcgtcatgcatcgtcatggaaccgcaaggtgccattggactgatcggacaagtgcgtgctgcagagaggcctggtagctaagctttccaggccgaggttttattgccagggtacagagatgaagccttcaaagttatttgagtagcacaaagactatatattcaataaagggatgatgctgcggtgtacataatcgcggccaa

SEQ ID NO: 95005 - DNA, 438 bp, Oryza sativa
  unsure (1)..(438): unsure at all n locations
  Clone ID: PAT_MRT4530_93240C.1
ccggccgggaaaatagcattcagtttctttagtccttaaacaacctggcatccctaaatcgccccatagttttcttcacagtttgcttgttcctctttgtgcgatggctcccttgcccagcagctattaggccagagcactagtcaatggcagagttctcgtcgtggaagtccgagaggatgtagatttgataggttgcaagcatttgagccaattcggagtgtgaggtctcaagctggcacaactgagttcttcgatgtctctaatgagttgtttcaatgtaccggagtatcttgttgtccgccgaattattgaacctagaggcctactactaccccattacacttaatggtgcatctnttagtatattatatccaagggaagaggtataacaggggccgacttttccaaggcttgtccttgagaaccttaccaaca

SEQ ID NO: 95006 - DNA, 2210 bp, Oryza sativa
  Clone ID: PAT_MRT4530_93241C.1
cacatcgttccaatttcaaccaaactttaaattttggcgtgaactaaacacatccttagaagttttttgcgcgtcgcggtacgacgcgccgccgtcgtgggcgttccccaacccgcgcctccgcgccgcgtacgccgcgctccaggcgtggaagcagacggccatcttctccgacccctccaacttcaccgccagctgggtcggcgccaacgtctgcgcctacaacggcgtctactgcgcgccgtcgcccggctacggcggcggcggaggtggaggtctcgtcgtcgccggcattgacctcaaccacgccgacatcgccgggtacctgccggcgtcgctcccgctggggctccccgacctcgccctcatccacctcaactccaaccgcttctgcggcgtcgtgcccgacacgttccgccgcctccgcttgctccacgagctcgacctcagcaacaaccgcttcgtcggcgcgttcccggaggtggtgctcgcgctcccctcgctccgctacctcgacctcaggttcaacgacttcgagggctccatcccgcccgcgctgttcgaccgcccgctcgacgccatcttcctcaactccaaccgcctccgcaaccccatcccggccaacctcggcaactcgccggcgagcgtcgtcgtgctcgcgcacaacaacctcgggggatgcatcccgccgtccatcggcaagatggcggacacgctcaacgagatcgtgctcatcgccgacgagctcaccggctgcgtccccacgcaggtggggctgctcaggaaggtgacggtgttcgacgtcagcgacaaccacctgcagggcccgatcccggcgagcgttgccgggatggccgccgtcgagcagctcgacgtcgccaggaacctcttcgagggggccgtgccggccggcgtctgcggcctcgccagcctcaagaacttcacctacacggacaacttcatcacctcgcgcccgggctgcggcgtggccaccgccgacggcgtgtggaactgcatcccccggcgcgccggggcagcggccgccgtcgcagtgcgccgccgctgcggcgcacccgttcgactgcagcaaggcgcaatgccaggccgcgtcctacaccccgacgcccggtggtagccctggacgtggtggccaagggccaccggcgccggtgagctcgccgccacggcgcagaggtccgtacccgcagccgccatcgagctctcctaccccgtcatacccctcgccgtcgtcgtcctacccggcgccaccggggtcgaacaccccgtcctacccgtcgccgccatccagcgccaccacaccgtcgtcccactcgccgccggggggctcgagctcgaccacaccgtcctacccgtcgcccaatggtggcaagcccagtacaccgtcgcacccctcgccgccgggatccaccactccgtcctacccctcgccgccgtcgagctccacgaccccgtcctaccactcgccgccgcagggccacaccaccccatcacacccgtcaccgccgtcgagctccaccgctccgccgtcccactcgccgccgcagagcacgcctactcatccgtcctacccttcgccgccggtgacatacacgcctcctccgccgacctcggccgacagaccagacgtgcggttcgcgccgccgcctggctcgtacggccccatcccctcgacccctccgtcctccggctcgccgccgtcgccttcctccggctaccagccgccgtcgggccagcccggcgcgtcgccgccgacgcagcacgtgccgggagcggggaccccgaccaccacgccaccatcgcactcgcatccatccaccccgccatcgccatcggggccaagcttccacccgccgccgacgccgcacaactgctcgccgccgtctcacggtagcagcaccggcggcggccacggtggtggacacccgccgtcgacgtcaacgccgcccggcgggaagctcccgttcccgccggtgtacggcgtgtcgtacgcgtcgccgccgccgccggtgaagccttctgacccatccagtcttaggatttcagtaagtgtttccagctcggtagagctcgtcagaggctgcaaagctttctccctggccgggtttactccatgttcttcttcctcctttgaaatgaagcacttctcctcggagggttggtgaaaattggataaagaagctcgttagttt

SEQ ID NO: 95007 - DNA, 428 bp, Oryza sativa
  unsure (1)..(428): unsure at all n locations
  Clone ID: PAT_MRT4530_93242C.1
ctcgctcttcatcatatatctcttgggggccccgaggggtcttcacagcctgctcgggggggtcgcgcgatggctccctagcccagcagctattaggccagagcactagtcaatggcagagttctcgtcctggaagtccgagaggatgtagatttgataggttgcaagcatttgagcccggggcggcggggaggtctcaagctggcacaactgagttcttcgctgtctctaatgagttgtttcaatgtaccggagtctctgttgtccgccgagttattgaacctagaggcctactactaccccgttacactaatggtgcctctctagtgtatatcatccaagggagaggtgtaacagggccgactttcccaggctgtcctgggacctaccagcggcaggtccaacgntcagggcaagcccaattgacc

SEQ ID NO: 95008 - DNA, 732 bp, Oryza sativa
  Clone ID: PAT_MRT4530_93243C.1
tcagtggcggccaaaccgctgctgtggttgatacgccaacttggccactcggcagcattcccttagattccctgccgggcccgcaaccctagcttgggaagtcgtgaggcaccacgtcagaccgacctcaggaggccaatgtccgatatggtgccgggggctactgtcggagatatgggaccggggcctggtcctgcccccgcagcccgcgaaccgctggagcggccagggggggtcggggcctcggggtgccacgtcatgcccctcgggcccttgcaccgcttcgccccgaggccctcgcccagccgccatttggcggggggagctagcgaggagggggcccaggctgagcatcctttattgcaccgacaaccgtgctcccacgtcgcgtctgctcctggcggagtggaggtagggctgtcccccgtgtcaggcgagggacggcgctgggccccacttgaggacaagctgtggcttagcttccaggcgaaggcacggtttattgtctttcttgctggttctaggatcaaaccagctggcatgctcttgacactcgagcaaaatcgaccggacgagttcgccctatctgggacgagcgcacggcatgagccggtgctttaccctgctcgcgccgtcatctgtccgcgttctgttgcccttcccgccaccctgctcgctccgtcgtccatccatgctcgctcgcccaactcgccgccctgctcgccctgcacg

SEQ ID NO: 95009 - DNA, 476 bp, Oryza sativa
  Clone ID: PAT_MRT4530_93244C.1
tcgatggcatccataaatcgccccatagagggcttcacagtgtgcttgttcctcttgtgcaatgactctctagcccagcagctattaagccagagcactagtcaatggcagagttcttcgtcgtggcagtccaacgagaatagcaggttcgatggcgctgcaagcattcgagccaattctgagtgagaggtctcaagctggcacaactgagttcttcgatgtctctaatgagcaattccaatgtaccggagtatctgttgcccgtcgagttattgaacctagaggccttatactaccccattacactaatggtgcatgtctagtgtatatcatccaagggagaggtgtcacagggccaactttcccaggctgccctgagttctaccaactacagatccaacaatcaggccaagcccaattgaccgaaagtcagagccaaagtcaacagttcaaggatgaacatcaaaagatccacc

SEQ ID NO: 95010 - DNA, 308 bp, Oryza sativa
  Clone ID: PAT_MRT4530_93245C.1
cataataatacttaaaaaggcaagagaaattttccgcaaaaacttattcatattttcaaacaacatttttcccaacacatgctcattgtggaacacacatctaaccacctaaaccttttaattcaccattattatttttaccaaacatacgtcccaaaatcaaaacacatccttacaaccaaaaatactaatatcctgcctgtctccttcacacaataaccaaacgacaaccttaacagataaaaatgccacctaatgaaaacaaatcacctaatctttaccaaaaggaccacccactcattcaccca

SEQ ID NO: 95011 - DNA, 584 bp, Oryza sativa
  unsure (1)..(584): unsure at all n locations
  Clone ID: PAT_MRT4530_93246C.1
gcgggccggcgggggcatgggggggtcgttgcgtgtggcgnccggtcggaggcctgggcggcggggcgtngaggtggcgtgagcgtgcgtgngggcaggggcatggccngatcgtggcngagggtcggacgtgccagtatcttggtgtttgngagcttgctgcgtgatgaangtggcatgctgtgtgcgccgagagccatggagctgntggatgtgttgcgttttccctgtgggcaatgatntggttgcgtgcatgctgcctctcgccgggcacaccaccatggtggtgngtgctgatgatgatatggtgcctgttgcaacagtggtgcagccagatgttgcgtgggtgtaaaaattgcaaagaggttattctttgcatgctggatgagtagtgaccagtgagtatggatcccagcaatgtgatgtaagactactgggatgcaatatggtagtatttttatgatttcagttaataagatgctggaggcttttagctgaggctnactctcgcgtgtgtactctctctgttctaaaatatatgaaattaagacacccatcatatataaaaaaaaaaaaaaaaaaaa

SEQ ID NO: 95012 - DNA, 186 bp, Oryza sativa
  Clone ID: PAT_MRT4530_93247C.1
atgcctaaagaagcaaggactgaacctggtgctgtccagcccaagcttgttcacaacaccactggaggacccggcttgctgcgcgaggccggtctgaccgccgccatagggccgatcagaccaacggtgtggggccagtttgactggcggtatgtagccgataagaccggcagggtccagttctga

SEQ ID NO: 95013 - DNA, 300 bp, Oryza sativa
  Clone ID: PAT_MRT4530_93248C.1
atggagaagcgccagagcctattggttataccaaccaagcggggcggaagctggtggaatcactatggtccgatcctccctacagatttatgttacacaggatttaaacaagttaagtttacgagcctacagatatctgacgacgttgttacaaaagttatcatcatgcatatattttcacttatgcttataatcaggacaaagtcctcatcttcaacctccagcagcccgatggactgggagcttggccatggctttggcgagctcgtcggcgacgattggtggctcgattgggaatga

SEQ ID NO: 95014 - DNA, 366 bp, Oryza sativa
  Clone ID: PAT_MRT4530_93249C.1
atggggggcccaattcggcctaacctattcggcgccaaggggaaccggcaccagggcacaggcggggcaaaaagccggcccgcccgaccaagggcgggggggggcatcggccccccggcggcaccagttgggaacgtggaacgccggcgggccgcccggcaaagagaaaaaggaggaggaggcggcctcaccaagaggcgcggcaaccgaaggaaacggccgcgggaggaaggcgccgggcgcctcccgggggaaaaaacgcgggcggcctatccggcggtctccaacgaaggtgaaggagcggccggggtacgggggagcgcggcgaacgcagtagagccggtggcgtggcttggtggtggctag

SEQ ID NO: 95015 - DNA, 387 bp, Oryza sativa
  Clone ID: PAT_MRT4530_9324C.1
atggcggcggccgccggggacggtgaggacgcgaaggcgacgcggcagccggagcagcaaccggaggctgcggcggcggaggctggggtggcggcatatggaggcggcgtgatcgcgaagctggaggagcagtggcggaagacgaaggagcacgcggagacctacccatacgtgtggggatcctacatcctcgtctacggcggcctcgccgcctacctcacctggcgctggtgcaagctccgccgcaccgaggaccgagtccgcggactccaggcccgcctccgccaactcgccgccgccgaggagtcgcaggcggcttccactcctcctccgccgccgcagcagccgccgctgtctgggcccggcaagccaacctccggcccgtga

SEQ ID NO: 95016 - DNA, 774 bp, Oryza sativa
  Clone ID: PAT_MRT4530_93250C.1
atggctgagatcgggacggtgcgcgaagggttgtatgcaggtggccaggctggcgagaagctgaccagcaagacgaccagcatcatcgcttccatcataatctctttcgcacgtgtgattgtcatcttcatccccaaggtcacaatcatccttatcgttatcaacgatatcctcatcatgggcgacacgggcggcgaccaccaccgcctcctcctcacccccgccttactccctcctccgcttcgttgtcgcccaagcagacgccggaaaacgcacggctacaaggacggggcggggccttccaactccctcgaggtcgcggggtcagtgctcatgaccccggccagatcaaggcagcgacggcgccgaggaagagagcagcggcgacgacgaggccagatccacggcgggctctgccagatttggagccggcgaaggtggaggaaggggaggatgaggtggcaggcggcgagggcgcaggagaggtggcggtggggcggcggctactgcaatgggcgcagccagagcctgccagagctagcgcccctcggacgtagtagggggcatgaggtggcgctgaaggcgccgtcgcgacatggcggtcatggcctcaagcgcgcggcgacatccatcacagttggcgacatgcaggggagttttctaggcgctggcgtcggcttgtggagtcagagctggttcgtcggggtgacaaagctgggcaacgatgacatgctacattctctttctaggggtgttgttgttggctgtgaatag

SEQ ID NO: 95017 - DNA, 344 bp, Oryza sativa
  Clone ID: PAT_MRT4530_93251C.1
cggacgcgtgggcttggatgcaatgaaggcttggcaatagctatgggctgtaatatgtcagaggtctgtatagcctcagactgccttgaggtcattaggagcatctcaaagaaaccaaggtgccaatatttagcagtcctaaatgatattgaggcaagaaggaagcattttgcaaaagtagagtttcgtcatgaaaatcaggcttgtaattttgatgctcacaacttagctaagtttgcttctactttacaggaggggtgttatctttggttttcaaatcctccttgtaatatgaataggaatgtaaatgtggacagtaataaataaattgtccgctctttctc

SEQ ID NO: 95018 - DNA, 3257 bp, Oryza sativa
  Clone ID: PAT_MRT4530_93252C.1
atggcggaggcaaaaggcaaaccgacgtccaccaagaaaggcaggaaggctgcggccagcgcggtggcggtgggcgacgacatcgactcgctcaagtccgatgtcgcctccttcgcctcctcactcggcttccttggtgccgccgccgcctcctccggcttcgacgattctgatttccgcaagtccggccccataattcctcccaaaacctcaaaatccgcgcaaaccaccgacgcccccccaaaccctaaacccaccaccaccaccaccaagaagccacatcctcttgatatccatggcaccaatgccacaaccaaatcagtatcaggtgctgtcaccaccaattacccgctgatgaaggcaacggctctgtccgggcagtggtacgcagatgctggtgagctcgaggcgagcgtcctcggcgctcgaaagcaagtcctgccttctgtgggtctccaggagatgcagaggatctcggagggcaagcgacagctggcggagaagcttatggcgcagtacacggtggaatatgacatggtgaagcggggtagcggcgacctgaagcttctcgagatatcggcaaagtctggcacatctgctgataaggtttcagcattcacatgccttatcgaagacaatccaattgcaaacatgagggcactcgattctctccttggtatggttacatcaaaggttggtaaaaggtatgcgttcacagggtttgatgcattgaaggagttgttcctcaaaagggtattacctgatcgtaagttgaaaagtcttattcagcacccattagatattttaccagaaacaaaagatggctactcacttctcctcttctggtattgggaggactgcttgaaacagaggtacgagaagtttgttattgcattggaggacgcattaaaagatatgctgccaaatcttaaggacaaagcaatgaagacggtttttatccttttaaaggaaaaggcagaacaggaacgccggttacttacagctcttgttaacaaacttggagatcctgaaaggagagcagcctcaagtgcggcatatctgttaacaagtctcctatctgctcatccaaatatgaagatggttgtgatagatgaggtggactcatttctctttcggccacatgttggtcttagggccaaataccaagctgtcaactttttgagccagatttttcttaccagtaagggtgatggcccgaaaatagccaagcgtttggtggatgtttacattgcgcttttcaaggtactcatgtcttgctctcgtgctactgaaggagttaaacacagcaaatatggcaagaaaactaatgaaaatgggaaaaaggaaaagggcaatgacttcaattctcatgtaaagcatgaagacccttgtgcaggatcagatttagagatggactctaggattctctctgcacttttaactggggttaatagagcattaccatatgttgcaagctcagaagttgatgatattgtggaagttcagacaccaattctttttagattggtgcactctgtaaatttcaatgttggtgtacaggcattaatgcttttgtaccaaatatctacaaaaaatcagatcgcaagcgaccgtttttaccgtgcactgtatgcaaaacttttgagtcctgcatccgtaacctcgtcaaagccagaattatttcttggtttattggtgaaagcaatgaaaaatgatgtcatgttaaagagagtggctgcatttgcaaagcggttgctgcaggttgctcttcagcggcctcctcaatatgcttgcggatgccttttcatactgtcagaggtccttaaagcaaagccaccattgtgggcaattgtgctccagaatgaatctgttgatgatggtattgagcactttgaagacatagtagagaatactgattgtccagctattacctcaagaactacagataaatgcaatgacatattagctactcttgagaaatgcaattcagatgctgaggatgcctgtgatactatagaatgtgtaagtccaatctcaagtggtgagaaagatggaaaaggcacatcagctgaggggttgacacttcaggcatcttataatccacgacacagagagccttcttactgtaatgcagaccatgccagttggtgggagcttactgcactggccttacatgtgcacccatcggtatctactatggctaggacattgctatctggtaacaatatcgtttatagtggtgatccattgacagacctatcactccctgctttccttgacaaattcatggagaagaaaccaaaaggaaaccgcatcgctgaagggaaatggcatggtggatcccaaattgcaccagctaaaaagcttgatcaaagtcatcatctcattggagaagagctactagaactggtagaaaaggaagttcctcctgaagatgttgttttccatcgtttctacatgaacaagactggccctattaaacctaaagcaaagaagaaaaccgcggttctggatgaagatactggagagctctttgctgatgatgtagatgatgctagtgatgaaagtgatgatgaaatgcaggagctgggaattgggtcgatagaagatggagaatatgattatgataatctggatgcaaccacatttgaggaggaaggggatttgcttagatatgacagtgatgttgagttgcatgacatttcagatgatatctcttctggagcagattctgatactgaagcccttgaaggtgctaaccattcagatggcaatgacagtgatggagaggagccagtccaggggcaaaagaggaaacatggtgcaaagagtggagcatcgccatttgcaaaactagaagactatgaacatctcatggatggggaagcggaaaagccaacgtttaagaaggggcggaagcacagggtaaccagagacagcaaggagaagagaaaaggtctgagcagcaaggagaaatcaggatcacgaaagaaaaggtcgaagagatcagaatgagataaacatttttaccattttcatgtttatcgtaatcgcaatgatggttatgaaatttttgtagcttatagtttcggtgtttgtatccttcgcccacctttttcatttggacacgttcctgatgaatattacactaagaaatcacttggagattagggacagatcaacggggctggcttctccctaaaaaaaaaaaaaaaaaaaaaaaaaaaaaaaaaaaaaaaaaaaaaaaaaaaaaaaaa

SEQ ID NO: 95019 - DNA, 765 bp, Oryza sativa
  Clone ID: PAT_MRT4530_93253C.1
atggctgagatcgggacggtgcgcgaagggttgtatgcaggtggccaggctggcgagaagctgaccagcaagacgaccagcatcatcgcttccatcataatctctttcgcacgtgtgattgtcatcttcatccccaaggtcacaatcatccttatcgttatcaacgatatcctcatcatacgccggaaaacgcacggctacaaggacggggcggggccttccaactccctcgaggtcgcgggggcgagcggaggcgggctaggtgcgggggtggcgacggtgccagactttgtgtccctcgccagatccgggccccactcggtctggccaccctctcgcggacaacggcgacaaccaaaggtggaggcaaggaaggtagatggcaggcgccgaggaagagagcagcggcgacgacgaggccagatccacggcgggctctgccagatttggagccggcgaaggtggaggaaggggaggatgaggtggcaggcggcgagggcgcaggagaggtggcggtggggcggcggctactgcaatgggcgcagccagagcctgccagagctagcgcccctcggacgtagtagggggcatgaggtggcgctgaaggcgccgtcgcgacatggcgctcctcctcctatggccagctcagatgtggtcgcggagagatccatggggaggatggaggcggtgccttgcagaggggagtggcttgacggcgttcaaagcgacgttgttactctgccggaactgtgggcgatggcctag

SEQ ID NO: 95020 - DNA, 270 bp, Oryza sativa
  unsure (1)..(270): unsure at all n locations
  Clone ID: PAT_MRT4530_93254C.1
aaaaaccaacccaaccgccgccgcatcgncctcgttagaacgatggccgcgtcggcgctgcaccagaccaccagcttcctcggcaccgtccctcgncgggatgagctcgtccgtcgcgtcgggacntccggtggccgcatcaccatgcgncgtaccgtcaagagcgcgccccagagcatctggtatggacctgaccgtnccaagtacctnggnccgtttctnggagcagacggcatcgtacctgaccggagagtttcngggagactacgg

SEQ ID NO: 95021 - DNA, 3639 bp, Oryza sativa
  Clone ID: PAT_MRT4530_93255C.1
tcttatctgccattaccgaagccgagcaggcgaggcgaggcgaggcgagcggacgccatggagcccggcgtgagcatcgagtccgggtcggcgatccgcgtggcggtgctgccggtgggcgggccgatctcgccggcgcgcctccgcgactacgcggcgctggtggcgcggcacgcgcgcgtcgacctcgcctcgctgcggccctactactcggagcaccagaagagccccttcgcgcaccagccgtggggcggcggctgcctccgcctcaagttcgtgctcggcggctgcgtgccctcgccgtgggaggacttccagtcctcccgcaaggtgctcgccgtcgtcggcatctgccacctcccgtcctcccccgatctcggccgcgtcgccgccgacttcgtcgacgccgcgcgctcctacccctccgcgctcgccagccgctgcttcgccttctgccccaccgacgcgcagctggtgcagaaaaagagggataatattattatgttccctccttctgatcaacaatcgttggaacttcatatgctcacgatgatccaagacctttctgcttcgctgttgatggagtttgagaaatgggtcttacgtgcagaatcaacgggaactattctaaagactcctttggattcacaatccagtcttggctcagaggaggtgattaaggctaaaaaaagaaggctgggtcgtgcgcaaaagataattggagattattgcttgttggctggatcacctgctgatgcgaatgcacattatgccactgcaatagagcttgcaagattaacaggagatgttttctggcatgctggagcccttgagggtagtgtctgtgcattagtggttgataggatggccgaaagtgaccctgttttggaggacgaagtgaagtttcgttattacaccattatccagctatacagaagagcaactttacaagacaatgctcaaagagtttcaccagtcagctttgagcttgaagctgcattgaagctggcaagatatttgtgcaggcggcaatgtgccaaggaggtgtcagatttactaatgggcgctgccgatggtgccaaggctctgattgatgccagtgatcgcttgatactctatattgaaatcgcgagactttttggtacacttggttataaacgcaaggcggcctttttttcaagacaagttgcgcaattgtatctccagcaggataatgcatatgctgctatgagtgctatgcaggtcctaaccacaactacaactgcataccatgttcaaagcaggaagaccagcaaaatggatcatggtttgctcaagctttactggttatccttatttgattctggcaatactgatcctggaaaattgcatcctcagtctgtagtatcactatttgagtcacaatggagtacccttcaaatggttgttctaagagagatactgatgtcttcaatccgggctgcggatcccttatcgtcgtggagtgctgcagcccggcttcttcggttgcattctttcccactgcacccttcacaaagagagatagtgaagcgcaatccaaataaaaaagagtggtggactggtggtggtccttctggaccttttatttacacacctttcaccaaggggggaacatctggaactagcaaacaagaggtaaattggattgtgggagagccagttcaagttatggtagagttagcaaatccctgcagctttgacctaattgttgagagcatttatctctctgttcattctggaaattttgatgcctttccggttagtgttaatcttccaccaaacacttccaaattggttctgttatctggaattccaacacaagttggacaagtatcaattcctgggtgcattgttcattgcttcggtgttatcacagaacacctattcaaagaggtcgattgtctactccttggagctgcacaagggcttgttctttctgatcctttcagatgctgtggctctagcaagtttaagagcgttaactttccaagcatttctgttgttcctcctctgccattattagttgccaatgttgtgggcggagatggttctattcttctatatgaaggtgaaatccgtgatgttttgataacactgacaaatgctggaactgtacctgttgaagaagcaaatgttgcattgtcagggaagaaccaagattctgttatttcgattgcccatagcacatggaaatctgcacttcctattaaacctggtggagaagtgacattcgcagtgactctcagagcctggcatcttagcccgacagatttggaagcagatggcagcagatctcctgcaaactcaaggaggatagcaagagaagggagtaatcctttcttggatattcactatgctggtccttcagggaactctgagagcaatgatgtttctctcccacctggaagacgtctggttgttccgttgaatatttgtgttgtacagggcatgcgacttgtaagagcacgcctgttgtccatggaattacctgcccggtttactgatgctcacttaagatctgtcagtagcaaggacaatctaagcaatggcagtgatgcgattcgtaatgacattagcttattgaagattgatccttataaaggaagctgggacctccgtcttctggaacttgagctgtttaatcctactgatgttgttttcgatgttgatgtctcagttcatctcgatggcacaagtgtcgagcaaaaaattcttccagaggataaaacggccagttcggcttgccacaaaactcgaattgatcgtgactactctgctagagttctcatacctcttgagcacttcaaattacctgttcttgacacttccttctttgtgaaggaaaatggaagtgatgaacctcttggatccagagctgccacgttagcagaaaagaatgccaaggcggaactaaatgcttcaatcaacaacttgatttcaaagataaaagtgaagtggcattctgggagaaatagctccggtgagctgaatattaaagatgctattcagacagcattacaggcatctattatggacatactgttgcctgatccgctgacattcagctttagacatgccaaggatggaacaacagccaaaactgactcttcgaaggagcctggtgacggttccagtcgttctgctgatgagagtgttctgaggtgtaaggatcctatatttgctaatgaaatgacccatatggaagttcaaattcgcaataacactaaggaaactattcggatgaacctaagcatttcatgcaaagatgttgctggagagaattgcttcgacgaaaatagcgcaactgtcctctgggctggtgttcttagtgacatatatctggaggttcaaccactgcaggagcctggcaatcgccttgaagagcaggagcttcaagggaagccttcgccggtgtctgagctactgaagtgtgcaggattttatgccctccgcaagttgcaaaaggtagttatagaaatagaacgaaatgaggctcgactggagaaaatcgctaatgttgcaagggcggctcttacgaggatgaacaatggggagacactatctcaggaggagatgaaatcgtaccttgaagaaattattcgtttggctagtatctaa

SEQ ID NO: 95022 - DNA, 787 bp, Oryza sativa
  Clone ID: PAT_MRT4530_93256C.1
atggaggtggagaagaaagaaattaaggccgggttaattagcgctgaggttgtaaatagcagcgccactggacctgacgctgacctcgtgccagcgtggcagctgagccgacccccctgccgacgtggcaagaacctcagcgccaatcgcttcggtgctgtgttgcccaaccttagcgccaaccgcttcggcgctgagatgcccacccttagattgacatacagaaggaaaaacaagaagaccaccgatttgactgcttatcatcagacacacatcgatcgatggaaccagttcgaagccaaccgcatgccggataaagcaatgcacaacaggcaagagtttgacgcgtacttagcctggctcacgaggaactaccgcctcgccctacgtctgtcttggacgctagccaacatagcggacgacccaactggggtggaggagcagaacaagtacgatacaagtacccgtagaggtagcacggcacgggagctgatcaggacagtcaacgatgcgggcgtggcacttggcatgccccccggctcgcaacaagagagcagcgttcttcgaaatgcattacaggatgcagggccgatgatgccgtcgaaccaccttgacgggctgagcgggggagaagtcgaggagtggctcaagagggtgaacaagagggagaggaggaggaagaggaggagcaagtggagttcggtccctcccagctgcaggacgctccacaatcgttgcaggggccatctcgaccacagcgcaagagagcttatgtttccgactgaag

SEQ ID NO: 95023 - DNA, 305 bp, Oryza sativa
  Clone ID: PAT_MRT4530_93257C.1
gtttgctttgcacaagccccagcaccagcaagctggtactcatcatcagcgagagctagctagctgtgtgcgccacttacactgctgctgctgctggttctagctaagctcaccgatcgccgtcttcgtcatcgccggtgacctggcgaattagtccagagagatggcggcggccgtgacggtggcggaggtgaggtgggcgcatacggcttaggggcacctgccttgcctatctgatccaaaccttgtcccacccgtccacacctgaccatgctggatcatcttactgctgtttatggatattc

SEQ ID NO: 95024 - DNA, 601 bp, Oryza sativa
  Clone ID: PAT_MRT4530_93258C.1
gaaagcaagatgggttcagagatcagagttttcgggaaaacaggaagatggcgattgccaagagactttccatggttgcgttgtgtaagtggattgttgctttatttcgctctcagaaaaggaacccatcacaaagcaggtacacatttggtctatctggcaacaatgtcggcttgctagtactcctggacaagtacccgcggattcagaaaactctcacaagaagaaagtaaaaaacgcggattctgaaaaatctcacaagaagaaagtaaaaaaccttactggaggagcaactgctgttcagtgtaaataaaaatagccatcggttggggagtttgcttgtaatggcattctttatttaaaggttgggtggagcaagtgtttccttgattcttttaccgatgtttttcgctttgtcagtcaccagcacaggaaatgcggaaggttattgctttaatcctgtgatttgttcgtgctgttttgggggacgcttttgcttatttctcaccggcaaaagctaaatgcatgtacagtgtgcgtgtaatacatggtggttggagactggtggttgattgatttctttccttccagattgagtgaa

SEQ ID NO: 95025 - DNA, 1494 bp, Oryza sativa
  Clone ID: PAT_MRT4530_93259C.1
cagaaatcccaatggcaatggagaagagccctcctccggcgccgcacttcctcttcgtggtgagcgggatacagggccacatcaacccggcgcgccgcctcgccgcgcgcctgatggcgtcggcgccggccgcgcgcgtcaccttctccaccgccgtctccgcgcaccgcctcatgttcccgtccctgccgtccccggccggcgaggacgtcgacgacaccggcgtcgcgtacgtcccgcactccgacggctacgacgacgggtacaagcccggggtgcacgcgagggacgactacatggcgcgcacccgcgccgcgggcaccgagtcgctctccgccatcgtcgcggctctcgcggcgagggggcgcccggtgacgtgcatcgtgtacacgttcctcgtggtttgggcccccgccgtggcgcgcgcgctggggatcccctcggcgatctactggatccagccggcggcggcgttcgccgtgtactaccactacttccatggccatggcgaggccctcgcctcctgcgcgaacgaccctgcccgcggcgccgtcgtgcgcctccccgggatgcccgttcctcaggtccgacgagctcccctccgccgtgtccatcgtctcgccggagcacaagcactacctgctgctcgccatgctgcgcgacctgttcgaggatctcgacgagctcaagcccagggtgctggtgaacacgttcgacgcgctggagcccgacgcgctccgcgccgtgcccgatctggaggtcgtcgccgtcgggccggtggtgcccgacggcgaagcgtctctgtcgagctcgagcacggacatgttccggcgagacgacgcgagcgcgtgcgtggattggctggacacgaagccggcgcgctccgtggtgtacgtctcgttcgggaccctcctgtcgatgagcaagcggcaggaggaggagatgaggcgcggccttgaggccaccggccggccgtacctgtgggtggcgcgccagggcgccgtcgatggcggcgcgaccttggacagcgcacccacccccgccgccgatgccggcggcggcggcggcgaaggggacgcgcaagggatggtggtggagtggtgcgaccagatgaaggtgctctcgcacccggctgtgggctgcttcgtgacgcactgcgggtggaactcggcgctggagagcatcacccgcggcgtgccgatggtggccgtgccgcagtggacggaccagccgacggtggcgtggctggtcgaggcgcgcatgggcgccggcgtgcgcgcgcggctggacggcgagggcgtggtcgagcgcggcgagctgcagcggtgcgtggagctcgccatggcgggcggcggagacggcggtgtccgggcacgggcggagcgatggagggagcgcgccgcggaggcggtcgcggccggcgggtcgtcggagaggaatctccgggcgttcgcgtccggggccgtgacgcaggcggtgtgctcgagcaggtga

SEQ ID NO: 95026 - DNA, 273 bp, Oryza sativa
  Clone ID: PAT_MRT4530_9325C.1
atggaggactcacctgaggtcggccgggggggctcagtggtggcggcgccgggctcggtggaggcggcgggctcggtggcggcggcggcgggctcggcgaaggaggagttcgcggcggcggcgccgggctcggtggagggcgtcgccgatgagagaaatgtgatttttgtgaataatataattatcactttgtcggatgaagaagtgaccaaaagaaaagttgtagatcttgatgagaggatcaactttgttgttgaccatattcccatgtga

SEQ ID NO: 95027 - DNA, 246 bp, Oryza sativa
  Clone ID: PAT_MRT4530_93260C.1
ttttccgcccgctctacgtctccacgggctccgccgtgtcgtcgccgcgcggggcgttggagatggcggcggcggcggcggcgatggggatggggctgtcgtcgctccgggtcgtagtggttcacgccgcgattgagctctcccgccggttcactcacctgcgggggcggcggggggggcggctcgtggcctgagccggctagcgtgccgcttgtatggctgcccagtggggccgggaacgtacac

SEQ ID NO: 95028 - DNA, 3279 bp, Oryza sativa
  Clone ID: PAT_MRT4530_93261C.1
atgccgccggagatggacgagatgccgctgagcgacgacgtgctccgcgagatcctcctccgcgtcccgccgctgccgacccagctcatccgcgccggcgcagtctgcaggcggtggcgccgcatcgccgccgagccggggttcctccgccgctaccgcgcccaccacggcgagccgccgctgctcggcttcttcgtcaacccgcgcggccgggagcccctcttccgcgccaccctcgacgcccccgaccgcgtcccgcccgagcgcttctccatccgcctccacgacgacaccgagctcggcggcaactggtactaccacggctgccgccatggccgcctcctcctcctcaactggaagagcggcctcggctgccgccagatcctcatctgggaccccgtctccggcgacctcatccacctctcccccccgccgcagctcgatgccctaaagggggtcttcttccaggccacggtgatctgcgccgccaccaccgccgccggtgaccacgtccacggcgacaactgcaagtccaaccccttcaaggtggtcctcgtcggcaccgacaggtccaccgccttcgccttcgtctactcgtcggagaccggagattggggagaccatgctgccgaaaccccagtggggaattgcatctcgcttgggtgcagatgcatccagattggggatttcctctactggatgctcttcggctacgacaacaacatcctcgagttcaatttggtgaaccacagcctctccgtggtgtatgtgccgacgcatatccatgaagatcatgatggcctctacccgattactctccaagaggggacagagcttgggctcattgtcatgtcaagatcctgcatgcagatatggcagtggatgatcgatttcgacggcctccccgggtggctgccgctcgaaccgatctacctcgacaatcttcttcatctgagcgcgggggagtgtgtcaatccgaccaaggtgctggggttttcgcaggattacaatgagctgttcgtcgcgtcgtccaccaggatcttcatgggcccgcgcgacggccaggtcttggcggcggcgcgcgggcggctgtggggcgttgtgggccaacacggaacggcggcccagggaccagcgtggtgtggttttgggcgaacggtggcagaggatccggtgccccgtggccagatctggtcgccccacgcccggctcaagccggcgcgggcggccgaggggcgtcacgggcctgtgcggggctgcgtagcgtggcgttgcctgggcggatggtggcggcggccctcccgaagggcgcgaccagctcagcagccgggcgatggcctggggttggcgcagcgcaacctgcgcggatatggcggcggccctctcggagggcgcggccagaaggctatggtcgcggtggtggcgttcgaggtggagatggcggtcgtaggccttgaggcagggcgcaaagggagcaatggcagtgctaagggagctggcagcgaaagcaagcacaaagagtatattgaaagggcacaatggatagaggagaacatttctaatataaagcctttcacagaagaagatataaaaagaattaccagtgactacaacaccaatcttggaaatggtggattcggaaaagtttacaagggagttcttgatgataaccatttcgttgcagtgaagaagtatattaaaatggattctgaagaaatgtttgcccaagaagtacgtgttcacagtcaaatcaaccataaaaatgtagtcaggctaattggctactgcatcgagaaaaatgctccaatgatggtcatggagtatgtgcctaatagggaccttgattaccatcttcatgacaagaatagccttgattcattggacataagattggatattgctatagagtgtgcagatgctctagggtatttacattctatgtgcagccctgttctacatggtgatgtaaagccttccaatattctgctggatgacaattttaatgcaaaaataacagattttggaatatcgagacttctctcgacagacaaaactcatactgttaagtgtatagggagtataggttacgtggatcccctgtattgtcgggagggacgtctcacctccaaaagtgatgtttatagttttggaatagttcttcaggagcttatcaccaagaaaaaggcggcaagtctggctcaagctcttgctgaaggaaagggggtgactgaattgcttgatcccaaaatttgcaatgagagcaacatgaaggttttagtggagattggaaaattactacaggaatgcctaacagaggacattcatagacgtccggatatgtgcgacctggctgggcaccttcggatgcttaggaaattctgtttgagacaacctgctccactagaaaattttggttggcacctctttcctgaaacacagaatgaagataaagaacaaagccagcaaggtacaaacaatgtcagctccagtttgatggcgttccctaagatggcaggcattttcaaccggaacattcttgttgtcgagtatgtcaattgttatgagaaagaaaacagtgggaggattatgtttgacaatgagatcactgctgaggaaaacatggccacccttgaagcaattggcattctagcaatgaatcgcttcatcaccgacagcgaccacgccggtaaccgcgaggacgaggatgacgagcggcagcacgggccgtcagagaccacgccggaggagatgttgactgcgctgggcagggctgggcaatgggctagcccacggtgttgtggcccattcagggcaaattccgctgtaccttcaggcggtcatagtctccgtctgtccctagaggcctgcaaaaatcaaagattttttgcaagcggaccccttgtccgtttacgaaaattatttttccagccgctgacaggtggggcccgtctgtcagccgccgtcgtcggtcgccgtcgccaccatcgggttcgcaaagtcgtcgccatccccgtccaccgcttcgccaccgccgaagaccgccggagctccgtcgccgccgtcaacccgatctccgccgtcgcttcttcctcgtcgccggcgctgtccgttgcttctccgctgcttctttggtcaccgagccgccgttcgccggcgagcgtgcgccgtccgagccgccgagccgccgccgccggtggtgacgtcatcgctgacgtcatcgtccccgtctcccgtgagccggtcgtggaccgatcgatctcggccgtccgttttggatag

SEQ ID NO: 95029 - DNA, 729 bp, Oryza sativa
  Clone ID: PAT_MRT4530_93262C.1
atgacgagtttgaagtatgatctaccgctcttggaccgagacacaagattctcacttttgcaagtgaagatgcaagccgttcttacacagcaagaccttgatgatacgctatgtagatttgataagatgacacaggattggtccgacgatgagaagaaaagggatagggatcataaggctatgccatatattatctttatctatatggagaagacaaccgctggtttgtgcttgaagctggaacatatatgcatgaccagtaatatgatgagtctgtgaaggaccatctctccactttcaagaaaattgttgctgactttgagcctacagaggtaaagtatgatgaagaggatttaggccttattctattgtgtttattgcctagctcatatacaaatttcagagatactattctttatagtcgtgataatctaactttgaaagaagtttatgacgcgttgcatgtcaaagaatagatgaagaagatggtaccttgtgaaggttcaaattcataagtagaaggcttgaatgttcagggcaagcaacaggagaaaacaaaaaacaaatcaagagacaaaaagttcaagaagctactgtgggagatcaaagtccagaggcaggtataactcatgcaaataatgcaagagagatggacatgatatctctcagtgttggaagctacggaacaaagccaagagaaaaacacaaggctgaaaaaaattatgtata

SEQ ID NO: 95030 - DNA, 2619 bp, Oryza sativa
  Clone ID: PAT_MRT4530_93263C.1
atgaagctcaggggcgtctccgccttccgcaagggcgccgcccaccagaggccggaggacaccaacggcgctggcggcggcgcgagggtggcgccgccgccgccgctcatcgacgaggaggcgctcggcgacttcttcgtggaggtgtacgccggcccgcgtgtgagcacggacatgagctgcagcgacatgtccctggacgagatggacgccacggtgaggaagatggagttcgtcgtcttcgaccggtgcggcgccgacgagtccgacgagaaggggaagaacgacctcgatgtctgcggcgacggcggcgacgatgacggcgaggcgaggccggaggagaggtttggtgccttcagagacagcacgtcggagtgcagcgacgcgtcgacctccggcgaattcgtcgaggagttgccgtggatcaggtaccaggggtatgaggatgatagcttggatggtgaattttcagacgaacacgggatcagagacgaggagatcactagagcagttgtttctgaatttcaagaagatcaagaagaagagggcacatcaggtagattgggagatgggtgcgaagatgaggctgctcaacaacaggaagaaaatgatgagcaaaacatctcagattttgcctgtgaatcggagatcgcgtcggagcatgaaggtgttgatttcagagttgaggcttgtgaggagcaggagagagtcagtgaagacaacatcctggatgcggcacatcaaaccgaggtttgtagagaacaagagatgcaagaagagaaaaactttgctgctgtctgcaaattggggattcctgagcaggaactagcagagacggcggataatatccctgatgagtgctgcaaagaggagacttcaatggagcaggacgaaggcggcgatgggaccaacatggagtctgaaagcatttcagaggttgccgagcatccgaatgtggaagatgaagagaacacgcaggatgatggtggatctgaaatggagatatctgaggagatcatctctggttttgggtgcgaagaggatttctccgaggaagtcacttcaaaatatgtctccgaaggtgaaatttctgactccggtgcgattgtttccctacatgttgaaatgcaaaaacaaccagtggagacccatgcctttgagcaagatgacagcagcactgcagacaatgcatttcatcaagatgacagcacagcagacagagcatttgatcaagatgacatccgtgcagatggctatgatgactctcagaaggaattggatattggaatgagagaattcagagttgcctccgaagaagttggtattcaagaagctaatagtgatgatcctgtggactgcacagaagatgctaacatggaactgggtgtattcttgtgcgacggcaagatgcttctgaaggttctggtatcgctcaagaaagcagccaagaagatattaccacacaaacaacagaagatgcttctgaagaatctgataccgctcaagaaaccactcttgatgataactctacaccactcgctgctggtgcccaaatggaattggggattggcacaatctggtattgctgaagaaacctgtcaagatgataatgctggatatttcagtgatgatgattctcaaaaggcaaccgtgataaccacatgccaattgcaagttgattatgaagaaaatgttattgctcaagaagctgatgataactctacaggtgtcagagatgatgctcaaaatgaacctgagcaaacatgtgaattggcaacatctgaagaatgtcattttacccaaaaaactattcaaaatcatggtgctctagaggaatccgtggttatcgcaagtgcatcagaagatgctcatgaagaatcagatcctactcaagatggtcatgaagaagactattctgtaggtatcaattctggtgctcagaaggaaggagagcttgacacaagtgaatctggaggtgcttctgaaggaactactgtgcatcaagaggatgatggacacgttaacaccacagatctgaatggcagtgctcaaaaagagattactgtctctatattagatgactctgaagaactttgcagtagtgaggaaaataatcaatcatccaatatgctaataccagagttcagcgataacttcagtgctgaagagccccagaaccaagattctgttgcaaaagaatcgtcccttgatgacatatgcaacgcattcagcgggatgcacctcaaaggagatgcatatcttgatcctactgagtccatgacttgtccggggaatagattgatcattgctaggaggaggagaacaccggaagaggaggaatatttgagaggttttaacccaagggctccaaattttcttcctcttgaactggacccagaatcagaaaaggtggacctcaagcatcagatgatggatgagcgcaagaatgctgaagaatggatgattgactatgcacttcggcgagctgtgaataatttaggccctgctcgaaagaagaaggtggagcttcttgtccaggcttttgagaccgtcctaccgcacgacgaggaagagaagaaaggcatcacaccaacaaggcctgtccaagcttgcaattga

SEQ ID NO: 95031 - DNA, 420 bp, Oryza sativa
  unsure (1)..(420): unsure at all n locations
  Clone ID: PAT_MRT4530_93264C.1
tttgtccccttaacccccttggttctcttatttttttttttttttttttttttttttaattgcaatatctccattttatatccatgtcaaaaagccccggcaaaaaacaaacagttcgatcccccaaatattatcccccctatccactgaaaacccccatcgaacccctaaaaagcaatgccaatgcccctttaacgagaggccccagcaaaaggagctaatccattttacccaattcccaaaatcaaccaaaaaaaaccccccccaacaaaccccccacggnggccaaaggccaaacgggggctcaactggccccggcggatccctcctcctccgggtcaaactccgggtcccccccggggggcatctccctccactggtcctcggcccaacactccttgatttggccccacttcttgc

SEQ ID NO: 95032 - DNA, 3691 bp, Oryza sativa
  Clone ID: PAT_MRT4530_93265C.1
atggtgcggagcaaggaggtgcacaagaagcccaaggacccgctgatgacgccgccgccgtcgtcggccaagaagaggggtttccgggacgacggccgcggcggcggtggggggagcaggccgaggaaccgcgagggcgcggcgacgtcgctgacgccggcgtccgtgcctaactacatgagggggacgggcagctccgacgccaaggtcgggcgcggggcggcgtcgtcggcgtcgccgcggcggaggccggtgcgggtggtggcgagggggaaggtgctgttcccgaaggtgtcggccgccgccgccgccgccgccagcgccgggctgggcagggcgacgtgctcgtcgacgatgaaggaggccaagttccccgacgcgctcgacctcgcccccggcgccaccgacgccgagggccccgccgcgacgcgggtctgcccctacacctactgctccctcaacggccacgcccactcgccggcggggcgtctccgccttccgcaagggcgccgcccaccagaggccggaggacaccaacggcgctggcggcggcgcgagggtggcgccgccgccgccgctcatcgacgaggaggcgctcggcgacttcttcgtggaggtgtacgccggcccgcgtgtgagcacggacatgagctgcagcgacatgtccctggacgagatggacgccacggtgaggaagatggagttcgtcgtcttcgaccggtgcggcgccgacgagtccgacgagaaggggaagaacgacctcgatgtctgcggcgacggcggcgacgatgacggcgaggcgaggccggaggagaggtttggtgccttcagagacagcacgtcggagtgcagcgacgcgtcgacctccggcgaattcgtcgaggagttgccgtggatcaggtaccaggggtatgaggatgatagcttggatggtgaattttcagacgaacacgggatcagagacgaggagatcactagagcagttgtttctgaatttcaagaagatcaagaagaagagggcacatcaggtagattgggagatgggtgcgaagatgaggctgctcaacaacaggaagaaaatgatgagcaaaacatctcagattttgcctgtgaatcggagatcgcgtcggagcatgaaggtgttgatttcagagttgaggcttgtgaggagcaggagagagtcagtgaagacaacatcctggatgcggcacatcaaaccgaggtttgtagagaacaagagatgcaagaagagaaaaactttgctgctgtctgcaaattggggattcctgagcaggaactagcagagacggcggataatatccctgatgagtgctgcaaagaggagacttcaatggagcaggacgaaggcggcgatgggaccaacatggagtctgaaagcatttcagaggttgccgagcatccgaatgtggaagatgaagagaacacgcaggatgatggtggatctgaaatggagatatctgaggagatcatctctggttttgggtgcgaagaggatttctccgaggaagtcacttcaaaatatgtctccgaaggtgaaatttctgactccggtgcgattgtttccctacatgttgaaatgcaaaaacaaccagtggagaaccatgcctttgagcaagatgacagcagcactgcagacaatgcatttcatcaagatgacagcacagcagacagagcatttgatcaagatgacatccgtgcagatggctatgatgactctcagaaggaattggatattggaatgagagaattcagagttgcctccgaagaagttggtattcaagaagctaatagtgatgatcctgtggactgcacagaagatgctaacatggaactgggtgtattcttgtgcgacttgcaagatgcttctgaaggttctggtatcgctcaagaaagcagccaagaaggtaactcggcatgctttaatgatggagctcaaatggtaccagatattaccacacaaacaacagaagatgcttctgaagaatctgataccgctcaagaaaccactcttgatgataactctacaccactcgctgctggtgcccaaatggaattggggattggcacaagtgagttgattgaaggctcttctgatgtcactgaacagtctggtattgctgaagaaacctgtcaagatgataatgctggatatttcagtgatgatgattctcaaaaggcaaccgtgataaccacatgccaattgcaagttgattatgaagaaaatgttattgctcaagaagctgatgataactctacaggtgtcagagatgatgctcaaaatgaacctgagcaaacatgtgaattggcaacatctgaagaatgtcattttacccaaaaaactattcaaaatcatggtgctctagaggaatccgtggttatcgcaagtgcatcagaagatgctcatgaagaatcagatcctactcaagatggtcatgaagaagactattctgtaggtatcaattctggtgctcagaaggaaggagagcttgacacaagtgaatctggaggtgcttctgaaggaactactgtgcatcaagaggatgatggacacgttaacaccacagatctgaatggcagtgctcaaaaagagattactgtctctatattagatgactctgaagaactttgcagtagtgaggaaaataatcaatcatccaatatgctaataccagagttcagcgataacttcagtgctgaagagccccagaaccaagattctgttgcaaaagaatcgtcccttgatgacatatgcaacgcattcagcgggatgcacctcaaaggagatgcatatcttgatcctactgagtccatgacttgtccggggaatagattgatcattgctaggaggaggagaacaccggaagaggaggaatatttgagaggttttaacccaagggctccaaattttcttcctcttgaactggacccagaatcagaaaaggtggacctcaagcatcagatgatggatgagcgcaagaatgctgaagaatggatgattgactatgcacttcggcgagctgtgaataatttaggccctgctcgaaagaagaaggtggagcttcttgtccaggcttttgagaccgtcctaccgcacgacgaggaagagaagaaaggcatcacaccaacaaggcctgtccaagcttgcaattgataattgtagagttagtggtcgaactaatcaagatcttgactcgcgagctactaactcagtggtcgctgcagtattatcgccggagacctgcttgaagttgaatgagagaactacttactagtttactggaaatctctagtttgggttgtttttactgaggatctctagttgagtttcttaggagctcaaaactgctccacagggaaagataaccactccctgaatcaaacagattcttatctagttactgagctgcaaggtaacagctcaccagctaagtactgtaacgtgtgtataaatgtctcttgtgctagtgtctgatatttactgatgagtgatgactgagactagcaaaatgtttagggtggttgatgccttagacagagatgaatagaattcttctggagtgcagattggttctggagtatgatcatacatgtatgctagtactactaatgtgcatttgtaacataagcagctcctgataatcctgggattgccatgagtgcacattcatcc

SEQ ID NO: 95033 - DNA, 371 bp, Oryza sativa
  Clone ID: PAT_MRT4530_93266C.1
accaaaagaacagatacgttaattgcgcataccataggacatccttcatacacaggtgatacgtaccacgacatttatacaaggcttgcatggaatttgtcaaaaagacaaagaccgaattacctgacaaaaatggtacatgacactatagttacatatgcgcattaccctgaactcgagcatgaattatgcatgaactgaaactctcagagctcagtaataaagaacaagcgatatatatataggagacagagaaaataaaaggaggggaggcaaacaacaactacatatgacaatttcattaatagagtatagatcatgtgttactgactgtagttcagtccatagaactagtgccgtctgatgaaaaa

SEQ ID NO: 95034 - DNA, 576 bp, Oryza sativa
  Clone ID: PAT_MRT4530_93267C.1
ccggccgggacaaaaccattcaagttcattagtactacaacaacatggcatccataaatcgccccatagttttcttcacagtttgcttgttcctcttgtgcaatggctctctagcccagcagctattaggccagagcactagtcaatggcaaagttctcgtcgtggaagtccaagagaatgcaggttcgataggttgcaagcatttgagccaattcggagtgtgaggtctcaagctggcacaactgagttcttcgatgtctctaatgagcaatttcaatgtaccggagtatctgttgtccgtcgagttattgaacctagaggccttctactaccccattacactaatggtgcatctctagtatatatcatccaagggagaggtataacagggccaactttcccaggcctgccctgagtcctacccaacaacagttccaacaatcaggccaagcccaattgaccggaaagtcatagccaaagtcaaaaagttcaaggatgaacatcaaaagaaccacccgtttaagacaaggagaagtaatttgcattgcctggctggtggtagctcatttggtggc

SEQ ID NO: 95035 - DNA, 604 bp, Oryza sativa
  Clone ID: PAT_MRT4530_93268C.1
gttcattagtactacaacaacatggcatccataaatcgccccatagttttcttcacagtttgcttgttcctcttgtgcaatggctctctagcccagcagctattaggccagacgcactagtcaatggcagagttctcgtcgtggaagtccaagagaatgcaggttcgataggttgcaagcatttgacgccaattcggagtgtgaggtctcaagctggcacaactgagttcttcgatgtctctaatgagcaatttcaatgtaccggagtatctgttgtccgtcgacgttattgaacctagacggccttctactaccccattacactaatggtgcatctctagtatatatcatccaagggacgacggtataacagggccaactttcccaggctgtcctgacgtcctaccaacaacagttccaacaatcaggccaagcccaattgaccgaaagtcaaagccaaagtcaaaagttcaaggatgaacatcaaaagatccaccgtttcagacaaggagatgtaattgcattgcctgctggtgtagctcattggtgctacaatgatggtgacgtgccagtttgttgccatatatgtcacctgactctcaac

SEQ ID NO: 95036 - DNA, 600 bp, Oryza sativa
  Clone ID: PAT_MRT4530_93269C.1
ccggccgggtggctgttggtaatgcagattagataaaaagcattcagctcattattcctacaacaacatggcatccataaatcgccccataggtttcttcacagtttgcttgttcctcttgtgcgatggctccctagcccagcagctattatgccatgagcactagtcaatgacagagatctcggcgtggaagtccgagaggatgtagatttgataggttgcaagcatttgagccaattcggagtgtgaggtctcaagctggcacaactgagttcttcgatgtctctaatgagttgtttcaatgtaccggagtatctgctgtccgccgagttattgaacctagaggcctactactaccccattacactaatggtgcatctctagcatatatcgtccaagggagaggcataacagggtcgactttcccaggctgtcctgagacctaccagcagcagttcctgcaatcacggctagcccaattgatcgaaagtcacagccaaagacataagttcaaggatgaacatctctagattcaccgcgttcagatgaggagatgttatcgcgttgcctgctggtgtaactcattggagctaccacgat

SEQ ID NO: 95037 - DNA, 1013 bp, Oryza sativa
  Clone ID: PAT_MRT4530_9326C.1
aaacaaaatagtattttatttcagctatcctcagttacaaaaaggaccgtgcaatctgatcaatgtaatcagaggcaacaatccgaacgaatccgaaaaccttttctcccgtcaatgagaagaagaaaagggtgacgatgcctcggtttcatatgaaactgcgagtgaacatcactactgcacttaaaaaacctcatcagaaattcagaattaaaataagaaaaaaaaaggctcttgctaccaaatgcaccactaggtttctacttagttcatcactccacctactgagtccaaaacttgtgcttgattagcaagaggttcccgtgccgcaaactgaatccaaaacttcgcggctagatcttcaactcggtatctagtgcctcctcgtcatgatttccgttaatattcttcaggttcgtgaaagcactatgccgttccgtgttgccgagtggggttttatttcgtgggaaagccgtaggaaaaatgtccttttcatcaggagatttctcacggcgagtgtaagctgcactcgccaacctctgcttgcggctctccaggaagctaacaagagacgcattcttcaccagcaatgagacatctgctcttggcacgatctggatttgccgcgagcatggattcgtctccttgatggtggcgtacccgtcctctgggctccgatgctgtcgctgtgaacaagcatcggctttgttctcgtggatgaacaaaccatcagcatctctctcaggagcctgataacagaatatcctcttctttttgtttggatatgcaggctgctgctgctggggaacatgctggtgtcctgcgtctggagacttctttgcagcgaagaatataacctcctcagcctgcacgcatagcgaatctccacgtccccagtgttgtatggccaagtcataatcaaagcttgacttctcccttgggacgttgtcgaacttcaccatagacccggagtagaaaatcgtcagctgttcagtcgttccaggcacggccat

SEQ ID NO: 95038 - DNA, 259 bp, Oryza sativa
  Clone ID: PAT_MRT4530_93270C.1
agaaattaacgagatgaaagggggtgcccccaattaaggctgggtgcgtgctacatcattgaatgtaagaacactaagtgcaggtgcgaatgaaaaaaatcggccaacaggaaactaacggtactaagggtcttttaccgtaaatggcgcgggtaaaattaattcccaagagaaaaatggcgagctaacaagcaaaagctgtttaactacttgaatgtggctacattttttatctggggggaggggttgaattgattcg

SEQ ID NO: 95039 - DNA, 573 bp, Oryza sativa
  unsure (1)..(573): unsure at all n locations
  Clone ID: PAT_MRT4530_93271C.1
ctacaacaacatggcatccataaatcgccctcatagttttcttcacagtttgcttgttcctcttgtgcaatggctctctagcccagcagctattaggccagagcactagtcaatggcagagttctcgtcgtggaagtccaagagaatgcaggttcgataggttgcaagcatttgagccaattcggagtgtgaggtctcaagctggcacaactgagtgcttcgatgtctctaatgagcaatttcaatgtaccggagtatctgttgtccgtccgagttattgtattncctagaggccttctactaccccattacactaatggtgcatctctagtatatatcatccaagggaaaggtataacagggccaactttcccaggctgtccctgagtcctaccaacaacaggttccaacaatcaggccaagccccaattgaccgaaagtcaaagcccaagtcaaaagttcaaggatgaacctcaaaagatccaccggttcaaacaagaaatgtatggcatgccctgcggtgtaccccatggtgctacaatatggtgaatgccaattgtgcccatatatggt

SEQ ID NO: 95040 - DNA, 276 bp, Oryza sativa
  Clone ID: PAT_MRT4530_93272C.1
atggccgaggagccgttcgagacggccggatacgtgagatgctacgggagcacgtcgtgcgccatgacttcacgaagtggccgagatgactgggacgtcctagggttgcccttgggcacgcaccttcttgggcttagccacgacacaattacaaagctcaagacccaaatcatattcggaatggacaagcgccagcggtcgacgacgataggctcggggagcagcgtggctgcaaggggtggcaaggcagtggtgggcgttgcagcgagcggctag

SEQ ID NO: 95041 - DNA, 454 bp, Oryza sativa
  Clone ID: PAT_MRT4530_93273C.1
atggcatccataaatcgcccatagttttcttacagtttgcttgttcctcttgtgcgatggctccctagcccagcagctattaggccagagcactagtcaatggcagagttctcgtcgtggaagtccgagaggatgtagatttgataggttgcaagcatttgagccaattcggagtgtgaggtctcaagctggcacaactgagttcttcgatgtctctaatgagtcgtttcaatgtaccggagtatctgttgtccgccgagttattgaacctaaaggcctactactaccccattacactaatggtgcatctctagtatatatcatccaagggagaggtataacagggcccgactttcccagtgctgtcttgagacctaccagcagcatgttccaacattctgggcatgctttctttgccgaaactcaccagccaaagccatcacgttcaaggcat

SEQ ID NO: 95042 - DNA, 492 bp, Oryza sativa
  Clone ID: PAT_MRT4530_93274C.1
acaaagcttagttattagtcctacaacaacatggcatccataaatcgccccatagttttcttcacagtttgcttgttcctcttgtgcgatggctccctagcccagcagctattaggccagagcactagtcaatggcagagttctcgtcgtggaagtccgagaggatgtagatttgataggttgcaagcatttgagccaattcggagtgtgaggtctcaagctggcacaactgagttcttcgatgtctctaatgagttggttcagtgtaccggagtatctgttgtccgccgagttattgaacctagaggcctactactaccccattacactaatggtgcatctctagtatatatcatccaagggagaggtataacagggccgacttttccaggctgttctgagacctaccagcagcaggttcaacaatcagggcaagcccaattgaccgaaagtcaaagccaaagccataagttcaagggtgaacatcaaaag

SEQ ID NO: 95043 - DNA, 694 bp, Oryza sativa
  unsure (1)..(694): unsure at all n locations
  Clone ID: PAT_MRT4530_93275C.1
ctccgggccggcggcccgggccacccacccgtcctcatcaaccctagaaaccaaagggagcaggagcaggagcggcagcggctgcggaatcggaggaaggggatcggccgccgccatgagcaccatgaagttttgccgcgagtgcaacaacatcctgtaccctaaggaggagaaggaccggcggctgctgctgttcgcgtgccggaactgcgagcaccaggaggtatcggagagcaagtgcgtgtatcggaacgaggtggcgcacgcggccggggagcggacgcaggtgctgcaggacgtggcgtcggacccgacactgccgcgcacaaagacggtgaggtgcgccgcctgcgggcacggcgaggccgtcttcttccaggccaccgcccgcggcgaggagggcatgaccctcttcttcgtctgctgcaacctcacctgcgcccaccgatggagggaatgattttacttctttctcttcttctccacaactacaacttgatcgatcatgatgatcaactttcccggtttgcttaaacaagacaattgagtactagtttgtaaatggatggaggtttagcaataggtagggttctctgccttcatcgggctcatgttttatctacttgtcttgtttaactcgtactccttcgatgctagatcaatgttaacttgggatgctaaaaaaaaaanaaaa

SEQ ID NO: 95044 - DNA, 484 bp, Oryza sativa
  Clone ID: PAT_MRT4530_93276C.1
gttcattagtactacaacaacatggcatccatatatcgccccatagttttcttcacagattgctagatcctcttgtgcaatggctctctagcccagcagctattaggccagagcactagacaatgacagagttctcgtctgagcaagtccaagagattgcaggttcgataggttgcaagcatctgagccaattcgcagtgtgaggtctgaagctgtcacaactgagttcttcgatgcctctaatgagcagttgcaatgtaccggagtatctgttgtccgtcgagttattgaacctagaggccttctactaccccattacactaatggtgcatcgctaggatatatcatccaagggagagggataacaggaccaactttcccaggctgtcctgagtactaccaacaacagttccaacaatcaggccaagcccaattgaccgaaagtcaaagccaaagtcaaaagttcaaggatgatcatcaaaag

SEQ ID NO: 95045 - DNA, 1524 bp, Oryza sativa
  Clone ID: PAT_MRT4530_93277C.1
atggcttcgtcagtagcactcgtgctaatgaaggcttccctcccgcggcggcagcgcatggaccgacctcgccgttctcccgcggcggttcagcttgtcgccggcgttgatgcagccgacgacatgtttggctccctcgcaggttgtcctcctcggccgctggagtatcccgtggtgccagacttggacgactacgacgtcgatgacgctccggtggctggacgacccgcacccgcctcggacaagacgctggcggtgcacgccggggagaagctcgggagcggcgccgccgccgcggagacggactcgatcgcgacgccgatcgtgggcggcacgacgcactggttcagggactcggccgacctcatcgccttccgggaaggccggcggcggagcttcgagtacgggcggtacggcaacccgacggtgaaggtgctggaggagaagatcagcgcgctggagagggcggaggcgacgctggtgacctcctccggtatgaacgccatcgtcgccacgctgctcgccctcgtccctcccggcggccacgtcgtcgccaccgccgactgctacagcgaggcccgcgcattcatccgcgacaagctctccaacatgggcatcacggtatgtaaagttgtaaacaccattaatggaagcttcatcaaagcatcagcatggcattgcttgcaatctgactctaataatggcgttcgttccatggatttgcagtcgacgttcgtggatcttgacgacgacatggaggctctggaatccgttcttgatgagggcgaggtgacgatgttctacgccgactcgatgacgaaccctcacctgaaggtcgtcgacgtgacacgcgtcgcggagctgtgccaccggagaggcgcgctggtgtgcatcgacagcacgctggcgtcgcccatcaaccagaagccgctcgccctcggcgccgacgtggtcctccactccgccaccaagtacatcgccggccaccacgacgtcatcgccggctgcgtcagcggctcggaggccctcgtctcgcggatccgcacgtggcaccacgacctcggcggcgccatcagtccgaatgcggcgtacatgatcattcggggattgaagacgttggcgctgcgggtgcaggcgcagaacaggacggcgctgcggatggcgcagctgctggagaagcaccccaagatcgagcgcgtctactaccctgggctggagagcagcccgtggcacggcgtagcgacgaggcagatggctggtgcaggcggcgtggtcggcttggaggtggcgtcggacatgcgcggcgcgatgaggttcgtggacgcgctggagttgccgctcatcgcgacgtcgctcggcggctgcgagagccttgtccagcagcccgcaatcatgtcctactggggtaagtgcgacgaggagaaggcaaagaatgggatcaaggacaactttgtgaggttcagttttgggatcgagaagtttgaggatctcagggatgacatactccaagccttagggaagatt

SEQ ID NO: 95046 - DNA, 488 bp, Oryza sativa
  Clone ID: PAT_MRT4530_93278C.1
gttcattagtactacaacaacatggcatccataaatcgccccatagttatcttcacagcttgcttgttcctcttgtgcaatggctctctagcccagcagctattaggccagaacactagtcaatggcagagttctcgtcgtggaaagccaagagaatgcaggttcgataggctgcacgcatttgagccaattcggagtgtgaggtctcaagctggcacaactgagctcttcgatgtctctaatgagcaatttcaatgtaccgcagtatctgttgcccgtcgagttattgaacctagaggccttctactaccccattacactaatggtgcatctctagtatatatcatccaagggagaggcataacagggccaactttcccaggctgtcctgagtcctaccaacaacagttccaacaatcaggccaagcccaattgaccgaaagtcaaagccaaagtcaaaagctcaaggatgaacatcaaaagatcca

SEQ ID NO: 95047 - DNA, 1461 bp, Oryza sativa
  Clone ID: PAT_MRT4530_93279C.1
atggcgaagtcatcgtccctcgtgacgaaggtttcggcgcagcggcggcggcgagtgcaccgtcctcgccgttctccgaccaagccggagcgctctgccgccgccgtggcgctgagccacgagaagattcttctcgccggcgttgatgcagccgccgacatgttcggttccctcgcgggttgtccctcgtcgccggagtatccggtggtgccggacatggacgaccgctacgtcgacggcgccgtggatgacgctccggcggcggcggcgggccgacgcgcgtcggacgagacgctggcggtgcacgccggggagaagctcgggagcggcgccgctgagacggactcgatcgcgacgccgatcgtgagcggcacgacgcactggttcagggactcggcggacctcatcgcgttccgggaaggccggcggcggagcttcgagtacgggcggtacggcaacccgacggtgaaggtgctggaggagaagatcagcgcgctggagagggcggaggcgacgctggtgacctcctccggtatgaacgccatcgtcgccacgctgctcgccctcgtccctcccggcggccacgtcgtcgccaccgccgactgctacagcgaggcccgcgcattcatccgcgacaagctctccaacatgggcatcacgtcgacgttcgtcgatcttgacgacgacatggaggcgctggaatgtgttcttgatgagagcgaggtgacgatgttctacgccgactcgatgacgaaccctcacctgaaggtcgtcgacgtgacacgcgtggcggagctgtgccaccggagaggcgcgctggtgtgcatcgacagcacgctggcatcgcccatcaaccagaagccgctcgccctcggcgccgacgtggtcctccactccgccaccaagtacatcgccggccaccacgacgtcatcgccggctgcgtcagcggctcggaggccctcatctcgcggatccgcgcgtggcaccacgacctcggcggcgccatcagtccgaacgcggcgtacatgatcattcggggattgaagacgattgcgctgcgggtggaggcgcagaacaggacggcgctgcggatggcgcggctgctggagaagcaccccaagatcgagcgcgtctactaccctgggctggagagcagcctgtggcacggcgtcgcgacgaggcagatggccggcgccggcggcgtggtcagcttcgatgtggcgtcggacttgcgcggcgtgatgaggttcgtggatgcgctggagttgcctctcatcgcaacgtcgctcggtggatgtgaaagccttgtgcagcaaccggccgtcatgtcctactggggtaagagtgaggaggagaaggcgaagaatgggatcaaggataattttgtgaggttcagttttgggattgagaagtttgaggatctcagggacgacatactccaggccctagagaagatttag

SEQ ID NO: 95048 - DNA, 1274 bp, Oryza sativa
  Clone ID: PAT_MRT4530_9327C.1
gcagttctcgcctagttcacctggctggcctcctttcatgagggtcaatcctatattggactggtcatacagggatgtttggtctttcctgttgacctgtaaggtgaaatactgcagcctctatgatcaagggtatacttccattggaagcatatatgatactgttcccaatgcgcttctttgtgattcaacaactgggaaaagttttaggccagcatacatgttatcagacggaaggcttgaaagagctggcagaacaaagaagagctcctgatgaagagtttgaagaataccttagtcaactgataggagacaattacactggtgatcgaaatgagatggctttgttgccagaaggtattacggaattattgcatcacaaaatgctaccgttgccattgatcaaatgcaaaaatgtggtcattctcgctgcaactaatgtggatgagcttgaaacggagtggggttgtcttctagacacacaagagagcggtttagtgatggctaaatcttttgtgtcaaagcatctctgcacgtcgctattagatgttaaaattgccccagtggttgcaaaactatgcatagatttttctgatgtatacataggttgttatcggatctcaagatctgggcctttggttgtgagttttattgggaagtgttcgcgtatttggaaccataccattgcaattttacaaatatttaagatatgccactaccaaccatttatgaaaaaatttggaccaaattacccttctttccttctttttctccccctcctttcttccacagctcagagaactggtggcggcggagcggcggcagcagcgagcggagcaagcggctgcagcggtggagcgagcggcgcggcggcggagcggcggcaacaacgagcggagcaatcggcggcaacggcgagcggcgcgagcggcggcggtggagcgagcggcggcggcgaagtggcgcgagcggcggcggcgaagcgaccggcggcggcggcgagcggcgcgagctgcggcggcggtggcggagcggcagcaacagcgagcagcagcggtggagcgagcggcggcggcggagcggcgagcggcagcgacagcaacagcggcggtgacggcgccagagtagaagcagcggggaaagagctagaagatgagagaagagggagagaggtagaagatgagggcattttcgtccaatacatgcaaaatacgtatcttagcggcaccactaagattacaacaaatagcaatggcatcattccaaatacgtaa

SEQ ID NO: 95049 - DNA, 1419 bp, Oryza sativa
  Clone ID: PAT_MRT4530_93280C.1
atggcgaagtcatcgtctctcgtgacgaaggttttggtgcagcggcggcggcgcgttcaccgttctcgccgttctcccaccaagccggagcgcgctgccgccgccgacacgttcggttccctcgcgggttgtccctcgtcgccggagtatccggtggtgccggacttggacgactgcgtcgtcgacaccgccgtggatgacgctcccgtggtggcggcggaggcggcaggccgacgcgcgtcggacgagacgctggcggtgcacgccggggagaagctcgggagcggcgccgctgagacggactcgatcgcgacgccgatcgtgagcggcacgacgcactggttcagggactcggcggacctcatcgccttccgggaaggctggcggcggagcttcgagtacgggcggtacggaaacccgacggtgaaggtgctggaggagaagatcagcgcgctggagagggcggaggcgacgctggtgacctcctccggcatgaacgccatcgtcgccacgctgctcgccctcgtcccccccggcggccacgtcgtcgtcaccgccgactgctacagcgaggcccgcgccttcatccacgacaagctatccaagatgggcatcacgtcgacgttcgtggatcttgacgacgacatggaggcgctggaatccgttcttgatgaggacgaggtgacgatgttctacgccgactcgatgacgaacccacacctgaaggtcgtcgacgtggcacgcgtggcggagctgtgccaccggaggggcgcgctggtgtgcatcgacagcacgctggcgtcgcccatcaaccagaagccgctcgccctcggagccgacgtggtcctccactccgccaccaagtacatcgccggccaccatgacgtcatcgccggctgtgtcagcggctcagaggccctcatctcgaggatacgcgcgtggcaccacgacctcggcggcgccatcagtccgaacgcggcgtacatgatcattcggggattgaagacgttggcgctgcgggtggaggcgcagaacaggacggcgctgcggatggcgcggctgctggagaagcaccccaagatcgagcgcgtctactaccctgggctggagagcagcccgtggcacggcgtcgcgacgaggcagatggccggcgccggcggcgtggtcagcttcgaggtggcgtcggacatgcgcggcgtgatgaggttcgtggacgcgctggagttgccgctcatcgcgacgtcgctcggcggctgcgagagccttgtccagcagccggccgtcatgtcctactggggtaagagtgaggaggagaaggcgaagaatgggatcaaggacaactttgtgaggttcagttttgggatcgagaagtttgaggatctcagggatgatatactccaagccctagagaagatttaa

SEQ ID NO: 95050 - DNA, 355 bp, Oryza sativa
  Clone ID: PAT_MRT4530_93281C.1
tctgttgtgcgacgagttattgaacctagaggccttttactcccccattacactaatgttgcatttctagcatatatcatccaagggagaggtataacagggccaactttcccagactgtcctgagtcctaccaacaacagttccatcaattaggccaagcctaattgaccgaaaggcaaagccaaagtcaaaagttcaaggatgaacatcaatagatccaccgttttaaacaaggagatgtaattgcattgcctgctggtgtacctcattggtgctacaatgatgcacaagtgccagatggtgccatatatgtcactgatctcaacagcgttgctaatcaactagaccctaggc

SEQ ID NO: 95051 - DNA, 613 bp, Oryza sativa
  Clone ID: PAT_MRT4530_93282C.1
gttcattagtactacaacaacatggcatccataaatcgccccatagttttcttcacagtttgcttgttcctcttgtgcaatggctctctacgcccagcagctattacggccacgacgcactacgtcaatggcacgagttctcggtcgttggaagtccaagagaatgcaggttcgatacggttgcaagcatttgacgccaattcggacgtgtgaggtctcaagctggcacaactgacgttcttcgatgtctctaatgacgcaatttcaatgtaccggacgtatctgttgtccgtcgacgttattgaacctacacggccttctactaccccattacactacatggtgcatctctacgtatatactcatccacagggagaggtataacacgggccaactttcccacggctgtcctgacgtcctaccaacaacagttcccacaatcaggccacagcccaattgaccgaaagtcaaagccaaagtcaaaagttcaaggatgaacatcaaaagatccaccgtttccgacacggagatgtacttgcattgcctgctggtgtcgctcattggtgctaccatgactggtgacgtgccagtttggttgccatctactgttcaa

SEQ ID NO: 95052 - DNA, 332 bp, Oryza sativa
  Clone ID: PAT_MRT4530_93283C.1
gggggacgagacatcctaaattttttttcaccaggaatttttttggaaaaggcgaagcttataaaattttttcaaaccctggggggggaacctttagcaaccctgaaaagggttcttttaaggggttccaacccgggggaacttggatgcttttgggatacaaaaagagggcaaagagctggcatgcccaagctttttttgctttttccacccgaaaaccaaggttacgggggtaggcatgaaacttgacctccggtgtcccccccccagaaagggagaggggggcccccacctgatgaatacccccatggggagacaccacctcaagattg

SEQ ID NO: 95053 - DNA, 204 bp, Oryza sativa
  Clone ID: PAT_MRT4530_93284C.1
atgagtcactcggagagacgaaggaagcaagaaaaggaggaaaaggggcacagcgagaatgcagctaatccaagcgagaggcgtcgtatcgccattagagcacgcagagaccaccggcattcgtggatctcgcgacacctacaaaccaagagcattcgcacatgcattcacgccaacattgcaatcgagtttgctgcagtttga

SEQ ID NO: 95054 - DNA, 513 bp, Oryza sativa
  Clone ID: PAT_MRT4530_93285C.1
gaagtgttttaaatgtgagtgttccccaatctcgagttgttcttaaatcagccaaacattgaacacttctcttattgtcaggcaagtttaattgcagtgaaaccagttaaaggcgacacggtgctcttctttagccttcatatcgatggcgtaccggacccgctcagcctccatgggagctgcccagtgatagaaggtgaaaaatggtctgcaccaaagtggatccgtatcaggtcctatgagcatcctcctgtctcaaaggtgacagaaggatgctccgacaacagtgcacgttgcgcgaaatgggctgaagctggagaatgcgagaagaacccggtatacatggtaggtgccgagggtttgcccggcaattgtcggaagagttgtggcgtttgtgattcctaggatgtgtttattttcctaaatctgatgtttgtgtcacttgctgaacacttgatttgtacatacttagagcattttcagatgaaataggtagcatttgaattttcagac

SEQ ID NO: 95055 - DNA, 824 bp, Oryza sativa
  Clone ID: PAT_MRT4530_93286C.1
cggcacgaggcgtatcagctttgggatgcgcgagcagaagtccacgatgagcggcggcggcgacgcagccgccatctgcgcccagatcgcggccgtcttctccggggaccccgccgcgcgccccgtcctcgtcgccgagctcgccgcggcggccgcgcgcgggggccgcgtgttcgtgcacggcgtcgggcgggagggcctcatgatgcgcgccctctgcatgcgcctcgcgcacctcggcctccccgcgcactgcgtcggggacgtcactgcgccgccggcctccccgggggacctcctcctcgcctccgccgggccgggcgcgttctccaccgtcgacgccatctgcggcgtggcccgcggcgccggggcgcacgtcgtgctgctcaccgccaagcccgagggggacttcccgcggcgccaggccgacgtcgtggctcacctccccgcgcagaccatggctgacgacgaggaggcgacgacggagagctcgccggcgaaggcgaagctgccgatggggagcctgtacgagggagccatgtttgtgctgttcgagatggtggtgctggagctcgctcgcgtcttgggccagagcccggcccagatgagggcgcgccacacaaacttggagtagcctagtttgtgttttggcccacttgtaacaacctgtatggctgtgttgtgcggatttgcagttgcctgataatgctttttcgtcaaattgcaagtacatccaactatgtgtgattcctctaattaaaagaacttccaacttatatgtgatcggaatgcctcgtgccgaattcctgcagcccgggatccac

SEQ ID NO: 95056 - DNA, 149 bp, Oryza sativa
  Clone ID: PAT_MRT4530_93288C.1
aagtatacaaaatagaactaagattaacattcgtgggattccaaaccgggggggggctctgtaaggcaatatcctcaaaaggtaatcaaacactactagttcattacatttgtaaggccaatttattatcgtatcgccatgtcatatat

SEQ ID NO: 95057 - DNA, 1256 bp, Oryza sativa
  Clone ID: PAT_MRT4530_93289C.1
ccttcgcctccgctgccacctggcagctcatcatggagcggatcctcgcgcagtcggaagtggcgccgctgacatccggcaggctctcgcacagcagcggccctctcaccggcggcggctccatcaccgacagcccgccggtctcgccggagatcgatgacgcaaagtactgcagagcagcaagcactccgaagcctcagatgtaccgaggcggcaacaagactgttggacggtggctcaaggacaggaaggagaagaagaaagaggagacacgggcacacaatgcgcaggtccacgctgctgtttcggttgcagcagtggctgctgcagtcgcggctgtcgcagctgcgacagctgcagcctctggttctggcaaggatgaccgtgctgcccgcaccgacatggccatggcatccgcagctacgcttgtggctgcgcaatgcgtcgaggctgcagagtccatgggagctgagcgtgagcatttggaggctgtcattggctcagcggtgaacgtcaggacacctggagacattgttactgtcacggctgctgctgctaccgcattgagaggtgccgccacattgaaagcaagggctttgaaggaggtgtggaacatcgcggcagtgatccccgtagaaaagggtacaatgggaggagggcaccatcacaagcagaatatgcagaagcagcaccgcaagctggagagcaatggtagtagtattagtgatgatctttcactcgaggaggagaacaacttcttgggcatctgcagccaagaactgcttgcacgtggcaccgagctccttaagcgcactcgcaaaggtgctttgcactggaaggttgtatcagtgtacatcaatcgaatgggcctggtcatgctcaaaatgaaaagccggcatgttgctgggacaatcaccaagaagaagaaaagtgtggtgatagatgtctgcaaggatgtcgcggcgtggccaggccggcacctgctggaggacggcgagcaccgccgctacttcggcctcaggacagcggagcaccgggtaatcgaattcgagtgcaccagccagagggagtatgagatgtggacgaaaggcgtggcgcgcctcctcatcattgccagcgagaggaagcgcgccccgtgaaccaaaactagcatagtgcccgtgcgttgctctaccgacctgccaatgccgagtgccgatccaccatcagcttgctaagctgtggaacagcatggctgcatgggcctgaggtgcaca

SEQ ID NO: 95058 - DNA, 471 bp, Oryza sativa
  Clone ID: PAT_MRT4530_9328C.1
cgagcaattatgcatcatggaaagacatgcgccatgctcgcagtgatacattttttatggacaacctaagatactgaaagtggactatcggaagcgggattcaggaaacaatctcagggatgaagggcgcacatctgatactaggggaagccagtcactgtggcctagttgcatcatgattaaacagaacaaggaagcgtacttcagattaaggcttcaccatggtataacggagtacgaacagacactccagctggcataggaaaagaaaatatctgcaataagaagtgaaagtgcgagatgcacagtgcccttttggagaaaggaaacagactagactttttgaccacatggtgccatatcattacaaaacttaggggaataattatagagggcaccatgaactggataaagacataaatgtgaatcgccatcaggtgggtgtgtagggaagcctacttgagggctcac

SEQ ID NO: 95059 - DNA, 828 bp, Oryza sativa
  Clone ID: PAT_MRT4530_93290C.1
ctctccaccagcagaaagccgcgggtgcccacctaacctcctccgccgcgggcatcccctcctcgccgcctccgccaacagccgcgaggcgagacgacgatgacgccgcctatggatcccccgccggctcgccccgggcgctcggatctgccgccggctggtctccgggtgagaaggcgcggctcggctcctacctctcccagcgacgcgcgatgacgacgacggcaccgacgcgccgacgacgacaacaccgcctgtgtgtgtgggggtggggggacggaggaggagaggcggcggctcgactctcccctctcccggcgacacgcaacgacgacgacgacgccgccaccgacgcttctgggggaggggggacggaggaggagaagcggcagctcggctcccccttctcctggcgacgcgcaatgacgatgacaacgctgcctgtggggaagccagtggacggaggaggagaggcggcgacgactgtctcgaacggtgccgacgcgacgacgacgatgccgccggttgtgggggagaccggcggatggaggaggagagccatcggtggcacccctttttttatacgctgtaatgtttttcgcaggcgggtgaatctaccgcctgcgaagatggaggtgtcgctagcgaaaataatttttgcaagcctttgcgtataggcggtcctttcccccacctggaaaaactatttttggcgcctgcaaaaacctttttttctagtagtgctattcaattcaaacgaaaatgcatggacgagtacaagctgtattgggtgatttcaatctatcgcaattttctctttcttcgtcc

SEQ ID NO: 95060 - DNA, 225 bp, Oryza sativa
  Clone ID: PAT_MRT4530_93291C.1
atgagtgaagcgaaggtcgagccggcgcaccacatcccccgcctacggcgctgggtcccagagctccaccacccaacctcctcatttgccagccgcttgctctacataaatcaaccgctcgccggaacgaagaggttagtcgcggcagccccacctcctcgcgacctgctcgtctccatctgcgcgtgctccagagcctccgccggcgtcggcgtccaggcttag

SEQ ID NO: 95061 - DNA, 185 bp, Oryza sativa
  Clone ID: PAT_MRT4530_93292C.1
tgtcaggctctgccactcctagcattgctgattctgctgttgcactcatgtggagtgtccggaagcccttgtacctgcaaaaatggcccttatttttcctggaattggtggtcctccgcttgggttttttaaccctttggccaatcttggggtttccaccagggttggccaaagtggttaagtgg

SEQ ID NO: 95062 - DNA, 1558 bp, Oryza sativa
  Clone ID: PAT_MRT4530_93293C.1
ccacgcgtccgcgagtctcgtcggctcctcttcccctacctctgtcctccgcccctcccatctaagcctggacgccgacgccggtggaggctctggagcacgcgcagatggagaggagcaggtcgcgaggaggtggggctgccgcgactgccggcgcgattgaggaaatcggccagcaacaggcgccgccgccgccgcagccgccaggcaggcctcatccgctaccgcatgccctcctcacctaacctcctcggctggcaaatgaggaggttgggtggtggagctctgagaccccagcgccgctgcgtccgcatcgtagtataagcccccgtaggcggggatgagatgcgccggctcgacctacaggccaaggacatgattgccgccattgtggatgccaagccgttgttctttccgcagctcaagatccaaggacgcaaggacgtcttcttcgcgcagagcaagctgctagcaagcaccaagaccttcgcttcactcattgctgccaagtccatcccaagctgctccactgcctcgcaagcgacaagtactatccgtttccttcatctgctccagccgccagcaccatcaatccctttctaacttccacagaacatcagaatgggaatataggatgcattccttgatgaaagacaggtagaggtgtccaaccattacgaatttctaaatcgaagaagaattcagcatggaaagatagggtattttactctctttctcttccatgatttcctatggagaggggtatggtgaaataatgaggtatgtctgcttcaccttgtctttgctggtattgcccatttttctgattcctggttaacatcaaggctcttctcatcaagcaaaatgattccctaaccctgttcagtttccacaagcaaaattgtttatagtgttttcaggaatagaagaaactagcaaaatgattccctaaccctttccagtttctataagcaaaattgtttgcagtgcctttaaatgcgaaaaaacagttttgaggatgttgctacatcaatagcacaatcatcacctaccgatgcctcacatgaagtcatcgtggctcacaaatttacatctcatcaatgagggttaggatcaggactgtcaactactccaagtgatctgtacattagatggtcagctttttttttttacttctcagcagagcaggtgatagattcaataactattggagatatttagagcaggtacaatagcgggctataagccagctgcaaatatattttaaggagataaatgaggagagagaagggcagcggactacagatttgtagccagctgtagcacggactccaagacacagtgtgtgtatgacaggtgggaccaagtattaatagtgtagtatgtaactattgtatgaatgagctattagattggttatagataaattggagctagtagttagctatactattgaactttctcttagaaacaacgtgtagttgaactggcagaatatttgtggctttgtagcatctgacttttctgttaatgaaaaaattcaatagttttttattgg

SEQ ID NO: 95063 - DNA, 630 bp, Oryza sativa
  Clone ID: PAT_MRT4530_93294C.1
ttacaaccagatttttcaacgtcctcaagcccgcggcatctttggctgtacgaatggtcatgacgactgcctacgacgtaaaacgacccccaccacaaggagatcctttcggcatcgagcacggtggaggcatcgccaatctgcaaacggcgcaaacgccatcgcggccatcaaggcggccggctttgagctcctcgagtctgaggacctggccgacaactcggaccgcgcgccttggtactggccgctgggaggaaacgcctggcagtacgcgagcacctttggcgacatcttgtcgacgtttacaatgacccctgccgggcgtgcgattgcgcacaccgtcttgggagtcgtggaatccatcggcctggtaccccccggaaccaaaaagacggccgacagcttgtcgacgacggcggctgcgctggtcgcgggaggaaaggaggggctgttcacgcccatgtttttgatggtggcaaggaagccggttgcgaaagaatgaaaatggggttggctgtgattggcttggcggagtaccgaagccagaaccggagcgacttttgtgttggattgagacgatatagtgtgctagcaaaccaacgatttccataaaaaaaaaaaaaaaaaaaa

SEQ ID NO: 95064 - DNA, 641 bp, Oryza sativa
  Clone ID: PAT_MRT4530_93295C.1
gacttccgcacgcgtcctatcaagtctcgtcggctcctcttcccctacctctgtcctccgcccctcccatctaagcctggacgccgacgccggcggaggctctggagcacgcgcagatggagacgagcaggtcgcgaggaggtggggctgccgcgactgccggcgcgattgaggaaatcggccagcaacaggcgcccccgccgccgccgccaggcaggcctcatccgctaccgcatgccctcctcacctaacctcttcgttccggcgagcggttgatttatgtagagcaagcggctggcaaatgaggaggttgggtggtggagctctgggacccagcgccgtaggcgggggatgtggtgcgccggctcgacctacaggctaaggacatgattgccgcagctcaagatccaacgactcaaggacgtcatcttcgcgcagagcaagctgctagcgagcaccaagaccttcgcttcactcattgctgccaagtccatcccaagctgctccactgcctcgcaagcgacaagtactatccgtttccttcatctgctccagccgccagcaccatcaatccctttctaacttccacagaacatcagaatgggaatataggatgcattcccttgtgaaagacaggtaga

SEQ ID NO: 95065 - DNA, 722 bp, Oryza sativa
  unsure (1)..(722): unsure at all n locations
  Clone ID: PAT_MRT4530_93296C.1
atcccacggtttgggggggtggtctggaatatcacggttggcccaaaatgccaagcccctgtggatgcaaactgtgacaaagatgtgttttgtgcccactgggcccgaaaatggagattgatgcaagggtgccaaaactgagtgttggctccggcatgggatgattgacgcacagctgcgggagactggatggtgtgttgcatgggagagtgcccatgagcatgcagcaagatttgcagacgggatactcatagctgcagcaacatgcctgcaatgctgctgcccaagtgacnagtgtggtgatgctggctggacattgtgtgatacaggctaatgctagagttgtaaccccccgtgatggggctgccggatactacactgccaggccaggccaggggtgacttgggtgaactggaaggatgcaacactgactggaacaacggacgatgatntatgatggtgcccgtgcattaagcgtgattggcactgggtggagtggggctgcgatgccaaatggggctgggatggattgaattagcgtggtggcgttggactgactggatggtgtgggctgaactgactggactgctggctgactgttggtgtgttgaccgctgtgtgccgtggtgttgaggagttggtgtgtgttggttgctgttggagcctgtgtgcctgcaatgtgccaggtntgaagtgcttgccaaaaaaaaaaaaaaaaaaaa

SEQ ID NO: 95066 - DNA, 720 bp, Oryza sativa
  Clone ID: PAT_MRT4530_93297C.1
gtggtcgatcctcctcctgaggcagagctggatctcccgctgctgcgcctccgagatgctctggcacaccagctccaccacatgccgcagctccagcgccgcgtccttggcgtagtagtgcagcaccttgggcagcatcagcgcctgcctcctcgccaccacgttcgcctggatgaactccgtcctcgccacctccagctgctggtgtatcttcttcgcactgtacagcctcacctacaaacacaagatccaacttacagctttgatatttcctttttttttttacatggatgtttggagtcattttttaccgtccttgagaggtacaggaagtacagctttttctagcgttgaatctggtattaccttgtacttgtagtagtaccttgggtagtaccaaattttgcgatagaaaaatatagtacctactcgaagaccgtaaaaatttcttgattgaagtatggctggaagtggtggcttacaggtggatctgaaaatgctccagtggagagggcaaaatgagcaactggctctggatgctgaagggcatatggatgcctggctgtccctgccatggatctcttcgttggtgcgaacagcgcccgaacccactgcgaaaacggtgtacaagattccgttgttagtttgccacaatggcaacttttacggtggtctctggtttatccgtacactgtttctttcatatgattgcatttaact

SEQ ID NO: 95067 - DNA, 130 bp, Oryza sativa
  Clone ID: PAT_MRT4530_93298C.1
agcatgcctccagttcgtccgccgtccttttttttttttccgtggaactgcccatggcaatcgggattcctatcatataacacccggaacggtggcaacactgaatgtggctcaacatcaccaaacccga

SEQ ID NO: 95068 - DNA, 411 bp, Oryza sativa
  Clone ID: PAT_MRT4530_93299C.1
atgtcagcgtccctctccctctatctctttcctcttttctcacatcctctcccatcgccgccgcgggcgcggtgctcccttcctccgctccgcgtcttcggcctcggcctccgcggcggacacctcgccggcgccaagggacgtcgttgcaacccttgtccgtgcgctccttctccgatgctattcgacctcatggtcctccacggccgcgcctcaggctggcgcgcgtccccggccgccgcgccgtcgtccactgtcgttccgcctacgtactcctgcagctccatcatcaacggcaccctcccgccgtcgccggagccgtgcgccggagcagcgaccgtccgatcgacccggagccatgtcgaggggctcgtggttgagggacctataataaacttattcctccagtga

SEQ ID NO: 95069 - DNA, 201 bp, Oryza sativa
  Clone ID: PAT_MRT4530_9329C.1
ataactctcttacattattatttcgggaggtattattgcagtgggcgtatatattataatcccaattttggccgcgtgagtgctgtttccaaatgggccttaacatgtcctcaatactaaacaactattacacaagagaacccaattaattatacaagcatttaacaaatggtctctggcaatatacagcatgcaaagaat

SEQ ID NO: 95070 - DNA, 186 bp, Oryza sativa
  Clone ID: PAT_MRT4530_932C.1
gaatacaatattgcgatccattgaaatatatgccatccgcacaaatctcaaagcaattctaatgttaagggcttcgttgtaaattgactttccctatcagtaaattgatttgccctagcagtacagggaccaaatgaagagcatcagctcaccagtacataatatagtaagtagaaatatgtgttg

SEQ ID NO: 95071 - DNA, 355 bp, Oryza sativa
  Clone ID: PAT_MRT4530_93300C.1
ggggtcaacatctttttaaatatataaatttgatacatgaaaatcatacatgtcgattttgcatcaaaaagcactttcctagtataacacattgagcgagttctattaagtattttacattgtatattagtgatcaaagttgtatttgagagaacatattgatgcccaaaatgaagtctatttgcgactttgagggactacaagtatgtacagtaaacataagatcaatcatagcatccaatctacttctaataaatggtcaagacaaaaaaagcgcttaccataatctggcaaaactcttctttacatttaccagcagtcaaatgccatccaacatataagtgccagtttccca

SEQ ID NO: 95072 - DNA, 256 bp, Oryza sativa
  Clone ID: PAT_MRT4530_93301C.1
ctgctgccctagcatggttgtacaagcacctgtgtgaattgagatgcatgccgaaggactagtgcagatgctaacttggcaggttgtgtttggttgctataggtatggatgtggattcgcctaccagttggtcatcctacatggaggcaacatccagcatggcccttcgaggatgatgatcgatgccccatggttgctttcctgtaggaagtggtcccgctgcctatagtttcaactattaaaatttcatatttca

SEQ ID NO: 95073 - DNA, 572 bp, Oryza sativa
  Clone ID: PAT_MRT4530_93302C.1
gttttttttttttttttttttttttttttttttttttttttttttctctgcttttttagggctctccaaacccgtggctagtttttttttctcccccatacaacacatgcatccattcaaaccaaaagaatttaggtagaagaatgataatctcactcataactcataagcaggtaggggccaaaatttaggctgaaaaaaaaaagaaaagatccaatcaattcttcagtttaaatgacacatccgatgcttcatcgatccttttatcgaaatgcacttcgtggtagcggcattggctgctgcagaaggctttctcatctctgtgctgcatgaagaggcggcaagcgtcgccgccggcggcggagctctcgacgacgaggtcatcgaatatgtgggtcatcttggggttgggtccccgggcgatgacgcaggtgtagtcctcggcgagctccgcctcgccctgcgccgtcctcgccgccgccgacgacagcggcgaccgctgcaccggcgagagcagcgccagctgcgcgtcccggttcttcacgccgaactcgatcggcgagctcggcggg

SEQ ID NO: 95074 - DNA, 432 bp, Oryza sativa
  Clone ID: PAT_MRT4530_93303C.1
atggccaaatgcagcaagatccgctacatcgtctggctccggcagacgctgcggcggtggcggtcccgggccgcggcgcgcgcggcggcggaggcggtgccggcggggcacgtggcggtgtgcgtgggcggggcgtcgcggcggttcgtggtgcgggcggcgcacctgaaccacccggtgttcagggagctgctccggcaggcggaggaggagtacggcttcccgtcgggcgcctactgtggccccatcgcgctcccctgcgacgagggcctcttcgagcacgtcctccggcacctctcctcgccgtcctccgccgcgcggttcgtcaccctcgaggacatccagagcggcgccctctcctgctgctgcgccgccgccggcgacgccctcccgctcctccgcggcattgccaccgacaaggccgtgtggtga

SEQ ID NO: 95075 - DNA, 474 bp, Oryza sativa
  Clone ID: PAT_MRT4530_93304C.1
atgaggcccgtcaccaccgcccccgctcctaccgccggccgcacccgccgacgacgccccagttccgccgccggccgctctcgcctccggatctgggcgggacaaggcccgccaccgccagatccaggcaggatgaggtccatcgccgccggatccgagcgggacaaggcccgtgtcgccgcccactcgtcatcgtcgtcggggtcgccccagctgcccccacttgtgtcgtcgtcgtcgtcggggtcaacccctccttgtcgtcgtcagggtcgccaccgcggagggggcagcccgagcgatggggatgacgtggccgccgcccgccacgcgacgcgccgctctcggctgccggcgcccgcctctgccccatccccacctccgccctgcgcctctgccccgtctgctctatgccacggctacttaacacgcccgtatggaaaaattgatttttccatgcaggcgcttaagtga

SEQ ID NO: 95076 - DNA, 1221 bp, Oryza sativa
  Clone ID: PAT_MRT4530_93305C.1
atggggcggcgcagccgggacacaggcacggctcaggccggcctgaccgagcgacagcacgcggcagcgcggccaccggcgatggtgcggggagcggcgacgcacgctagggagtggtggtgcggcgcgacaaggggaggcggcatccggctgcccgacacaaccggtagcggcgtggagcgcggagcgcggcgacggcgacccggtcggacgaccacaagtggtggcggcgcgtcacgagcaggcacaggaggtggccgacgaaggggaggaagggggagagggaagggagtgctcaccgagcggcacgacggcaaacgagcggccgacggcaaggaacggcggcggcggggctcctcgggaagacggcgcgacggagctccggtgacgggcgtcgctcgggaaggggcggacgagctcagccttgatctaaggaagatcattgaggggttagggaggaggatctcaccggtgaccgaggggggtggagctcgagcggatttccggcgaagagggccagtggccgaggatctccccgtccttgcgaagccaagggaggcgacggcgtgggtcggcgtggaccaaagcggcattgtgacgcggctggaggtggcaatggcgacgaagagaggtggccagttttataacaagtggtatcagagcctacgggagatccatggtagaggtgcgagggaggtgctccacgccgcgacgactacacggggtgtccagggacagacatggacgcaagggagacgaccagacgtggtgctcgggttgatggcggcgaaagcgattggcgatccaatcggtgggtcagacacttcgggcgggtggcctggactttccggaaaagaggattattgcgtcagcgggttcgggtgcacggtggaccgggcgcacggctgcggctcacggaacgaacggccgagatctatcctatccacaacggacggccaggatccatcggcccacgaccggtgcacgagacacggcgacgatgacgtcggcgatgacgtcatcaccggcgatgaccggacggcgcaagctcgccgaagcggcggcgacgatcgggtcgacgacgacggcggtgctccgacgatcctcggtgaaaacggagggcgggactgggacggtgacgacttggcgaacccggcgatggcttccccgagcgacgaccagagcgacggcggcgcacggctggacgaacggcggcgctaa

SEQ ID NO: 95077 - DNA, 470 bp, Oryza sativa
  Clone ID: PAT_MRT4530_93306C.1
tctggtcatccaaaaatatcttcagttcttttttctttctcagaatttctcgactctatttatatggatcatatggctccaagtctcatctctgttccccatgcttgcaccacacgctgcatcacattcgcatcgacgtggaggatgaggagcagaattggccactttaatttcatctatgtatctatggtaaaaattaaaagctacttttaccagctacatttgtatagattaaccacaatcaaatggagtgtccaattgtccttatttgtatagattaacatcaaccgaattttaaacaaacaggcaacagcggatattttgcttaggtcctagtgccttttactcacgcagatcttgtgtcatttggttatttgttgccacttgccaaggtagtaggtagagcttcatatgtttatgcattccaagtaaaattgcatgttagaagtaaattcttgcccctctcatca

SEQ ID NO: 95078 - DNA, 393 bp, Oryza sativa
  Clone ID: PAT_MRT4530_93307C.1
ccggccgggccgttcccccacccccgccgccgacgaactcccccctagacatggcgacgcgcggtgccgcttcccgctccttcctcgccgccgaacgtggccgcgccgcctcgtcggcgccgcgcatccgcgcggctccgctcccctccgccccacgacgccgggtaacctcctccgtcttctcgacaattgccgccgcgaggtcgatgacggcgatgatggggtcgacggcgagaatggcggtgaagactgaccggtcacccgtcagcgtagcgtgcgggagtgctgtgagctctcccagagtaattaggcttgaacagtgctgacccgactctgataagaagaactcgttttaaggtacagaagctatctggctcaggattccccctgcct

SEQ ID NO: 95079 - DNA, 532 bp, Oryza sativa
  Clone ID: PAT_MRT4530_93308C.1
aaaaaaaaaaaaaaataaaaaaaaaaaaaaaaaaaaaaaaaaaagggggttaaaaaaaaaggtttaaaaaaaaaaaaaaaaaaaaaggtttaaaaaaaaaaaaatttaaagggtctttattaaaaaaaacaaaaaggggccgaaattaaatgataatatatggggggcctttttttaataccccggttttttttttacaaagttcgaaattaaaaaacccttttaagaaacccggggggggcctttttttggccccttttttttttccccagtttttggaaaaacctatttttttttcacttttttccctttccaactatttcccctttttaaaggcgggtgtaattcaaaaagctgggggccataaaccttttccattttgggggaaaccctttttttaacctggttcctttacctaaaagggttgccccacggcggtggctcttaaattttttccttcctaaaaagggttaacggatcccccccttaagcccccttttttaccttttttttggggtttttttttagggtt

SEQ ID NO: 95080 - DNA, 571 bp, Oryza sativa
  Clone ID: PAT_MRT4530_93309C.1
caacaacatggcatccataaatcgccccatagttttcttcacagtttgcttgttcctcttgtgcaatggctctctagcccagcagctattaggccagagcactagtcaatggcagagttctcgtcgtggaagtccaagagaatgcaggttcgataggttgcaagcatttgagccaattcggagtgtgaggtctcaagctggcacaactgagttcttcgatgtctctaatgagcaatttcaatgtaccggagtatctgttgtccgtcgagttattgattcctagaggccttctactaccccattacactaatggtgcatctctagtatatatcatccaaagggagaggtataacagggccaaactttcccagggctgtcctgaggtcctaccaacaacagttcccaacaatcaagcaaagcccaaattgaccaaagttcaaccaaagtctaagttcaggatgacctcaagatcccgttcaaacagaaatgttaatgcttgccggctggttttttcaatcgggcaacaatgatggtaaatgcccattgttccataatttgttcggattcctaa

SEQ ID NO: 95081 - DNA, 206 bp, Oryza sativa
  unsure (1)..(206): unsure at all n locations
  Clone ID: PAT_MRT4530_93310C.1
gcgagcgagagagccgggcctccgccgcgcgctttcctccctnnntcccaccaccacacctntcctccttccccaccntcgtnntttccntcctntnntcccantccaantccaacatggcggccgnnatgtgngtgtagtggnaaagtagtngggagagcgattgtagggataggtaggtcagctngggcgagttcaanggcaaa

SEQ ID NO: 95082 - DNA, 465 bp, Oryza sativa
  Clone ID: PAT_MRT4530_93311C.1
gttcattagtactacaacaacatggcatccataaatcgccccatagctttcttcacagtttgcttgttcctcttgagcaatggctctctagcccagcagctattaggccagagcactagtcaatggcagagttctcgtcgtggaagtccaagagaatgcaggttcgataggttgcaagcatttgagccaattcggagtgtgaggtcttaagctggcacaactgagttcttcgatgtctctaatgaacaatttcaatgtaccggagtatctgcttgccgtcgagttattgaacctagaggccttctacctaccccattacactaatggcgcatctctagtatatatcattcaagggagaggtataccagggccaactttcccaggctgacctgagtcctaccaacaacagtctccacaatcaagcccagcccaaattgaccgaaggacaagccacagccaaaaggt

SEQ ID NO: 95083 - DNA, 494 bp, Oryza sativa
  unsure (1)..(494): unsure at all n locations
  Clone ID: PAT_MRT4530_93312C.1
ccggccgggacaaaaccattcaagttcactagtactacaacaacatggcatccataaatcgccccatagttttcttcacagtttgcttgttcctcttgtgcaatggctctctagcccagcagctattaggccagagcactagtcaatggcaaagttctcgtcgtggaagatcaaagaatagaggttcgataggttgcaagcatttgagccaattctcgagtgtgaggtctcaagctggcacaactaagttcttcgatgtctctaatgagcaatttcatgtaccggagtatctgttgtccgtcgagttattgaacctagaggccttctactaccccattacactaatggtgcatctctagtatatatcatcacagggaaaggtataacagggncataatcccaggctgtcctgagtccaccaacaacagtccaacaatcaggccaagcccactgaccgaaagcaaagcaaagtcaagaatcaaggatgacatcaa

SEQ ID NO: 95084 - DNA, 414 bp, Oryza sativa
  Clone ID: PAT_MRT4530_93313C.1
gtcatccataaatcgccccatagttttcttaacagttagcttggtcctcttgtgcaatggctctctagcccagcagctataaggccagagcactagtcaatggcagagttctcgtagtggaagtccaagagaatgcaggttcgatgggtggcaagcatttgagccaattcgaagggagaggactcaagctggcacaactgagttctccgatgactctaatgagcaattgcaatgaaccggagtatctagtgcccgtcgagttatagaacctagaggccttctactaccccattacactaatgccgcatctctagtatatatcatccaagggagaggtataccagctccaactttcccaggctgtactgagtcctaccaacaacagttacaacagtcaggccaagcccaattgac

SEQ ID NO: 95085 - DNA, 1319 bp, Oryza sativa
  Clone ID: PAT_MRT4530_93314C.1
gcacgaggctcaccaccaaagaggaagaaaggaggaggaaaaaaggggggcgaaaagaacaaatcgttgcgatcgctttcgacggcctggatctcctcccacgcgggatcgtacggggcgcacggcgttgtcgctttcctccacataataagctgctaagaattatcaccatggaggtcaatggtcatcacaaaccaagaagagaatataatggccgagagtgcaatggtgtacaatcagtaaacaattttggcgatatcgatccatggacagcatgggcatacaaaccgcgcacagtttcattgctactgatgggaacatgctttttaatttgggcaagtggtgctcttgatccagaaagaagcttctctgttgaccgcgtttcatctgttaaaaggggtgtctttgcaatgattgctgtttttttggcttattcatttcttcaggcaccttctactgtacttattagaccacatcctgccatttggcggctggtccacgggatggcagttgtttaccttgttgctctaacttttttgcttttccagacccgtgatgatgctaggcaatttatgaagtatcttcaccctgatcttggtgttgaattacctgaaagatcttatggaaccgactgccgcatatatgtacctgatcatccgaaaagcaggtttaacaatgtttatgagatcctttttgatgagtttgttattgcccatatccttggatggtgggggaaggctataatgataagaaaccaaccacttttatgggtattatcaattggctttgagctaatggagctcacctttcgccatatgctgccaaactttaatgagtgttggtgggatagcatcgtactagacatattaatctgcaattggtttggtatttgggctggaatgaagactgtgagatactttgatgggaggacatatgaatgggttggtttgagtcgtcaacccaatattatcagtaaggtaaaaaggacgctaggccagttcacaccagcacagtgggacaaagatgagtggtaccctctgcttggcccttggagattcatccagttctgcctttggattcctccccgaaaccccttgattgtttaccgacttgtcctttggtggttaattgcgataccaaccattcgcgagtacaatacatacttacaagacaggaaacctgttaaaaaggtggggtctttctgttggctttccctagctatttgcattttggagcttctactatgcatcaagtttggacatgatgcattcagacatcaggatcagatgacattagcttctgcttctgttattgtctga

SEQ ID NO: 95086 - DNA, 557 bp, Oryza sativa
  Clone ID: PAT_MRT4530_93315C.1
aaggtgtgcgcagagtctttttgtttggaatacaataattcgatcaacttacatgagaattgcgatgcacgtgtttatttctattcacatgactgccatgatttatgcaacccaaatttgttatgtctggcagaatggagaagagatttggagatacatactacagcctccgtcgcctgtcgcttgaacgaataaatgtaatcaatgtaacgaatcaactggaatgtgcatcatctgctgcttgtcacaactgttgccaaccgcaccagtgcttccttttccgtattgacgcgtgtgaagtgaagcaacgccatcggcggctcagccaggcgatccgccgtcgcccgcctcctgctgctccgacgagccgccgcccttctccggccaggcgccgaagctcagctggcgcaccatcgtcgccaccgccctggcccaccgccggagctcgcccttcaccttgtcgggctcgatgtccacgagcggcccgccgcccagcccggacaagaggcggtcgaaccgcgcgctgcgcgacggcggctttggttggccgtcgccgg

SEQ ID NO: 95087 - DNA, 322 bp, Oryza sativa
  Clone ID: PAT_MRT4530_93316C.1
ttcgcaagcagtttttaggccaaagcactagtaaatggcagagttttcgtcggggaagtccaagaaaatgcaggttcgataggttgcaagcatttgagccaattcggagtgtgaggtctaaagttggaacaactgagtttttcgatgtctttaatgagcaatttaaatgtaccggagtatttgttgtccgtcgagttattgaacctagaggccttttactaccccattacactaatggtgcatctctagtatatatcatccaagggagaggtataacagggccaactttcccaggttgtcctgagtcctaccaacaccagtt

SEQ ID NO: 95088 - DNA, 307 bp, Oryza sativa
  Clone ID: PAT_MRT4530_93317C.1
cgattggtacctcgagccgccggaacaaaacattcaagttcattagtactacaacaacatggcatccataaatcgccccatagttttcttcacagtttgcttgttcctcttgtgcaatggctctctagcccagcagctattaggccagagcactagtcaatgacagagttctcgtcgtggaagtccaaaagaatgcaggttcgataggttgcaagcatttaagccaattcggagtgtgaggtctcaagctggcacagctgagtttttcgatgtctctaatgagcacgtggaatgtaccggaggatct

SEQ ID NO: 95089 - DNA, 635 bp, Oryza sativa
  unsure (1)..(635): unsure at all n locations
  Clone ID: PAT_MRT4530_93318C.1
gttcattaagtactacaacaacatggcatccataaatcgccccatagtcttcttcaccagtttagcttgttcctctagtgcaatggctctctagcccagcagctattaggccagagcactagtcaatggcagagttctcgtcgtggaagtccaagagcaatgccggttcgataggttgaccgcctttgagcctattcggagtgtgaaggtctcaggctggcacaactgagttcttcgatgtctctagctgagcatttntgtgtaccggagtatctgttgtccgtcgagttattgaccctagaggccttctactaccccttacataatggtgcatctctagtatattntcatccaagggagaggtnttacagggcccactttccccagggcttgttctgagttccttccaaacaaagggttccacaattcgaggcccaggccccttttgaccgccggtctaaagccaagttcaaagttcacggtggacttgacgattcccggtttcagacagggggtgtaatggcttgctgctggtgttcttattgggtgctcattgatggtggatggcattgttggctattaatgttaatgatcaaaaacaaggtgctcattcttggaccttgggcatgggttct

SEQ ID NO: 95090 - DNA, 1114 bp, Oryza sativa
  Clone ID: PAT_MRT4530_93319C.1
cgtgattgttagatttaggtctcccccatatccccattcccatctctctctctcgagtctcgacggcggctgctgctgcggcgtcgcctgcggtgcgatgtcgtcgtctccggcgcatgctcagcgcttctactgccaccagtgcgaccgcaccgtccccatcccgccgcccacctcccccgacgccgacgtcctctgcccgttctgcggtggaggcttcgtcgaggagcttggggaggacatcaaccccaaccccaaccccaaccctagccccttcctgccacaccaccccttcttccccttcgcctccccatccttcgacctccgcaaccctagcgacctcgcggccttcttcgggcccccctccccctccccctccccctccccagccgccaggcacttcgacccctccaacttcctccatgatcacttcaccggcctcctctctggcggcgccaccatccagatcgtcctcgagggctcctccgcctccctccccctcgggggcgccgccgccgggcccggggggatcagcctcggcgactacttcgtcggctctggcctcgagcagctcatccagcagctcgccgagaacgaccccaaccgctacggcacccctcctgccgccaagtccgccgtcgccgcgctccctgacgtcgccgtctccgccgacatgatggccgccgatggaggggcccagtgcgccgtctgcatggacgacttccacctcggagctgccgccaagcagctcccctgcaaacacgtcttccacaaggattgcatcctcccctggctcgaccttcacagctcctgccccgtttgccgcttcgagcttcccaccgatgaccctcaccacgcccacccaacccttggatctcaccgccccgccgcacccgcctctgcctctgcctctccctctccagctccaccacctaggctggctgagagaaggttcaggatatcgctgccatggcctctccgtgctgcgtttggcggccaggcggagagcagcaatcctaccaatcaggatcctgttggtggttctactgatgcttccggttctggcaacaacaatgcaactggaggtcatcgtggctacgatgatcttgactga

SEQ ID NO: 95091 - DNA, 322 bp, Oryza sativa
  unsure (1)..(322): unsure at all n locations
  Clone ID: PAT_MRT4530_9331C.1
tttcaatgcttttagtgataagagtgactctacagcaacttatcgactgagctgtttgagaccttctttaatnaagattttagaagaggcgaatgtttcgttgaaggaggaaacaaatttggcagtgaaatatatagaaatagtgcttaacatggtgcatacatcagaaactgctaaatgtatcagcaacaacagtaaaaacattctgtacaaaacaacactcttctccagttgtcctgatcatagatgcctctcgcatgaactttttgggatgcacaagantgcaacagngagcacatattttctcaacggtggtgcaagt

SEQ ID NO: 95092 - DNA, 473 bp, Oryza sativa
  Clone ID: PAT_MRT4530_93320C.1
gtccggccacatgtggggggagggtgctgccggaacctcgccacctttggtgacaggccgggcgcgtgcgacgtgatcagccacatactgtggaggcctctacaagcatctcggcgccctgcctgtccttcaccctatgtacatgctgtctcagcaacctgctgctctggggggggggtgggcgcattaaccaacctcccatacttctgtatctttgtcatactcaaccgaataattcatatctcttccttgctacaaagttctagctactagctagcctactgtttttagctgtaacatttttgtggagtggcttctaatctgattggtgttttccttttgtttggaagcatatgtgtggtgaatcaatgttgaatttccatgtttctctacttaaacatgcaacaaaataaaatggtctatcgttctacctgattcaagtttactgtcccgtgcttgccacctcctagcct

SEQ ID NO: 95093 - DNA, 564 bp, Oryza sativa
  Clone ID: PAT_MRT4530_93321C.1
ccggccgggacacaaaaccattcaagttcattagtactacaacaacatggcatccataaatcgccccatagttttcttcacagtttgcttgttcctcttgtgcaatggctctctagcccagcagctattaggccagagcactagtcaatggcagagttctcgtcgcggaagtccaagagaatgcaggttcgataggttgcaagcatttgagccaatccggagtgtgaggtgctcaagctggcacaactgagttcttcgacggcactaatgagaaggtgcaatggcctgccgaatctgtgggccgttccgcctctcaccgagcggtctcagtttatccaagaggaatgacgtagcttcgactgtcatctcgcactctgtgagttctggaacggcaagcttcacctctgggacctgatacccgaggccaccagccgtcgcttctgtgcccacgacctaaaggtgctgtccgacgtcttggacggcaacatcctgcagacggtctacgacttcggcgtccgggccgtctacctatgcatcctcctgatgatgggggactaccccatc

SEQ ID NO: 95094 - DNA, 276 bp, Oryza sativa
  Clone ID: PAT_MRT4530_93322C.1
cccacgcattcgagcgaatttcctgctgcgcttgctgccagagttgcaggagctacctggcgaactctatgatcgtgttctgggagtacggtgcaaaccactacaatgcgatgctgatacgagggtacagcgcggaccaagctagcacgtacacgtgaaacatagtggacaccatgtccaacggcgtcgagaagctcatcggcatgggcgccgttgacgtcgtatttacctgagtgtttaccataggttgtttagctatgtatatgacaatctacg

SEQ ID NO: 95095 - DNA, 732 bp, Oryza sativa
  Clone ID: PAT_MRT4530_93323C.1
tcggtactacaacaacatggcatccataaatcgccccataggtctcttcacagcttgcttgttcctcttgtgcaatggctctctagcccagcagctattaggccagagcactagtcaatggcagagttctcgtcgtggaagtccaagagaatgcagggtcgataggttgcaagcatttgagccaattcggagtgtgaggactcaagctggcacaactgagttcttcgatgactctaatgagcaatttcaatgtaccgaagtatctgatgtccgtcgagttattgaacctagaggccttctactaccccattacactaatggtgcatctctagtatatatcatccaagggagaggtataacagggccaactctcccaggctgtcctgagtcctaccaacaacagttccaacaatcaggccaagcccaattgaccgaaagtcaaagccaaagtcaaaagttcaaggatgaacatcaaaagatccaccgtttcagacaaggaaatgcaattgcattgcctgctggtgtagctcattggtgctacaatgatggtgaagtgccagttgttgccatatatgtcacagatctcaacaacgctgctaacaacttgaccctaggctaagggatttcttgtcagctggaaataacagaaaccctcaagcatacagacgtgagggtgaggagcggtcacagaacatatttagtggctttagcactgaactacttaacgaggct

SEQ ID NO: 95096 - DNA, 409 bp, Oryza sativa
  unsure (1)..(409): unsure at all n locations
  Clone ID: PAT_MRT4530_93324C.1
gtcctacaacaacatggcatccataaatcgccccatagttttcttcacagtttgcttgttcctcttgtgcgatggctccctagcccagcagctattaggccagagcactagtcaatggcagagttctcgtcgtggaagtccgagaggatgtagatttgataggttgcaagcatttgagccaattcggagtgtgaggtctcaagctggcacaactgagttcttcgatgtctctaatgagttgtttcaatgtacccggagtatctgttgtccgccgagtttatttgacctagaggcctactactaccccattacactaatgggtgcatctctagtatatatcatccaagggagatgtataacaggggcgctttccagggctgtcctnagacctaccagcagcagtccacaa

SEQ ID NO: 95097 - DNA, 502 bp, Oryza sativa
  Clone ID: PAT_MRT4530_93325C.1
gaccttctccccttcccctctcctccccctccccatctcctcctcctcctatacccgagcaagcccaggcggccgaggccgggcgggacggcggcggccggcgcggagggcgccgctggtggctggtggctgctggtggctgtcggcgggcagcggctggcggcgtggccgcgcggagggtggcagggagcatggcagtggacggatgggaggggggcgggagccggcagccggcggcgccctcccctctgccggaggggaggcggcaatggcagcacatgttctttctttttttttcgaatttttgatacattggatctgataatttgtgattcattggatctgcgatgtttggatctatgatgtatttgatgtttggatctgtgatgttttaatctatgatgtatgtgatttgtgatgtatttctttaagaatttgagatgtatttttttgtgatgtgaatctatgattcattgatttgtgatgatactttgatttgggg

SEQ ID NO: 95098 - DNA, 334 bp, Oryza sativa
  unsure (1)..(334): unsure at all n locations
  Clone ID: PAT_MRT4530_93326C.1
gcggcgacgcagccgccggcccgggcggggggcgcgtncaaccgcgcctcgaccgccgctactcgcggatcgccgacgactaccactgggtggatcaggttactgatgcactagctcaagcaggacttgagtcttcgaatcttattgttggcattgatttcacaaagagcaatgaatggttaggaaaattttccttccatggacgcagtttacatcacattagcaatgcacctaatccgtatgaacaagcaatctcgatcattggacagacactgtcgaaatttgatgaaaataacttgattccctggtttggatttggagatgcaacaacaca

SEQ ID NO: 95099 - DNA, 1527 bp, Oryza sativa
  Clone ID: PAT_MRT4530_93327C.1
atgggcaccgacatcgccggcgacggcgaacccagctcgcccccgcccctgcccgtcccggacgggctggacgacaacggcttccccctcccctcctctcccactgccgccaccgccgccaccagcttcgccgacgacttctaccgtagcggcaccgactggtcctccctgctcgccgccccctcgccgccgccgtcgtccgaggagtccgggaagaacaagtccggcgactccctcgtccagaggagcctcttccaggcgtggggaatcgacaggcggccgcggcgggaggaggaggtcgcgggggtcgcgggcggggctggggctggggcttcgtccgctccttctggctcatggcccgggaggaagcggcggcgaggaggcgaggtggaggccgcggcggacaggaagcctctcgcctgccccttctacaagaagattcccgttgtcttaaaactgaaattaacgaacataggaactccattcacggtggatgcatttcggtatggagcggttgagggttgcaatgcctatttcctcagccattttcaccatgatcattatggtggattaaccaagaaatggtgccatggtcctatctactgtactgccctaactgctcgcttggttaagatgtgcttgtcagtaaatcccgagtatatttgtccgttggagcttgataaggagtatgttatagagggagtttcagtgaccttgttagaggccaaccattgtcctggtgcagcactaattcacttccgtcttggtgatgggaagaaatatctccatactggggattttagagcatcaaaatcaatgcagttgtatccacttctccaaagaggccagataaatttgctttacctggacacaacttattgtaatccaaaatacaagttccctcccaaggaagatgttattgattttgctgtgaggacagctaaaagatatctacagaaggaaccaaaaacactcattgttgttggagcatatagcattgggaaagaaaatgtatatctagcgatttcgaaagctttacaggttcctatctacactgatgcatcaagaaggcgcattcttcacgcatttggctggtcggatttatccaaaatgatatgttcagacagtcaaagttggactttctctgaggaaactggaaatcagcttgacctaattaaacctagctccaggggcaaaattactatctatggtgttccttatagcgagcactcaagtttcagtgagcttagagaatttgtgatggtctatatttgtttgctagtttctgagaccccaaaagctgttggatattcagtggtacggttatataaccttcctggcatcataaatgcacatttcactaaaatgcttgtcttcattcttcacttatttttttctattataacaaatgccagtgacacgacgattgtgcctccagtcccgaagtctgaggagcagccaagatcttcagtgaaggtgaagatcggtatactctgttctgatgctgcgtcattgcaaagcatgtag

SEQ ID NO: 95100 - DNA, 921 bp, Oryza sativa
  Clone ID: PAT_MRT4530_93328C.1
atgccactgctgctgctactgtcgccgccgaccgccgcggcggctgggccggcaccggcgccagcgccagcgcccgtcgccgtctcgctgcccccgccttctcggctacgcgcgtcccacctcctcttcgccttccctcgcctgcggaaatacggccgccgggaccgcgagcccgtggcgaccagcttgggcgagttagaggaggaggatgaggatgacgaggaggaggaggaggaggaggaggaagacgatgaggaagtggaggtggaggtggaggttgatgaggatgaatttctgaagaaccggccgaagccggttggattcggcgccgggaagacgtactccaccgacatcgaggagcagcttctccgggagatgggtttgggcggcaggcggcgcagcagcggaagcgggccgacgccggccaagaaccgcgcggcggccaactcggccaagggaacgggtgaagatctcaatgatggcggtgtttgtgttcgtgtttggaatctcccaaaaaagaaaaacatacacaaggacctgaatcttgctttcaagggatttccaggccttgtaaatattgagccagcggtttctgcaaacaagaagactcgtgatcctatatgcaagggttttgcctatcttaaactggaatctgtggaggctgctaccagtagcgctgtatgtgtctatgccttttatgtcaaagagttctggacttcagtttactctctgaagttggtgtttggatggtttgttgaactatactcccagaaagctgtgtcattcggcaaggttcagaagccgatcaggtgctgtgttgttgattcacaaagctctgttgactcccaaaatcaaccatccagtggtcaggcaatccgtcaacccgggttgatggccaaaaatttggtggcagcaagctga

SEQ ID NO: 95101 - DNA, 151 bp, Oryza sativa
  Clone ID: PAT_MRT4530_93329C.1
ctctcgcgtcatctaactacacaagtttctgaagagttatcatgagacccagatgatagagatagacgtgctggcggagagctgtaactgcatgctgctgcgaatagcccggagcctgcggacagatgtaccctgacctcgctgagcagat

SEQ ID NO: 95102 - DNA, 375 bp, Oryza sativa
  Clone ID: PAT_MRT4530_9332C.1
gtaggataagttggctctcttgggaagcataattcaaaggtaaagttatcgacccttgcatcaaatagcagaagtagctatcacccggagaccagggaagctaatatgaggcagttggataacttgtccgaggttgactccgaagatatgaatcatgagaagttctagaacggaagcatcactgaactaccgcaacctagtctgagtcagccaaaaggtgcatcctggtccaagtcaggtgaagagaagattccatccgcaacaggaggtcaagccaagcagttccgagtggtaaagttttgctggaagttcgtcaagacgcaacggaagaagtcagacaagaagagaagaccgcccaacctatcttcttgctag

SEQ ID NO: 95103 - DNA, 285 bp, Oryza sativa
  Clone ID: PAT_MRT4530_93330C.1
gcatgataactggccaagcctagaagtgggtggatgacaaagcgggatgcatatagctgtacacgttaatccagagccattgacaccattcaattctgcttgaattttccagcagacagaaaccaagttagtgcaaagcaaccccttctttaactgaaagtctgaaacacacaaactacgatcaataaactcagtgtttattgcaatgtaagtgagtgatgagttagaactggtgagttctggttcggagcctgaatcctgacttcattctgattttctccttca

SEQ ID NO: 95104 - DNA, 492 bp, Oryza sativa
  Clone ID: PAT_MRT4530_93331C.1
tttttttttttttttttttttttttttttttttttttttttttttttttttttttttttttttttttttttttttttttttttttaaaaaaaaggaaaccaagttggcataaaggttaagaccccaaaaaaaggaaaaaaccgcccaaaaaaacgggggcccaaaaggggaaccagaacagaaaaaccaatacaaaaaggggtgggtgataaaaaaaaaggttgaaaaaaacccaccgggaaactgggaccaaacaaaaaaaaacccgattaaaagaaagggcgccccgggccaaaacttaacttttaggaggaattgggaaacaggaacttggggaaggagaaaagaacccccccaccagggaggggccccttggagagagggggaggccccctatctccacggagggaaaacttcaaaagggagaggagaaaacccttgaccttaaaacccttgtaaggggccccagcacattccaaaaactaagtggtt

SEQ ID NO: 95105 - DNA, 687 bp, Oryza sativa
  Clone ID: PAT_MRT4530_93332C.1
atggccggctgcgccgtcgccttccccggtgtgccgcccgacatcgccgtcctcctccctggccgttgcctcgtcttcgtcctcggtcctgcttcatcccccttcggctgccgttcctgtcaagctgatcctatcgtcgtccgcctcttcaccaagccaaagccgccgtcatcgtcaaggtcgttcgatcgtcgtcactgcaccaagcccatcctcgcctccatgcaagggtcgccaccgaagtcatcctccttgagtcgtcgccctgttcgtcgccgccagtctcctccgttcgtcgtcggtcatcgtcatcgtttcctcgcctcgtgcgtggtgttcctgtcattttggagtctcctgcggtgccgttcgagtttgtcgcagaagcttccgaagccctccttttctcggagcaaggcaagtcacgctctcctggagcatattgaatcccatttgcgaaaaccattcctacatttccatgttatggctttacttattgaatattgtgtatttacctttgacaaccctagatgtacacctctggccaaggttaaatttattcgaatagccgcgcccttggttatgggcaagcggagcaatgacccaaagttagtggtttctgtctgtagagttggaacacatggttggagcctgtgggttgggttaaggccttatgtgcctttgtaa

SEQ ID NO: 95106 - DNA, 1230 bp, Oryza sativa
  Clone ID: PAT_MRT4530_93333C.1
atgaagggtgtcagttcggacaccgtcaggctgcggctgtttccgttttccctcctcgggaaggcgaagcagtggttttatgccaaccgtgctactatcaacacctgggacagatgctctacgacattcctctcgaagttctttccgatgggcaaaaccaacgcccttcatggaagaattccaagtttccagcagacaagggacgagtccattcctaaagcatgggaacaaattcaggaatacgtggccgcctgtcctcatcatgggatggacgactggctgatcctgcagaacttctacaatggactcactcccatgtcccgtgaccacctggacgcggcagctggaggagccttcttctctaagatggttcgaggagccattgatctaatagagaagatggtctccaatatgggttggagcgaggaacgactccaaacccgtcggcgatgcatgtacaccgtcaaggagacagaaatgcttgctaccaagctggacctcctcaggaagcaattggacgatcacgacaaacggtcacaaggcaccgtcaaagccttggacttacacgtcacgtgtgaggtctacggcagcacaggtcattctgggaataactgcctggaaacccgtgaagaggtgatgtacatgggcaacaacaacaacaacgggtatcgtccacaaggagtcaggggtggaaccagccatgcccatactatcaaggaggatatcgtctttgcgcaagctaaaaccactgatgctttaagcaaaaagctagctgccaatgacaagctgagctttaataagatgatagaaacccagctagctcaattgacttcattagtacctgcaaatgaatctgggaggattctggggcagcccgactcctccattgaaaatgtcaaggcgatcacaacaaggggagtccgtttgccaaaaactctcactgttccccagcttccccggactctccgtctccccaatctcctacaccctccatcagcgatcttcttccggcaatctcccccaatggcggacctcgagcaatcttcctccgatgccgccgcgctaaagaagctgtacaccggaggagccgtccctccaaggcaaaccatggcgagggaggtaggaggcaaatcgatgaggctccttgttgactaccaatatacgtggaataatggaatattgttaggatgcttccctaaccacaagtgtacgttcaggttaattttgtga

SEQ ID NO: 95107 - DNA, 289 bp, Oryza sativa
  Clone ID: PAT_MRT4530_93334C.1
ttctcgtatctatctcctctccctctccgcccattgtgtcctctccacctgcgatccatccgcgcccgcgaggaggagggagccggacgccgccgcggggagagcaggggagagaaggagaggttgctctttcttgtcgtcatcataaagccgtctttttttgtaaccccgactaccctcaggacatctgcgttgccgacctcaactccgaggtgaaggtgaacgggttcccgtgcaaggcgaacgctactgcggatcaatttcttctcctttattttctcttttatta

SEQ ID NO: 95108 - DNA, 297 bp, Oryza sativa
  Clone ID: PAT_MRT4530_93335C.1
ccataatatgttttttttttttttttttttttttttttttttttaattttttttttttaacaaaattaaacaaaaagctaaaaaccccttttccaaacccaaaaacatgccgattttgtaaacccggacaaaacacggttacaggggaacattgaaaaaacttgaaggcattgtctaaaagaccataaaattcaattcgggaactccccccataaaaaccagcacaggctggcaagcattacaaaatttttcttaatctgggggattatgggcctaataaaaaatggaaagaaaggc

SEQ ID NO: 95109 - DNA, 958 bp, Oryza sativa
  Clone ID: PAT_MRT4530_93336C.1
cggacgcgtggggttcgccaagaaccgggagctggaggtgtctactcccggtgggcgatgctgggcggtctcggttgcgtcttcccggagctcctcccccggaacggcgtcaagttcggcgaggcacagtggatcaaggcgggctctcagatcttaagcgagggcggtcataactaccttgacatcccgcgcctgaaccacacacagagcatctctcgatatctaggaccagcccacgcgtccgggctttcatagagaaagaaatgggttgcccaattgaagttgtgtacaaggaagacaatcgtccgatagctgctgccagtcttggtcaggtacatcgtgcagtgcttcacaatggagagagagttgcagttaaagtgcagcgaccagggctcagaaaactttttgacattgacctaaggaatctaaaactagtagctgagtattttcagagcagtgaggcatttggtggtccttcaagggattggattggtatttatgaggaatgttccaaaattttgtatgaagaaattgattacatcaatgaaggaaagaatgctgacagatttcgccgagatttcagaaatataaagtgggtccgtgtgccacttatcatgtgggactacacaactgaaaaggtgttaaccctcgagtatgttcctggtattaagataaacaacttgactttgttggataatcggggatatagtcgttccctgattgcatctcgttcaatagaatcttatcttattcagatactgaagaccggtttcttccatgctgatccgcatcctggaaaccttgctatagacacggatggctctcttatatattatgattttggggtgatgggtgaaataaaatcattcactcgggagagattactttccttgttttatgctgtgtacgagaaggatgcaataaggttatgaaagctctaattgacctagaagcctcc

SEQ ID NO: 95110 - DNA, 1351 bp, Oryza sativa
  Clone ID: PAT_MRT4530_93337C.1
ccgggtcgacctcgcgtccgatggccacagagtgtggtgtgaacaaatcccgccgcttcgatcctggcatgtcgaggcgaacacgaagatcaacaagtctcatcgtttgttatcaagatcaacatgcgccgtccctggtgcagcagctacgtcaagatgacaagctgaagacattgttccagcgccaaggtatggagcttcagccaccatatccatatgaagatcaggagctgcaaagcgaaggtgatgaacaggagacaccgaatcgataccatgatgagcaggaggagaaacctcaccattatctagatgaagagcaggagaagaaaccattccaggatcaagacggagagaggaaaacaccaaagcaatatcttgatgaggatcagaagacagtgcagcaatgccaatatgaggacaagaaggtgccaaatcaatgcaaagatgaggagaatactccagggcaataccaagatgaggagcagaaaatagctaaacaatgcaaagaagaagaagaagaagaagaagagaatgcattagagaagtatcaagatgaagagcacaagtcactcaaggcacaacaccaatgccaagacacggagcggaaggccccggggcaatgcaaaactgcgaagacgaagctgatcacgccgccttgtgccaacgatgtgccccggttctcccttcaggatctgatacaagagaagcagctcctcatcggagaagccaaggccaccagcaagctcggaaacggcaagaaagccattgctgatcgtaaactccctccacctccggctgcctccagcgcgacgttggctatggtgataaagcgacctgatgggggaaagaagtcgatgggagtgatccgccggtgcgtgcaggccctgaaccagatggtcaaggccaaacatggctccaagaagaacaagcctcctttctaatcaagtgagtacatgcatctggtccagagttccctggtagaatcagcacgtctcagaataatgcactgttactgtgcaaatacatagttttttggggatagtttttcaagttgtgcagaatctgccaaggaactttagagcaaggccaaccatcttttcaactttagtagtaaggtgtcatgatctatgtgtcattatggcatttggtcagcaatatttgtaattactcaatgatgtatcagatgagaagcatcagagtctagctagttcacgcgctttgaatgcatctttgtgcaaagttatactgtatattccaggaagtatgaacaggagggaattgcacagttttacaccgacactttctttgagtatcaggtcaaaaatggtgttggtgcacgctccctttctat

SEQ ID NO: 95111 - DNA, 357 bp, Oryza sativa
  Clone ID: PAT_MRT4530_93338C.1
atgcgtggcaatcatcatgaagcatatcaacctaacccgacaacatatgcaatgttatattatcggatccggcttgatcggctaaccctgtccgactcgaattctgccgatcttagtcgtagccgattcggactccagccgatcttcactctgtttccgggacgatctccatctcgaactccatctcgattccttcttcatctccgattcttagattaccaaatttggtcgttaacaactatgggttgaattttagtcccagttggtattaccaaccaggattaaggatctaaataatctttactcccggttggtacaaccaaccggtgtaccaaccgggactgaagtggtgatctt

SEQ ID NO: 95112 - DNA, 336 bp, Oryza sativa
  Clone ID: PAT_MRT4530_93339C.1
tcgcccacgcgttcgacgatggggggtgggcgcgcgcttctggcggtggttttgcttttcccgctggttgtccaaatcccggccttccatccggtggtctatgaaccgttcgacgagagcttcgaggggaggggggttcttttcgggaagggccacttccaagggggatgggagcaccaaaagaatgatggacatgaaaactattggctggttggtagtgaaaagggccaaaaatatgccattatcaaagagcttggtgaacctggtactttgaaaggagggactggtggcctgcaatttggagggagggttcaaaatgggcttgaatggggaggg

SEQ ID NO: 95113 - DNA, 3848 bp, Oryza sativa
  Clone ID: PAT_MRT4530_9333C.1
ctattattttttttttttttaatcattgtcatgatatatttgggtatctatgatccgggttacatatatatatatgaattaatatatatgttaaggaccaacttgttgcatttacatttggtccttactatctgtatagcctttccctctgtggctataagcagttatgtatgccatcaaaagaggaacaaagactagcacctgcagaattattgccagtgtgtgtgccagttctgttaatatatgttcagcagacacttgcaggagccttactaccgggggctatgaagaagctgctgaatgaagggcgacgagggaggcgtaggcgccatccttgatgttcatcaaggtgatcggtgctttcccttctcgatgatcactccattcttgacgactagggatcaaatccgcgtttttgttattgctagaccaaacggaagagctgctcgaactgtggcgtggttgagggccgcttcttgaatcaccagacccatttgttgcctcagccactttagctgaaacttctgaatgtccacaccatctagcagtatatgtcctacgtcaggatcataaaacctctgaagcaatgaaattgctgttgatttgccactaccactctccccaacaagtgcaacggtcttcccagaatgaattgtcaagcacaagtctcggaatatctcaacatctggcctggttggatatctgaagctaacatgctggaactcaatattgccgtgcagtgtttcgacagttacccctgcatcctcacttgggtctatcctagatttacgatccacaattgcaaatatcgaagacacagctgattttgctttggaagaatctgatgtaagggtacttgattgcgacaccccaatcgctgccatagcaagagcaagaaaaaccctgaaaactttaggaaaagttgtcttgttttcctcaacaagccgagcaccagcataaaagctagctgcatatacaccaaatagcaagaaaaatgaaacaccaaagccaattccacttataatccctgttctaatccctgtccttagggggccttcacatttcttcttgtacaaatccataaccttttcttctgctgagaaggagactacggttcttatactgcttactgcatcatttgccacttgacttgcctcctcatacatcatctttgcatctgcactgaaaccctgaatgaatttcatctggatccatccatttagaccaatgagtggtattaaagctaagatgatgagtgataactcccagtttgatacaaaggcaatgactaaaccagcaatcaaggttgttgtgttttgtacaactaattgaagtgcatcacccacaagccccctaactttagctgcatcagctgatagccttgcaccaattgctccacttgagttttctgggtgatcaaaccattcgatctccatatttaccaccttctcaaatgtcatcaatcttatccttttgatcaacctgcacccagctatagagaaaaggtacgaactaactggaagtgacaaaaagtatactgcgccaaacaccaagaacatggatgaccagaactgcgaatctttcctcagcagatgtgggggttcatagaatgctttgatcacatttgacagcagtatagcaaagattgggaagattactccgctgatgacagatgcaatggaacctagtatgagcactggaatttctggcttgttcagagacgcaagacgacttagaggcacatcctgtggcatcccatcacatagattatcagaggaaccatcctggatgtcaatccctaggggcataccaaatggtacagagaatgaatggtggctgttatcacgggatgacctccggctgcggctagcagactgatttattgacaattgtttgcctgaacgagctccagagtcaccctttcggtcagacttgtcctgccggtttgcttcctgcagctttatcagttggctgtaagctccttcaggatccttcagaagctcatggtgtggacctttttccactaatgttccttgatgaatgacagcgatggtgtcagcatttctaactgtactcaagcggtgtgcaactatgacagttgttctgttagtcatgaccctgtcaagagcctcctgcacaatcctctcagactcagcatccagagcgcttgtagcttcatctagcagtaggatccttggatcttttagaattgctcttgctatggcaattctttgcttctgcccaccagaaagctgagtcccatgttcaccaactgaagtatcaaggccctgaggcattttatctatgaatttagaggcattcgcaagctcagctgcagctctaatttcttgatccgttgcattgtctttgccataagctatgttttcctttatgctagcagcaaataggactggttcttggctgacaaggccaattttacttctgatccacctaagctggaattccttgagattcacaccatctatgagaacatcaccaagctgagggtcgtaaaacctttcgattaggctgataaccgttgatttaccactcccactctgaccgaccaatgcaactgttgtgccactgggtatggaaagggagaaacctctgaatatttgctcatcaggcctagttggataggagaaatatacgtccctaaactcaatatcccctcgaatgtcatcgggcttcattcctgtggtgctgtatgcatcgatctctggttttctgtttattgtctcgaacattttgtatgcagcagcctgcccacctgcaaaagctttcatgcttggtgatgcctgccctagtgctagagatcctgttagcactgcaaagatgacattcatgaccttggcgccggtatatcccttgagcaagatgagcttggcaccataccatatccccagcgagtagccgcagaagaggagcaccatgaccgtgcccatgccaagcccggctgcgaggccctcccgaacgcctgatttgtaggcgcttttcagggacttgttgtacttctccactgcctgcttctccccggtgaaagatgcaactgttctgatggatccgatggtctgctccaccaccaccgacgactcggcgtacgccgcctggccgagggacgccatctttgcgacgacgttggacatgacggcccccgcgacgacgagcggcgggatggtcgccatcatgaccagggtgaggagccacccctgcgcgaaggcgacgatgaatccgcccaagaacgtcaccaccagctgaatgaacttgccaaccttctcgcccatggcgtcctggatgagcacggtgtcgccggacatcctgccgacgacctcgccggtgttggtgtacttgtcgaagaaggcgatctcctgcctcaggatggtcttgaggtacaggttccgtatcctcgccgcctgccgctctccggtgatcatccagcatgtcacctggacgaaggaggcgacggcggaggcgatggcgaggtagatgaactcgagggagaccatggacacccggttgacgacgtcgtggatgcccatcgcgccgccgaaggcgtcgatgaggttgccgaagagcaccgtcatgaacggcagcgcggcgccgttcgccaccgcgcccagcgtccccagcgccatcagcgccgcgtccgtcttgtccgcgaacgcgaacagcttgtggaacggcacccgcgccgacgccgacgccgacgccgcccgctctcccctcgccaccgcggcgccgccgccgccgccaccgcccttgccattccccgggctcgagtccgccgcggcgacggaggccgacgacgacgcgttcgcctccgcgtctctccaagactccggcat

SEQ ID NO: 95114 - DNA, 687 bp, Oryza sativa
  Clone ID: PAT_MRT4530_93340C.1
aaaaaaaaaaaaaaaaaaaaaaaaaaaaaaaaaaaaaaccaaaccctttcaagttcattagtactacaacaacatggcatccataaatcgccccatagttttcttcacagtttgcttgttcctcttgtgcaatggctctctagcccagcagctattaggccagagcactagtcaatggcagagttctcgtcgtggaagtccaagagaatgcaggttcgataggttgcaagcatttgagccaattcggagtgtgaggtctcaagctggcacaactgagttcttcgatgtctctaatgagcaatttcaatgtaccggagtatctgttgtccgtcgagttattgaacctagaggccttctactaccccattacactaatggtgcatctctagtatatatcatccaagggagaggtataacagggccaactttcccaggctgtcctgagtcctaccaacaacagttccaacaatcaggccaagcccaattgaccgaaagtcaaagccaaagtcaaaagttcaaggatgaacatcaaaagatccaccgtttcagacaaggagatgtaattgcattgcctgctggtgtagctcattggtgctacaatgatggtgaagtgccagttgttgccatatatgtcactgatctcaacaacggtgctaatcaacttgaccctaggcaaagggatttctt

SEQ ID NO: 95115 - DNA, 676 bp, Oryza sativa
  Clone ID: PAT_MRT4530_93341C.1
gtggaatccgagctccaagctgaagctgcaaatccagagcgagaggggaaggggaggggccgatccaccgaggcctctcacctccgcggggctccatggccgcctctcaccctaagccggcggaagcagtcccgccaccggaggatgctgccacggccgccgccgctgccgccaccgaagaagaagaagacgagtgggatgctgatggatttgttattcctaatttgaccactcaagaagatgacgttactgagcatactgcccctaaacctaaggatcctgaacctctgaaggagaaagaggagaagatatacttgggacctcatggcgctccaccatctcaagcaaagcagcaggagatcaacatagttggccgtaagcagcgattcagaaacaagctgaaggaagcagataacaaattcactggcaatgctcaggagaacaaggtggaaaccctgagggagctcatgggagctagaacacatagcaagggcgtgccaaagagctctcctcgtgattggcttgatcctcactgtcatgagtctgaatttgataggaaaccacactaggcaacctccaaatgatgaccaccgttacttcaaacattgataaaatgtatatctgtgggtgttattgctcaacaatatatatatacacatgggtcgtctgatatgcg

SEQ ID NO: 95116 - DNA, 658 bp, Oryza sativa
  unsure (1)..(658): unsure at all n locations
  Clone ID: PAT_MRT4530_93342C.1
acgcgtgggcggacgcgtgggcggacgcgtgggatcggcgtgtagaggtgatcggaggcgagcgcaccggagcacaccaccgaggcggcggcggcggcggcgagggagggagaggaagatggggaagacgccggtgcggatgaaggcggtggtgtacgcgctgtcgccgttccagcagaaggtgatgccggggctgtggaaggacatcaccaccaagatccaccacaaggtctccgagaactggatctccgccacgctcctcctcgcccccatcgtcggcacctacgagtacgcaatgtactacaaggagcaggagaagctatcccacagatactaaatgtgaagcatgcagagattgccacaacttttggaatttttatgatctaaaattatccaagaatgatataacatttttggttcagttatagttgtccatgtactgttttccatcgttccatgcatctccagtatgtatgacttgcaaacttatttttgcggcttgctacatatggtggcattccctgtcactgaagcaattgtttaataaagcaaattaactgtttaacaaaaaaaaaaaaaaaaaaaaaaaaacatgcggacgtccaagttttngtcctttagggggggtaattgcgggttgggaatatggccaagtgtt

SEQ ID NO: 95117 - DNA, 238 bp, Oryza sativa
  Clone ID: PAT_MRT4530_93343C.1
acagcaaatagcttgcaaactttgagacttcattatacaattcttttgccccttctacacacatagtgcataaattcaagaattctctcaaatacttttttaatcacataataaagttccccaatgctcactaatttttattccaactaccacctcacacacttatactactttctttaaagatcataaaatcaaattttattaactcttatacttaatacccattcttttataaact

SEQ ID NO: 95118 - DNA, 1056 bp, Oryza sativa
  Clone ID: PAT_MRT4530_93344C.1
atgaagatgaagaagttctatcagaaggcgcttgatgaggcatttgtagctgtccaagaatcaagcgatattgagtttgaaagtgatgaggatgatggcaaggggaacaaaggcaagaatgatgtttgtctcatggctagaagcgtggatgaagattctaattgtgataatgaggttttatttgaggaaattgaagctgttagatatgttaataggtctcatgttaaaaagattaagaaatctgaatcttgtcttgctatgagttttgtcatgaacactagattggttgatgaattgtttttgactaagagagctttgaataaatgtcaatttgctttgtttgctagttcgatgtttaatgtgattagctctaaaaggattaaacaatctagtgaaaaaccttgtttgacatgtgttgctaatgagatgaaactaaaagatgcactaggtcgtgttaagcacatggaagaaattgtcaaacaagatgaggtgttttcttgctcaaattgtagaaaacaaaaaggtcttttggatgcttgcaaaaattgtgctaatcttactcaagaggtttcttacttgaaaagttctttgcaaagattttctgatggtgctggtgctagaggtggtgaaattttgcttaaacctgagcctaagaacactgtgtttaaatctgctggcatcatgactagtttaagtgcattatcttcaaaaaccaatatggtcatcttgttggattctgttttagacttgctagaaaacagaaaaaggaacgggaaattgcttttgcgaaaaagagatggcaaaaactgcgttttgtcccgagacaggcagtcagaccggtgctttacccccagtcagaccggcggtaagccttcggtcagaccacaggcacttttggcgaggaaggagaacgtgtggattgtggattcctgttgttcgcgacacatgaccggtgataaaaattggttctcctccctcaagaaggcatcaaggaaggattcaatcatctttggcgatgcttctactagtatgatcactactactggatctgtcaaa

SEQ ID NO: 95119 - DNA, 159 bp, Oryza sativa
  Clone ID: PAT_MRT4530_93345C.1
cttggctgtcttgcatggatggaggttttctgggcattgccactcgtgataggtacatctgctgcctctggacaagcatacggcccaggtatcaaagcaattcgcgaagcatttttatctaaatagaagcagttggttagtagcagatgctgatatgac

SEQ ID NO: 95120 - DNA, 1333 bp, Oryza sativa
  Clone ID: PAT_MRT4530_93346C.1
agggtctccataaaagccatagaaatgcttatactgtggtacaaattttgaattctacaacgcttatatttttgaacggggtgagtataatattggcacaagagcaatgtataaacaattaaatccatggaacacgtagttggttggtggtcgggttggacatgagacggattggaactatatactatcgatattgattagccattgcacctgttaaaaagtgtatctatatgtgtagggctatgtatgtatgtacaagggaaaactagcctctaatgcctataatgccttctggtccagtcgctcgttccagttcaggcacctgatcaagctgcggaaccagtcaccagtttggtcagatttattaactgttgggagcgggtgctgactcatggatatttgaacagagtctccccttgataattgctgcctccttttgccatcaaatgatacccaggcgttacttcttgcatcatctggaatcttcaattcaagacgagcagaatcaggaaggatgacaggtctaaatgatagcgagtgcgggcagattggagtaaacagcatacacggggcatttggatggaccattgagcctccagctgcaccagagtatgctgtactgccagtcggtatagctactatcacccccatctccttcaacctttgtgattagatggttatgctcgtagcattcaattttgggcaggtatggatcagaaccctctttaagatgcatcaattgcaagggaaagcctgtttcctttcctcccttctgacgcggcccagtcaacctctttcttcctgcaccagcctggcctagtgtgtcggcctcttcctcctcccacgagagcgccgtaggtataaaaccccccttacatgtacagcttgagacgaatttcaggcctgctgatcgattatcaattgatctgcacatttggactagaactctgcattgcaacaagattacctgaccaaactgatccaatgtaaacctttcctcaacagatgtggaggctccattgctggatggttttccattagtaataccagaagcaactgatagaatatagtcactatcaaaggatgccccaacattcccttcctggcaatgaagataaatgggcttcttcacactatcagacacaacttctgtcaatcgctgaacctgtttggcagagggtgcagtcccaatctcaacaggtatattcaccacctctatctttcccagtgagacagcttcctggcagtcgagcccgatccgcgagctgaagaacgacgcccacgcggcgacgacaccatgccgcgcgccaccaccacctcccgaagacaccat

SEQ ID NO: 95121 - DNA, 493 bp, Oryza sativa
  Clone ID: PAT_MRT4530_93347C.1
atgaagccctgcgagggcgaggagctcgcccgccgccgctcctcctctgctccgccagcccgcttcgctcgctcgtccacgcctcgccgccaaggtgctgtcctgctcgtcggcctccacgcgccagtagtggcaattgaggggcagcggcgtctccataaatctgcatgttctccacagatctgcggaacatacggctccgccgtcacccgccgcctcgccggcctcaccggctgcccgcccgcccgcccacgttgccgcctcgggctctgccgccgcccggggagcgccaccgcccgccgcctcgccggccgcccggatctgggagggggctcgaccgcccgcccggtcgcccgccgctccggtatcatcaagctgaaggaatcaacaacatttgctcatggcaaagaccaaattatggaggaagcaactgactttgtgcaccaaattggcactgtgaacaacatacaacaaaaccaggaggagccagcag

SEQ ID NO: 95122 - DNA, 207 bp, Oryza sativa
  Clone ID: PAT_MRT4530_93348C.1
attattttaagtgtttgccggagattatggggtcggtggctgcggaggaggtggtggtgttcacgtctatagctgcggacattgagattgacaacagtatcactgctcagtgagtacatatttctcaagaattgtcaattaccgacatactgcttctccagatctccttacagaccttgtcatccctccctatctctttcttttctg

SEQ ID NO: 95123 - DNA, 616 bp, Oryza sativa
  unsure (1)..(616): unsure at all n locations
  Clone ID: PAT_MRT4530_93349C.1
caaaaaaagtagttnatctcctcgcggcggcgctctctctctctctccgccggcnacgatggccacggcgaacggcgtcgacctcgcgacggcggggctcctgcggctgctggcgatggggatggggccgtccgtgcagattccgggagaaggcggggttccggtgatgatggtgcagcacatcatcatcggcgacgacggcggcgacctgttctccggcgggctcggcggcggcgtgccccccgcgtcgaaggcggcgatcgcctcgctgaaggaggtgaaggccggggaggacggcgaaggcggggactcgctgggcgactgcgcgatctgcctggacgccttcgccgccgggaaggagatgccgtgcgggcaccggttccacagcgagtgcctcgagcggtggctcggcgtccacgggagctgccccgtctgccgccgcgagctccccgcggcggaacaacaaccaccagaggagcagcagagcggcggcgcggacgccggcgagaggcggaggccgagggcggtggtggtgagctacgtggtgctcggagacggcggccgcggcggggagagaggggagccatggaacattaggatagaggacgtggattag

SEQ ID NO: 95124 - DNA, 655 bp, Oryza sativa
  Clone ID: PAT_MRT4530_9334C.1
ctgcatgtcaatccctatgagcataccaaatggtacagagaatgaatggtggctgttatcacggtatgaccttcggctgctgctagcagactgatttattgacaattgtttgcctgaacgagctccagagtcaccctttcggtcagacttgtcctgccggtttgcttcctgcagctttatcagttggctgtaagctccttcaggatccttcagaagctcatggtgtggacctgaccaaaaatgttaaatgtttaaggaaagatgcaatgggcaactgagagctcataaaatggatgattttgatcattgatatgagccttttgggaattttacctttttccactaatgttccttgatgaatgacagcgatggtgtcagcatttctaactgtactcagccggtgtgcaactatgacagttgttctgttagtcatgaccctgtcaagagcctcctgcacaatcctctcagactcagcatccagagcgcttgtagcttcatctagcagtaggatccttggatcttttaaaattgctcttgctatggcaattctttgcttctgcccaccagaaagttgagtcccatgttcaccaactgaagtatcaaggccctgtaaatattggcaaggagaaggaacaaatctcagtatgttaccccc

SEQ ID NO: 95125 - DNA, 188 bp, Oryza sativa
  Clone ID: PAT_MRT4530_93350C.1
caaacacaccgaatacggggcgactgctgttttataggcgcggggtggggcgtcgaggagaaggaaccggcattggggcgatcaaggggagcgagctggcggttgtgctcggagctagcggccaaacggcagtggaggtgcggtggctgaggttggaaaaagagaaaaagaagggggaaagaggagct

SEQ ID NO: 95126 - DNA, 1067 bp, Oryza sativa
  unsure (1)..(1067): unsure at all n locations
  Clone ID: PAT_MRT4530_93351C.1
ggccgcttttttttttttttttttagacagggaaaggtaaagcatttcatatggttcacagatagaatcttcctcatcttccagccaaaatgattgtactaatcattaacaaatcatcatcgttctccccagcaacttattacaagaaacttctctattactactacattttgcatgtcgctcttacacaaataagtgtcatcaagatggcattatatcatcgacaagtacatatagttaatcatcaaatcacagacaaatcaattcaaattttaagataagtttgaaacctcaaatctctccaatgtatacgtcgccttataatcttatatcgtctaggtcttcttgggggcaaacttggccttgatcttgtccacctcctcgtcgtcgatctggaaggccttggcgaggacggcgtcgggcaccgccggcgaggcggcgaagagcgtggcggcgatggactgcgtgggtgggtgtgcggcggattgaggccgccaggggcgtagtcgatgcgaccgaggcgtacgcccggaggatggagggccggaggagtctggacgtggtggccggtgacccgacgtcgagctctccgtagaggacgagcacgacctcggtggcgcgcgggtgggtgtncgacgggttgagnccgccgggggcgtagtcgatgcgggcgagggagacgccccaggtgttgaggcccgggaccttctcgacgttggcgccggtgaccacggcgccggtggtggtgttggcggcggcgccggggctggcgagcacgccggagaagaagtcgtccgccgtcgcgttcgccttgcacgggaacccgttcaccttcacctcggagttgaggtcggcgacgcagatgtcctggaggtagtccgggtcgccggcgagcgacggcgctgcggcgacggcgagcgccaccgccaccgctgcgaggagcagagaggaccacgacgaccctgcagccccagccatcctgctcgctgatctctctcgcctgctagctgagcctctgctcttcttctgctcgccgatggttaattgattgatgtgtgttgacccga

SEQ ID NO: 95127 - DNA, 234 bp, Oryza sativa
  Clone ID: PAT_MRT4530_93352C.1
atgcctaatggaattgtggagactggtattcgcgctcgcttgcgtattgcggctgtggtggctcgcactcgactgctcatgaattggttgtttattgccggactgtatcatgggagagaattctatccaactgctgacatcaaagatatagattcatctaacgatgaagataaaagtgatgatgtggctgcacgagaggacatgaaattagcaataataactacagtgaactaa

SEQ ID NO: 95128 - DNA, 1074 bp, Oryza sativa
  Clone ID: PAT_MRT4530_93353C.1
tttttttttttttttttttttttttccagccaaaatgattgtactaatcattaacaaatcatcatcgttctccccagcaacttattacaagaaacttctctattactactacattttgcatgtcgctcttacacaaataagtgtcatcaagatggcattatatcatcgacaagtacatatagttaatcatcaaatcacagacaaatcaattcaaattttaagataagtttgaaacctcaaatctctccaatgtatacgtcgccttataatcttatatcgtctaggtcttcttgggggcaaacttggccttgatcttgtccacctcctcgtcgtcgatctggaaggccttggcgaggacggcgtcgggcaccgccggcgaggcggcgaagagcgtggcggcgatggactgcgtgccggggagctggctgttgaaggcggagacgacggcggcgggcttgtcgccggtgttcctctggaagtggacgaggccgcgggggaagacgaagacgtcgccctgggagatggtgcgggagaggagcttgttggcggtggtgacgaagccgacgtcgagctcgccgtagaggacgaagacgacctcggtggcgcgcgggtgggtgtgcggcgggttgaggccgccgggggcgtagtcgatgcgggcgagggagacgcccagggtgttgaggcccgggaccttctcgacgttggcgccggtgaccacggcgccggtggtggtgttggcggcggcgccggggctggcgagcacgccggagaagaagtcgtccgccgtcgcgttcgccttgcacgggaacccgttcaccttcacctcgcgtggtacggtaatacaaatactgcggtaacctccggagttgaggtcggcgacgcagatgtcctggaggtagtccgggtcgccggcgagcgacggcgctgcggcgacggcgagcgccaccgccaccgctgcgaggagcagagaggaccacgacgaccctgcagccccagccatcctgctcgctgatctctctcgcctgctagctgagcctctgctcttcttctgctcgccgatggttaattgattca

SEQ ID NO: 95129 - DNA, 336 bp, Oryza sativa
  unsure (1)..(336): unsure at all n locations
  Clone ID: PAT_MRT4530_93354C.1
ccggccgggagcgcatcgctcggtcttccttccttccgtccgtccgcggggcacaaacgcacccaccacccccccataacgcgcgagatcccctctccgccccccctctcccgatccgccccnccgnatcccncccccccccnancccanccnacctaccccccctcnccnccnccnccctccccctccncacaatccacaaccaacaaccacacatacaccaacacttttcactacataacccccctgcctcatctcaccaactataatctgtcgttcctctacaactaccccatctataataccaccaccctaaccccgcttcatgtacaacat

SEQ ID NO: 95130 - DNA, 990 bp, Oryza sativa
  Clone ID: PAT_MRT4530_93355C.1
atggaggaggcctactgcatgatgatggtggggagggagagggagctcgtggctgagctgcgtcacctcctcttcccttctccgtctcccactccgaccacccctgcgagccactctactacggcgctcgccggcgacggcgagtgctgcttgccgccagggctgacaacgacgacgacggtgtccggtggaggacggcggcgggggaggaagagagtcaaccgcgacaatgataatgtcaagctgcttctgcaggcagatgatgatcaggaggccgtaatagctgatcatggcgatgcaaatgccaagcctcttcctaatttcaccaaaacaagaaggaggaagcagcaggcgacgacatcaacgatggtaacgacggtgccagatttcgatgggtatcaatggaggaagtatggtcagaagcaaattgaaggtgccttgtaccccaggagctactaccggtgcaccaacagcacaaaccagggctgcctcgccaagaagacggtgcagcgcaatggcggcggcggagcagcagggtacacggtggcctacatctcagagcatacttgcaagtccatcgaaccatccctgcctccagtcatcctcgacaccaccgtccgtactaccaacaaccaccagcagcctgcagctgctgaatcaccggcggcgacatcgtcgtcgtcgtcgaatatggtcatgacgagtagcgagactggtaattggagcggtcagcacggcgcctacgcatgccgacagatgatcgccgccgatgaagagtactgctgctgggacactccggcgacgacgacgaccacctctggctctaatggtggtaacagtacttgtgctgaggatatagaattattgagcaggccgatcaggtcgccgatgcacatcgcggcggaagggaattggatggacgatttgctccttgttactgacggccttatcgttatatccaactccagcatcacccatttcctcacttaa

SEQ ID NO: 95131 - DNA, 999 bp, Oryza sativa
  Clone ID: PAT_MRT4530_93356C.1
atggcgagttcctcctctagcggcgcgaatcctctctcagggcaacccgtcccagagaaacttaccaggaataatttcctgctatggaagactcagattcttcctgctatccgtggcgcacgcatggaaggatacatcaccggcgcaaagcaagccccagctgcagaaattgacgccaaggaaggtgacaaggtcgtcaaggtgacgaacccggcctacgaaacatgggtcgctgaagatcaacaagtgcttgggcgatttcaagacgattccgtccccagccagatctccacccgcggtaatgtcaacttccaccaatctatccgccgcgccatcggccgaatacgcagagtctctacgaaggctttcaaaaagatgctcaagtttggtttccctatgaagattcagcagaccttgaactcccatcagattttagatttgaagacattaatcatgaaagatttcaaacatccagagaaatcttcacagctgcaatcagcccatgtattcttccagtcggcatccatcaaggaagaaatattcaagcctcttacgagttctatcacccagagcaaaaactttgatagatggtggggtgaatggaagttgcatctattccaccaaccagcttcaatgtacatgatagacctctttccagatgttgtccctcaaacaacagaatcctctcctcctcgtcaaagcaacagtggcaaggatatcacctacgccccaggcttaattcctaatggaggtgggccatctcaccctgtcatcggctatgatgcccccaatactttagctcttctccaagggcttatcagagaaccagccgatgccgacccctccaactccttctgctccaactccctttacaagagtaagcacccttctttaaccatttttgtaatcgtctcactttatggccgattgctcacattcttggtaattgcagaaaaggaaggctgctgtgaagaagaaatcgactccaatgacatctaa

SEQ ID NO: 95132 - DNA, 610 bp, Oryza sativa
  unsure (1)..(610): unsure at all n locations
  Clone ID: PAT_MRT4530_93357C.1
cccngggcccnttaaagggcccaaaanttccccttggagggnggggggnaaccccanttttgggtntttaaatctttggaccccngggnaaaanccggttntggtttgaatttnntggggatttggggggnaaacaatttaananngggaaacggnnagggcccggggttaacccctngttgggaattcaaccnttcantaaagggaaccncaggnggngtttcnacccgcgaccgccnccngttttagaaatanttgatccccnagggtgctggaattgggaacgagatagtttctaattgatnacgaagaaatngtgtannanggcttgcatgtaanatagtgnttggnttnatcaagagnaggaangtttgcncccagtgtgcaagtgttntgcattaggagcccgantgcccgngggccatccgaccagtgatggacgtccgagcgtgtcagtgtgatgggccatatagcnattggtgttccatgccnttcttagctacaaanatctaatcatcctttgtactccnttcatcacaagatttgcacgtacntatttngtntcagttttaganantaaaaaacaagantngntanngaaaaaaaaaaa

SEQ ID NO: 95133 - DNA, 186 bp, Oryza sativa
  Clone ID: PAT_MRT4530_93358C.1
atgcccaacgttttgaatgcgtacgttgtgccccatacacactccgcgtcggcgagcaagcggctagcgggtggtggggcagcacgcggcggcggccagcggggccgcgcacggggcgacagcgtgccggccgtggtgagcggcagcaggcgggaggcaacgcgccggttctcctctccgtttttt

SEQ ID NO: 95134 - DNA, 264 bp, Oryza sativa
  Clone ID: PAT_MRT4530_93359C.1
atggatgagtttggccgaaatccagagaaagccaccggacaagagaaatatgacgacagcgaactcttgcattacacagaaacaccaaaagaaaagaggaaacaaaggggaaaacccaactgcgggaagaacccgactacctggaccatcttcccctatcttaggcgaccagaaccgtcggaatcgatggaggaaaggggccgaatgaagaggaagaaagaatcgcctttcttccgtgtcgcgcccagagattcgacaacctga

SEQ ID NO: 95135 - DNA, 1230 bp, Oryza sativa
  unsure (1)..(1230): unsure at all n locations
  Clone ID: PAT_MRT4530_9335C.1
aggcctaatatattggaaatcatcaatcaaattaatgagaaagaagatataattggtgaggtagatgtgcatccatcagagccatggatcttgacgagcaatatgtttggctcagttgacatcttgaactgtaatacgcaggtataagctaacttatttacaaactccatctctacagttatcgcggccaagttcatcgcgcgaaagcaatggtttgtggttggacatcaagatggtttcataagagtttacacatatgagtccccagtaaagcaagtgaagagattcaaagctcatgtatggaacatcacaactttggatgtccatccaactgagccttacctactgtcaataggctcacaagaccagatcaagctgtgggactggaacaagggctgggagtgcattaagacatttgacctccatggcctagcatatcaaataaaatttaacccaaaagatacacataaatttgctgttgcgagcttggaaaaaaaaatacaggtttggaatatccgttcttcccgtcatgaattcacattgtctgggcacggatatatagtgagttgcttggattactttactcgaggcaatcaactgtacatgataactggttcctgggacaaaacagccaagatctgggactgtcagagaaggacttgtgttcaaacacttgaaggacatacggattgtatcacctgtgtttgttcccatccagatctgccaatcctactcacaggttcaaatgatgagacagttcgtctgtggaatgccactaccttcaagctggaaggtgtactggactttgagctcggcaaagttactgctatagtttgcttaaagggttcaaaacgagttgcgattggacatgatgctggattagtgattactgaaattcgtcatggaaagcctgctcccagcaacagataaggatattcaaactgttggtgtcaagtaggcaaactggaaacaaccgggactaaagatccgggtgccgagctcgaaatcgtaatcatggtgttaccatgaattgacacgtcgtggaccaccatcggtttgtcggcggtcgcaggggatattacctgttgtaagctgacgtactgggtttttcctccttcctgctgcctccctgtgcttttttttctcttttgaatgaattaacagtcccaaactattntgaaaaaaaaaaaaaaaaaaaaaaaaaaaaaaaaaaaaaaaaaaaaaaaaaaa

SEQ ID NO: 95136 - DNA, 327 bp, Oryza sativa
  Clone ID: PAT_MRT4530_93360C.1
atggcgtcgtcgtcttcgctgccggagatcgtgagcttctcgcctgagtccgacggatcgtcgtcgtcgtcggcacctctgatcggcggcgacggcgagctcgtcgtgcagctggtgccgcgagacgtctctgatgggatcctgggcaagttcgcggacaccagcgagttcgacttcgactacgaccagagcggcctctggtcgccgctggtgctgaggccggaggtcctcctgctcgcgcagacgccggccgggcgccgccgccgccgccaccaccaccgccgccggtggaagcggaagaagatgctctgctactgcttctggtga

SEQ ID NO: 95137 - DNA, 545 bp, Oryza sativa
  Clone ID: PAT_MRT4530_93361C.1
aggaatccacaacggcacgcatcattgaccggatcacgaagaaacttgggcatggtaaacaggaggttaaaaggacttaaattgcacaaatgtaaatgcaataagtaaatgagacaagagacaaggagtttatcacccaaggttcagaaactcgccggttttctaggcgagcccaacttcaccgttcaaaaccacgaagccacctcaagccctcttcgtcaaggggtgggcaaggagggagtcagcccacgaagtggactacccaagccttgatcactaagggtagttcttcattcactccgaagacctgactactttacaacggctagaaaactagccgttgcaatgcattaaatgcactgagacacggggactgatcagacagccatagagcggccggtcagaccggccaaggctcagtcagaccgctgctggctcggtctgaccagctgcggctctggcggctcgggtttttcacccagaggccgaccagcatgatgtcatcggtcagaccgcctatcgaacgccgccgagacggttgatct

SEQ ID NO: 95138 - DNA, 427 bp, Oryza sativa
  Clone ID: PAT_MRT4530_93362C.1
caggacgacctgaagaggctggcggcggtgcgcgcggtggagcaggtggagagcgggatggtgctggggctggggaccgggtcgacggcggccttcgccgtcgcggtgatcggggcgctgctggcgtccgggaagcttagcggtatcgtcggggtgcccacctacatgcgcacgttatagcaggcgcagtcgttcgggatccaggtctctacgcctatacgaccaccccctcattgtcctgtccatagactgtgccgaccagtgtattccattccttacccttcatttagggtgaggttgtcttcttgtcagtcagaagtttgatctctcgatatttcttcacggcttggactgtttccatgggacaaatgtaaaccttctgttagatattgtgttacagccagtttttgtctccctttatgagctt

SEQ ID NO: 95139 - DNA, 1569 bp, Oryza sativa
  Clone ID: PAT_MRT4530_93363C.1
atggaagagatgatcaagccggcaccggcaccggcgtcgtcggaggaggagaaggaggtggtggctactgctgctactggagaaaggaggcatgaggaggcgacggccgggagagaggagcaggaagaggaggaggaggaggaggaggcgccggtggtgctgaagaaggggccgtggaccacggcggaggacgccgtgctggtgcagcacgtccggcagcacggcgaggggaactggaacgcggtgcagcggatgaccgggctgctccgctgcggcaagagctgccgcctccggtggaccaaccacctccgccccaacctcaagaagggttccttctcccccgacgaggagctcctcatcgcgcagctccacgcccagctcggcaacaagtgggcgcgcatggcctcccatctgccggggaggacggacaacgagatcaagaactactggaacacgaggaccaagcggcgccagcgcgccggcctgccggtgtacccgccggatgtgcagctccacctcgccttcgccaagcgctgccgctacgacgacttctcctcgccgctgtcgtcgccgcagcaatccgcggggagcaatgtcctctctatggacgcagccgatgccgccggcgccgcctcgtccgggtacaccagcgcgcgcccgccgccgctcgacctcgccggccagcttgccatggggagccggccggttcagctcctcgccgcgacgccgttctccgcgccttcgtccccgtggggtaagccgttcgctcggaacgcgcagttcttccagttcccgcactcgtcgcccgtgtcgccgacgacgccgaccgggccggtgcaggtgcacccggtcacgccggagctctcgttgggctacggccttcacgccggcgaccgggccagactcccgcctgtctcgccgtccccgggtgccagagccgagctcccttcaagccaattgcgcccgtcgatggcgcctaccacagccgccgccgccgccaccggcggcttggtcggcggagcgctgcaggatcacccaaacgcggcgagcctcgaggccatgctgcaggagctgcacgacgccatcaagatcgaaccgccggcgccgccggaaaacagaggaacggaagaagaaggcggcggcggcggcggcaatctgcgcggcttccttcatgagcaaatttttgacaaattgatgcccatcaagtctgaagatttttgcatcgtggggttgcattctgtactaatttcacttcaatttccaggtgacggcaaaccggaggtagagctcaaggacgacatcgagacactcttcgaccttatcataccggcgacgttcccggcggcggcgccggagcccgccgccgccgcgacggccgcctccgccgcgcccaaccactccagctccgtctcgcagcacagcagcgacgaccaggaccactccaacggcgccgacgtcctcgacctgcccatcctcaccggcggcggaggcggctcgtcggagcaggacgactggagcctcgacggcgccgcctgccagtgggacaacatctccggcggcatctgctga

SEQ ID NO: 95140 - DNA, 468 bp, Oryza sativa
  Clone ID: PAT_MRT4530_93364C.1
atggactctgaagatatgggtagatctacggggtggctcagcagcacggtcgaccagcgaataagcgagcaaactcagaccaatcgacggccgatcgatgaccgtagcacgcctagctggtacttttcttcggccgagggacctagaatagactttttcccggcctgccgccggccgccgacgtcggagggacaaaagcccatccctcccagccgtcggcgaaaacccaagcctctcgccagaactggagcggacggcgaaaagcagcggcgccggtgcatgcctcctcgccggtgcgcacactcgcccaagggtgagggcgccacctttgagcagccctgccccggcgccgtccccgtcgtctctctctcatcttccgcgcggcgtcatcgacggccggaggcggtggacttcccttgcgcgtcggcaacgaccggcggcgggtgggctacccgcgcacgtgggtga

SEQ ID NO: 95141 - DNA, 171 bp, Oryza sativa
  Clone ID: PAT_MRT4530_93365C.1
atggagggctgccgcacaacgaacgacgggacgaggggccgtggcgcactggatgaagggccgccgcctaccggatcgcatggccacaatcatcgcaaagttgtggtcgtcgacgccgtcccactccaactcatcaaggtccctgggaaggagggggagtacgaggcctag

SEQ ID NO: 95142 - DNA, 471 bp, Oryza sativa
  Clone ID: PAT_MRT4530_93366C.1
cattgaaaggtagccaccggtgcgtcctctcttccctcttccttcacccttcatgctcgatccagatgggggcgggagaaccggatgggaccgccagttatggggatggcgtgaggagagataaaccgcccaaatttggccatttctctctcccgtgttttgggcaatccgccacttttggcgcattggatggccgcttctcatggaaccttttttttctcctatacgccaaaatgccgatggagtatcggatagatgagctcctggggatgctgtaagtcagttgatgtatccttcaccggttgtttgtaggtatcttataatgtgtccttgagaaaaatattgacagatccaactatgaacaagcagtggtttgaaagaacatctctatcaaatctcagggctccattgaaaaaaatatcatggaattaaaattgattatcatgttccaaagaaaaaaaaaaaaaaaaa

SEQ ID NO: 95143 - DNA, 1219 bp, Oryza sativa
  Clone ID: PAT_MRT4530_93367C.1
tagtggatccccgggctgcaggtctcttgagtggtcaccacatactggtgaacatgacactgtagacgagttggttcttcaacaccttgagccacacactaatatcaggaatctaagaatttgtggctatgaagggtgcgtcgttccattttggattgagaacctttctgtcagaaaactggtatcaatcaaattagaaagttgtataaactgggaacaactaccgtcacttggagagctaacactgctcagatatcttttgttgagaaatcttccaaagctacagcagattggccggcattctcatatgtctagtagtagttccatggagctgttgctacctccaaatcttcttagtctggaaatagaacaatgcccagagctgcaggaattacctcttctacctcctagtctggtatcatttcaaataatagaagttaattggactaaacttccaaggatgggcaagctatgcagcaagagcaatgaaacaattttagcccaattgcaggaggttgttatcaatgattgtccatgcttaagttccctggaagacagctttcttgagcagaagcagcacatggtagctctaagaaacctgcacatccacaactgtatacatctggagtctgcatcgataccatttgaagcaatgatcatgctcagatctctatgtatcggacgctgtccaatcggcacgaggccgagaggtgctggggaaatgttcctgccaccatcacttaaagatctatatatcagatcatgtggtgactatgagcgtatagtggttgtgtcactgcaagagcaacaactcatcaatctctccgtattgaatctgaataactgctcgaacctggtatccctccccccctcagaagttttcagtaggaatttcacctcgctgcagatcatcatcatacagaaatgtgggaatctgtcatccttgggtgggcttgaatcccttccatccctctctgaattaacaatcagacgttgtgctaaactcacaaaatttggttcatccgtaaatccatatgtatctggtggtgaagaagagcatctggtggattcaagaagttccctgcgtatcagctctcttacaattgatcttccatccctgctgcttgttgagcctctcaagagtctctgccacactgaacacttagaaattgaagatgcgtcacagatgaagcagcttacctgatcgttggctgctgca

SEQ ID NO: 95144 - DNA, 309 bp, Oryza sativa
  Clone ID: PAT_MRT4530_93368C.1
ggaagccagcgggacggaaacattatggcaaacaatccaaggaaagcagtccaaagaaaaaaataaagaaaaggggccccaatgctgtgtggccattccggggcttggatttagaagctttgctgtaaccagcttgcagaatcccacttgtacaactccagcattcacagttggacagcacatgctcgcaagccgttccacacaggccaatccacagtggggattcccagggcctggatctaaggtcaacgaaatggggcaattcggttcaagtacacgtaggtgacgccgcccaggcggacatttcct

SEQ ID NO: 95145 - DNA, 286 bp, Oryza sativa
  Clone ID: PAT_MRT4530_93369C.1
ccaaaggaccaaagggccgctggttttggcctaaggagagcccaagggccatgccaaaaaagagccccctacttctaatcaaatggcccctagctttaggccaactcttaaatccctgcaggcatgcccccagacagggggagggcctggacccaacatctaaaactcattgggggcttccccaaaccatcgaaccattttattatgcccctccggctatggccaagggagggcccctcttccaaaccttttggatttcaccctttcctccctacgggaaggggcc

SEQ ID NO: 95146 - DNA, 277 bp, Oryza sativa
  unsure (1)..(277): unsure at all n locations
  Clone ID: PAT_MRT4530_9336C.1
gtgccccaatttatgggtgtgtnttggttgtgccctgcgctgctgcaagcaatgtgtggattgctgtgaacactggcacaccacacgctggcacaatttgatgcccatgcaacagctgactttcctgaatgaatgaagtgactgtatgaagggtattgtgtttgaatattttacctagaggaggaggaggatttgttatctgttattgcttaagcttatgtaatggtgaaagaaggaaagatgctacactactttgagaagaaaaaaaaaaaaaaaa

SEQ ID NO: 95147 - DNA, 1330 bp, Oryza sativa
  Clone ID: PAT_MRT4530_93370C.1
ttttttttttttttttttttttttttttttttttatcatgggcgatcccgtgcaatatcattctactagaaaacagcaacccgtctcacgaacagataactagaaaatgacaaatgttttaacacaagttaatacgacagtatcaaaataaggcacaatagaggtgaaaatacaaaccgacaacataattctgacagtaccaggaaatacaatctagaaaccacgaagaactagcaaccttgaatctgcttcggtgctactcccatgctcagccaaacttttctagtccaatttgaagactcttcttaagcatcactggatcaacaaactttattccttgtcatcactacctgggctacgggagccagcacgctgtggtgatggtgaaacactgcgtgaaggaggtgaaccttttccatttgtctctttttcaggacttccattgcgagcagggctcctgcgtggtgttgatcccttgagaggagggctagcgctgtgccgagtaggcgatgcactatgaaatgagcggctccgactcctgcttctgctcctgcttctgcttttgctcctgctcttactcctgctcctgcttttgctcctgctcttgctcttgctcttgctcttgctcctacgcttatcatcatctcttcctctacgacggttcttgtagtctgggcttaagcttcggcttcggcttcggcttctgcttctgcttctgcttctgctgtgacgacgatgatccctatccctgtcacggccatgcctttctctgcttctgctgcgacttcggcccctgcgttctctatctctgtggtcatctctgtgccttcgccttgggctacggcttcttgacctgtcccgtgatttctcaacctcttctatgatccttccttttcgtattggctccgcattgggcccatacttggcaaactgcaccatgatgttcctcccatccacattacgcccatcaagccgatctatagccttctgcgcctcttcagcgtacttgtagcgcacgaacgcgaatcccctcgagtccccagtcctccgatccctcgggatgaagacgtcgacgaccttgccgtagcggtcgaagagcgggaagaggtcgtcggctgtggtacggaagctgatgttgaggacgaggagcgagaaggtgtcgcggatgtccggcggccccgacctcccgaagtgcgacatggcgagaaacccccgcccgccgccgccgccgcgtgggagacctagggtttagggctccggcgccgcgcgagcggcggagtcgagtcggggcgagggcgacagcgagtgtgtgcagtgcccacgcgtccga

SEQ ID NO: 95148 - DNA, 1386 bp, Oryza sativa
  Clone ID: PAT_MRT4530_93371C.1
atgaagcaggtgtcctgtagtgttgtaaataaatgtttggcctacaatccatgcctctcaagaaactactatcaacggtctcataccgtgaagttgcaaagatcacaagctggccagataattttgcctcgcaaattgaggaaatctacgctatggcagaccaacttcactcagaggcagattgcaacgcattgttcctctgacctgagtacctcctgcagagaagaattgcccagctatttaacagttaatgttttgaaagatcagtcatgtgcaagacaaggaatctttcgtaaagtgattgtcatcttgaatcctaattctggatttcgcagctctcgtgaagttttctaccagaaagtacaaccaacattggagctttcaggctttatgatgcaagttgttgaaacagcgtatgctggtcatgcacatgctcttgcttctactgttgatctcagcacatgtcctgatggtatcatatgtgttggaggtgatggaattgtgaatgaggttttgaatggtctacttggtagagatgatttggaagaggctattcaactgccaattgggataattccggctggttctgagaactcgttagtgtggactgttcttggtatcagagatcctgtttccgctgcaactactttagccaagggtggtatcactccaatagacgtgttctctgtcaaacggacccaagctggaattactcatttcggtttgacagcttcctactatggttttgtggctgatgttctgcaactatctgaaaaattccgtctgcactttggccccttccgttatgtcatcgctggtgttcttaaatttctatcattacctcaatacagatttgaggtcaactatctccctttgtcacccaggagaaatcacaaattactacctgtgactgaaaagtgtaatgatcatcttgctgctgatagcagtgctgaagataactgggttactaggaaaggagaatttcttggcatttttgtgtgcaatcatttctgcaagcctgcacagggattactctcaccggttatcgcgccaaaagctcagcataatgacggcagtctagacttgattcttgtccatggaagtggaagactcagattattctgcttctttatcgcctatcagttttgctggcatcttcttctgccttatgtggaatatgtcaaggtaaaacatgttaaggtcaggccaattggcaaaacccacaatgggtgcggtgttgacggagagcttattcttggagagggccaaacagaatggcagtgctcactgctcccagcacaaggcagattgcttggccggcatcgcagcgcatctgagtagcatacccaaatatttgcaaatattgcttcttgcaggtaaaaacat

SEQ ID NO: 95149 - DNA, 535 bp, Oryza sativa
  Clone ID: PAT_MRT4530_93372C.1
atggcactcccggcccacaccatcctatcatatctccccatggcgctcacttacctccaccacaacatgcccctccttgaagggacctacacgaggtcaaagctcaccagcgtgcctgagggaagagaggcggtggcggtcaacgatccctggagagccacgaggaggatgggatcccctgtggggaggtggaagatgatgacggtggggaggactagcctcttttctttgtcgtctcttgtcactggaggtgagagcggtggcggtctgctcagcaaggtgagtgctcggcggaggagagagagcaacagcagcgcccaacatccagctccacggcccatctcctccatgatgtcatactccgcggccaccggcagcttcgcgccgcaaccctgttgacttccttctcagctcgacaaccttcttccccgatgacaacaccgacatgcagaaaaagttcagcctgcacgctgctccaccccatgccattcataacccaggtgatgatggtggcctcctcagcttcctccgccat

SEQ ID NO: 95150 - DNA, 429 bp, Oryza sativa
  Clone ID: PAT_MRT4530_93373C.1
atggcattctggttagaccgcgaggaatgggcacaagatttcacttcaccagaaaaccgttatgcatgcttgttgacattgtccttgttgcaaggtcgcacagctgcacgaggcgtcgcgcatggcggcgccgtgcgggaggtgctggtgtacggtctcctcttggcaggggtggaccatggcgagctcatgggcagagcgcggttctgcctgtgcccgaccggcgatgatgagggcgtggccgcggcgagctaccgcgtcgtggaggccatcacggccgggtgctgcgccatggacatcgccgtctccttcctgtgccgccgtcgccgcgccacctccacgccatcccagagccccatgccgcgccaccgggtccccctccatcccctcctgcgccgccgtggctctagccacaggtttccatcatga

SEQ ID NO: 95151 - DNA, 486 bp, Oryza sativa
  Clone ID: PAT_MRT4530_93374C.1
tttttgttttttttgaatattgaaggtttttattgaaattatgtttacaaggggagacaattagagatatatagttcatatatatagaataagagacactgggtaggggcatttatacaaataataatagatgctgcccatactccatcaaatgttcttcttaaacaaaatctgaaataggttaatacaaaatcatgtgatctccacacaataaaaactaaggttactttcagatcaaagaactattgtcctgagcttctctctgaatctacatcgtcagttgtccatccgcagattcttccttccccagttagtcaggctctgactctgcaaaggatccttcttccaattgacatttgcccgtcttacagctatcttcatacccacacgttcatacatcattcagttccatcatgcaccagtgcattcgtttattcatcagtctcatcttaatacaaaatctataatgaaatacccacaagttac

SEQ ID NO: 95152 - DNA, 147 bp, Oryza sativa
  Clone ID: PAT_MRT4530_93375C.1
atggcgatccattggccgatagcccgatatatcttgtgttgcaccgggatgaacaatacattggatggattgttcatggctccttgtgagaaacttgagaacgaatgggttgggttcagaggcagccaagccaaaaacaccttgtag

SEQ ID NO: 95153 - DNA, 351 bp, Oryza sativa
  Clone ID: PAT_MRT4530_93376C.1
atcttactcttggtttttactttcctattcaactcccttctttttattaaaaccaactctaggtttaccccggtaattacagcccagacccatcaagccaaccaattttccctttatgaaatcgttataccttcagagattcacactaaatacaacccgctcccaaaaaaaaaccacccccttacctatcaaacaacctacactccgtaacaaaaaagggcaaaccccggcgttcctactgagggacccaacctccccaaatacgctagcgcctaccgccccattctcagaaaggaaacttgttgttcagcctccataaaaaaataagccaccccccaggaaaacgccaac

SEQ ID NO: 95154 - DNA, 825 bp, Oryza sativa
  Clone ID: PAT_MRT4530_93377C.1
atgacgagcaggaacgagatcgatgagatcacattggaggatcttgatgaggagcagcgtcaagtcatggagaagcgaataaaggcgataatggaggagatcccggcgagatcgctcatcaggacccatgcatcaagttgctatgagctagtccaaaatcatcaagtggatggattggcacaaaacacgcattatggccagtataatcatattgtgccgccacaaccaccaattcttaggccaccaaatccacaaccaaggcctgagaatatggaagagcaaattagtaacatcattagaaaagcatttggaattgagccaagaaattgtgctaagaatcggtctggtggatcaaaggttaaaaaggtgaagaaggtgtgggtgagaaaagaagccaaaactccggaggtcgtttttatcaaggaagagtctcaagatgttcctactggagatgcggtggaaactatacaagcagaaaaggttgaagccgacaccatgactgccaatagcgggagtctgactgggacatctggccgatctaaccaccggcctatggccgctggtctgatcgggcccaaagaccggcctgaccgggtggcattagagaatattgagaaaattgagggcaacacaggagcttccacttcgaccaaaaatatcaagaatcatagcttagctcctggaaaacaaccacagccgaagtggataccttccgacttatctcgctctcaaaagaggaggctacaacgtcttcgagccataggtcaaaaagaaaagaaggccgaagacatgagggaccaaacatgtaaaaatttagaaccttga

SEQ ID NO: 95155 - DNA, 309 bp, Oryza sativa
  Clone ID: PAT_MRT4530_93378C.1
atggagcgccgccaacgcttggtagaggacaagctcaagctcatatccgcatccgccagccgccgccgtctcgtcaagcttcagttcctcatccccaagccccgttgccaccgtcgaactctacgtccccgagcagctctagctccaccggcgagctcggttacgacaggagaggcggaccttgtcctgggtctcgccggcaggcttcctagggggcgcgtgcgcgccagcttcttaactcgcacagccgcgcgcgccccctcactagtagtccacgagctgacgccgtcaaaagattttaaaatttga

SEQ ID NO: 95156 - DNA, 370 bp, Oryza sativa
  Clone ID: PAT_MRT4530_93379C.1
attaggtggaaacacaacttttgttcattttatttaccttttatttttaaatgtttcacaaaaatgggaaagacacctttttttttttttataccacccaaaggttaacatgtaccataagaggatatctgggcttatttttatcttccgacccccttttctggtaaaactcatcacaagacaccccccgggggggaaagggacctggggcccccataggccctaggggaaacaccatattaaaagggcacctaaaaaaccacccgggcttggcctttagccaaatcctcccaaaatgagggtgatcgccttgcacctgcaccagctgtcgtcaacggcggcaagctgccggcagcaatctcaccggacc

SEQ ID NO: 95157 - DNA, 654 bp, Oryza sativa
  Clone ID: PAT_MRT4530_9337C.1
atggcgtcgccggtgagctcatgtcccgctgctgctgcttcacatccatcgtcccaccaccactgccgaggtgttcgtccggcggctggacacagtttctccccacccacacgaatcacattggttcgctggacgccgcctcgccacggttgggtcaagctcaacttcgacggctcagtccacaacgacggctccggcagggccagcatcggcggggtcatccgcgacgaccacggccgcgtcctcctcgccttcgccgagcggacgccgcacgccacgatcggggtggtggaggcgcgagcgctcatccgcggcctgcagctggcgctcgaccacggctggaacgaccggctgcttgtggaaggggacgacctgaccctggtccggctgctccgatgcgagtccacccacacccgcatcccgccggcgatgctcgacgacatcctctggctgctcgactccttccgcgtgtgcgaggtgcagcacgcctaccgcgaggggaaccaggtggccgacgcgctgtgccacgaggcgtacaaggcggcgccggcggcgaggctctggacgcccggcacggccatggtcccgttccccgtctgggagaagctcgaggacgatcggcgcggcgtgcttcaccagcgagtccgtgcgtga

SEQ ID NO: 95158 - DNA, 266 bp, Oryza sativa
  Clone ID: PAT_MRT4530_93380C.1
atggcgaccagggggcagaagggcacctgcggcactgcaagcgggatcgcccggcgcggaggccacggggcgcaggcgggtgaaaacggggcgggtatttcccgcccgcccgcccagccgtattatttcgggacaatttcgggtaaaaatttcgggtacccggaagtttctccgggtagcgggttcgaatacggcaatgacgccgagactacgagcgccaccggtgctgcggtgcagcacccgtcgcaccgccacctgctgcatcc

SEQ ID NO: 95159 - DNA, 2586 bp, Oryza sativa
  Clone ID: PAT_MRT4530_93381C.1
atggcgtataaaagaaaatctcccgtctcgtctcctccgctcttgcgccatcttgcggctgaacaggggaggggcgccgacctccatctggcgagcaggggaggggaggggattctggcaggggaagacatggcttcacgctcgacgccttcgaagaggccgtttcaaaagaattcttcagagcaaaatggtcggggcaagtggcagaaaacaaagcacaattctttgcagcagcctcaactgatagtgcaacctggtgttcctattttccgcattctctgccctacttcaaaatctgggaatgtcattggcaagggtggaggcatcattgcaaagataaggcaagagactggagtaaaaatcagggttgatgaagttgtccctggttgtgacgagagggttattgtgataactgccattgataaggacagagaagttagtcatgtgcaaactaaggaaaacgacggaggtgtggcttgttctgttgatggcaaccatggaatggagaaggaccacactaaggaagaaaaggatgaaagtaacaaagaaatggatgattcagagaaaggccttggtaaggaagaaaaggatgatttagaaaaagatcatgataaggaggacagggatgagtcagggaaagacaatgataagaaagcagatgattcctctgttgcaaaagatacaaattctgagccagaggcgcagctggagctggagaagggaatgccattagccgtgaaggccattttgcttgtatttgaccggatttttgtaaatgaaatggaaaatggaacaggagatgcatctggtgagagaaatcatgtttcattgagattattggtgctagacagccaagtaggttggcttttgggaaagaatggtagtgtgattaagcaaatgtctactgacagctgttgtgaaattcgagtttcaaaggacaagcttccattatgtgctttaccccgagatgaactttgccagatcactggagagctcgactcagtcaggaaaggtctgaatacagttgctcagttgctatttactcatcctcctaaggagagtgatgttcttggtgctcataattctggttcatctcgttcattcttcaatcaaccagatgttcttcctccaggaatgcaacctaatctccatctcccttttcaagggccaaatgttgctcatcttcccaattttcctgaagctctaatgcatggccatggctcagtcccacctgaaccccttacttttaggttgttatgctcaagtgacaaggttggaggtataatagggaagggtggaaacaatatcaagtctattcagaatgatacaggctgtgaaataaaggttcttgatactgttccaaaatctgaagatcgcatcgtatttatctcaggacctgcgcatccgggtgatggaatttcccctgcacagaatgcaattctgcatgtgcagcgtaaaattgtaccgacctccaacaccaaggagggtcctgcgatatgtaggctgattgtttcaccgaaccaagttggttgccttcttggcaaaggtggtagtatcatagctgaaatgaggaagctatcaggagcacatattatagtgctgagcaaagacaagatcccaaagggtgtcccagaaaatgatgaagttgttcagattagtggggcctctgaagctattcaggaagctctaatgcagataactgcaagactgcggaaccatcttttccgggacagaatggcttcaacagtccctaatgtgcagccaccttttggtttggtggatcctcagtttggttcatatgcgggaaaccatgattctatatctcctaggatttttcctaatgtgcctcagtttcataaagattttataggacgaccattggatgagatgtctgctccttggaccatgaagggcatgcaggttgttggtgatccaatttcattgcctgatatcccaggaatggcgcatagaggaatgggtggatttcctgggcctggtcagccatctatcgtatcaaccataactgcagatgtcatggtcccaaaattagttttaccttctctatgtggggaagatggaggctgtttaaacagaattcgtgaggttctttggaaaatatcccagtcttttcattgtgagatagaaatgctatggaagctcattgtgctcttattagctgaaggtaggtttggtgatgcatatggtccatggggtcctccctgtgtacgtccgtgggccttttgtgactggctgcggcattattttgtgaagtttgagacacatatttctacttttatcatttgcagaagctgtactgagctagctaaacagtggagatacaccagtgacacctttcgttacttgatgaaccttgtttcccaaggtcggaaatttgtcgagtctgttgtgatcttcttatatatacttggttatcattgctatatcagcattggaagctgcactccagaagtttcacagctgagatgcactgtgacgatacttcgatatcgtgagtctgcaactagctgtgaatcacgtttcttgcccctgttatctttcgggcattcaggatgtaaaggtctctga

SEQ ID NO: 95160 - DNA, 1223 bp, Oryza sativa
  Clone ID: PAT_MRT4530_93382C.1
tctcttgttctagatcgcgagcgcccgcccttgggtttgtttttttttttttttgtggaaggctaattattctttcatttgatttaagaatacttttgtacatcttgtttacatgaatacaatttgttacatggatccatgattcatatctttgtttttgtttcaaaagctaaatcaaggattcatatgtgagttaaggccgcgcacaaatggcatagtctgcatccatcttagctttgcttgctgattacaaccatcttggaataattccaaatccgcgtcgacaagattgaacaatatgaattcatacaggttcaccttctactgctgatagcgacgacggcgatgatccgatgcgattccggggcagtttggcagaaggcatatggcagcttgtgatcaaaattgagatgtacacgtctctctcttggagttttgcttgcagatgcctccatggatggattgagattgatttttgcttcgtcttgatgctgtttggaacaatttgatgttactgttttcaattagctgcaaagcctgacggtgcacgcgaccgcctgcgcccaatacttgagcctcgccttcacctcatctgggctatccccagggctggagatcttccagttggcgatgggctgcgccggggaggagggggccaccggagccggctccgccaccggcgagtggtagtgttcgtcgaggaagcgctggctcatggagtagcagagctcgagggccgggagcgtgccgcagagctcggggatctcgtcgtagctgaacccgaaccccagatccacgcaccccttgagctcctccaggtcgtcgtcggtcaggctcctcgcccgccccacgccgaggccgccgccctccccgccaacgccgggcgcgtcctccctcgcggcggcggcgcccgcggcgtcgtcggccaccaccaccggcctcgccgccgcccgccgcggccacgccgcctcccactgcgccccgcgccacacgtcctcggtgcccgcaacctcctcctcctcctcgttcttggcggcggctcgccggtgcgcgcgcggccgccggttcttgtgcctccgcctgcgcgctggcgctggcgcggcggcgggaggcgtccccggctgctgcagaaagaaagaagtcgccagggaggcgtcgtcggccgacgcggcggcggcggtggccggctcgtcgtcgcggtcggagtcggagctccacgtcat

SEQ ID NO: 95161 - DNA, 1500 bp, Oryza sativa
  Clone ID: PAT_MRT4530_93383C.1
cgggctgcaggaattcggcacgaggctcggccgctgcccgtcgctcggcgagccgccggcccgacggcgccgcacgcgccgggagcactcgaccggcgctcgccttggacgaaggcgccggttagccgcgaggcagccgcccagcgctcgcgttcccccctcctgatccgtggggttgctcagcggggcgccgtgccggaggagatgcagaggctgggggatttcaggctcccgcccttcttcaactacccgccttacttcacgttgcagcctgtgcgagaaacacgtgaaaagcaagtgcagctgtggaaagatctgatacttgattattgtagaagtcaaaagctatatataatctccctagaagaagatttcccattgttctccaatccaaagatcgagagatctcttagccatgaagcaaaggaagtattccttgctgctcttgtttatgaaggacgtgcagaatggatggacaaaggtcataagaagtgcctcattcttgtggtggcgttggggtagccacaccattgattcttgcaaggaggaagagcagctagaggcgaggcaagaaaagaagtgaaatctctccgttagacaggaagaggaaaagcaagggggaattggggatggcgtcaaagaggatacagaaggagctcaaggatctgcagaaggatccccctacatcatgcagtgcaggtcctgttggtgaagacatgttccactggcaggcaacgataatgggtccatctgatagcccatatgctggtggagttttcctagttaccatccacttccctcctgattatcccttcaaaccacccaaggtggcgtttcgcaccaaggttttccatccaaacatcaacagcaacgggagcatttgccttgacatccttaaggaccaatggagcccagcactaaccatttccaaggtgttgctgtcaatctgttccctgctgactgatccgaaccctgatgatcctctggtccctgagatcgcccacatgtacaagacagataggcacaagtacgagaacacagcaaggacctggactcagaggtacgccatgtagcacctcagatatcgatggacatgtcgatgttgtaacaacattatcaacgggtgtgtctccctctcgccttgtgtggtgtaaggatcaaaaccggctttgcagtgcactcttggtgttgctccattgtgtcactcactcattgcagtgatttcgaatagtatcaaactggtggtttttttcggtcagataatgtttgcaacttgccaacaagtcagtgcttccaaatgcagtggttccttgaatcttggccctccaagatgcaaataatcaagttcatagttagaacaagctacgatcatcacttcatattcgtagtggcggcgatggagttgccagggaagaagagggcagaggaatcgtggttggagaaggaacggctctggaggaatatcgtgctatcgatggagttggagtgggctggatatag

SEQ ID NO: 95162 - DNA, 1998 bp, Oryza sativa
  Clone ID: PAT_MRT4530_93384C.1
atggcgtcatcgccggagtcgtcggcggcgccggcgcgccatatccccgacgagctcgtcgaggacatcttcgcgcgcatgccggcccggtcggtgctccgctgccgctgcctctcccgcgcctgggccgccgcgctctccaccgacgccttcgtcgaccaccacctcctcctcgccaaccgccgcgggggccccaagctctgcatcccgccgagatcggcgtccgccgacacgatcaacgcgtggtcgccggagggaagaacgacgacgccgctcatggccgtcccgcacggcacgcgcaacggccgcattatcccctacggccgcccgtgccgcggcctcctcctcctccacgccatcttcgcccggctctacttcgtctgcaacccgtccgccggcgaggtcgcggcgctccccgacggccgcatggcgggcgaacccgcgccccggcgaggactacgccagcgtcggcctcggctacgacgcgcgcacccggacgcacaaggcggtgcgcctgctctaccaccacggccaccccgccgcctgtcacgtctacgacatcgccgccgcaacctcgacgggacactggaggccggcggcgacgggggcgaacaccgggacctcgtccacatgaacaagctcgccgtctacgcgcaaggccacctgcactggatcacgacgaaaagcgtcggcgacgctgacgccatcatgtcgttttccatggcggcggaggtgttcgggcgcgtcccgccgccgccggggacgacggacatgaaaggcttcatgatcaccgagctcgccggatgcctgtgcgtctacccggcgtacctctcgtcggagagatctctagacatctggttactcaccgactactcgacggcgacgtgggagctgcgctgccgcatcgatcccacgtccgcgacgtcgccggagacgaacgacttcttcttggtgaacagagaagttacaccgctcgtcctcaccgacgaccaccgccgcgttctcctcctctccgaggagcatgaggtggcggagtacgacgccgcctccgggacactccgaagcacgccgggccgccggagctccggcgcgccacggcgacggcacaccgcagctcgtgccgtacgaggagagcctcgtgtcggcggggcggccgtacgaggacatcctcttctcgccgccggccgcgcgggcggtggcgctggtgctgcgccggctgccggcgcgcgagctcgggcggctcaagctcgtctgccgcagctggcgcgccatgatcgagaccgaccgcttcgccgcgtcgcacaacgcgcacgccagggagacggccatggcgagcttcgcggccggctgccatgtcagcctcggctcgtactactactactctctggtgttcgtccctctcgagtcgtgctccaaccgcaagccgccattgatgagtacaagaactgttgtccgcaacgcatgccatggcctcgtcctcgtcacggacgtcaatggcgaaaggaacattgtgcacaacccggtcaccggcgccggcagaaacttctccttcctgacgcctcgccggtgtcctcccaagataccggagtggacgacggccgcgggtgcgccgggctggggtacgacgcgtcgagggaggagcacgtgctcgtccgcctcgcctacgccggcggcgaggattgcgccgccgtgcaggtgtggcgcctgagagacattgggccgtacaagctcacggagtcgcggccgccgatccctcccgacgtcggcgtcccgccggtgcacgtcgccggcaagatgcactggatgggggagcagaggcgcctcggcatcctggtgttcgacgtctccacaatggcgttcgacaccatgccggcgccgccgcgcgctgccggacgccggcggcgccgtcctggcgacgctcgccgggaagctctgcgtggcgcactcgtgccgcgagacggagacgatgagcatatgggcgaagagcgcgggagatga

SEQ ID NO: 95163 - DNA, 1884 bp, Oryza sativa
  Clone ID: PAT_MRT4530_93385C.1
atggagtcggcggcggcggcggcggggtgggggctcggagccgtggacggcgtcctgccgccggagctgctgctcgacgtcctgctgcgcctccctgccgggccgatctgccgcctccgcgccgtctgccgctcgtggctcgccttcaccaccgacccgcacttcgtcgccgcgcacgccgcccgccaccctgccccgctcctcgccgtcggcgtgcagggcttccccaggctctgcgtcgacctcgtcgacctctccggcaaccttgtcaagcagatcctccgcgtggggaaaggcagggtggtgagcgggagctccgccgaccgtgtcctcgtcgccggcgaggaccacagcgtccgcgtgctcaaccctaccactggatccatttcaattttacctagccatcgctgcggcggcgcagacccctcaacgattgcggcctggtttgcatttggtcagacagcttccacgggggagtgcaaattagtccggattttactgaatattgataactctcgtcacctatccgaggttatcaccatcggcgacacggatggagagtggagggagacggcgaacccgccaggctaccttggttggaactgcaccaatggagttgtgttcaaaggcgctgcttacttcatcttggattactgtttctctgatccctccttcctcgagaggggctgcatgccttcctttgactttgcgacggagaagtggagtgtggccctccaagggccgttgaacagaattctcgaggaatccaatggcacgctcagctatcatgaccttgccaatcagcttatgttatctggacttaaaggcactttgtgtacatcgcactggaatgatcaattttataccgtggatctatggtttctaactgattctgaaaagggtacatggtccaaagatcataggattaatgttgatgctgtttttcatgggattggagattatctgaaagtgcaacctttgcttgtgacggatgagggaaagatagtactctcgatgcagatgggatcaaaaggggttgtgcagatttatgatccagtaactgacacttcctcggatataattcagattagtatctacactggagcaagggagaaaaaggttggcagggcattgtacgaggtgctaccacaaagctgggcacttaggatctctactgctctgatgatgtttcggtttggtgtcatcaagaatccaaaatgtcacggccaagagcatccaattcatcaggaatctgttatcccccatcaacctcaggtgacctacaagcaaattgtaccgctcggtaccagtacgcatctgccgttcgttccggcatgggtaggatcggaagagagtggcgctggccatgccttgaagcaatcaagtggcggcgagcggcggattctggcatgcgttgaagcaggccgctgcggcggcatcgaactcgtccttcccagcggcagcggcgttgaagcaagccgcggcggtagcgaactcgtcgttcctggtggcggaggcgtcgatgtcgtcctttccggcggcagcggcgtcgatgtcgtccttccccgtggcggtagcggtggcgatgttgaagcaggcgacggcagcagcgaactcgtcgttcccagcggcggcgtcgatgtcgtccttcccggaggcggcggcgtcgatccaggaggcggcagcggcgtcgatcgatcgagaatcccagcccttctagggttcgagctgcccgtccatccctcccgatccggttattgcacgcgaagttacgtttttgcccttccatctcagttctccgcgtggtactgcacagagacagaattggtaccgcccggtaccaaactctaccagccgttggatcgggccagatccaacggctag

SEQ ID NO: 95164 - DNA, 225 bp, Oryza sativa
  Clone ID: PAT_MRT4530_93386C.1
atgggtgcgctgcctccgtcgccggtggtcaagccggacatcgacgtcgtcatcgttgacggcacgtcggcacagtcggttgggtgtcaagaaacatgtcgagctctatgtctaccaccgctttgcccgctctcaccttacccagctcgattacccattgatgaccaaaacacttatgaattttgctcggtctttctggtgcacactgcaatgagaaaatgctaa

SEQ ID NO: 95165 - DNA, 1146 bp, Oryza sativa
  Clone ID: PAT_MRT4530_93387C.1
atgttacaccctctgtgcctctgggtgcttaacccagccaccggggttaccgtcgcattgcccaagaaccactcagatgaaattgctgctgggagagggatgatgatgtaccatggcaaagtcgagtctcatgcttttggggaaatctcttccactggagtgtacaaggcgctccgcatcatcagattttaccaaaggcagctgtgtgaggtaattgccgttgatggcaacaaccaagacatgtggcggaaaatgcaggggcccccagcaaccatctgttgcagtaaacagatgagatgcgtggtcgtcgatggggtggtgtatttcatgatggaattttacacgacttattttgaaatagtggtgctccctgttgaaccaggcagcatagcttcattcaacctcgagacagagaaatggatgacagtacaaggtccagaagtggtgcacaggcatgttcaggatggtgacagcacttactcggaacttaacttgcagttatcgttggctgattcaggtggctgcttagttacagttcacaatattcctcctatccgcatggacctgtggtttttgacagattctgagactgatgatggcagagtctatactaggagtgtaaataaggaatttagaagtgaggatccaggaactggcacttgtgctactgtgtttgaggctagccgttcaagttacaaacactttgagcgttgttacggtacagcggtcggtaccggtaccgccaggtaccaaaatcctagccgttggatctggcccgatccaacggctggtagagtttggtaccgggcgaagggctgggattctcgatcgatcgacgccgctgccgcctcctggatcgacgccgccgcctccgggaaggacgacatcgacgccgccgctgggaacgacgagttcgctgctgccgtcgcctgcttcaacatcgccaccgctaccgccacggggaaggacgacatcgacgccgctgccgccggaaaggacgacatcgacgcctccgccaccaggaacgacgagttcgctaccgccgcggcttgcttcaacgccgctgccgctgggaaggacgagttcgatgccgccgcagcggcctgcttcaacgcatgccagaatccgccgctcgccgccacttga

SEQ ID NO: 95166 - DNA, 624 bp, Oryza sativa
  Clone ID: PAT_MRT4530_93388C.1
atgggtaggatcggaagagagtggcgccggcgatgcgttgaacaatcaagtggcggcgagcggcggattccggcatgcgttgaagcaggccgcggtggcggcatcgaactcgtccttcccagcggcagcggcgttgaaacaagcggcggcggtagcaaacttgtcgttcccggtggcggcggcgtcgatgtcatccttcccggcggcagcggcgtcgatgtcgtccttccccgcggcggtagcggcggcgacgttgaagcaggcgacggcagcagcgaactcgtcgttcccggcggcggtggcggcgtcgatgtcgtccttcccggaggcggcggcgtcgatgtcgcgagtgcatacggcgcggggaacagcgtggcgtaccaccgtggggcgtgcttcgccaacgacatcgtcatcgtcatatggttgtcaggtccaggaggtggtttcaagaatactccgatggagggcctcttggttccagtattcaagaagcaaatgcagttctggggttgggacaatcctatgattaatgggtgcaaattagagaacggactacccagcataatgctcactggattttctaccggatgttttgataaatttacatcatttttcatttag

SEQ ID NO: 95167 - DNA, 810 bp, Oryza sativa
  Clone ID: PAT_MRT4530_93389C.1
atgttacaccctctgtgcctctgggtgcttaacccagccaccggggttaccgtcgcattgcccaagaaccactcagatgaaattgctgctgggagagggatgatgatgtaccatggcaaagtcgagtctcatgcttttggggaaatctcttccactggagtgtacaaggcgctccgcatcatcagattttaccaaaggcagctgtgtgaggtaattgccgttgatggcaacaaccaagacatgtggcggaaaatgcaggggcccccagcaaccatctgttgcagtaaacagatgagatgcgtggtcgtcgatggggtggtgtatttcatgatggaattttacacgacttattttgaaatagtggtgctccctgttgaaccaggcagcatagcttcattcaacctcgagacagagaaatggatgacagtacaaggtccagaagtggtgcacaggcatgttcaggatggtgacagcacttactcggaacttaacttgcagttatcgttggctgattcaggtggctgcttagttacagttcacaatattcctcctatccgcatggacctgtggtttttgacagattctgagactggtatgtgggttaaaaagttcagcttgccatctcagtttattattgtaactgtgcatcctttgctggtattagatgatggcagagtctatactaggagtgtaaataaggaatttagaagtgaggatccaggaactggcacttgtgctactgtgtttgaggctagccgttcaagttacaaacactttggtatttatacaggaaatctattgagttcatag

SEQ ID NO: 95168 - DNA, 317 bp, Oryza sativa
  Clone ID: PAT_MRT4530_9338C.1
ggactgaacccaggcgggaaatccccacaggattaatttcgcggcacaagaggttgttggagcattacatatttagatgagcggcacacccaaagaacccggagcaggtggccaaagtttagacccatacatagggcacccagtgtttgcatacaagaggatactaggggattatggcggctttttttttttttttcggattgagcaaagagatgccccccccatttttttttgggggggggggaaccccgcggggaggaagtttttcggatgcttcccctcagaatgctttttgcacttggtctaaaagggggggc

SEQ ID NO: 95169 - DNA, 429 bp, Oryza sativa
  unsure (1)..(429): unsure at all n locations
  Clone ID: PAT_MRT4530_93390C.1
accggcgtcggcgtcgtcgtcggcgtcaccggaggaggaggccccggcaatcgcgcanaaggggttcttcctccacccgtcgccgaggagcgccganccgcctcgcctcctgccgctgttccccgtcacgtccccgagggtagcctcctcctcctcctcctccgccgccgccgccgtcgccgtcgcctcgccgtcgttcgagtgatcgagctatgcacgtcggcgaacccgtcgcgctgcttagattatttatgatatgagcactgctcggtagtatgtactgttcgtactcgttcttggtgcttaattgctgtaatttttttctcacttcattgagcgatttgctcccgaagaaacaacggaaaagaaacacatcttgatcgtcagttctaaaaaaaaaaaaaaaaaaaaaaaaaaaaaaaaaaaaaa

SEQ ID NO: 95170 - DNA, 779 bp, Oryza sativa
  unsure (1)..(779): unsure at all n locations
  Clone ID: PAT_MRT4530_93391C.1
cccacgcgtccgccttcctcgagaggggctgcatgccttcctttgactttgcgacggagaagtggagtgtggccctccaagggccgttgaacagaattctcgaggaatccaatggcacgctcagctatcatgaccttgccaatcagcttatgttatctggacttaaaggcactttgtgtacatcgcactggaatgatcaattttataccgtggatctatggtttctaactgattctgaaaagggtacatggtccaaagatcataggattaatgttgatgctgtttttcatgggattggagattatctgaaagtgcaacctttgcttgtgacggatgagggaaagatagtactctcgatgcagatgggatcaaaaggggttgtgcagatttatgatccagtaactgacacttcctcggatataattcagattagtatctacactggagcaagtgtgttcactggaagtttattatgtccacagagtgtgtgacaaggttggcagggcattgtacgaggtgctaccaccaaagctgggcacttaggatctctactgctctgatgatgtttcggtttggtgtcatcaaggtgtagctgatgtccctcgaaaatgtaacaaaaaaaatggtgtagctgatatttgctgtgtcttcgtcatgtctctgaatctctgatcgatcgcgttattgcgatatgttctgtaatcatatcaacaattctggagttaagcatatgccgttagctcgagtttgagggatcgtgtgctcctgtctcgngtttt

SEQ ID NO: 95171 - DNA, 471 bp, Oryza sativa
  Clone ID: PAT_MRT4530_93392C.1
atggctgctgcttcatctgctgacatggagaggatcttcaagcggttcgacaccaacggggacggcaagatatcgctgtcggagctgacggacgcgctgcggacgctggggtcgacatccgccgacgaggtccagcgcatgatggccgagatcgacaccgacggcgacggcttcatcgacttcaacgagttcatctccttctgcaacgccaaccctggcctcatgaaggacgtcgccaagatgtctaagtttaaacttatggccgtcgccgccgccgccgccgggaatgatgacatcgatgccgccgcctccgggaaggacgacatcgacgccgccaccgctaccgggaacgacgagttcgctaccgccgccgcttgcttcaacgctgctgccgctgggaaggacgagttcgatgccgccgccgcggcctgcttcaacgcatgccggaatccgccgctcgccgccacttga

SEQ ID NO: 95172 - DNA, 483 bp, Oryza sativa
  Clone ID: PAT_MRT4530_93393C.1
atggccaaactgcagaactgcagaaaggaccctcttacttacatgacgatgacgatgtcgttggcgaagcacgccccacggtggtacgccacgctgttccccgcgcctaccacgcggagaactgaggtggaagggcaaaaacgtaacttcgcgtccatcgccgccgccgtcgccgggaatgacgacatcgacgccgccgcctccgggaaggacgacatcgacgccgccaccgccgccgggaacgacgagttcgctgctgccgtcgcctgcttcaacgtcgccgccgctaccgccgcggggaaggacgacatcgacgccgctgccgccgggaaggatgacatcgacgccgccgccaccgggaacgacaagtttgctaccgccgccgcttgtttcaacgccgctgccgctgggaaggacgagttcgatgccgccaccgcggcctgcttcaacgcatgccggaatccgccgctcgccgccacttga

SEQ ID NO: 95173 - DNA, 742 bp, Oryza sativa
  Clone ID: PAT_MRT4530_93394C.1
tcaagtggcggcgagcggcggattccggcatgcgttgaagcaggccgcggcggcggcatcgaactcgtccttcccagcggcagcagcgttgaagcaagcggcggcggtagcgaactcgtcgttcccggtagcggtggcggcgtcgatgtcgtccttcccggcggcagcagcattgatgtcgtccttccccgcggcggtagcggcggcgacgttgaagcaggcgacggcagcagcgaactcgtcgttcccggtagcggtggcggcgtcgatgtcgtccttcccggaggcggcggcatcgatgtcatcattcccggcggcggcggcggcgacggattgtgaaatggagggagtataatttatcttggcgacgtccttcatgaggccagggttggcgttgcagaaggagatgaactcgttgaagtcgatgaagccgtcgccgtcggtgtcgatctcggccatcatgcgctggacctcgtcggcggatgtcgaccccagcgtccgcagcgcgtccgtcagctccgacagcgatatcttgccgtccccgttggtgtcgaaccgcttgaagatcctctccatgtcagcagatgaagcagcagccatcccgatcgatcgatcgatcaaacaaaacaatctaatatatctctctgatctccgcccgatcgattaatctccgatttctgatgatattcttctctgcttgcttgctgctatagatagatccttcttctccggcggacgcggg

SEQ ID NO: 95174 - DNA, 722 bp, Oryza sativa
  unsure (1)..(722): unsure at all n locations
  Clone ID: PAT_MRT4530_93395C.1
ggcgctctaaactagtggatccccgggctgcaggattcggcacgaggggggttaaagttttcattcaatcaagaaataagtaggtaaataaaggaaacaaaccttgaaataattttccaggtctcaggtatatttatatcntgtatataatcttagtggcactgcttgacctcaaagacagacctattaaatacaaaattacgcgttacctttgtacatatgctaaaagtactatagaaaacattggaattaccattaaattcttgaactgttgttgatgtaacaaccacaacagtgtggttgccaatcacatcttcattcaaagaatgagctaactgcccccataacgtcactctgattttagcaccactgtagataacattgtaaaagacttagataagattatgaaagatatcaaaaatcgattgaaaggaaagacagccatgtttcttactctaataatagaagttcaatctcacggataactttaggccatgggtttgtagagttcttcattatcattcttgattctatgggcttaattttggtaagcagtccgatgacatctgtcaccttggaatgttaattttgtgataatacaatttgaatagtgaagttaaatattattatacgcttacctgataaaattttatctttatttactctatcaagcaatgtttcccttgtagcaaactcgaagtagttgaatttgttgatgcttc

SEQ ID NO: 95175 - DNA, 269 bp, Oryza sativa
  Clone ID: PAT_MRT4530_93396C.1
atttgttcatggtgaagcggcggtacgaactcataaatggcgggcgagtagctcaccaagatgcgagaagccgatgccggcctctcggcaatcactgacagcgcaaagtccgggccaatcacactgccaggccgctacctcagtggcaagcaggagcatgtgcatatgggcaaagatccacacatcgaccgactaagtggcagggccgtacgactccctggtagccccaccggacgacttgcaggagaccaatactatgctcaacaagc

SEQ ID NO: 95176 - DNA, 357 bp, Oryza sativa
  Clone ID: PAT_MRT4530_93397C.1
atggcgagctcggccgccgtcgaccaggtcttcgacgccgtaaccggcaggcgggggccggcggcagcgccgggagggcgggcgggtgagagcggcgactcatggcagtgggcggccgaggggaaccggcggcggtgcgagtggcggctgagggacgagggccggcgggcgggtgagggcggcggcggcttgtggcagtggaaggacgtggggagccggcggcggcgggagggtgggcgggcgagggcggcggcagctagtggcagaggaaggacgaggggaagcggcggcggcggcgaccggatcatggcacttctcctctcggtggacggccgcgtcgggggagtgacagcgtga

SEQ ID NO: 95177 - DNA, 1122 bp, Oryza sativa
  Clone ID: PAT_MRT4530_93398C.1
atggagcggtgcagcgtgctggggctgggcggtggcgggggcgggggcgggcggctggacggcgagctgccgccggggttccggttccacccgacggacgaggagctgatcacctactacctgctgcggaaggtggtggacgggagcttcaacgggcgcgccatcgcggagatcgacctgaacaagtgcgagccgtgggagctgccggagaaggccaagatgggggagaaggagtggtacttctacagcctccgcgaccgcaagtaccccacgggactccgcaccaaccgcgccacgggcgccggctactggaaggccaccggcaaggaccgcgagatccgcagcgcccgcaccggcgccctcgtcggcatgaagaagaccctcgtcttctaccgcggccgcgcccccaagggccagaagacccagtgggtcatgcacgagtaccgcctcgacggcacctacgcctaccacttcctctcctcctccacccgggatgagtgggtgatagccaggatcttcaccaagcccggcgtgttccccgtcgtccgcaagggccgcctcggcataagtggcggcggcggcgacacctcgtgcttctcggactccacctccgcctccgtcggcggcgggggcggcacctccgcctcgtcggcgctgcgcgcgccgctggctgaggcctcgctgttcgccgccgccgcggcgccagccgttgacggcgccgacagcagcaactacggcgggggcggcggcgccggcagcgccaccgccaccgccaacttggtcaccggccttgagctcgtgccctgcttctccaccacagcccacatggatgcctcgttcggcaccgggcagtacaacccggccccgctggccgtcgagccgccgccgccgccgccggccttcttcccgagcctccgctcgctgcaggagaacctgcagctgccgctgttcctctccggcggcatgcaggcgggcgtgtcgtcgcagccgctcagcggcggcggggccttccactggcagtccggcatggacgtcaaggtcgagggcgccgtcggccgcgcgccgccgcagatggccgttggccccggccagctcgacggcgcctttgcatggggcttctag

SEQ ID NO: 95178 - DNA, 228 bp, Oryza sativa
  Clone ID: PAT_MRT4530_93399C.1
tcttatccgggcagggcacgcacgcacagatccgtgccgttttctagctgcccatcgctgtatctgtgttaccgtcgacacggcgagatcaggatgaggaggaggacagggtggaagggaggaaggggccgctacaaccgctcgccgcatgccacctggcgcgccaaggttgtccggagggaggaggcggcgcccgatgcggaatgtggctccctcggcgactacccc

SEQ ID NO: 95179 - DNA, 314 bp, Oryza sativa
  Clone ID: PAT_MRT4530_9339C.1
ggaggggaatggaatgggaattgaatgaacctttgtttaattttcccctgttttctgttggcaggcttttctcctgctgccttttttaatttccccctcccagaaaattcccgggctgcaacagcggccattttttttaggttttttttttccctacatctttttctcctttttttggttggcttttttttttttcgggctgctgccctaagagatgttagaaccccccaacccggggcaaaccaggttgtgcctgcgtgtaggggaggccttcctccaaaaaaaactgctccacggcgatgggcaccctggcg

SEQ ID NO: 95180 - DNA, 120 bp, Oryza sativa
  Clone ID: PAT_MRT4530_933C.1
atgaggatgggtgctcaagacatgaagctcaagggcctcaagagggctctcaaggagcagaaggcaaggctctacatcatccgccgatgcgttgcgatgctcataagatggcatgattga

SEQ ID NO: 95181 - DNA, 343 bp, Oryza sativa
  Clone ID: PAT_MRT4530_93400C.1
acagcgaagtcgtctcccttcggcatatactcttcgccctacatcctttgcccaagaggcctctggcttggcgaggtttgttcgaagggcctcatgccatacctccaacaagcccctcacgggcaagggtgagataggagcttcggccgagaccgtgcaaacaatgtggtatggtatgtggcactccctttcgaccgatgctcctgccgaaacctatattgttcctgcaaataaagaacagtaataggccttcccttcgtgggcttattattatgcggctcggtcgatgggaatttaccgtttcgcctaccctcgcgacacgtggcactttactactggtggg

SEQ ID NO: 95182 - DNA, 223 bp, Oryza sativa
  Clone ID: PAT_MRT4530_93401C.1
catagtgataagcttgcggccgcttactggcacctgccaatgatgtctttgccagcactgccacattctacatcttacattgccatagtttccattctcttttgttggtgtgcagcttgcttgtgtacaatttaatggctgagcatatggagactaattcaagcctgtgttggcttcttggttgggtagccaacctttctgtctgatcggatgaggccacgtg

SEQ ID NO: 95183 - DNA, 1321 bp, Oryza sativa
  Clone ID: PAT_MRT4530_93402C.1
gttgcgtgcgagctccgatctcctaaacctcctccaattccctcaacgaaatctctctctcgatccgactctgctctctatccggcctcgatcacccccaccaacatcctcctccgattccctcgccttctccttctcctcctccaacttctcgatgacttccactatactaagctagctagcccccgccgatccccgcggggttttagtttagctccgcgccacccaatcgccgcaggtgatctttcccggtcaagaactcgcgattcgggggcggatacggaggaaggaaatctgtggtggattcggatcgagctcttcgttttcttgctctttgtataaattgcgatcaggggcggcggaaacaagggttcttctctgtctctcttcattagcgccggcgacaaggtgaggtgaggtggtggtggaggcgatcgaaatggggtcggtgctgtgctgcttggccgacgacggccgccccgtctgctgcttccgcctcccatggccgatcttcaacgccgctcacaaccacaaccacaactcgggttccattgctcgtccaagagcggatacacgagttgcgcctgatcaaggaagaattagtctcactgctccatcacagcatgattcgatggatactttccgctgcccgccaaggcccttgccttgggatgatcctcgattcagccatcatacagagcatcacccactagtaggaggacatgacaaagcttcaacaacgttccacaaatctggtagccttggagaaagcaagaatgctgatagcatatctaattccaaagctgtcaaggatgatgggccttccacagctgtgaaggatgatggatcatcagtaaaacaccattcagatggtctgcacattggcaaagagcaagtacatgatcttttcgactttgaggacgactgtccaatatgcctagaagagtatgattatgagaatccaaagatgacattacaatgcaaccacaatttccatctttgttgtatttatgagtggatggagagaagtcaagcttgcccagtctgctcaaaggtaatgctgttccatgaggattcatgatcataatgctgcaacgtttctgtgatgttggagagtggagactcacggggactggatcacctagatttgtgtacatagcttgacgaaaatcaaagtcgctagattgtttgctgaaacttccagcggcgcaaagattttttattatttttttgtttctgtagagcatataattcttttctcatttttcagaaaaaattggtagcttgtgtcaatccacatatcacatttcgattggatgtt

SEQ ID NO: 95184 - DNA, 459 bp, Oryza sativa
  Clone ID: PAT_MRT4530_93403C.1
aacttgttcgactgtgtcatcccggtccctaaacttgcagatcactcgtttagatccttcaacctgttcagtatcaccccggtccctaaacgagtgatctgcaagtttagggaccgggatgacacaattgaacaagtttgaggacctgaacggtcgttttgcgagtttagggaccgcgatgacacagcggtacaagtttgtgaccggtgatggactaaaaaaagaaactgtctagtaccagcggtaagtttgtcccgtttggaaaagtagagctaggtaggttcggtaaaccaacatcaccttcactgcaccgtcgtgtccggtaaaaagcacctgccaattaggcaaattacatggcatgtgccacgtcgttgttgcaccacggtttcgcctacccctaccgacgcagaaccgaaccgatcccccgcgcccgcgcaggcgcaggcgcaggagcagcat

SEQ ID NO: 95185 - DNA, 357 bp, Oryza sativa
  Clone ID: PAT_MRT4530_93404C.1
atgcctgtaactgaagcatgcacattcacattccagaaagaaactgaagggtactctccgcgcgggatcctgccgcgccgtcgcctcgggacgacgagctcgtacaacggtgctgagcttgcctcttccgcctcggagcacgggtcgtcgccatcgcctcgcgagaggacgcagctcccgtcgcttgactcaaccggggggttttttgcataaaagacatcacagagacggggcaaaaagacccgctgtacgtgcccttatattattgccctttcgtctccccttctatcaatggtgatctagcggggtagggggactcgagtcctcccagtggtgttattttctcctaatatgtag

SEQ ID NO: 95186 - DNA, 427 bp, Oryza sativa
  Clone ID: PAT_MRT4530_93405C.1
tttgttttttttttttttttttttttggttttttttttttttttttttttttttttttttttttttttttttttttttttaagaaaaaaaaggaaaaaaattgatttcaacatgcaaaaaaggggtagctttttttatggaaaaagggccaaaagggcgggatccgggaaaaaaaaatttttttacagggggaaaaaacccaaaattttaaaggtccctagcccaaagaacaagggaaaccttttccatttccaaaactcctaaatttttgaaggggaaatggttaaactttaaaggaagggagccaggcagccacaccggaaaaaaaagggtcgcccgaagcaaaacgatgctttggacaaaattttcgcccatttattcttgacaagaataccggggaagggaaaggtcccgagaggtttttggg

SEQ ID NO: 95187 - DNA, 536 bp, Oryza sativa
  Clone ID: PAT_MRT4530_93406C.1
tcatcgtcgctgccgacccggcggcggcacttgaacggaggaagacggaggtcggtgcgcggggagggagggagcggcgccctttgtggcaaaggagctcgccggcgtgcggagggtgggcggcggcatcacacgcgcggagcaaggaggccggtgcgcagaggacgagcatcaccctgtcgcgccggagctcgccagcacgcgggagagaggcgccggcaacgccgtatttgtggctcgcacctccagccgccgacggatccaccgcctgcacaccgccacagcccaagctatgccgcagttgctcctcctcctcatcgtcgagcctccgcagccgccgtcgccgtcgccgccgctcctttctccgcgcgcgccgccatcgccgcgcacgcgttgccgcgggtccagtcccttcgtgcctctccacagccgccactacctccctccacaagtggccgcgtgggctcatcccctttaagtcgctgccgacttcgtagttcggcagattcaaccgctacaggcctacacccatccgg

SEQ ID NO: 95188 - DNA, 723 bp, Oryza sativa
  Clone ID: PAT_MRT4530_93407C.1
atgagcagccagcataaccgcttctgcttcttggacggatgcgggactgttgttgcttgctccgtcgcttgggcgtccacgacggcattgcgcgccgccgctacttgccattgcggacctcgcgcgcgcggacgcctccgcgccggtgacaaggaggagcaggagaaggcgccggtgccgcccgtcgccgtcgccaagctatccagccgcggaagcgcccgccacctccagccaaggcgccggaagccccaccggaaaccaagcccaagatttctccggcgccgagctccctcgccgtcgccgccaccaagctccttcgtcgccgccgccaagctcccggatgaggatgaaaatggagacgctgtgagagatgagatggaaaaagtgacgggagtgccatgcagcggggcgcgcgctgcagcttgctccaccgctgtgtcgctgctgctgccaccgcagctgctgcgccgccgcgcgccgccgctgcagctgctgccgtcgagccacatcgcgccgccgccgctgccgccaccgagccgcgtcgctccgccaccgctgcaactactgccgccgagccacgtcgcgccgccgccgctgctgtgccgccgcgccgccgtcgccgcgtcgcgtcgctccagccgccgccgtcgagccgtgtcgcccctgagaaggaagagaggagggaagagaaaggggaagaaggaagaagggggaaaggggtag

SEQ ID NO: 95189 - DNA, 213 bp, Oryza sativa
  Clone ID: PAT_MRT4530_93408C.1
atgaagccgcctcccatctctctcccggatttggctggcggggatcaaggacgatggccgcagcggcaacagagggagcaacggtgctggctttcctactcctctcccctccctctcctagatctgtccgaaggagatgaggccaccagcggcgatagcagcaaagggggctggcgaccggcgctagatctggcagcgaatggctcgacgacg

SEQ ID NO: 95190 - DNA, 594 bp, Oryza sativa
  Clone ID: PAT_MRT4530_93409C.1
gggccgccgggtttttttttttttttttgggtttttgatatgctattaatggatgaagtccgtacatgcagaacaaggtccgcgaaataaaatggactggcacatcctatctaagtccaacaggattagattaagccgacattccagaaatgcaaaaatcattaaaaaaataaaaaaaataatcactgaagcgctcaccatccggagaggagttgagaggctgttgggggaggatgcgtcgatgctagcgcgtgcataagctccatagaagatcaggacccgacgcggccatggacgcccgccgtcggcggctggggaaggagcagcctcgatctacgcctgcgatggcgtccagggagggagccgcctcaatccgcacctacggtggcggccggggacggagccgcctcgatccactccggcggcggtgccggggacgcgcgctggcggccggagaaggggacacggtggggaggggaaaagggcggcgccgctcggacggggaagagagggcggcgccgcatcgatgcgttcgatggggaaggagagaagcgaatcagtgagagaagggttgggctgacatgtgggtcatag

SEQ ID NO: 95191 - DNA, 354 bp, Oryza sativa
  Clone ID: PAT_MRT4530_9340C.1
atggatgaatcaattccttgggattacgacggtatcaaatgtgcatcgtgcatgcaaggaatggaaggatcaactagtaaacatgattccctggtgcaaaaacatgtggattttggtatactggagaacaacatacaagatccaactgcgacgccaatgtatctgccaatggaattcttgaaaaccattacatgtgacttctcaaaggaacaagagcttggcaggggtgggtatggagtggtttacaagggtgcgtttggatccaaggctagcaggggcctagcctggcctggcaaggacagtcgtttggaatcagaaaaaaatcctagcccatgggggcgagctagcccatag

SEQ ID NO: 95192 - DNA, 377 bp, Oryza sativa
  Clone ID: PAT_MRT4530_93410C.1
ttcatgcctaagacaacaaaataaaaaacacgaagagagataaaattaaaccaaacctacataatcacactcctaaaacgatagcataatctcgagcgctactagatccatctctggggggccgtactacaagggcaaagtttacttacccgtgcttgcgacgtaatacctcttctatggctcgacctaaatcaaactcactggccggggttctacaacgccaagactggaaaaaccctggcttaccccaactaaatcccctggaagccgatccccttttatgacggtgaggtcaatgaaaaaagccctgaacagagcgcctttcccaagaattgcgcagacttaaggtcaaaaggtactccccttggcccagctca

SEQ ID NO: 95193 - DNA, 529 bp, Oryza sativa
  Clone ID: PAT_MRT4530_93411C.1
taatgtcaatgaaaacataaaagtccgtcgggttagacgaaatttctatgtatattcttaaaaagtcaatatctgaaatgattgaatcttttaactttttaatcaacaaatctttatcggaaggggttgtgcctgacaaatggaaagtcgcaaaagtaataccaatacacaaaaaaggagataaacttgatttcaataattataggccgatctcactgttgccttgcgcctttaaagttatggaaagagtcgttcagcgacaattgcttgattatttaaagtgtcaacactccaccgtgacagcactagccgcagtcacagatgattggttttactctatcgataaaggtaattacattggaacaatttttgtagacttgcaaaaagcatttgatatggttaatcacctaatccttgtatctaaacttgaatctatgggtgtaattggtgtagaattacagtggttcaaacactatttatcaaacagaagaataagaacttcgcaatcaggaaaaatgagcgaggaata

SEQ ID NO: 95194 - DNA, 1620 bp, Oryza sativa
  Clone ID: PAT_MRT4530_93412C.1
ttcctttgccgcgcttgctcggcacggcaacccacgcgaaatcggagattccttcgattcacgagatcaccacgagtccaccaccctcctcctctcgctggattcgatgggcgctcggtgagatccgaatcccccacggtggtcgccggagatgaagccgccgcggaggtggatgtacgggcggggcggcgggaaggggaagccggcggggctgctgctgctgggggtgttcctctgcttgtcggtggtgctgctgctgctgctgcacggctcgtccccgtcgctggagggcgaggggaggaagcctgaggcggtggaggcggcggggggagggggagaggaggaggaggtggcggtggcgcgggcggaggtggaggaggcgccgctgccgccggggaacgcgcggctcgccttcctcttcatcgcccgcaaccgcctcccgctcgacctcgtctgggacgccttcttccgcggtgacaaggaagggagattctccatcttcgtgcactcgcggccggggttcgtgctcacccgcgccaccacccgatccggcttcttctacaatcggcaggtcaacaacagcgtccaggtggattggggggaggcgagcatgatcgaggctgagcgtgttctactcgcccacgcgctcaaggaccccttaaacgagcgcttcgtgttcgtctccgacagctgtgtgccattgtacaacttcaactacacttacgactacataatgtcttcgtcaaccagttttgttgacagttttgctgatacaaaagcgggtcggtataatcccagaatggacccaattatcccagtggaaaattggagaaaaggctcgcagtgggctgtgttaacaagaaaacatgctgaagttgtggttgaagatgaagaggttttgccagaattccagaagcattgcaggagaaggcccttaccagagttctggcgggactgggatcgtcctattcctgcggaggcatggaaggcacataactgcataccagatgagcactatgttcaaacattgcttgcacaacatggtcttgaagaagagcttacacggaggtcagttacacacagtgcgtgggatctatcatcttctaaagatcgtgaaaggcgtggatggcatcctgtaacatacaaaatctcagatgctactcctgcacttgtaaaatccataaaggatattgataatatatattatgagactgaaaatagaaaggagtggtgtacaagtaatggaaaaccagcaccttgcttcctttttgcaaggaagtttacacgagcagctggtctgaagcttcttgatttatctttgatagcagcaaatggcgcatctaccatgtaaagtttctccgtcaaaagcagaatactgccagcttgcacatacgtaaaggaaagtggtggaggggacagaagataacagcgaattttttttgggcatcttcattacaatttgttgcactctgaaaagggacataggtgttctaaagcaataaagtttgtttcttttagcacctaggttagtacatatgttaacccactacttagcattataactgtaactgtaagcaaccacctgcagttggattggcaagaatcacctcagttcttttc

SEQ ID NO: 95195 - DNA, 1901 bp, Oryza sativa
  Clone ID: PAT_MRT4530_93413C.1
cacaagaaatcgtcatttcctcgccaggtaacagcatgaaaaaccaggcaacatcgactagtgtttttttttccaccccaaaacaaaccaatccggagagcaccaatgagacaatgaccaacccagggtacaagcgctagctagattcttaacaatcctagggaaacttgatcgggtccagattccccaattggcaggacattcacgaggcctctacataagcccccgtggtcctgaatgatcaacgcactatctttacagtcctgcaaacctactcatcattcctcctacagtcctagtacgctcctactggctgtacaaactaagcgcgtaagtggctaatctgcaaacccacttataagtgaaaataagtggattcgtgggttagccacttacatgcttagtgcaaaactacaaaccataatgcatagggaagcagccttcacaggcctctggtagctgcagtgttgatgtaactagcggccgcatctgcatccaggtgcttcccttccattagtccccttatcagggtggcggagtaggtcttggatggaggacacaatggcagctctccggatctgcatcgctctacgtctgatgacgggcatgtcattgtaagaattggaaggttatcctcctccccaaggtaaagtacattggagtaccagctatccttaataggtgcaaggtggacacccttgtttctggaaacaaactctatttcagacaagccaatcaaaggagagtcaggagactcagtttttccactttcgccgttctccttcactaaacgattctcttgaaacaatacatcattgaactgctcgagcgttattttatacatgcagacataggagttctcagtgtggtttatctcagggttgagaaaagcaacaccaccagttccccagcaaggagtagaggatctaccaaaaaacaatctatgaggcacagtcttccacatggaacctcttggtgggcttgtgtcatgagatccaaaacatggtatattcataccctcagcctttcccccttggatgtagcacagaaaccttggtgtccacatgtttgaaccaaagctggcataccaaacatatacttttgacagttctgatctccaagtagaagatagagatgatattccttcagttgacaccgcagcagatccatcattttgtggttcaactgaatcagttggaccttcaaccattacattacttgaggtggtctttgttgcgattttgtcttcatcaaggttcaactttgagaggctttcacttataataccataagtaatttgaataatattgacagaagcaatagcatcagggagatcttcaactcagcagtcagaaccagaaggatacagcccaatttgtgagggcctactcctcattgatatattgtccggcaatctattactcagaacaggccaggacgtcttcaattcatcacgtaccgcttgtataactctccatgaagattcaaacggttgcatatcaggagtgtcaaatctgaacttgtctcccaacaaaactttagcacaagcactaactgaatttggtatggatctaaggttatagcctcttcaagagccatcagtatcctcccttgggcaaaactaagagctttgtcagtagcagagcatatccattgggagtgatgcagcagccaccaagaggatcacccagtgctgcatcaaacccagcagacaccaagagtatatcagggttaaatgcttcagcaacaggaagtagtacatggtcccatgcagcaatataatgtgcatcaccacattttccatgttcccagggcacgttaactcgtgccgaattcgtgcagcccgggggatccactagttctagagcggccgccaccgcggtggaatggagtggggtaaa

SEQ ID NO: 95196 - DNA, 3237 bp, Oryza sativa
  Clone ID: PAT_MRT4530_93414C.1
atgatgttacaatctgattttgctttcctgctttctgcaccgtccacgcccaccacctgttcgacgaaacgctgctgcgcgtcctgggccaccacagcgacggccgacgggctgatcatggaaccgcagcaagtacccatcaatgacaggctcagcaacctctccaatgatctcatctgccggatcatctccaacctggactcgcgccaggccgtgcagacatccctgctgtcaaggcgatggcgcaacctctggtgctcactgaccagcataaaagttgacttctgcgagttcgacggagagaccgactcatgggaaggggaccaggcgcggttcaggaagttcgtcaacaatctgctgctgcgccgtgaccccgtccccgtgctagacaagttctgcctcagatcctacataccgcacggtgccaatgatcaggaagcctcggcagacgctaacctgtggatcagccatgcgttacagttgaaagccccagtagtggaggttgaccaagatatccaaacacgggacacgttggagcttggtggtcatgccgtatttgcctcacagtacttaacaagattggtcctctctgcagtttcctttacccaaggtttcttcaagcaactcgagattggttgttcgaagttggaacatctttccatatatgacagcatcatttgcgtcgatatatcttccaaaacactgaaggtcttgatcattgataactctgagttctcttatgactacaatacttccatttctactccgagcgccacttctctgaccttgattgatcttggaggccgtctacctttactaaaagacatgggatcactcgtgtctgcttcagtttatcttacccgtgaggccattcctttggatactgctatcaatattgatcagtggttcatgggcctgtcgggtgtaagacaccttgccttggattttccagtggaagtgataaaaatcaaagacaatatgcaatggtgtccgaaattcaacaatcttgtaaacctgacgctgggtcgatggtgtctggactcaaagttgtatgcattaactgtcttccttcagaactcaccgaaactggagaagctgagactagagattgatgagggttatactgctaaagatatcaaaggcgagcttaaagaaagatcatttacatgtgagcaccttaagattgtcgaggtcgactgcgtggaggatgatcccctggaagtcgaatgcttggaggatgagccggatcccctggtcaaccgtgtgaagaaattctttcgcaatagtggcatgacctctattcagattaatatcacacacttggactaccacctgccttacgaatataatattgaagacaatatgcaatggtgttcgaaactcaacaatcttgtaaacctgacgctgggtcgatggtgcctggactcaaagttgtatgcattaactgtcttccttcagaactcaccgaaactggagaagctgaggctagaaatcgatgaggggtatactgctgaaaaaatcacatgcgagcttcaagaaagatcatttacatgtgagcaccttaagattgtcgaggtcgcatgcgtggaggatgatcccctggaagtcacatgcttggaggatgatgatgatgatgatcccttggtcgatcgtgtggagaaattctttcgcgatagtggcatgacctctcttgagtaccctgcagccttttatgattcctggcgcgtgttgtcagaatttcaagacctgctttcacttctgattgcatttgattttggggaagaggccacccgtttacaatgcgaaatggttgtcaaaaaggaagaggccacccttttacaatgcgaaatggttgtccaaaggtatggaatggatatgtataaagggaagaggccacccttttacaatgcgaaatggttgtccaaatgctctctgcaccatccacgcccaccacctgttcgacgaaacgcctcagcgcctcttgggtcaccgggttggctcatggaaccggagaaagcacccggcagaggcaggctcatgctcagcgacctccccgacgacctcatccgccgcatcatgtccttcctctacgcgcgccaagccgtgcggacgtgcgtgctgtcccggcgctggcgcgacctctggcgctccctcacccgcatcaacgccgacttctgcgagttcaagggggacaccaggacatgggtgggggacaaggcgcggttcgagaagttcctcaacgctctactgttgcgccgtgaccccgtcctattggtggacaagttctggctcagatgccccagctgcagcttcggggtttactcattagatgctaacctgtggatcagccatgtgttacagttgcaagccccggttctggatgttcgcgcagtgggcatcagccgtctcaatcaggcagtatttacctcccagtacttgagaagattggccctctcctcggttgttttgtccaaaggtttcttcaatcaactcaagatgcgctgcccggaattggaatgtctcttcttgcgagactgccatattcacgatcatcacatctcctcccagacactgaagatcctcacaatcaatatctctgatttcagtttcgttgacaagtacgattgctgcatttccactccgagcgtcactgctctgacattgtttggtccgaaagggcgggtacctttgctacaggacatggcatcactagtgtctgcttcagtttatcttgccaatgatttcagtaattttggtactgctggtgatgtccatcggttgctcacaagcttatctggtgtcaaatatttggccttggattttgatggggtaaatgaggtgcagataacaaatgaaaacaatatacaatggtgtccagaattcattgatcttgtaagcctgactctgggttcgtggtgtctggagtcaaacttctatggactgactgtcttccttcagaactcaccgaaactggagaagctgacattgaaactcaataaagttcatactcgaagaatcgttggcaagcttaaagaaaaatcatttacttgtgaacgccttaaggttgttgaagtcatatgcattggggatgatcctctggtgaactgcgtggaagaattctttttcaacagcggcatgacctctcttcagattagaatcaaccacctggacggctacgagctttatgaacctaggttatacagagatgagtacaggcgtcgacagtacatgggttaa

SEQ ID NO: 95197 - DNA, 1106 bp, Oryza sativa
  Clone ID: PAT_MRT4530_93415C.1
acgaggaaaaagcgctactactagtgcacacgggcgacaagccacacacgcaaaaatcgttcccgactcgtggcgacgcaaggccggcgacccgtacgtgtggcgcccacgacgagagagagagagagagacagacagacagctcgtgtggtctcgtctcatctggagctgagccgagtagccgacgcctccatctccatctctcctctctgctctagcgtgggcggagaacacgaggcgtggccgcgtcgtcgtcggaggagggagcagagatggacggccgcaaggatgtcgggatcctcgccatggatatctacttcccgcccacctgcgtcctccaggaatcgctcgaggctcatgacggcgccagcaaagggaagtacaccattggtctcggccaagattgcatggccttctgcagtgaggtggaggatgtcatctcgatgagcatgacagttgtcacatccctgctgaaaaaatacaaggtcgatccaaagctgattggtcgattggaggttggcagtgagacagtcatagacaagagcaaatccatcaagacttggctgatgcagattttcgaggaatgcggtaatactgacattgaaggagttgattccagtaacgcgtgttatggtgggacagcagcgctgttgaattgtgtgaactgggttgagagtaactcctgggatggacgctatggccttgttgtttgcacggacagcgcggtttatgcggaaggcccagctcgtccgacaggtggtgctgctgctattgcaatgctcattggtcctaatgctcctattgcattcgagagcaaatacaaagcttctcacatggctcacgtctatgatttctataagcctgatcttgcaagtgaatatccggtcgttgatggaaaactatcccaaacatgctacttgatggcgctagactcatgctacagacagttttgtaagaagtatgaaaagctggcggggaaacaattctcaatttctgatgcagattactttgttttccattctccatacaacaagcttgtgcagaagagttttgctcggctttactataatgatttcacgcgcgactgcagcttttgtgacaatgat

SEQ ID NO: 95198 - DNA, 857 bp, Oryza sativa
  unsure (1)..(857): unsure at all n locations
  Clone ID: PAT_MRT4530_93416C.1
ccggccgggtcctcgtctcctcgcgccgccgccgccgccgcggacgccgccatgtcgaagcgagggaggggtgggtcggcggggaacaagttccggatgtcgctgggtctgccggtggcggcgacggtgaactgcgccgacaacaccggcgccaagaacctctacatcatctccgtgaagggcatcaaggggaggctcaaccggctgccgtcggcctgcgtcggcgacatggtcatggccaccgtcaagaaggggaagcccgacctccggaagaaggtcatgcccgccgtcatcgtccgccagcgcaagccgtggcgccgcaaggacggcgtctacatgtacttcgaagacaatgctggggtgattgtgaatcccaagggtgagatgaaaggttctgctatcactggacccattggtaaggagtgcgccgacctctggccaaggattgctagcgcagcaaatgccattgtctagagcttgtttggagtagtagttttcagttctgtgccggatgtgataatgtgctccagttcttttttgtttccaaccaagtttaacctgaacttgaagcaaaccttcagttaaattttcagtgcggattgtgtccttgatgaatggaaaatggcatgtttgcttgtttggcaaaanaaaaannnnnnnnnnnnnnnnnnnnnnnnnnnnnnnnnnnnnnnnnnnnnnnnnnnnnnnnnnnnnnnnnnnnnnnnnnnnnnnnnnnnnnnnnnnnnnnnnnnnnnnnnnnnnnnnnnnnnnnnnnnnnnnnnnnnnnnnnnnnnnnnnnnnnnnnnnnnnnnnnnnnnnnnnnnnnnnnnnnnnnnnnnnnnnnnnnnnnnnnnnnn

SEQ ID NO: 95199 - DNA, 1021 bp, Oryza sativa
  unsure (1)..(1021): unsure at all n locations
  Clone ID: PAT_MRT4530_93417C.1
cagagatgccggtacccttaccccgcgtcctgccgtgcactgccctagccggtacagagcaagtttcgtcttttggtgggcccccaggtcctagccctcggctccagcagggacaacgcagcgggcaagccgggcggcggatcccaccccagccgccaccatgtcgaagcgagggaggggagggtcggcggggaacaagttccggatgtcgctgggtctgcctgtggcggcgacggtgaactgcgcggacaacaccggggccaagaacctctacatcatctccgtgaagggcatcaagggccgcctcaaccgcctcccgtccgcctgcgtcggcgacatggtcatggccaccgtcaagaagggcaagcccgatctccgtaagaaggtcatgcccgccgtcatcgtccgccagcgcaagccgtggcgccgcaaggacggtgtctacatgtacttcgaagataatgctggagtgattgtgaatcctaagggtgagatgaaaggttctgctatcactggacccatcgggaaggagtgtgctgacctttggcctaggatagctagtgcagcaaatgctattgtctgagcttgtttgaatgaattgtaagacagctatatgacctcaggatcgtctgcaaatggtttactaggacaactgtggaactttgtgatgctatcgtttgtttgcccgttgcagttttgtagtgaacagaagttgccatccatatgatattttatttgccatctaaaaaaaaaaaaaaaaaaaaaaagatagaactgtgtgctgttgtcattcgctgcctgctgctggggttacgttttcctgcgtttttccagggaatatcattctagataagacaatttaaaataaacattacttttcagttctgtgccggatgtgataatgtgctccagttcttttttgtttccaaccaagtttaacctgaacttgaagcaaaccttcagttaaatnttcagtgcggattgtgtccttgatgaatggaaaatggcatgtttgcttgct

SEQ ID NO: 95200 - DNA, 274 bp, Oryza sativa
  unsure (1)..(274): unsure at all n locations
  Clone ID: PAT_MRT4530_93418C.1
tgatggtgnnntcgcggtggggcngggtaattcctggcccctcgatgggagcgggatcccctcgnnnaacggcggcngnngcgatcggcgtgccttcctgcacnataggtggccgggaacctggggatctcnnctggcgcnngcgtaggcggtcttnngcgttggggcttccccataccagnatgaagctcnnctccacggttgtcgagccgcccccgcggaacgaacggatggttgtgggggggggggggggggcgacnnggcggaagaggtc

SEQ ID NO: 95201 - DNA, 424 bp, Oryza sativa
  Clone ID: PAT_MRT4530_93419C.1
acattctaaacaatggtgagtcgtatattacattttaggctcctaatactatgctaaatgatactactcaccatcaatgctacatgctatgctttcccgattaatgtaaaatgatgcgatgatcttaaaatatagtattgagtattgatttcaatcatttctcccttttatctttacatgtaatgttggctagaaaatttattatcatgccatgtatactccttttattcagacaagcaattagccagaaaatcattgcaaataccaattggtaccatggaccttgtactacaatatcctacacaatgcagcagcacatcttctaccttgttactacctggtagccgtcgcatagaagcggctgaggccgaccttggtgccgacggccttgatgtcggcctgcacctgctcgcggaattccctg

SEQ ID NO: 95202 - DNA, 377 bp, Oryza sativa
  Clone ID: PAT_MRT4530_9341C.1
tcgtcatcctcatgatatggcgtctttggaaggagcggaacgctcgagtgttcgatgacgtcctcactttcgagcaagctctgcttcccgccttctttaaggatgtcggggattttgaccttcagattgacgagagcattaaccttgatggcttcgcaaaggcagacagcagcggtgtcgctcgggaggctggagagctgcgagcagcacgcttgggaggcggcgtcggagatggcggattgacaggggcaacggtgggtgaaggtgttggtgccggcgatggcgtcgggactggagttggtgcgggcgtcggtgtcaccaccggggctggtgctggggctggagttccagtcggggttggtgccggtgcttggcat

SEQ ID NO: 95203 - DNA, 863 bp, Oryza sativa
  Clone ID: PAT_MRT4530_93420C.1
ttatttttgaaaagaaaaagggaattattgcgtcagcggctaggattcgcggtggaccgggtgcacggcggcggctcacggaaacgaaaggccaagatcgatccatccaaaacggacggccaagatccatcggtccatgaccgggccacggggaacgacgacgatgacgtcagcggtgacgtcatcaccggcgacgactcgggcacgcatgcccgccggcgaacgacggcgcgacaacgcgaacggagagcaccaaaacgatgcgggcgacgcggcgaactcaccgatgacctaagaagaagcagcggcgctcttcggcttgacgacggcgacggtgttccggcggtctacagcgacgatggaggggcagacgaagttggcgacggcttggcgaacccgacgacggctttcccgagcgacgacgacgactgaagcgacggcggcgacggcgacgctaggctgcacggggctagggctctacgggcgacgagaggtgaaggcgagggtggcggtggcggctaggaggcggcgtcggaggcccacggcgaccggcgacggcgaaggaaggtctagggtttggggagagagacgaatccgattcgagatcgaatccacggatttccaaacgaaattagccgacgattccataagagaaaagatagaggggatcccggggatcatttcccctctattaatttcatcggaaacggaaaggggcggcgggccccacctgtcagcgtctgagggcgcgtgcacgcggcggctgcgggcggactgggccggcttgggccggggagagagagaaggttttgggccgactttcggcccaaagccaaaagcgaattttaaaaacctttttcaat

SEQ ID NO: 95204 - DNA, 729 bp, Oryza sativa
  unsure (1)..(729): unsure at all n locations
  Clone ID: PAT_MRT4530_93421C.1
gcacgagggcgaatgggagttccaacgataactgataataatagtggatcacagtttgagctgctaagacaaccttctcttgggactttgagcaattcaccaaacagaggtgctttaggatcatcagtgtcaacgtctaatactacttctggtcatggagcggggtttgagaactactcatatcttatttttcagtggctggattgtatttctcagttgttacgtttgtatccatctgcatttgagttctcatctaaattccttgttgactttatggattgtgtgttgtcatgccgctttgggaacttcttgtgcaatagtgagcgagaaagggagcaatctggtgctgtaagctcttgccattgcatgtggacgtacttggctgatctccgagcttctggtggcagcttccataagcatcgtaatccattctatgatccattaaagcataatggtcccctagtgccacctgctgcagcacttgctcctaccctttggccccaattttatttgagatggacatgccccattgaatctcaaggtggtgatcttgaatctcaatggcatgccatgaataaaaagtacacagaagcaatgaaggtaactaagtatagatctttatgtatacctttaatcattttgttgctgtatgtcgagtcatcatagtattttttttgtttgatttgatcacacaatctttaggaagttgttcaacgtgntcaaggggga

SEQ ID NO: 95205 - DNA, 800 bp, Oryza sativa
  Clone ID: PAT_MRT4530_93422C.1
atgggcacttattacggccacggcaacccactggaccccgccagagacgtgctcagcatcaacctctctgcgcacgggcgtctcaacgtcaccactccgccggcatccctgccgctgcgtgcgctccttgcgtcggacccccggtgtctccgctacccaccgccaccctcgccttcgcctctcgtcgcccgtagagccctagccccgtgcagcctagcgtcgccgtcgtcgccgtcgctccagccgtgcgccgccgtcgcttcggtcgtcgccgtcgctcggggaggtcaccatcgtggtcgccaagtcgtcgcagtcctcgtccgtccctccgccgtcgctgtcgaccgccggaacaccgtcgccgtcgtcaagccgaagagcgccgccgcttcttcctcgtcgccgacgtcattcggtcaccgtccgtcgccgtttaggtcatcggtgagttcgccacgtcgcccgcatcattttggtgctctccgttcgcgccgccgcgccgtcgttcgccggcgggcatgcgtgcccgagtcgtcgccggtgatgacgtcaccgctgacgtcatcgtcgtcgttccccgtggcccggtcatggaccgatggatcttggccgtccattttggatgaatcgatctcggccgttcgtttccgtgagccgccgccgtgcacccggttcaccgcgaaccctagccgctgacgcaataaacccctttttccttttgtataacatggttcattgcggagcaccagactgagaagtggcggagataagcccacgggggtcgctggggagtccat

SEQ ID NO: 95206 - DNA, 366 bp, Oryza sativa
  Clone ID: PAT_MRT4530_93423C.1
caccagctattttgtttccaaaacatgaacttatggattaatggtttagatcactaacgtgtatcttgcaccacacaaacggagggactctactttctatgacgcaagccagctatgcctacagctggccgtaggagactatgctccactgctggggctcatccgataacatagccggtagctgaccccacctgtgccattggggatgtacacttagcagaacgatgggaggctggtggtggtgctctccaaattccctctcctgcaaccagggaacaccttggccatggtgtgcccaacatggagggtgccgggctccctgttaatgcctccaaccatgtggttgagggccgagcacctgcacca

SEQ ID NO: 95207 - DNA, 591 bp, Oryza sativa
  Clone ID: PAT_MRT4530_93424C.1
tgaacaaacagatcaagaatattctgcagaagactgttaatgagatgggaaggcatggaagaacaagctacctgatgcactttgggcatatagggctgcttataagacaccctggcatgttagcaaccaacttgtctacgggaagacttctcaccttccggtagagttggaacacagggcgcactgggctatccggacttggaacatggacttaaagggagccgatagcacaggaagatgcagctctctgagctgaaggaatggagggacaaggcctaccacaataatgccaagatctataaagatataaccaaaagatggcatgataagcggatcaagcacaaggagttcaaggcaggggacgaggtgctgttgttcaactcacgggtgaagcttttcggacataggaaacttcaaagtaaatgaatggatccatataccgtcgtcgatgtttcatcacatggagccgtcacgctgcgagacgacgaaggtaacatctttaatgtaaatggccattgtttaaagatgatggatcggtgcgttttgatccatccggtcatttagcagccagaacaaaaaaaagcaggggaa

SEQ ID NO: 95208 - DNA, 1401 bp, Oryza sativa
  Clone ID: PAT_MRT4530_93425C.1
atggacgctccgagcggcgagagcggcggcggcggcggcggcggtggtggcaggaggtggaaggggaagggggtgacgcccatacagccgcggcggcagctggggacggttttggaggactcgtcggcggcattgctgcggccgctcaagaagattgggcggagccccgaccgcctcctccgctccgcatcgtcgctctccacgtcctcgtcggctccgccttcgcctcgctcttcttcggcttccgatgctccagtccgcgtcatctcgtcgtcgccgtcgtcgccctcgccaccgtcggcgcgacacatcttccccttcgcgtacgaggcctccacgacgacggtgggtgggagcccaaggctccacccgctgtcgtggcagcaatccagcatgtcccagcccgcgtcgccacagcaacagcagcagcagccgttgcagcaccagcagatgatatcgttcggcgcgtcgcctccgtgctcgacgacgcagttcgtcgtcccggagaacgcgcagcagcagcagatgctgctgcggtactggagcgaggcgctgaacctgagcccgcgcggtggccccggtggcgtgccaccgtggctgtaccagcagctgctccgggtcccgccaccgccgcagaagctttaccgcggcgtgcggcagaggcactgggggaagtgggtcgcggagatccgcctgccacggaaccgcacgcggctgtggcttggcaccttcgacaccgccgaggacgccgccatggcgtacgaccgcgaggccttcaagctccgcggcgagaacgcgcggctcaactttccggaccggttccttgggaagggccgcgccggcgggaaaggccgcaccagcgtaagctcctcggccgctgccgccgcgtcgtgctcgtcgtcgtcgctatcgccaccggagacacctgacgacgcaaacacgcagcaacaagctcctcagcagcgagaacagcgggacacggcaggagtgtccatggagaagaaacaaccacagcctccagctccaacctctcgtcaagaagggtgctctggcggcgacgcagctgcgccgtacccggccgaaatgcttcacgcgccggcggcgtgcggcggcatgtgggttgctcccgacgagtcatggttcagcacgtggggccctggcagctccttctgggacgactacgacatggacagcgctcgcggcctcttcctccaccctcgcttcaccggtgacgaaactagcatggatcattccggcacgcaagcaaccgtgccggcagtggcagcaacagcggcagggatgagcatgccatgcgatgatgttccggtaacctcttcttcttcagatctccctccccaagggacacctcagactcctaccttcatgtggaaggaggactaa

SEQ ID NO: 95209 - DNA, 416 bp, Oryza sativa
  Clone ID: PAT_MRT4530_93426C.1
attattcttatcattttatttatcttttttatttttcacatgttttatatagatgttttcttgaccaaacaatgaactttccaaaccactatactgataaaaccacacaccacacaccaacaaggggggtaatgggacctggaccacgagaaacaagaaagcccgatcccaatactaaacggaccggaacgcgagagccagcccaggaagcccaaccccagaaggctcggcaacccacgctccaataaactgagccggatgcacaagaaccccaaccacagggcaagcctgcccccagtggaaacgagcatcctgtaacaacatcacagaacataatagccggccccatacctggcacagcctgaggtgcctactgcgagacctcacccacagtaatggcagagcgccaactgccc

SEQ ID NO: 95210 - DNA, 2427 bp, Oryza sativa
  Clone ID: PAT_MRT4530_93427C.1
aagatgagagaagcttaaagaataacgacttacacaaacttgtaccttgtttcaaaagtttatattttcatttcttagagtacagtttgagtctgagtcggtggaaactcgggcacatcttctaaagaacccagaagtacatctttctcattgtcagcagtaagtctaaaaggttagtcgatgcttctttcaagtggcataggaaagtgcatactgggtaacattttctagatatttttccaattccttttctccactctcaagagtctcccaaagtgatttcctcaattcctcgtttccttgactttttgtaacaaggtcataagcatagcgcataacatggctgcagtatgcagcttcatcatccatacattcttgataggatgattcatattgctttggattaaaaacacacttcttagcacctttggtccacctcttcagtatataggtttctggaatactgcacacattcttgatgctaagagctttaagagcatgtggacaaagcaaacccattgtttcaaacttactacagctgcaattgagttgcattgtcatcatatcaaaatgaactgtgcagactcttgatcctcgcccttgcattgtcatctcaaattgatatctgttattgtcttcgcaatgaagctccttgaattttgtggctccacatccatcaagaaaatacgtctcaaacaacttgtagattctgtatgtataaacttttgctgcatgattcaaaatatcactgtgctttataatacaagcaggaggcttttggctgcaccgcgtgtcttcatcgatctctttttcacgccaatcttcagtcaacttgtccacaacaacaacaattgtagacggagaggtaaatttctcggcaatgcagttaaagatgttactcagactgtcacattgtggctcatattcaaccccaccatcaaaagtgtgtttgttgagagcaccacaccacttctgcttgagtttataaagtttcttaagccatttgttatcctccaacttaaactctctgagcatcccagcccatgtttcctcaaactcagcttctgagtcacatccctgcatacacttggtgaacagcttattaaatgctttggaaccattaagtgtaccaagacgagaagcagcattcttttgtatgtgccagcgagagatgcgatggcatgtatttggaaatacttcctcaattgcctttgacataacttgatcttgattggtaaaaatagagcgaggatgccgattgcccattgcctccaagaaagatttaaatagccacacaaaagatgacatagactcgtcagctaatagagcacagccatacatggtgttctgccaatggtggttcacaccaacaaacggagcacatatcaaattatgtttgtttaagcgataagttgcatcaaacacaacaacatcaccaaaacagtcaaagtcaatcctgctcctgccatcacgccagaaaaaattagtcatccgaccgcctcggtctatttgaacatcccaatagaacataccatcttcatttgccctgctcttaaggtgtcttacaaggttctgcaaatctgcattccctatggcaagtgtccttgccatactaatgtagcatgagagtgaatcttgctttgacgtctctacagaacttgacctccctgctataagtgatcttgcagaccgtaaaagatgtcgttcttcaggtcttgccaagttgtggttgtgatcagagaccagccggataaccttccactccccgtggttattcactctgaagcgaaccatggccttgcaattcgtcctagtatgtgggtcattgaagtttgcatcagtaagcctctccccttccttcaggccctccttggagcagaagtaatccttggtcctgatccttttcgtgccagtaaagtaggactgcttcccctttcggatactgaaccccatgcggtgcccatagtcacagtacagcttgtacgccgcctcctcgctgtacactaccttgcggagtagttcctcggtgccctccttgctgccatgaaccgttgctgcctcttcagtctcggcttcatcaccatacgccctcatccccatttcatcaccagagttagtaaccgccccttgtccttccatgaccctgtcgccaccagcatcgtcatgctgcgacccaattccttgatctacaccaacgcccgtctcaactgcgacgatagcattatcgtcaacacacatcggatctccacccccgccttcacagccaccttcaccgtcagtgttcaccatcacaggatggatgcggcggaagcagctggacgaacgacggcgccccctgctcgctcggcgggatggatggggatcgccggagccggagccggaggcggcagcggtggtcaaggtcggacgcgtgggcggacgcgtggt

SEQ ID NO: 95211 - DNA, 592 bp, Oryza sativa
  Clone ID: PAT_MRT4530_93428C.1
tgctagcaaacattccccagaactctccattgaagttccccaaagtttggccttcaggcaaattattgtctcttgcatgactgagggcagcagacgtgagatatgtaccctgcccaacccagatgatcgatgcagtaaaacccagatacagggaggctggcaccattgtgtaccaggaggggacgaggttggcggcgatgaagaggaggtagccggaggtgccgagcacgagcgcgcgcctggaccccatccgccgcaccaccggcgagcccaccaccgagaacgccgtgaacgacgtgtacaggagccccagcgacaccgaccccaggttctcgtccgtgttgacggtgctctgcaggttctgggcggcgtggtaggcgaggaagacgaagaggaaggccgagctcagcaggtgcaggtcgcgggtctgggacgtcgccgccctcgccgccgccgcggcgccgcgtctgccggataccagcggggcggcctcctcctcctcctcgtcgagggccaccgcgagctcggctccggcgggagcgtggccgtcttccatggcggatttggggggaggagttggtggcggcgtggc

SEQ ID NO: 95212 - DNA, 699 bp, Oryza sativa
  Clone ID: PAT_MRT4530_93429C.1
ttttttttttttttttttgcaacaacaagccagtaaagttgatctctcccagtcacacgttaattgataagtgcaacacacatatatgcctcagtaagacttagattgcagttacaccattacttttgatacttgagctaatgcaatcatgtaggagaaaccctgccttttatggttcatgcttgtgtaaattacctgccatatcccaaatgcttcccaaactgatgcactgttggcagaagagcatctcacaatcggcgacaacgacgggcagcttggagagcgcctcacacaccttgtgccaccggtgctagtcgtggcacctgctcagctcctccttgcacttgtccaccgcgcaggaagggcactgctgcccggcgccaccaacaccctcaacgcgcgcggtcacttcaccggcaccgaggccacagctgacaagtgacggccaagtgaccaactaaccagtagagcagctcactgtagcagttgctccaagagcccttccttgtctaggttcaaatctcaaatccgttgattcacaaatcataatcactttaagcggcgcggatgatgcggatcggttgagctccgtgtggcgccgccgagctcctcgtcacatcgggcggcaagaccacacaggcggcctacgggctttcttcgacggcggtggtgacggacggcgccggatccgcctcgtgc

SEQ ID NO: 95213 - DNA, 973 bp, Oryza sativa
  Clone ID: PAT_MRT4530_9342C.1
ttttttttttttttttttttttttttgaggaaatattatcacatacacttgtacccactatattttgattttgtaggcaggcatgcatacacacagatcagtacacaatcaaatcttctagcacgtacacataatgatatgatcaagccacgtgtgtgtacacatacatatatagcacaatcccagatcctgtaacttaattattcttaaacatatatggatattaagaccctacctccatgaagcacggcacgtacgcgcacgcatgctgctggcggatatatatttgggtcgtccaaaagtttaatacagtatatatgtagaggcaagcacacagccatatatatatatatatatatatatatatgctgcacacctatgtatagcatgtacatacatacgtacgtacgtatatatatgcacgctatctctcgacgtacttattaaacacaaactacagcggagaccttcccgcatactttaaggatgtcggggattttgaccttcaagattgacgagagcattaaccttgatggcttcgcaaaggcagacagcagcggtgtcgctcgggaggctggagagctgcgagcagcacgcctggttcaagagcgggttgccaagaccgacactaatgcacgcgttgagattaattaacgccagcggacacttgggaggcggcgtcggagatggcggattgacaggggcaacggtgggtgaaggtgttggtgccggcgatggcgtcgggactggagttggtgcgggcgtcggtgtcaccaccggggctggtgctggggctggagttccagtcggggttggtgccggtgcttggcatgggtttagttgcccattcacagcagaagccaagaccacaacaaccaatgcagagaacaaggcagagttcattgcctgtttgcttgccattgttgcctatgtgtgtgtgtgtttgatgctcttagggtatgtagccttgtag

SEQ ID NO: 95214 - DNA, 770 bp, Oryza sativa
  Clone ID: PAT_MRT4530_93430C.1
ttttttttttttttttttttttttttttttacatgtgaagaatcacaaagtcaaataataaatagatagacagaaagatatgtaaatgcaacaacaagcagtaaagttgatctctcccagtcacacgttaattgataagtgcaacacacatatatgcctcagtaagacttagattccagttacaccattacttctgatacttgagctaatgcaatcatgtaggagaaatcctgctttttatggttcatgcttgtgtaaattacctgccatatcccaaatgcttcccaaactgccaaaatcttgtccatcagatttaggccacctctgctcctcctcatccccatcatacttagcaatcggcgacaacgacgggcagcttggagagcgcctcacacaccttgtgccaccggtgctagtcgtggcacctgctcagctcctccttgcacttgtccaccgcgcaggtcacttcaccggcaccgaggccacagctgacaagtgacggccaagtgaccaactaaccagtagaggcagctgactgtagcagttgctccaagagcccttccttgtctaggttcaaatctcaaatccgttgattcacaaatcataatcactttaagtggcgtggatgatgcggatcggttgagctccgtgtggcgccgccgagctcctcgtcacatcgggcggcaagaggacacaggtggcctacgggctttctacgacggcggtggagacggacggcgggagaggaagagggacaagggggcggcgct

SEQ ID NO: 95215 - DNA, 315 bp, Oryza sativa
  Clone ID: PAT_MRT4530_93431C.1
atgagggaggcgggcaacaaggagctgaacagggtgcgccccgccgacgctcacgaccgcgccgccgccgccggctcggcgtcggcgtcggctctcggccttggccttcatcacgcggcggtgaacggcaccaatgagcagccgaggtggttcttgcacccggacttggtccggccgccgtcgaggcctctgcatcacggcagcggcgtcgtccaggcctcgccgtcgacgccggcgacgacgagcccgtggacgacgatgcagaattcaggctacagaggcgacgtagacgtcgacacctcgcttcatctgtaa

SEQ ID NO: 95216 - DNA, 360 bp, Oryza sativa
  Clone ID: PAT_MRT4530_93432C.1
atggccgagctcgcgtccggagctgtgagctcgctgctgggcctcctccagaaggaggcgcagctgctgggccgcatggggagcgacgtggagttcatcaaggaggagatggagagcatgtccaggacggcgcatctcgccagcgggcacgacaagcaggtccgcacgtggatgaaacaggtccgggacctcggccacgactgcagcaactgcgtcgacgactaccttcgaagcggcgacttggcggtccaccttcgccagggcggtgtccggcgctacatcttgtggacctattggcttgtgcgaaagatgcatgaccagcgaaacgcagcccttgcgctgcgtgagctcagggacccg

SEQ ID NO: 95217 - DNA, 558 bp, Oryza sativa
  Clone ID: PAT_MRT4530_93433C.1
atggctgttcggttcgagcatggctggctatccagcagtttaggcagctttggctgggcgaaggtgaatgagtgtatccgtctccatcgtcagcctgctgatactcagacaatgctgatctaccatccctcctttcaagttcaggtcaacattcatgacttcgacaaacagtctgccaccttcatcagctcagccactggggccatcaccatctcctacatcatgtagatatgcacaatgtgctttgtacagagggatcgtgatctaggtgtttgcaaagagcatgcgtgagggctatataccattagaggagctcttacagacaatgcacagacaatatagtatttcaagcatcaggattttttttcttccctttacccatcatcattctctgcggtgaggactactagggagggagtttctgcggtaatatatgcaacaccaagcatatccgatatacttcccgtcagtcaggagagtagtttagaggttgcataagtgcatgtcattgctggagtgtaccagtataaaatgtgctccaattatttcgtagctaat

SEQ ID NO: 95218 - DNA, 378 bp, Oryza sativa
  Clone ID: PAT_MRT4530_93434C.1
atggcggggggaggcgaatcaaggagcaggcagcagcagcctacgcgggcagggcgcgtgacggcgcagatagccggcgtcaagggagacggccacgacgacatatccatgtccgcagtggcgagcaagctggtgtcgaggaagatggcgattggggtcggtcttggcgtcgccggcggcccacagcaattaattggaggcggtggactgaccaacgccgaaactagcgaccgcgagacagggcaaagccgagcggagaggagaatggataacctcgccgacgagtgcgctaccactgccgcaagaggcccaccggcggcggatgaggcgcaggagatggccgccgagtgggatggagaggggagcgcggcggcctga

SEQ ID NO: 95219 - DNA, 228 bp, Oryza sativa
  Clone ID: PAT_MRT4530_93435C.1
atggggcacttcaagcggggtattgtagcattaagcaaggaaggaagccttctagagttcccatcaagggaagatgatgatgggttttcaggggaaagggggtggtccctccctcccttcccccctgaaaattttaaacacatccagtgggctccgctacaggggtggctgctgcgcgaccgatcgctggcgccggaggccagcgatcagaaatcacgcccgcacgcg

SEQ ID NO: 95220 - DNA, 132 bp, Oryza sativa
  Clone ID: PAT_MRT4530_93436C.1
atgggccacccgtgctttcgggccggcacggcacggttcgactgctggtgggctgtgcctaggccaaagctggagatggcgaagcaggcggaggggctacgagtccgatacggcgtgctctacatcaactag

SEQ ID NO: 95221 - DNA, 126 bp, Oryza sativa
  Clone ID: PAT_MRT4530_93437C.1
atggcgacctctgaaccgatcaaaccagtctggaccatcaaaatcattactgagatcatccaaaatgcgacggttcaaattaaaataaagacccacgggccaaatgttacatgcgagaggacttga

SEQ ID NO: 95222 - DNA, 291 bp, Oryza sativa
  Clone ID: PAT_MRT4530_93438C.1
atggactacatagagtataattcagtgttcacgttggttcaccatggccggcttcaacatgaacatgatcacgcgtacctgacgcagcagctggacctaccgctggtggaggcctcgaacctcatcaccaacttcaccggcacggctgattccttcgccggccgcctcctctggaccatcgccgccggcggtgttctgtcccagctcggcatgctcggcctcgtcgtgtccgcactcgtccctaccctctgccccgcgccgtgcggcgctgccaccgccgccgcctcgtga

SEQ ID NO: 95223 - DNA, 246 bp, Oryza sativa
  Clone ID: PAT_MRT4530_93439C.1
aagccgccgcgccgccgccgcgaggccgccgcgccgtgccgcgacttgcgccgccgtcgccatccacacgtaattatagagcccgagggagttgcggatacaagcgaaggtcaagacccgcaagactttgagcaaggcaagtcatcactatcccttgaacatgttgatcccaattgcaaaattattttatttacaaataagaatgcatgcaatgatgaacatcctatttgtgaatatgccatacct

SEQ ID NO: 95224 - DNA, 352 bp, Oryza sativa
  Clone ID: PAT_MRT4530_9343C.1
ggactcatagaatttattttggcactgcatcatttttatttgctcatgctttctattcattcctcccacagagactgatccatcgacgttttgttgccctcataagggaagcggagcacacacacacggcggcacagtaagtgctgtgaacacgagtctaatcaatattcacagctcacacaaacagggggatctatgctaatcccgaaaaaaaaaacacaggggaaagtccagatctatttttcgtacgcaactgatctgtgtgaacaacacggagtgcggatttttttttaccctcgtctatttgataggcatgcactatttcggcgctgtcttcgactgcaggatcagc

SEQ ID NO: 95225 - DNA, 160 bp, Oryza sativa
  unsure (1)..(160): unsure at all n locations
  Clone ID: PAT_MRT4530_93440C.1
ccctcgagcgncnnggctcgccggctgcgggctcgccgcgaggttgcctccgcgcctaagcaaaagcagccgcgtgcgcgcgcgcgcgcgcgccaatccttctaggtcaagaaaccgcgcccgatttatgccggcccagcgtgtgaaggaaaatataatg

SEQ ID NO: 95226 - DNA, 300 bp, Oryza sativa
  Clone ID: PAT_MRT4530_93441C.1
atggcggaggcggtgatgcaggaggtggtgacacaacagctagcggtaaccggtgacggtggtgggctcacacgggaggcgtcgatgctatacatgaagaaggaaaaacgaagctataaaaatgacctgggttacgaagatagccggaagacctcagggagcaaactgaagcaagctgctatgccatcactcactgctgcttgctccgggacaaaggaggccgggaggctgaggaccatctgcaagcatgatgcagatgggtggacgcacagagagattatttcacgaatctgccgttga

SEQ ID NO: 95227 - DNA, 688 bp, Oryza sativa
  Clone ID: PAT_MRT4530_93442C.1
accacgtctctctctcctactgttttctcacccaaagatccagattttcaccaactaaacccgctccgatcaacggcagcagccaagccggcgcagcgttccaggcaatggccgtcgagacggacacggcgagggcggcggtgtcgtccgagacggcgccgatgtcgccgcaggccgaggcggcgccgcgcgccgccacggcgcgccgcgggaactggctgcggcgcctcataccgcgggactacctgtcgctcagccggcgctggaagctgggcggcggcgccttcgccgcgcccggcggcggcgcggcgtcgaggaggctggcgtcgctgtcgcggtcgctccggtggaagcggcggctcccggggttctccctgaccctgcggagcggctcggcgtcggcggtggtcgacgcggttgcgttccgcgtcatgtacgtcgtggaggccgtcgtgctcggcctcgcgctctcctgcttcttcctctgctgcggctgccacctctaacctctcctctcttcacaccacgccataatcgggcgtgcaacagctgcaaccatcttaattttccctgctttttttttcttttttgttcttctcttgatgcttccgctgtaaatttctactacctacctttcggtgctaagattgaaatttgcaatctgcaaactgcaaaaaaaaaaaaaaaa

SEQ ID NO: 95228 - DNA, 459 bp, Oryza sativa
  Clone ID: PAT_MRT4530_93443C.1
aattaaataattaatttacttgtatattaaatatttgataaaaggtgtgcttacaataatgatgaagtatcaggagaaacgtgctcaggtacagatattacatgatggtggtcacgaatagagcggagatatatttcttgtgtgtgcctcttccaaaataaactcaatcgatcggtgtggctagagtatgagtaccaataattttccttttgagggaggctgacgccttccgagatgaacacatggaacgctgatcgatctccttacatgctctgttttgggctggacggctcgccattttctgacccaaaaacctgtctttctgagaccagtaggagagccttttgctcctgatctccccccccaggcgaggcccagagagtgcgtcgttccttctctggatgaaccggttttgccttgccggatcccttgaacggtacctatacattgtttgtttga

SEQ ID NO: 95229 - DNA, 1219 bp, Oryza sativa
  unsure (1)..(1219): unsure at all n locations
  Clone ID: PAT_MRT4530_93444C.1
gcacgaggcctcgtgccgaattcggcacgaggctcacgagctcaaaagacacacattccaaaagcatctgtggccatctcctcctagtcctaggctcgcgtcaatggcggcgtccaccatggcactctcctcccctgccgccctcgccggcaaggcggtcgccaatgccaaggtgttcggcgagggccgcgtcacgatgcgcaagtcggcggccaagcccaagcccgccgcggcgtcggggagcccgtggtacggcgccgaccgcgtgctctacctcggcccgctctccggcgagccgccgtcctacctcaccggcgagttccccggcgactacggctgggacaccgccgggctgtcggccgacccggagacgttcgccaagaaccgggagctggaggtgatccactgccggtgggccatgctgggcgcgctcggctgcgtcttcccggagctcctcgcccgcaacggcgtgaagttcggcgaggccgtgtggttcaaggcggggtcccagatcttcagcgagggggggctcgactacctcggcaaccccagcctgatccacgcgcagagcatcctggcgatctggggttgccaggtcgtgctcatgggcgccgtcgaggggtaccgcgtcgccggcggcccgctcggcgaggtcgtcgacccgctctaccccggcggcagcttcgacccgctcggcctcgccgacgaccccgaggcgttcgccgagctcaaggtgaaggagatcaagaacggccgcctcgccatgttctccatgttcgggttcttcgtccaggccatcgtcaccggcaaggggccactggagaacctggccgaccacctcgccgaccccgtcaacaacaacgcatgggcctacgccaccaacttcgtccccggcaagtgagtgtggatctccggcgagcaacggcggtgaggtccattgctttcatgaaggctgcggtgagacgcgcgacgttctcctctttccgcgtacccgaatatttgcttcgttcgttcagattgtgtaaaacaatgttatctggttggttgatgaaagaagtacaatggacctgattgtgtaaaataatttttatctgatttgttcctgggaaatcagtttgcctggccggtatggaacggaataccccatggtacatggaaatgtacgcggactcaaataatcacatgcaaaaacgcaaaaaaaaaaaaaaaannnnaaaaa

SEQ ID NO: 95230 - DNA, 265 bp, Oryza sativa
  Clone ID: PAT_MRT4530_93445C.1
gggtttctgcgcgctaaggggccgagcgggcgcggggattcctgagcacaagagcccgacagaccgaacaggaaacgcaactgcaggtcacaggaggccaatgcagaccaagcggcagacgagctaaggcaggagctggcgacaaccgcacgagcagaggaccccctgcgcagaggagacaaccccgacaagacgccgctgaaacctaagagaatcgagtatccagacgcagaggtaccgaaaggagcactgagctgaaaaatga

SEQ ID NO: 95231 - DNA, 583 bp, Oryza sativa
  Clone ID: PAT_MRT4530_93446C.1
gggaggcggcggaggcggagcggccgaagggggagtccggggtgaagacgtcgaagcaggtgtgcggacgctccagcggcggcggaggcggggacggcggggagagcccccgcggctcggggtggacgcgcccgccgctcaacaagagcgccggctcggacgcggagcgcgcgagggccctgctcccctcccgccgcggcagcgaccgcgacgccggcgcggggcgcaccgccagccgaaccctccgccctccgctcccgctcccaacgccgtcgcgacggcgacgaggagagccccgccggcgatcgacctagccggatgcttgcgagccgggaccggctcttcctctccggcatccagttcagattcgagaccgcttgtttgatcctgtgctcgcgcgtggagatcgcggatggacgcgatgccgcggagctcgatgtgtttttggtcggtcggcggacggtggtgtcgtcggcgcaacgtttactttcgcgtcgccattacggcgagcttttttctgtgctttactcaacaaagggaggaagcttcccttcatggtgatcctcttccctggaactggtct

SEQ ID NO: 95232 - DNA, 404 bp, Oryza sativa
  Clone ID: PAT_MRT4530_93447C.1
gtcggcctctaccgtcgtggtggcatgcatatctacggcacagacccttgaaggcaggtccagcgcgcgtcgacgtgtacagtggtgacactatcggcagcgtcaagtccaagatcgagtacaaggaggtgatttccgagaacttgcgacaggtacatgttggacgtgaagcatggttgaggacatgggcaccttatgctagtctatctaatcgagcatacgcatcatcactatcacgatcgtctttatcataaggtgttgcgtgcaaatactatttaattctcggtccggtgtgaccgtctcacattaggtagagttttttgatatcattggcgatttctatgtatggttcaagttctcggacgtttttttgccacgccataatcgttttcatagtgtcaggt

SEQ ID NO: 95233 - DNA, 3297 bp, Oryza sativa
  Clone ID: PAT_MRT4530_93448C.1
atggcagggatacgcaagacaattggggatgactgtgctccatatcgacatcttcgtcgcgacatgaggagtgatcaacatgatgctgatgaggtacatgataatgatcttgcaagggtagaatctattttgccagtttttgatggtaagtatgattccgccgcttatgttgattgggagctagcagtagacaaacaatttgacgagtatgatttctctaatactgaaatgattaaggctgctagtaataagtgtactggttctgcatctttttggtggtatactgttggcaataagcttgaaacttgggatgaatgcaaaacaatgatgaggaaaaattttgtgttttcatattataaacgtactctccttgagaaattagaacatttaaaacaaggtgacaaaaccgtgcgggagtactttcacaactttaaaatttgtatcacttatagtggtttaaaagaaagcaatgagaacacaatgactagattttttagagggcttaattccgatgttcaggctgggcttactaatgtgacatataatcatataggccacttgttcatgcttgcttgcagtgttgagagcaatattttaaagaacctaagggagaaacaagctatgcttgtgcctcctattactgacattttgcagggagctcagaacattcacggggagaagagcaataggatcgaggtgccatctccatcactcacgaaggaagaagagaagactgatgcagctacatcatccgaacagagaaccacaggtaatcttaatggtgctgcaattaatcaagcttttcatgctagagaagagcaaccattagtggaaacaattgctgagatgcctttgtcacaagttgatttacttgctgttccttgtgataaagaagagttgtgtgataatgcttcacttatatccatgccacaactggtgaatgaacatgctatttctagtgtttctttgtgtgccaattttaagcatgttgttcacattgctaatgaagtacaggaacatgaattgctatcatctttaaatactttgggctatgttcagtttgatgatttttgtgagctcgataatttgaagaagaaattatttgctaagtctgatttgccttgtccaactagtgctatttttcatatatttggcgaatctgatgatagaggaatatatttggtgcatagagtttacatatgttcagatttagaacctcctatacatgtggataaaacatgcaagctagagcgaaatgttattgctaaccaaattgtctcgagtttgccttgttttgactggaagaaacatgttgttgtaaatggactacgcaaagagcaccatatggaaaaaccgaggacagttttccgtgaagaaggggaggatgatgtgaccatggctaccatggatgcaaccattgctcacatcatggatgaacaagaagatatcaagatcaagtcctccaagtgctggaatccgattcagccacctactacactactgacttcaaacggtcgccgaatctgcatacgacctccgttttcggcccgtgagtacttgatggaaagctcttggagtcctctttccaatggatccatcctcattgtgaaattccatcttattgagccgcaattgaagcaacaagttgccgcgtcacctataatgggcctatgggcttgtaacttcgtatgggaccccggcccaagtggggcccatgacgagtgccctcgtggccgggttgacgcgcaccacaagttagcggcgaccattggagaggatcgggccacaaaccctagcgggttcgcatcaactgtcatatgcaaggccgatgttgtcaagtacatgttatcggctccaattttgaaaggaaggattggaaagtggatattttccttaactgagtttgatcttcggtataagtcaccgaaggcggtcaaaggacaagctatagccgattttattgtagaacatcgtgatgattcaatcggctcagttgagattgtaccatggactttattctttgatgggtcagtgtgcactcatggttgtggcatcggcttggttattatttcccctcggggggaaagttttgagtttgcttatactatcaaaccttatgcaaccaataatcaggctgagtatgaggcagttctcaaagggttgcagttactcaaggaggttgaagccgatgctattgaaatcatgggggattctttgctagtaatcagtcaattggtaggagagtatgagtgcaaaaatgatacattgatggtttataatgaaaggtgccgagaattaatgaaggagtttcggctagttactttgaagcataatccgtctcaatcggcttctcggaaattaaggtataaagcgttgaagtacactttattggatgatgaactctattataggatgattgatggggtgttgctgaagtttttgagtgccaatcaggttaaggttgcaattggcgaagttcatgaagggatttgtggtacccatcaatcggctcataagatgaagtggttgctttggcgtgcagggtatttttggccgacaatgctagaagattgtttcaggtattacaaagggtatcaagattgtcagaaatttggagcgattcaaagggcaccggcgtcggctatgaatcctatcattaaaccatggccatttagaggttggggaattgatatgatcggcataattaatccaccatcgagtaaaggacataagtttatattggtggcgaccgattattttaccaagtgggtagaggcgattcctttgaagaatattgattctttggatgctatacaatttgttcaagaacatataatctatcgatttggtatccctcaaaccattacaaccgatcaaggttcaattttcgtgtccgatgagtttgttcagtttgccgatagcatgggtatcaaattgttgaattcttcaccatattatgcacaagctaatgggcaggccgaggcatctaacaagagcttgatcaaattgattaagagaaagatttctgattatcctcggcagtggcatactcgattgaccgaagcattgtggtcttatcggatggcttgtcatggatcgatccaagtccctccttataagcttgtttatggacatgaagctgttttgccatgggaggttcgaatcggctcaaggagaacggaattgcaaaataatttgacagctgatgagtattataatctcatggctgatgaaagggaggacttggtccaatccagattaagagcccttgtgaaggttaccaaggataaagaatga

SEQ ID NO: 95234 - DNA, 613 bp, Oryza sativa
  Clone ID: PAT_MRT4530_93449C.1
ggttgatgtggctaatcacaactcacaccattttcttcattacatagacttaagtacatgcaaaagataaggatcagccaactaatttggccttgactcacgccttactccaacatgcagatgccatgcaacaaggtaactagctagacctattcttccgccacaaaatcacttcgtggccttccagcttgagctgcagctctgcatgcatcttaacacatccaactaaatgcttgcatgcagccgctaatcactagttctacatgctaatgcaacagcctttacacatcgtagatatcggcacgttcgtccggccgcatcgcacagctcacagcaagcacgtttcacacgtactggctcggatcctttgctgccacacactactaccttgtgcaaaacctatacaaaccaaatgcatacactctaaagacaagattattgctaacacgccggctggcagtcggagacgccgagcccgacggtgacgaacatgtgggtgtcgacggcgagcggcaccgtgggcttccccgggagcaccagcgcggtgaggttggaccagaaccggtgcgccgtggccgtgtcgttgtagtccggccgcgccgggagcaccggc

SEQ ID NO: 95235 - DNA, 2461 bp, Oryza sativa
  Clone ID: PAT_MRT4530_9344C.1
ctgtgagatgggaacactaacaccaaattgctccatctccgcactcgacatcgcaagtgcaataatttcattactaagctcaaagatggtgagatggttgtatctaaagatgaggacaaagcacaagtaattttgaatttttattctaactttcttggttctagtgaagatcacacagcctctattgatcttgatgttcttaatttgcaaacccatgatcttgagctacttgatgcacccatttcaaaagagaaactgtggaattcaatcaagcaacaaatgacagattataggaggtttgttggtatattataaaaggggttttgatggcagcaatatctactgtatggacaatagatttttgtaatcttcagcttctcaaccgtgcttatatcacccttttgccaaaaaaggaggaggccatgcatgctaaagactttagactcatcagtctagttcacacttttgctaagttataaccaagatcctagctaatcggtttgtcctctacaacagttggtttctccaaaccaaagtgctttcataaaatgccggtttattcaggataacttcatacttgtacaacaaacaaccaggttcttgcattcccaaaaaatgcctagaattcttctgaacctagacatctctgaagcctttgattcggtatcttggttgtttttcttgaagttttacataagcttggatttggccaagtttggaggaatgtcttaagtgggatgttttctacctcttctacccaggtgctcttgaatgggattctcagtatggcaatagctcatcggcgtgggctttggcaaggggatcccctaccactaatgctcttcattttggtgattgatgtcttgaatttaatgctcaatagggccactgaagctggttgttgtagcctttttcttcttgggctttacaacaccgaacgtatctttatgcatgtgatgtgggggtttttcttcaccaacgaccttatacatctctcccacacttgatattcttcaccttttcggaaacacatcgagtttaaagactagtgtccaaaagaacaatgttctccccattcattgttcagataatgatattgtagttgtccaagacctcctagcgtgtgagatttcagatttttccttgtaagtattttgggctgcttctctccataaggaaagtcaccaagtcccatatccaacctcattgatcatattactaatcaactaccagggtggaaggctgatcttatatatgacccgggttggtcatatagtccaagtttagtttgtcctcacctctatgctcatatatcgtgcgatatcaattgatttgctttcctaggccttcaaagccattgataagataagacagagatttctttggagaggaagaaataaagtagatgttggttattatttaattgcttggcccaaggtttgtcaaccttgggaatttaggggtcttggaatttaggatatgaagtctcttagttatgctctaagggtaagatggctttggttgcaaaaagttaaaccattgtggccttggtcgatctttcctatccaagtaagtgaaggggttacatatttgttttccatggcagtagtctcgaaagttgatgatggattagtactcttttgaaaggataattggctccttgggaagcgtattgaggaagtagcacctcggcttttcactttggtgccaaagggaagagttaataagtgcactgctgagacattacttgatcatatatgaatatctgatgttcaaggagccttttctgttggtgttataacatattttcttgatctgtgggacacccttttcttggtagagctacaacctagaaatccatatgtgaattattggaggctttcaaatataggagtttactcgaccaaatttgcacatgattttctgtttcaaagtgccatttattttggcccttgggaacacgtatggaaatcttgggccctaggaaggcgtatttttttttcatgtggttagtgccacacaatcattaattgttggacaatggactgcttggcacgacaaggcctcccacatcgtgattagttccccctatgtgaccaagaggatgagaccattcaacatgtccttgtctcttgtgtgttcaccaggtaagtttggttttccctcttgccccaagtgggacttagggctcttgcgccacaacccttagatgtggacttcgatgaatggtagaaccgaatcaatattttgttggatggcaatatcaagaagggcttaaatatatatagtttggtcattcttggtgcttggactattttggaagcatcgaaatgattgtgtcttcaacggagtttctcctagtttatcttcttctttggcactagcaaggaaggaagcacacctatcgagtctagctagggctaaagggctctctcttattttggaccccggttaggctttt

SEQ ID NO: 95236 - DNA, 634 bp, Oryza sativa
  unsure (1)..(634): unsure at all n locations
  Clone ID: PAT_MRT4530_93450C.1
ggnngnggattcggccgagagcattcttgagctcaatcagcaacaacatctatctccttcttgcttagttaagtccttcgccctcccnagaagaanaagatgtcttgctgcggcggnaactgcggctgcggcagcggctgccaatgcggcggcggctgccgcggatgcaaaatgttccctgatgtngangccacagccaccaccaagancttcntcctcnctgctccatccaacaaggcgaactctggaagaatggagatggcggtgganaacggcgaaaacggcggctgcggctgcaacacctgcaantgtngcaccagctgcagcggctgctcctgctgctcctgcaactgaatctatcntcctcctcgcccggctgcatgangatttatcgtatggatgctgcnactgtcnatcaganctttgatcgaagccttaatttgcttgcattantncccnncttatatgttngcaggccttgccttttgctctgacncctaaatnaaaccgtcntcctccttgtcnntgtgtgcgtgtgtccatcaatgttggatggatccctanctancttggatngatcatctatcctcatggtgatctcntcntgtnctccngctccntctcctctgcgttc

SEQ ID NO: 95237 - DNA, 972 bp, Oryza sativa
  Clone ID: PAT_MRT4530_93451C.1
ctactacggacggatacaaccattgctcacatcatggatgaacaaggagatatcaagatgaagtcctccaagtgctggaatccgattcggccacctgctactctgttgacttcaaacggccgccgaatctacatacgacctccgttttcagcctattggctttatcttgttcttgattgtttattcgatttgcttataggaatacggttgatctacaccggcaagatcaacaacccacggagaggtgtatcgatcgctaaggcgcaacacaacaacagtcgtcgtcgcctccgtgtctctgttgtcgtcgagacctacgaaaatggaatcggcttggtgccacgggtgtcggtttcgagatctgtttggaaaaacggaaccggattgcgcaaggggaaacgagatggtcatgctcaacatcaacatcttcaccatcaacgagatatagcgacttcttcatgcatcacatatgagcaataagcttgaaacttgggatgaatgcaaaacaatgatgaggaaaaattttgtgttttcgtattataaacgtactctccttgagaaattagagcaactaaaacaaggtgacaaaaccatgcgggagtactttcataactttaaaatttttcgacatctacaacactcacgaaggaagaagagaagactgatgcacctacatcatccgaagagagaaccaaaggtaattttaatggtgctgcaattaatcaagatgagtattccaatattggcacacatgggtacaatgtttttcaccggaactgtttttcactggaacgaaaaagttcaaaaagcaccaagacatgatttttgcacatattgaagtgtattggaaacgtccgtgtcaaaaaatcactcccgaggaacgactccagacccgttagcaaggcatgcacaccgtcaaggagacggagatgcttgctgccaagctggacctcgtaaatgagctgtatttgc

SEQ ID NO: 95238 - DNA, 2037 bp, Oryza sativa
  Clone ID: PAT_MRT4530_93452C.1
atggcagggatacgcaagacaattggggatgactgtgctccatatcgacatcttcgtcgcgacatgaggagtgatcaacatgatgctgatgaggtacatgataatgatcttgcaagggtagaatctattttgccagtttttgatggtaagtatgattccgccacttatgttgattgggagctagcagtagacaaacaatttgacgagtatgatttctctaatgctgaaatgattaaggctgctagtaataagtgtactggttctgcaactttttggtggtatactgttggcaataagcttgaaacttgggatgaatacaaaacaatgatgaggaaaaattttgtgttttcatattataaacgtactctccttgagaaattagaacatataaaacaaggtgacaaaaccgtgcgggagtactttcacaactttaaaatttgtatcacttatagtggtttaaaagaaagcaatgagaacacaatgactagattttttagagggcttaattccgatgttcaggctgggcttattaatgtgacatataatcatataggccacttgttcatgcttgcttgcagtgttgagagcaatattttaaagaacccaagggagaaacaagctatgcttgtgcctcctattactgacattttgcagggagctcagaacattcacgaggagaagagcaataggatcgaggtgccatctccatcactcacgaaggaagaagagaagactgatgcagctacatcatccgaacagagaaccacaggtaatcttaatggtgctgcaattaatcaaggtgagtgtgccgttaatgaattgaacatgtcaacttttcatgctagagaagagcaaccattagtgaaaccaattgctgagatgcctttgtcacaagttgatttactcgctgttccttgtgataaagaagagttttgtgataatgcttcacttatatccatgccacaactggtgaatgaacatgctatttctagtgtttctttgtgtgccaattttatgcatgttgttcacattgctaatgaagtacatgaacgtgaattgctatcttctttaaatactttgggctatgttcagtttgatgatttttgtgagctcaataatttgaagaagaaattatttgctaagtctgatttgccttgtccaaatagtgctatttttcatatatttggcgaatctgatgatagaggaatatatttggtgcatagagtttacatatgttcagatttagaacctcctatacatgtggataaaacatgcaagctagagcgaaatgttattgctaaccaaattgtctcgagtttgccttgttttgactggcagaaacaggttgttgtaaatggactacgcaaagagcaccatatggaaaaaccgaggacggttttccgtgaagaaggggaggatgatgtgaccatggctaccacggatgcaaccattgctcacatcatggatgaacaagaagatatcaagatcaagtcctccaagtgctggaatccgattcggccacctactacactgctaacttcaaacggccgccgaatctgcatacgacctccgttttcggcccgtgagtacttgatggaaagctcttggagtcctctttccaatggatccagcctcattgcgaaattccatcttattgagccgcaattgaagcaacaaggtgctacgtcacctataatgggcctatgggcttgtaacttcgtctgggacctcggcccatgtggggcccatgtggggaataaggttgatttgcaccggcaagatcaacaacccacagagaggtttagacttcccgttgtttcggaggatcgtccgttcgttggagaagttcctgaagacgaattgaagacgcttgttttttgtgtacctcggctaattcctggacgaggattttatgcacaaatgagttcggaaattactagtgaatttctgggcatgacaggcatcgagtcacctacacatgaaataaacaaagaaaccatattccgagaccaagctatctccaacttgactcattag

SEQ ID NO: 95239 - DNA, 4186 bp, Oryza sativa
  Clone ID: PAT_MRT4530_93453C.1
atgcctcggagctcgcgccacaggtggtcgtcccaccggtcgcataggagcggcgggtcggtggagcggtcggagaccgagggctatgaggagggaggcggcgccggggcgcgggaggaggccgcggcagctagcgtttcacgaaatcccgcaccggagaggcgccgctcgtcgtcggggaaggaggtgttgagctcggggaaaggttacgcggagcacgggaggaagtggaaggacagggtggaggagatggtcgtcgatgtggtcagtgaccgctggaacagcggcgtgtgcgaggatcacttggtcgagaagaggtcctagggcgaggtgatttggcctgtcgatgtggaaacgttacgtgagaagtccacgggctcaggggatgaatcaaagaggtcgagtaggcttatggctcctatcgctaatagggctgagcaggttttgtgcaaaagtgattctgggaagcgccgctcagacatggacttgcggagtagggagagttgtgtgccgtaaacggataacagaatcatggagcgggaaccagatagggagaagtagagagataggggaaaggagaaagaatgggagagacagaaagagcgagaaagggaaagaggcagggacagagaaagggatagagatcgggagaaggatagagagagagaacgggagcgggacaaagaacgggatcgagaacgtgacagggagcgggagcgagagcgggatagggaacgggagcgtgagaggcaaaaggaccgagagagggagaagaaagattatgattccaagcatgagaggtatgatgatggtggtgctaagaagaatggctccaaggcaagtaggggagaggaggatggttactcatacaagagagatacagagatcaatgcgagtgcgcacctggagaaatttcagaacctgagaaaggaccttgatagacatagccgaagaaaagatgtttctgaagataaagataagtggcctgctgaaaatagagatggtgatgatagaaaaacactttccagatatgatcatagtaaagttaggagctctaaggagcaaaggtttgatgatgataaatataaagaaaagtacaaggatgattatgaaagggataaaagacagcaagatgacaagtgtctggatgagcggttgacccgtgatcatgaaagtgatagagctgattataagagttctaaagacggacacagaacttccgagagccactacagaaaggatgtaattcaagaaccagatcattatgatgctggggatggtggaggtgaacgcatctagccttgagctggatgttgcaagtggcgctgatgattagtgaagccttggtggagagtagggtaaatttaagtcggatacctaattccccagaaagtacacattgaacttgatgtcctttttgtgttaatgaggcacggatctaaattgacagatcatgctaagagagaaataccatatgacgagagaaatattcgaccaaggacttcttctgggagagaacggacacctgcttctagactgcgtgatagggatgcagacaaccggccttcagaaaggctgaaacaaaaggatgatctccagtcacgtgacatgcaattggaaatttcgtcatcattacaatatgatcgcacacctaggaaggatgcacatccttctccaaagcacttatctgaaagatctccaactgaacaaaggttttcaggaaggctcagtggtggacgtagtactgataataaagcagaaagaagtggcctgaccaaatatagagatagagatggtgattctgtagaacggtcagttcatcaagaccgaacaccagctaaagctccatacagagaaccaacaccttctagttcgtccagaggtggccatttttcaggcacttcaccaaatcatccactgccaccacctccaaggcacagaagtgatgattcttcatttctgggtttgcatgatgatgatcgtaggcctcaaagtggagacaggaggttccatcagaagaggaatgatatgagttctggacgtgggcatggacatgcctggaacaatccaccgagctggccttctccagttgcaaatggttttgttcccatgcaacatggtgtgcctggatttcacccccctgttcatcagttttctgccccaccaatgtttaatctcagaccccaaatgaagttgaaccaacctggagtttcatatcctatgcatgagtcagttgacaggttctcgacccacatgcgcccatttgggtggcccaatcctctagatgaatcatgcccccctcacctgcaagtttggaatggaggcagtggcgtattcgccagcgaaccctatatgtatggcaggcaagagtgggatcagaacaggcaacatagtgtcagcagagggtgggagacaactggcgatgcattgaaaggacaaaatgaattgcatgagcgtgaaccttctgttactaaaaaggagcctgattgttcagcaacacctgttcccgagacttctactgggcaatacaatcttaattctcgtattgaacagaaggagatggatcagacattagagaaaaatggaacgaaggatgatctgaaaagctcttttagaaatactggaggttctggtggggcaccactcatgacttctatgccatcaaacagtggtactgcaattttttctaaaagttatctgtccaaaattagtgtgtcacgggatcttgttgagtcggagctgtacaaaaggtgcatatccttgctggcagactttggtattgcaaatactcctgaggttgttgggactggacttgtgcagagagctttggcccttcacaagaatcagacagcaaagattgtttctcctacccactcgattctcgagactgacaggaagacatacttaccagaagataatcatgatgacacagaaatgactgaccatactgtgtcgaaggaattgcttgtcgataactctgaaccacatcatggtgctgataccatggagaaagagttaccattgagacaggagctagctggtggcattggcgtgacatctccagcaagtatagaacctggtaatgtgggggcacctccagtaattattgaacctgatgtaggcatggaggatgtggcacctccaaaaatcgtagaacctgatgaaggcatggaggatgcggcacctccaaaaattgtagaacctgatgaaggcatggaggatgcggcacctccaaaaattgtagaacccgatcaaggcatggaggaggtggcatctccaacaatcaaagaacctgatgaagacattgaggtgatgcctttaggaactgcagaacctggcaaaggcatggaggaggtggcacctggaggaatttcagaacctgagaaaggtatggagaatttggtgcctccaggaattgcagaacctgtcaaagatggcatggatgatgtggctgctccatctgcagggcctgctgccggccttggggatggtgtgccagaagttactgttgaactagctgatagcgcgcaggagaaacctccagccatgggagaattgggtgatggcatggaggttatgccaccaccagtcacagaaactagcctaggcaaggaggattctcctgctgttcctagttctcctgaagttcaagagatcgtctccggcatgcatgcaggcattgagaaaggtatggaaggagagactgataatttaattgatgataaccctggggatggtgaggtgaacgcatctagccttgagctggatgttgcaagtggcgctgatgattgtgaagccttggtggagagtagggtaaatttaagtcggatacctaattccccagaaagtacacattgaaactcctttcatttcatttttaattcctttctcattttcttttgtccgagggtgttgcgccttctgcctagagttattttgagttgcaccgttctttttgcctcccgttgttgctctagagtgtttgccgtgagcttccatgctgtccggaacttgacgtgcacatggagtgtagaatgcaggagctgcagatggggggtatctgtgtcatcagcaggcactattgccatgccctttcagcagtactcccatgtttttctgctcgcacgtgctacgttgctagtatccgtaggcatgagcttcataatatattagagaggaatttttg

SEQ ID NO: 95240 - DNA, 760 bp, Oryza sativa
  Clone ID: PAT_MRT4530_93454C.1
atgtcacttccatcactcgcgaatgaggagaaggctgatgcacctacattatctgaagagggcataaaaggtaaattaaatggtgcagaaattactcaagatgagttatttttgaatggactatatgaagagcaccatatggaaaaaacgaggacgattttccgtgaagaaggggaggatgatgtgaccatagctactatggatacaaccattgctcatatcatggatgaacaagaagacatcaaggtcaaggcctccaaatgctggaatccgattcggccacctgctgcactgctaatttcaaacggccaccaaatctccatacgagctccgttttcggcccgtgagtacttgatggaaagctctcggagtcctctttccaacggatccagcctcattgcgaaattccatcttattgagccgcaattgaagcaacaaggtgttgtgtcacctgtcatgggcctttgggcttgtaacttcgtttgggaccccggcccaagtggggcccatgtggggtgcgccccaatctggtggagcacgaccctaggatcctcatggtcattctcccacccctataaataggtaggaatagggttgatctgcaccggcaatatcaacaacccacggaaaggtgtatcgatcgctaaggcgcagcacaacgtctcgtacgctcaactcactgaaagatcgggccaacaacagccttgagtgtcgagtggaactcagggttcatggcgtggaaagaaggacaacggcacag

SEQ ID NO: 95241 - DNA, 533 bp, Oryza sativa
  Clone ID: PAT_MRT4530_93455C.1
agttggttatggatcagacattagagaaaaatggaacgattgatgatctgaaaagctcttttagaaatactggaggttctggtggggcaccactcatgacttctatgccatcaaacagtggtactgcaattttttctaaaagttatctgtccaaaattagtgtgtcacgggatcttgttgagtcggagctgtacaaaaggtgcatatccttgctggcagactttggtattgcaaatactcctgaggttgttgggactggacttgtgcagaacaatggaagctttgggaagataaatagaaaacttggaacccccaatctgttgggttcacataaccttaaaaacaagagtgatatctttcagagagctttggcccttcacaagaatcagacagcaaagattgtttctcctacccactcgattctcgagactgacaggaagacatacttaccagaagataatcatgatgacacagaaatgactgaccatactgtgtcgaagaattgcttgtcgataactctgaaccacatcatg

SEQ ID NO: 95242 - DNA, 432 bp, Oryza sativa
  Clone ID: PAT_MRT4530_93456C.1
cttacctcaacagaatcctcctcatctagtactcgagggcagccagcagcaagcaagaaagactgcaagaagcaggcaagcagccactgcagtgccaacacattgtgccgtactacagttgtgcagaacagcggaaaaggaaaaacagctgcggaggtgcgcagaattgtgtcggcgccagcgcatcgatgcgtgccctgggattgcatgcgatttcgccgtgaggaggagaggacgtgggcagcaggcaacagcaatctcgctattaggtatactaaccttttgcagaaaatgacaataaagtggaggagaatcgacatcaactcagacgataaatcaatcggacgatgtctacaatcagacttatgtatgaatgggtcaagaactcagaattggcacgatgaattgggccaaaattcacaagtctgcata

SEQ ID NO: 95243 - DNA, 801 bp, Oryza sativa
  Clone ID: PAT_MRT4530_93457C.1
atggtggcgatcagggcgcccaagagccaccgcgccaagagggagctcctcaagcacgcgcccaagctcgttgagaccggcaagaagacgcttgttctccatgggaccaagaccagcgcggtgctgaactccgtgctcgcagatttgttccacctgaagcgtgataatgccgtcaggtactccaagaagaatgagaacatcaggccgttcgagagcggcggcgaaacttcgcttgagttcttctcactcaagacggattgcagcctaattgtaaaactggcacctaagcttggctcaaagcctttctttaccttcattggggagcattttgaaagtgttgaagagctgaagcatttgaaggaagtgctgcttgatcttttcagaggagaggtggtagagaatctgaatcttgccggtgtagatcgggtatttgtgtgcacagcaatatcccctaccactgtctacttgatgcactgtgctctccgtctgaaacggtctggcacatctattcctagaatggagctggttgaagttggaccttcgatggacctagtagttaggcggcaccgatatccagctgaaagtttgaagaaggaagcaatgaagactgccgatcatgctaagaagatgaaaaatgtcacgaaggatcctgtgcagggcaagttgggcaaggtctacattccagaccagcagattgcaaagatgtctttatcaaacgacatcaaggggctcaagagggagcgccgtgaggccaagaaaaacaaggagcacacgaagaagcaaaagataaacgttgagtga

SEQ ID NO: 95244 - DNA, 259 bp, Oryza sativa
  Clone ID: PAT_MRT4530_93458C.1
aactggaaaaattattggtaaaccttagctcatatatagttaaatataaatcaaaacctcagcaccaattctgtcccataagaacaataacttgcagtaagcacaggcaaggcatatattgcaactgtcgagcaaacaaaaaaaatgcatatacctcactatttcctaggtgtgtggcactatagcactaaaagtgtacaagcacgattttgaagagaaaatggagcggttaaagagtacggcaatagcatttagacta

SEQ ID NO: 95245 - DNA, 1318 bp, Oryza sativa
  Clone ID: PAT_MRT4530_93459C.1
ccagagaatctgactcttgccggtgtagatcgggtatcgctcgctccccacctctccccccacacccgccgcttgatccttccccacgcgcgtgcgacgtcgaccgatcggaatcggccgggaagaagaagatggtggcggccatcagggtgcccaggagccagcgcgccaagagggagctcctcaagcacgcgccgaagctcgttgagaccggcaagaagacgcttatcctccatggaaccaagaccagcgccgttctgaactccgtgctcgcggatttgttccacctgaagcgtgacaatgccgtcaagtactccaagaagaatgacaacatcaggccgttcgagagcggcggcgaaacttctctcgagttcttatccctcaagacggattgcagccttatggtgtgtggttctcactcaaagaagaggcccaacaatcttgttttggggaggacttatgatcaccacatatatgatcttgttgaagtaggagttgaaaactacaaatcaattgaatcatatgtgtatgacaagaaactggcacctaaacttgggtcaaagcctttctttgccttcattggggagcactttgaaagtgttgaagagctgaagcatctgaaggaagtgctgcttgatcttttcaaaggagaggtggtagagaatctgaaccttgctggtgtagatcgggtatttgtgtgcacagcaatctcccctactactgtctacatgatgcactgtgctctccgtctaaaacggtctggcacatctattcctagaattgagctggttgaagttggaccttctatggatctagtagttaggcgacaccggtatccagttgaaagcttgaagaaagaagcaatgaagactgctgatcatgctaagaagatgaaaaatgtcacgaaggatccagtgcatggcaagctgggcaaggtctacattccagaccagcaaatcgcaaagatgagtttatcaaacgatgtcaaggggttgaagagggagcgtcgtgaagccaagaaaaacaaggaccactcaaagaagcaaaagataaatcccgagtgaagaagctgaagaagttatttttagttgggaactatcaggttgggttaaggatttttggtcataactggttgggctgttgtgtttaccaagtggaagtcaccttgcgttatattgagtggtaaatagttaatgaagaaacatcctgtaaacccttgtaatggcttccacaacaatattgaccatgccagtgagcatggaattttgagtagctatatgttctgagaattttgttctaaaaaaaaaaaaaaaaaaaa

SEQ ID NO: 95246 - DNA, 618 bp, Oryza sativa
  Clone ID: PAT_MRT4530_9345C.1
atggggatttctctcttgcctccaatggactttaatttgagggatcttttccccaatccggaaaacttggattgtttggtggatcagttctacactcaggagaaggacaatcttattaaggtaattctatcagataaagcacctggccctgatgggtttaatgggttttttcttaagaaatgttggcaaatcatatcacaggacttctacaggggggttaggcaaggagatccactctcaccattgctttttgttcttggtgctgagttgctgcagagaatagttaacaaagcttgctccttaggtctgttgaccaagtcaattaatgaacttgatgagaggggtttcccaataatacagtatgctgatgacacttcaattcttctcaaagcattgcagagagaggtgttctgttttaaggcattgttgaattcttttgcacattctactggcctcaaagtgaattaccataagtcctgtctctacccaatcaatttatctcatgagaatgcagtgctttttgctggtctgcttgggtgcaccataggcacaatgccttttacttatttgggtttgcccatggggacaactaggccaagggtagtggacttttgttga

SEQ ID NO: 95247 - DNA, 341 bp, Oryza sativa
  Clone ID: PAT_MRT4530_93460C.1
atattaaaaaggcaaactcatcataaaaagatcaggaacacattctagctgaagtttccgatcacgctgcggtcaaatcatgcattataagcagggcacctccagcgacggagaacgcacaggtgatgtctttcatgccatgccttaacacacatttcatgtatatcgaacaatcacgggacactcgtcggagtagaacacgcgtgcacatcactgagctggctcagattaaggcagagtgcgtcgtcatgcaaaagcggcggcgtgaactgatcatttgagcggacggacggggtggtttaggcctaggatgagtccatgtcggcggagacgaagtcgta

SEQ ID NO: 95248 - DNA, 2679 bp, Oryza sativa
  Clone ID: PAT_MRT4530_93461C.1
atgacccgcgagcacgacggcgacggcgaggaggtggccaccgccgtccatggtgatgccggcgccgaggaagacggagaccggaacgtcgtcgacaagtcggagttctccgacgcggtgcatgtcgtcgtcgatcgcgatgacgaggagcccgagttcccctccgacgacgacgagggaggtgacgacgacgtgcgcgtctccttcgccaccgccgtcggcgacagcgacgagcacctccgcgaggagcagggcgagctggaccttgacgacgacgatgaggaggacgtgtcgaggtacgagtacgactatggcatgtggatggaggccgagccgatgtccatccaggagcgccgccgccggctgctccaggggatggggctcgccagcagccgggacctcctccgcagccgcagcgcgaggatgaggccgattcttccgcccaacatcccgcgctgcgcgtcgaggcgccagccgccgccgcagtgtcccgccgccgccgccgacgacgcgccgagcacctcgacggcggcgacggtgaaacggcagcggaacgccgtcctgacgcggtgccggtccgacagccgcctcgccgtccgcggcggcggcgcggcgaggaagccgccgacgttccggcgcgtgtactcggtgccgcactcgctgcacggctcgccggtgcacaaggctctccgcgcggccgctcggagtcgcagcccgctgccattgccggcccccaaggacgagagagaaaacaccgtcaggaaactcgacgacggcaaggagttcgtggtgagcggccagccggcggcgggcggctcgcgcggcgcgctcagcgacctcaagaccggcgtgcagctgagcttggacgagttcgagcggttcatcggctacacgccgttcgtgaagcagctgatgcgccgcagccagagccagccggtggcagccggggcggcgaacggcgacgcgaagccggggaagaagaaaccccggtggctcaagaacatcaagctcgtcgcctcggccgccggcctcatccaagagaagtacaaggaaagcaattgcggcggaggcggctgcggtaggtcgtcgtcgtcgtcgtcgtcatcggcggagcaagcgcaccagcccggggtgaccatgtccaagtcggcgtccaccaacgccgccaccatggcgtcgtcgtcgtcgtcgttggagcggcccaaggtgcacagcttcggcaagacggcgagggagctgacggggatgtacttccggcaggaggtgcgcgcgcacgaggggtcgatctggagcatcaagttcagccccgacggccgcttcctcgccagcggcggcgaggaccgcgtcgtgcacgtgtggcacgtcgtggacgacggcgccccgccgtcgtccatgtcgccggagctgctctcgtcctcccagagcctcccgcctctggcgcctcacggcgacggcgggctggcggcgcagctgtccaggaagctccgcgcgcggcggtggaagacctgcaaggacgtgctcccggagcacgtcgtcgtgccggagaccgcgttcgcgctcgccgacgagccggcgtgctccctcgagggccacctcgacgacgtgctcgacctcgcctggtccatgtactcccagctgctgctgtcgtcgtcgatggacaagacggtgcggctctgggacacggaggcgaaggcgtgcctcaagctgttcccgcacaacgactacgtgacatgcgtccagttcaacccggtggacgacggctacttcatcagcggctcgctggacagcaaggtgcgcatctggagcgtcgccgagcggcaggtcgtcgactggagcgacctcgacgacatggtcaccgccgcatgctacaccccggacggccaggccgccattgttgggtcacacaaggggagctgccgattctacaagacagcagattgcaagctcaaccaggaggctcagatcgacatgaacatatccaagaaacgcaagtcgcacgcgaagaagatcaccggattccagtttgcgccggggaacccgtcggagatcctggtgacgacggcggactcgcagatcagggtgttcaacggcatcaccgtgctgcagaagttcaaagggttcaagaacaccagcagccagatctcggcgtcgtactccggcgacggccgctacgtcgtgtgctccagcgaggactccaacgtctacgtgtggcggcgcgccacgtcgccgggcggcgccgcggggggcggcgtcgccgtcaaggccaagacgtggcgcaccagccgcgcctacgagtgcttcttctgcaaggacgtgtcggccgccgtgccgtggccgctgtcaccgtgcctaccaccgacgcgcggcggcggcggcggcggcgacgacgacgagcgcgcctcgtcgagcgtgcgcggcgccgtcgtcggtggggacgcgtcggcgtcgcggagcccagcgcgacaactgggcagcttgcctctccggcccaagtccgggccgatgacctactccggcgagaagcagctgggcgtgcccagggagccgtcgtcgcggtggcacggcggcgcggagggcggcaacgcgtgggggatggtggtggtgacggcgagcctcgccggcgagatcagggtgtaccaaaacttcggcatgcccctcagtttgttcagaaaaacgtaa

SEQ ID NO: 95249 - DNA, 5204 bp, Oryza sativa
  Clone ID: PAT_MRT4530_93462C.1
atgtgggacccacatgtcggacccatcttcctcctccagccgccggccaagccgagccgagccggccgccgcgccgcgcgtgtcaagccgccgccgccgccggccatcctccggtcgcgccgcgccgccgcgtctgccgtcgccgccgcttgccgccgccgccaagaggtgcgccgtggagtgaggaagcccggccgcccgtccttcttcgccgccggccaccgtagagccgtcgccgccgttcaaccgagccgccgccgcctcttgcgtcatcgccggccgtcgtccgtcgccgttcgtcgcgttgcgcgcctggagctggagccggaggtggtgcgccaggagccggtgccgtgaacaacaacaccaacggaggcaattctgcctcacaatctagcggagggccattctcgggctttgtcgtgaatgaagctgacaaatgtgtgtactatcgctatggtgggggagaaggagtgatcttgtgcttatatgtcgatgacatattgatctttgagaccagcctcaatgtgattgaggaggtcaaggactatctgtccaagagttttgaaataaaggatttgggagaggctgatgttattcttaacatcaaactacaaagaggagatgagggtgggattacacttgtgcaatcccactatgtggacaaggttttgagtcgctttggatatagtgactgcaagccagctcctactccttatgatcccagtgtgctattaaggaaaaaccgaagaatagcaagggatcaactgagatactctcaaatcattggttcattgatatacttggctagtgcaacaaggcctgacatctcatttgctgtaagcaagctgagccggtttgtctcaaatccgggagatgatcattggcaggctctggaaagagtaatgcgctatctaaagggcactatgagctatggaattcactataccggttatccaaaagtactagaagggtatagtgactcaaactggatatctgatgctgatgagataaaagccacaagtggatatgtgtttacccttggaggtggcgctgtttcctggaagtcttgcaagcagaccatcttaacgaggtcaacaatggaagcagaacttacagcactagatactgcgacagttgaggccgagtggcttcgtgaactcctgatggatttgccggtggttgaaaaaccagtgccagctatccgccactgctggcggaggtggtacgccgccgagcaggagctggatccggagctggtgcgccaggaggtgccgtgaaacgacaacaacaacggaggcaattctgccacaccatccagcggagggccattctcggggtataatcttctcctcctgctactgttgttagcgctattcctgttccctttgttagcgctatcgctatactatgtgcgctatgttcttgttcctgttctacatgatgcctctagcatgttatcgcattactggtatgttcctgttcctgacattcatgatgcgcatagtatgctactggttatgttaagatcaccctacactgcttatgccatgatcattgtttcaatttcttggattaaaatatgccgattaatgactatatttccaacaatccaaaaacctgataggtcattttcggtagttggctttgctgctgcactgaaaccacatgcttttgatggttcaaactataagagatggaaagcacgtgcactattgtggttgacagcgatgcagtgcttctatgtttcacggggcaaacgaagtgaaccacctctttctcctgaggaagaggctaagttcgaggcttcggattgcctgttccgtggagcattgatcagtgtactcgctgacaacatagtggacgtgtacatgcacatgccttctgggaaggacatgtgggatgcacttgaggccaagttcggagtttctgacgccggcagtgagctgtatgtcatggagcagttctatgactacaagatggtcgataaccgttctgtagtagaacaagctcatgagattcagatgctggctaaagaacttgagaacaacaactgtgagttgccggacaagtttgtggcgggtggcattattgccaaactaccaccttcttggtcggactttgccacttctctaaagcacaagagacaagagttcagtgtttctgatctcattggctctttgggtgttgaggagaaggcgagggcaaaggacgtgcggggcaaaaaggttgagggatgttctagtgccaatatggttgggagaggttcctccttgttgatgggaaacgggtcgcttgcggctgttcatggtgttggtacggtcgatctgaagtttacttcgggaaagaccgtgcagctgaagaacgtgcagcatgtcccttcaataaagaagaatctagttagcggctctctattgtgtagagaaggttttagacttgtgtttgagtccaataaatgtgtcgtttctaaatatgggacttttgttggaaaaggttatgacagcggaggcttgttccgcttttctttgaatgacatgtgtaataatcataatgctgtgaaccatattagcgagaatgatgagtcaaatgtgtggcattcgcgactctgtcatgtgaatttcggttgtatgacgcgcttagctaacatgagtttaattccaaaattcactttggtcaaaggttccaagtgccatacttgtgttcaatcgaaacaacctcgcaagcctcacaaggcgtctgaggcgaggaatttggcacctctagaacttgttcattccgatttgtgcgaaatgaacggcgtgttgactaaagggggaaagaaatatttcatgacactgatagatgattgtactagattttgctatgtgtatctattgaaaacaaaggatgaggcattgcattactttaaaatctataaagctgaggtagaaaaccaacttgaaaggaaaatcaaacggttgaggtctgatagaggtggggagtatttttccaatgagtttgcatccttttgcgaagagtttggaattattcatgagatgacgcctccctattcaccccaatcaaatggggtggccgaaagaaagaaccgtactctaactgagatggtgaatgccatgttagacactgcggggctttccaaggaatggtggggtgaggcagttttgactgcgtgtcatgtcctgaataaaattccaatgaagcataaggaagtaacaccattcgaggaatgggaaaggaagaagttaaatctctcatacctacgaacatggggctgtttggccaaggtaaatgtacctatagccaaaaagtggaaacttggaccaaaaactgttgattgtgtgtttcttggttatgctatccacagtgtgggttatagattcttaatagtaaactctggagtacccgacatgcatgctggtacaattcttgagtccagagatgctacattctttgagaatgaatttcctatgaaatatacacctagcacttctagtaaagaaactgtcatgccccatgagcactttgcaccgatagaacacaatgatcaaacgcctgaggaaaatcctgaggaggacaacattgtagatactcgcaagagtaagagacaaagggttgcaaaatcctttggagatgactacattgtatacctcgtggatgacaccccaagaaccatagaagaggcatattcatctcttgacgctgactactggaaggaagcagtacgcagtgaaatggactcgattatgtctaatggtacttgggaagtcgttgagcgtccatatgggtgcaagcccgtaggatgcaaatgggttttcaagaaaaagcttaggcctgatggtacaatcgaaaagtacaaggcaaggcttgtggccaagggttatacccaaaaggaaggcgaggacttcttcgacacatactcaccagttgctcgcttgaccacgattcgagtactacttgctctggcagcctctcatggtcttctcgtccatcagatggacgttaagacagctttcctaaacggagagctggaggaggagatctatatggatcaaccagacgggtatgtactagaaggtcaggagggaatggtgtgtaaactattgaaatccttgtatggcctcaagcaagcacctaagcaatggcatgagaagtttgacaccacgcttacatctgcaggctttgttgtgaacgaagctgacaaatgtgtatactatcgctatggtgggggagaaggggtgatcttgtgcttatatgtcaatgacatactgatctttgggaccagccttaatgtgattgaggaggtcaaagactatctgtccaagagttttgaaatgaaggatttgggagaggctgatgttattcttaacatcaaactacaaagagaagatgaggatgggattacacttgtgcaatcccactatgtggacaaggttttaagtcgctttggatatagtgactgcaagccagctcctactccttatgatcccagcgtgctattaaggaaaaaccaaagaatagcaagggatcaactgagatactctcaaatcattggttcattgatgtacttggctagcgcaacgaggcctgacatctcatttgctgtaagcaagctgagccggtttgtctcaaatccgggagatgatcattggcaggctctggaaagagtaatgcgctatctaaagggcactatgagctatggaattcactataccgggtatccaaaagtactagaagggtatagtgactcaaactggatatctgatgctgatgagataaaagccacaagtggatatgtgttcacacttggaggtggcgctgtttcctggaagtcttgcaagcagaccatcttaacgaggtcaacaatggaagcagaacttacagcactagatactgcgacagttgaggccgagtggcttcgtgaactcctgatggatttgccggtggttgaaaaaccagtgccagctatcctaatgaactgcgataatcaaacaatgattattaaagtgaacagttcaaaggacaacatgaagtcatctagacaaatcaagagaagactgaaatctgtcagaaagcagaaaaactccggagtgatagcattggactatgtccaaaaggctagaaatctggcagatcagtttaccaaggggctaccacgtaatgtgattgacagtgcatcgagggaaatgggcttgatacccacctaa

SEQ ID NO: 95250 - DNA, 1278 bp, Oryza sativa
  Clone ID: PAT_MRT4530_93463C.1
atggcggagatggtgcgccacctggagctgctgctggaggtggtgcaccaggagctggagccggtgccgcgaacaacaacaccaacggaggcagttctgcctcacaatccagcggagggccattctcaggcgatgcaatgcttctatgtttcacggggcaaacgaagtgaaccacctctttctcctgaggaagaggctaagttcgaggcttcggattatctgttccgtggagcattgatcagtgtacttactgacaacatagtggacgtgtatatgcacatgccttctgggaaggacatgtgggatgcacttgaggccaagttcggagtttctgacgccggcagtgagctgtatgtcatagagcagttctatgactacaagatggagaaggcgagggcaaaggacgtccggggcaaaaaggttgagggaggttctagtgccaatatggtacagaagaagaaccctcatgcatcccgcaacaacaagaaagtcaagcctgatgtcaaacctaaggctgcaaccaactttaagaagaaaggcaagggaaaggcaaagggagactgctttgtgtgtggcaagtctgggcattgggccaaggactgtcctgagcgcaaagacaggaagtctgccaacatggtcattagcgagggcggaggaacatcggggtacgaacacaatgatcaaacgcctgaggaaaatcctgaggaggacaacattgtagatactcgcaagagtaagagacaaagggttgcaaaatcctttggagatgactacattgtatacctcgtggatgacaccccaagaaccatagaagagacatattcatctcctgacgctgactactggaaggaagcagtacacagtgaaatggactcgatgatgtctaatggtacttgggaagtcgttgagcgtccatatgggtgcaagcccgtaggatgcaaatgggttttcaagaaaaagcttaggcctgatggtacaattgaaaagtacaaggcaagacttgtggccaaggcctctcatgatcttctcgtccatcagatggacgttaagacagctttcctaaacggagagctggaggaggagatctatatggatcaaccagacagcctcaatgtgattgaggaggtcaaggactatctgtccaagagttttgaaatgaaggatttgggagaggctgatgttattcttaacatcaaactacaaagaggatatgaggaccatcttaacgaggtcaacaatggaagcagaacttacagcactagatactgcgacagttga

SEQ ID NO: 95251 - DNA, 1799 bp, Oryza sativa
  Clone ID: PAT_MRT4530_93464C.1
ctgtctctcgtcgcgatctcgccgaaaccctagccaaaacccccgtgggggaggggatcggagagatgctgcacgagctcctcctcgcgctgctcggcttcaccggcgacttcgtcctcgacgccgcctcctccccgtcggccacccgccgccgccgccctgttcccccggaggccgccgccggcggcgacgtgggccccgcctccttccgcctcgcccccgacctcaccttcctgcagccgtccgagaggagtgctattgaaaggctcatatccttgggcttttactacagagaactaaatcgctttgcaactgagtctcgtgacctgagttggatcaattctcctatagatgtttcaccaactcatggtgagaaaactgtgaaggctaaagtgagaaaagggagtgcatacaggagagcgattgccaatggtattgctgagattttgtcagtttatagatcagctgttctgcaggttgagcaaaacctgttgtcagatcctttgcctatcctggcaacggtaactcatgggctaaataagtttgaagttctcctgcctccgctccatgaacttgttatggaaattgagcagaaagacatcaaaggaggacaacttcttaaccttttgcataaacgatgccattgtggtgttccagaactgcaaagctgtattcaaagacaggaagacagggacaaggagaatgattcatctcaggtggacgttgctgataagtttacgcagaaatcagctaaagagacatccctgactagttggcacacaggatttcatgtatctttggatatgctacctgagtatatccacatgcgagttgcagaatcgatcctctttgctggcaaagcaataagggttcttcgaaatcctagtcctggtgctaccttgcaggaatccatgaaccaaagtcagaatgtgaaaggatcttatagaatgcaaagtctcataggaggttcaggtgctctaaaagagctaccaaacttccctaacataagtgcagaagaattgttgccacaggctgaagcagataaaattgatgccatgctcaaggagctaaagcattcttcagaatttcataaaaggctgtttgagtctgctgtcggctcaatacgaacaatggcagctaataatctctggcagctagtggttgtacgtgctgatcttaatggtcacttgaaggcattgaaagattattttcttttagcgaaaggtgattttttccaggctgcactgaagactataggtgatgaggacaaatattttgctagagtctcattaagaatgtcatcgtttggtataaaagctagtacctcacagaaagatctacaaaagtccagtactcctgagatttcctcgcaaggaaaggctacctcagaattggcacttgatgggtgggatagtattgctctggaatattctgttgattggcccctgcagcttttctttactcctgatgttgtgtccaagtatcgcaaggttttccagtatctcatccgattgaagaggacacaaatggaacttgagaaatcctgggcagctgtaatgcatcaagaccatgctgatttttctgattattgcaaggatcggaaaaatggcgatgcaacacaactgcgccggcaacgctctaagccattttggcgggtaagggagcacatggctttcctgatcagaaacctacagttttatattcaggttgatgtaattgagtcacagtggaatgttttacaagctcacgtgcaagattcacatgatttcacagaactagtgacctttcatcaagagtaa

SEQ ID NO: 95252 - DNA, 2104 bp, Oryza sativa
  Clone ID: PAT_MRT4530_93465C.1
atgtcgataaccggcgacaacaacaacactggagacaaggagaaggagcctcccgtcaacagcaacagaggcaatactacctcaaactccagcaaatggccattctcgggtgtgctccccgatagtattgtggatgtgtatatgcacatgcctttagggaaggacatgtgggatgctcttgaggccaagttcggggtttccgacgccggcagcgatctgtatgtcatggagctgttctatgactacaagatggtcgatggccgttctgtattggaacaggatcatgagattcagatgttggcaaaggaacttgagaacaacaactgtgagttgtcggacaagtttgtggcaggtggcattattgccaaattgccaccttcttggacggactttgctacttctctaaaacacaagaggcaagagttcagtgttactgatcttattggctctttgggtgttgaggagaaggcgagggcaaaggacaaccggggcaaaaagatcgagggaggttctagcgccaatttggtgcagaagaagaaccctcacgcatctcacaacaacaacaagaaagtcaagcctgatgtcaaaccaaaggcaactaccaattttaagaagaaaggcaagcgaaaggccaaaggcgtctgctttgtgtgcggtaagcctgggcattgggccaagaattgtccttatcgcaaggacaagaagtctgccaacatggtcattagcgagggcggaggaacattggggttcttaatagtaaattctggagtacccgacatgagtgttggtacaattactgagtccagagatgccacattttttgagaatgaattttctatgaaaaatgcacctagcacttctagtcaagaacctattttatcccctgagcactttgcgctgatagaacacattgatcaaacacttgaggaaaatcctgaggaggataacattttagcaactcgaaagagtaagagacaaaggactgcaaagtcttttggagatgactacattgtatatcttgtggatgatactccaagaaccattgaagaggcatattcatcttctgacgctgactattggaaggaagcgatacgcagtgagatggactcaattatgtctaatggtacttgggaagtcgtcgagcgtccatatgggtgcaagcctgtaggatgcaaatgggttttcaagaaaaagcttaggcttgatggtacaattgaaaagtacaaggcaaggcttgtggccaaggggacaatgagctatggaattcactacgccgggtacccaaaagtgctggagggctatagtgattcaaactggatatctgatgctgatgagataaaggctacaagtggcgggcgactccattccacaggcatccttgacggcagcgacgaaaccaacctcttcgagacatcttcaactgagaaggacttcaactctggcaacgggcagcccccctttcgtgccgcggtgaatccggaagctgatcaaccggacaccccggccgacccaactccatcacgcccaccctcgccaccggtgcctaggaaagggtcgagctatacctcagatcaagcagttacccactcccgcttgtggccgaccgaccgaccaaggcgaggcggcggcgaggcacggccaccgacggcggtgaccggcggtgcgggaagcggcggcgacggccgaaaggcggcggcgcatggccggagcagcggcgtcgcgggaaggccgaagcggaagacgaaggcggcgacgacgacccgacgagaggaagggcggacgagcggcggcgacacctagaggaggggaggagatgagttagggatggagaggacgaccgcgacgaccaaagtggccggccggagacggaggggaatggatagctcaccggctcgtgagggagatggggttccggtggggttccggcgacgcgaggcggtggccgagatggcccacacagcggcggagctagcggcggcggcggcttggcgcggcggcagccctagcggcgacggcacgcggccggagatgggcggcggcggcggagctcggcgagcgcggcgcgacggcggtagagggcgtgggagaggacggtgaatggggg

SEQ ID NO: 95253 - DNA, 2100 bp, Oryza sativa
  Clone ID: PAT_MRT4530_93466C.1
atgccccgctgcgacgtttgcacggacgggcgagcgatcaggattttagggagcgcaaggcgtgactgctcactgttcgtttgcttcatcttcttcttggtaccgtcagtgagagcaaggactgcatccacaatagcaaccaatggcgagaaaggtggcaccgatggagcggagaacatcaacaccaacggtggcaactacaacaataatgcctcatcctcaggagcgttctctaggtcgagggaggttctagcgccaatttggtgtagaagaagaaccctcatgcatcccacaacaacaacaacaatgtcaaacctgacatcaaacccaaggctacaaccaattttaagaagaaaggcaagagaaaggcaaagggcaactgctttgtgtgtggtcgggagatgttcctccttgttgatgggaaacagatcgcttgtggctgttcatggtgttggtatggtcgatctgaagtttacttcgggaaggaccgtgcagctgaagaacgatgaagcattgcattactttaagatctataaggttgaggcagaaaaccaactggaaaggaaaatcaaacggttgaggtctgatagggatgaagagtatttttccaatgaatttagttctttctacgaagagtttggaattattcatgagaggacgccttcctgttcaccccagtcaaacggggtggccgaaagaaagaaccgcactctaactgagatggtgaatgccatgttagacactgcgggactttccaaggaatggtggggtgaggcaattttgactgcatgtcatgtcctgaataaaattccaatcaagtataaggaagtaacaccattggaggaatgtgaaaagaagaaattaaatctcacatacctacgcacatggggctgtttggccaagaatgaatttcctatgaaaaaagcacctagcacttctagtcaagaacctatttcatcccctgagcactttacaccgatagaacacattgatcaaatgtttgagggaaatcttgaggaggaaaacattgtagatactcgaaagagtaaaagacaaaggactgcaaagtcctttggtgataactacattgtatacctcgtggatgacactccaagaaccatagaagaggcatattcatctcctgacgctgactattggaaggaagtgatggatgttaagacagctttcctcaatggagagttggaggagaagatctatatggatcaaccagatgggtatgtactagaaggtcaagagggaatggtgtgtaggctgctgaagtccttgtatggccttaaacaagcacctaagcagtggcatgagaagtttgacaaaacacttacatctgttggctttgttgtgaacgaaactgacaaatgtgtgtactatcgctatggtgggggagagggagtgatcttgtgtttatatgtcgatgacatattaatctttgggactagcctcaatgtgattgaggaggtcaaggactttctgtccaaaagctttgaaatgaaggatttgggagtggctgatgttattattaacattaagctattgagaggagatgatggtgggattacacttgtgcagtctcactatgtagacaaggtcttgagtcgctttgattatagtgactgcaagccagctcctactccttatgatcccaggacagtgagctatggaattcactatgccgggtacccaatagtactggagggctatagtgattcaaattggatatctgatgctgatgagataaaggccacaagtggatatgtattcacacttggaggtggcgctgtttcatggaagtcttgcaagcataccatcttaatgaggtcaacaatgcaagtagaactcatagctttagatactgccactgttgaggccgagtggctttgtgagctcctaatggatttgccagtttttgaaaaaccactactagctatcttgataaactgtgataatcaaacggtgattattaaggtgaacaattcgaaggacaacatgaagtcatctaggcatgtaaagagaagactgaaatcctgtcagaaagttgaaaaacttcggagtgatagcattggattatgtctagacggctaa

SEQ ID NO: 95254 - DNA, 1437 bp, Oryza sativa
  Clone ID: PAT_MRT4530_93467C.1
atggcgcatcgagagctggtgcacagaacaacaacaccaacggaggcagttatgcctcacaatccagcggagggactttcacaggcgatgcaatgtttctatgtttcacggggcaaacgaagtgaaccacctgtctctcctgaggaagaggttaagttcgaggcttcggattgcctgttccgtggagcattgatcagtgtactcgctgacaatatagtggacgtgtatatgcacatgccttcagggaaggacatgtgggatgcacttgaggccaagttcggagtttctgacgccggcagtgagctgtatgtcatggagcaattctatgactacaagatggtcgatgaccgttctgtagtagaacaagctcatgagattcagatgctggctaaggaacttgagaacaacaactgtgagttgccggacaagtttgtggtgggtggtattattgccaaattgccaccttggtcggactttgccacttttctaaagcacaagagacaagagttcagtgtttctgatctcattggctttttgggtgttgaagagaaggctagggcaaaggacaaccggggcaaaaaggttgagggaggttctagtgccattatggtacagaagaaccctcatgcatcccacaacaacaaaaaagtcatgcctgatgtcaaacccaaggctacaaccaattttaagaagaaaggcaagggaaaggcaaagggagactgcttcgtgtgtggcaagtctaggcattgggccaagtactgtcctgagcgcaaagacataaagtctgccaacatggtcattagcgagggcggaggaacatcggggtacggtcgggagaggttcctccttgttcatggtgttggtacggtcgatctgaagtttacttcgggaaagaccgtgcagctgaagaacgtgcagcatgtcccttcaataaagaagaatctagttagcggctctctactcatgggttatagattcttaatagtaaattctagagtacccgacatgcgtgttggtacaattattgagtccagagatgctacattctttgagaatgaatttcccatgaaaaatacacctagcacttctagtcaaaaaactgtcataccccatgagcactttgcaccgatagaacacaatgatcaaacgcttgagggaaatcctgaggaggataacattgtagatactcgtaagagtaagagacaaagggttgcaaaatcctttggagatgactacattgtatacctcgtggatgacactccaagaaccatagaagaggcatattcatctcctgacgctgactactggaaggaagcagtacgcacctctcatggtcttctcgttcatcagatggacgttaagacagctgtcctaaacggagagctggaggaggagatctatatggatcaaccagacgggtatgtactagaaggttag

SEQ ID NO: 95255 - DNA, 753 bp, Oryza sativa
  Clone ID: PAT_MRT4530_93468C.1
tcagtccagtttcaaaggcatcaagccatcaaaggcatctttgtctctaagaatcaagtggatcgatggagccacttactactacaaagtacaaacaattaattctcctacttaatctacatttcaatccaagcactgttaagttgacataatgaaatgtacacactgcactgttctatctattcatctttgctacaagatgatactatctattttctgattatactaaaattcgtgaaccatttccattattacaaattaagttgtactcctaaaatgcagaatttcagaatttccccctgattttgtaaagggttatctatctatgctaatttgaataatcagtagattaattagatggtccaaagggaggcttatagtcaagatcctcggatggcggcggcatcgacaatgacgacgacgacgacgatcgcccagctgtcgtcgttagtccggcagaaaccgcggcgtggaagtcgtactccaggtcgccgctctgcagtatgtgcgcgtagctgctgaggtcggggaactcctcccgcggcggagcggcgacggcggcggctgcgggcgccggtgtggtgctctggccgccggcgaggctgaagtgtggcctcagatgcgccggcaccggcagcggcggcagtgacgttggggggtggtgttgatgatggcgtggcagctggacggcggcgatgctggcgccggcgacttcgtcggggaagttgaccttggccttggagcccttgaagc

SEQ ID NO: 95256 - DNA, 660 bp, Oryza sativa
  Clone ID: PAT_MRT4530_93469C.1
atgtctgcgcctggagccggagctgccgccggcgccgctgctgcctctggagatggcgcgccaggagccggagccgttgcgaacgtcaacaccaacagaggcaattctgcctcacaattcagcggagggccattctcgggtcatgctagtcgcaagtcaattgcgtccttggtatgggtcattttcggtagtggctttgctgctgcactgaaaccacatgcttttgatggttctaactataagaggtggaaagcacgtgcactattgtggttgacagcgatgcaatgcttctatgtttcacggggcaaacgaagtgaaccacctctttctcctgaggaagaggctaaattcaaggcttcggattgcctgttccgtggagcattgatcagtgtactcgctgacaatatagtggacgtgtacatgcacatgcctttcgggaaggacatgtgggatgcacttgaggccaagttcggagtttccgacgccggcagtgagctgtatgtcatggagcagttttatgactacaagatggtcgatgaccgttctgtagtagaacaagctcatgagattcagatgctgactaaggaacttgagaacaacaactgtgagggggatcctctagagtcgacctgcaggcatgcaagcttgagtattctatag

SEQ ID NO: 95257 - DNA, 616 bp, Oryza sativa
  unsure (1)..(616): unsure at all n locations
  Clone ID: PAT_MRT4530_9346C.1
ctgaaggtggttactggagcaaccaattgttgataacgcaagattcctctgagtggccccaattctgttgtttgggagacgcctttgttgttcatgagactttgaagatgatttggggaagggtggccntgagctttagtgctccagtgactggataatggctggtgggcagactntgcatgcnggtggttgttggggctgaccccgttgtaaggtcagctggcaagtgtgctagctgaagtggtctagttatcgcatcccatgtgcaccctttgttggtcatcgtgcgagcctgagggcagtgcgttgctgtggtgatgcaccactgggatgtgtgcgcaacactggggatggccttgaaatgagtgatgctggttgatgcgtgtgcgtgctgcacagtgatatgaaaaatgttgagttggagccaatgaacgtggtgccgtgcacatgcccctggttgctgccacccctggtngccaaacctgatgaaattgtggaaaacactggagctggttgctgggtatacacacgcataaaaaaaaccctgtgttaaacataacaaccttgttctggctgtactttcgtgcttctgatctaaaaaaaaaaaaaaaaaaaa

SEQ ID NO: 95258 - DNA, 2160 bp, Oryza sativa
  Clone ID: PAT_MRT4530_93470C.1
gcctccgaaaccacgtgctgctgcgacgtttgcacggacgggcgggctatcaggtttttggggagcgcaacgcgcgactactcattgttcgtcaacatctacttcaccttcaccaatatatcgaacactggagacaacggcaacactggatacaaggagaaggaggctcccgtcaacaccaacggaggcaatactgcctcaaactccagcggaggaccattcttgggtgtactcgctgacaatatagtggacgtgtacatgcacatgccttcagggaaggacatgtgggatgcacttgaggccaagttcggagtttccgacgccggcagcgagctgtatatgctggcaaagaaacttgagaacaacaactgtgagttgccggacaagtttgtggcgggtggcattattgccaaattgccaccttcttggttggactttgctacttctctaaaacacaagaggcaagagttcagtgttactgatctcattggctctttgggtgttgaggagaaggcgagagcaaaggacaaccggggcaaaaatatcgagggaggttctagcaccaatttggtgcaacagaagaaccctcacgcatcccacaacaacaacaacaacaagaaagtcaagcctgatgtcaaaccaaaggctacaaccaattttaagaagaaaggcaagggaaaggccaagggcgactgctttgtgtgcggtaagcctgggcattgggcgaagaattgtcctgatcgcaaggacaagaagtctgccaacatggttattagcgagagcggaggaacatcgggcctcaatgtgattgaggaggttaaggactttttgtccaaaagctttgaaatgaaggatttgggagtggctgatgttgttcttaacattaagctactgagaggagatgagggtgggattacacttgtgcaatctcactatgtggacaaggttttgagtcgctttggttatagtgactgcaagccagctccaactccttatgactccagtgtgctattaaggaaaaaccgaagaatagcaagggatcaattgagatactcccaaatcattggttcattgatgtacttggctagtgcaacgaggcctgacatctcatttgctgtgagcaagctgagccggtttgtttcaaatccgggagatgatcattggcaagctctggaaagggtcatgcgctatctaaagggtacaatgagctatgaaattcactatactggttacccaaaagtactggaagggtatagtgactcaaactggatatctgatgctgatgagataaaggccacaagtagatatgtgttcacacttggaggtggcgctgtttcctggaagtcttgcaagcagaccatcttaacgaggtcaacaatggaagcagaactcacagcactagatactgccacagttgaggccgagtggcttcgtgaactcctgatggatttgccggtggttgaaaaaccagtgccagctatcctaatgaactgtgataatcaaatagtgattattaaggcctccgaaactacgcgctgctgcgacgtttgcacggacgggcgggctatcaggtttttggggagcgcaacgcgcgactactcactgttcgtcaacatctacttcatcttcaccaatatgtcgaacactggagacaacggcaacactggatacaaggagaaggaggctcccgtcaacaccaacggaggcaatactgcctcaaactccagcggaggaccattcttgggtcacgcgcatcgcctcctcacccctgccagcgaggcgcccaccaccaacccacatacccacccccgcgaggggggaaaggaaggagaaagcctcccgcccccctcgccgccggcgaacgcgacggcgggcgcgtcaccacatgccgatatcctccggcatactcgcgccgacgcggggggcctcctcgtcgtcgtccgcggtggggaggaagctcctcctcctcggggctcgtcatcctccctcgtccgtggcggtggcgggtcgtggcgtctggcgaagggggcttgccggggtcggggtggcggcggcggcggcgtcgtcgtcttcgcccgacgagcttcacgcgcgcgggaggcccctccgcggcggcgcctacgaggagccttttgcaaatactcgattgagcagcagtag

SEQ ID NO: 95259 - DNA, 470 bp, Oryza sativa
  Clone ID: PAT_MRT4530_93471C.1
tctcgactggtttataattaaacactggctcatttctttgaagctttttttttaaggatctggttttccctctagtagttctgagctgatgaaaagtttctatagcgggttactgagagaattacagtcattgtgctaccatgagaataaatacaataacagagtaacaaccatgagaatatgttcaagaactaatggattctaaaatttgaaaggtgcttaaaatgttttcttgacactattcatgatgagaattaaacggttaatcaagtaagacatgggacgataacaactactacctaatcctgtaaatctacagaatctccatgcttttcagttgctttttatgcacccacaatatagttttcagttgcatgttatcattggaggatgtagaatactcatgcatgcacaattttttataatatggggccacatatattatcttttaatttcttgtatcacatcct

SEQ ID NO: 95260 - DNA, 3048 bp, Oryza sativa
  Clone ID: PAT_MRT4530_93472C.1
atggaccatgttgtttatctaagtgctgataagctgctcaccgaacagtttgctgacaatgttgctatggcaagaccttcggatatcagggctgttcttgcgtcctatcaaggccgtgatatacctgctgagtttattgagcgttcaaaggagcaccagagagcctcgctcccggctagcactgccagaacgaatacaagtggacgctcgcccgaccaaccagaagcagagcccgtgcagattgtggcggcgatgcggcctcgtgcttttgctcccccttgcctgccgggcagtggcccgctgcctggcctggcggtccccgggcgcggcgacctcttcccggctgccggcagcgtcgtcggcaggagggccgctcccgctcccgccggccggggcgccgtcgctcgcgcagtggacgggccgtccgccgctgcggccgttgccgccgcggcggcgtccgccgcggcggacgtcccgcccccgcagatcacgtggcagatcgtcgtcggcgctgtagctggagtgactcccttcgtcgtcgccggggtcgagttcggcaagagaattattgcacagaagaaatgtgaaatctgtggaggctctgggcttgtgatgaagaaggattactacgttcgctgccaaggtcgttcacggcacctcctcctggcgcaccagctccggatccagctcctgtcggcgtcggcggcggcgcagctcctgtcggcggcggcgcaccaccgccgccattttgaggtgggggtcggaatgccacacgcgcgcgcgcgcgccgggccgtgggcgtggccgaggcgtggcgtggctggcggcgggcgggtgtcacgtcgctatccttttgcagccactaacccacgttcccacgattccctccgcaacaacgcgtccacgttctttctcctgatagataaggaggccgcgagtttttggggagtgcctcctgcacgactgctcatcgccatgtctggagttgctgccgccgctattggcggaggtggtgcgccgccgccgacaggagctgcgccgccgccgacgccgacaggagctggatccggagctgcgatgcagtgcttctatgtttcacggggtaaacgaagtgaaccacctctttctcctgaggaagaggctaagttcgaggcttcggattgcctgttccgtggagcattgatcagtgtactcactgacaacatagtggacgtgtacatgcacatgccttctgggaaggacatgtgggatgcacttgaggccaagttcggagtttctgacgccggtagtgagctgtatgtcatggagcagttctatgactacaagatggtcgatgaccgttctgtagtagaacaagctcatgagattcagatgctggctaaggaacttgagaacaacaactgtgagttgccggacaagtttgtggcgggtggcattattgccaaactaccaccttcttggtcggactttgccacttctctaaagcacaagagacaagagttcagtgttcctgatctcattggctctttgggtgttgaggagaaggtgagggcaaaggacgtccggggcaaaaaggttgagggaggttctagtgccaatatggtacagaagaagaaccctcatgcatcccacaacaacaagaaagtcaagcctgatgtcaaacccaaggctgcaaccaattttaagaagaaaggcaagggaaaggcaaagggagactgctttgtgtgtggcaagtctgggcattgggccaaggactgtcctgagcgcaaagacatgaagtctgccaacatgatcattagcgagggcggaggaacatcggggtacggtcgggagaggttcctccttgttgatgggaaacgggtcgcttgcggctgttcatgtgtgggttatagattcttaatagtaaactctggagtacccgacatgcatgctggtacaatttttgagtccagagatgctactttctttgagaatgaatttcctatgaaatatacacctagcacttctagtaaagaaactgtcatgccccatgagcactttgcaccgatagaacacaatgatcaaacgcctgaggaaaatcctgaggaggacaacattgtagatactcgcaagagtaagagacaaagggttgcaaaatcctttggagatgactacattgtatacctcgtggatgacaccccaagaaccatagaagaggcatattcatctcctgacgctgactactggaaggaagcagtacgcagtgaaatggactcgattatgtctaatggtacttgggaagtcgttgagcgtccatatggatgtaagcccgtaggatgcaaatgggttttcaagaaaaagcttaggcctgatggtacaatcgaaaagtataaggcaaggcttgtggccaagggttatacccaaaaggaaggcgaggatttcttcgacacatattcaccagttgctcgcttgactacgattcgagtactacttgctctggcagcctctcatggtcttctcgtccatcagatggacgttaagacaactttcctaaacggagagctggaggaggagatctatatggatcaaccagacgggtatgtactagaaggtcaggagggaatggtgtgtaaactattgaaatccttgtatggcctcaagcaagcacctaagcaatggcatgagaagtttgacaccacgcttacatctgcaggctttgttgtgaacgaagctgacaaatgtgtatactatcgctatggtgggggagaaggggtgatcttatgcttgtatgtcgatgacatactgatctttgggaccagccttaatgtgattgaggaggtcaaagactatctgtccaagagttttgaaatgaaggatttgggagaggctgatgttattcttaacatcaaactacaaagaggagatgagggtgggattacacttgtgcaatcccactatgtggacaaggatggcttatgtcttaatgtgatccgagtggcttttccaagcagagatgttgacctgcagaacatctcagaaggaacacacctatatgagttcgactgctag

SEQ ID NO: 95261 - DNA, 954 bp, Oryza sativa
  Clone ID: PAT_MRT4530_93473C.1
atggcaattacactgcaagatgtatccatgcttataaggatgccacttgcaggacaggcaattgtcctccctgacccactagtggattggagggatgatatcattggaagatatgcttgcattgttccagaggatgatagcgacataaaatgttttttctctgaagatgaggcgcgcggccctacgttacactggctcagccagttcgaggttggttacatgaaagacgacacggaaaattaccatgtggaattgcatttggaggcgtaccttctatggcattttggatgggttatgttcacaagtggacacagaaacacagtggatgcaagaatgattaacttagcaaggtttattgcgcagggcaacatacaaagctttccccagtggagttggggatcaacagttttggctgcaacttaccgaggtctttgtgaagcatgcacaaagacaagctttaagcagcctgtgtttactggttgtccattgttgccacagtgggcgaatgttcaggttcgaagtgcgtacgaatacttcactgaagtgttcgatctacttaaggaggataacgttcagtggtgtccgtacaccaacgaggagacacaacgccgtgcccctactggcctcaatacactctgcctgtgtgactcgtcttactggctgacgaaaaagatgcttctgtacgatatagcagttgaggcgtacagtccgcagcatgtaatgaggcaatttggcctttaccaagaagtgccagtcccacttggtgaaacggtcccccccaagatacacttgcaaaataggaaggcagatgctagcgtgcggcgaaatatttttgctaagatgacaccttgggtcgaacaatggtcgagggcaacactcgacattgttaacgaatccagaccgtacgaccgttgtcctatgcataatgccctctacaatagctgtcaaaggtag

SEQ ID NO: 95262 - DNA, 2388 bp, Oryza sativa
  Clone ID: PAT_MRT4530_93474C.1
atgcaatgcttctatatttcacggaaaaaacgaagtgaactgcctctctctcctgaggaggaggctaggttcgaggattcggattgcctgttccgtggaacattgatcagtatacttgctgacaatatagtggacgtgtacatgcacatgccttcggggaaggtcatgtggaatgcatttgaggccaagttcggagtttccgacaccagcagcgagctgtatgtcatggagcagttctatgactatgagatggtcgattaccgagaaggcgagagcaaaggacaacagggcaaaaatatcgagggaggttctagcgccaatttggtgcaaaagaagaaccctcacgcatcccacaacaacaacaacaagaaagtcaagcctgatgtcaaaccaaaggctactaccaattttaaggataaaggcaagggaaaggccaagggcgactgctttgtgtgcggtaagcctaggcattgggccaagaattgtcctaatcgcaaggacaagaagtctgccaacatggttattagcgagggcggaggaacatcggggtatggtaaatttttacctacaattctctctgtttttcattcacctgattggtgggttgatactggtgctaatattcatgtgtgtgctgatatttccatgttttcttcttatcaagtcgggagagattcctccttgttgatgggaaacgggtcgcttgcggttgttcatggtgttggtatggtcgatttgaagtttacttcgggaaagaccgtgcagctaaagaacgtgcagcatgtccctttaataaagaagaatctagttagcagctctctactgtgtagagatgcttttagacttgtgtttgaatccaataaatgtgccgtatctaaatatggaacttttattggaaaaggttatgtcagcggagttctgttccgtttttctttggatgacatgcgtaataataataatgatgtgaaccatattagcgagaatgatgagttcaatgtgtggcattcgcgactttgtcatatgaatttcggttgtatgacacgcttggctaatatgagtttaattgcaaaattcactttagtaaaaggttctaagtgccatacttgtgttcaatcgaaacaacctcgcaaacctcacaatgcatctgaggcgaggaatttggcacccctagaacttgttcatttcgatctgtgtgaaatgaacggcgtgttgagtaaagagggaaagaaatatttcatgacactgatagatgattgcactagattttgctatgtgtacctattgaaaccaaaggatgaagcattgtattactttaagatctataaagctgaggaatggtggggtgaggcaattttgactacttttcatgtcctgaataaaattccagtgaagcataagaaagtagcaccgttcaaggaatgggaaaggaagaaactaaatctctcatacctacgcacatggggctgtttggccaagaacacagtaatcaaacgcctgaggaaaatcctgaggaggataacattgtatactcgaaagagtaagagacaaagggttgcaaaatcctttggagatgactacattgtatacctcgtggatgacactccaagaactatagaagaggcatattcatctcctgacgctgactattggaaggaagcggtacgcagtgaaatggactcaattatatctaatagtacttgggaagtcgttgagcgtccatatgggtgcaagcctgtaggatgcaaattggttttcaagaaaaagcttaggccagatggtacaattaaaaagtacaaggtaaggcttgtggccaagggttataaaaaaagaagcctcaatgtgattgaggaggttaaggactttttgtcccaaagctttgaaatgaaggatttgggagtagctaatgttgttcttaacattaagctactgagaggagatgagggtgggattacactcgtgcaatctcactatgtggacaatgttttgagtcgctttggttatagtgactgcaagccatctcctactccttatgactctagtgtgcttttaaggaaaaaccgaagaatagcaagggatcaattgagatactcccatatcattggttcattgatatacttggctagtgcaacgagtcctgacatctcatttgctgtgagcaagctgagcagatttgtttcaaatccgggagatgatcattggcaagctctggaaagggtcatacgctatctaaagggcacagtgagctatggaattcactatactgtgtacccaaaagtactggaagggtatagtgactcaaacttgatatctgatgctgatgagataaaggccacaagtggatatgtgttcacacttggaggtggcgctgtttcagaccatcttaacgag

SEQ ID NO: 95263 - DNA, 275 bp, Oryza sativa
  Clone ID: PAT_MRT4530_93475C.1
aaaacccaaaaccttttgatttacattttaagttgtccccccccccctgtttttttttcaaccaaaaagggtttaaaacttgcccaaacctttttttgtcaacccaaattcatggggcccccccaaatttccaaatctttggttccccttttttatttttttttccccaagccccaaactttgggggcaacaaaacaggtttttccttaggcttaaaccccctccctttttttgaagcatttcccaacccggattcccaaactttgcggccccgg

SEQ ID NO: 95264 - DNA, 2232 bp, Oryza sativa
  Clone ID: PAT_MRT4530_93476C.1
atggcaactatttgcgaaaatatacctaagccgcagactggggcagcgggagcgaagcgcacccacggattggggatgcgggagcggtgcccgaagcggtgccacacgctggagaagcggaaccgcaacggtcccgcacattgggcgtgtggcaccgaggcgcacacgcgtaacggccgtgcggcaccgcggtggtatgcgggaccggtcggggtggcagtgctaaaattctgggaacatggaggaggcagtggcagggcggtcgcgcgctctggttctgcgggaccgtggcggtcgcgcacgccgggtatggcggacgattggccctacccgttactcagtagagatcgatgcatgtcaccgtgcacgacagatgtcttccagccgttcaagtggctcgagggcattatgattacatggaagcaagacaacaaagtgcacgccgacggagagcaaatccaggggaagggctgccacttgcatgacaggcaattgtcctccctgacccaccagtggattggagggatgatatcattggaagatttgcttgcattgttccagaggatgatagcgacatcaaaggttggttacatgagagacgacacggaaaattaccatgtggaattgtatttggaggcgtaccatctatggctttttggatgggttatgttcacaagtggacacggaaacacagtggatgcaagaatgattaacttagcaaggtttattacgttgggcaacatacaaagttttccccagtggagttggggatcagcagttttggctacaacttacggaggtctttgtgaagcatgcacaaagacaagctttaagcagcctgtgtttactggttgtccgttgttggtcaagttatggtcgtatgaacgcttcccattgggacaaccgtacatgactgaacctgtggctgattcgaccttatttggtaacagtacagatgataggcctacttatggcatgcgttggtgctggggaccaccacagtgggcgaacgttcaggttcgaagtgcgtacgactacttcactgaagcgtttgatctacttaaggaggataacgttcagtggtgtccgtacaccgacaaggagacacaacgccgtgcccctaatggcctcagtacactctgcttgcgtgactcgtcttactggctaacaaaaaagatgcttgtgtacgatatagcagttgaggcgtacagtccgcagcgtgtaatgaggcaatttggcctttaccaagaagtgccagtcctgcccggtgaaacggtccccccaagatacacttatgtagatattcctgaaatcgccgacgtggacatgctgtaccctatgcagtcagcgccagttacccacctgacgggtgatattgtggaggaactatatgctgaaacaacatcactgtgggagaagctgcgtgacaatatagctgggtcccatgaggatatgatgtctgctctagaccgaatgcgccagaaatgcaaacgtattatgcgcgcggcatcgtgcaggcatgcatcagacatgcaccgtcccacaggacacaggttcgcggacccccttccggaacgaccgtctacctcctccatgccttccacttctaggccgtccacatcggcaagaccctcagcttccacgcgtcctaagccggcggtaaggcctgtagaaccatctacgataattcgaccggacaatgaaggaagtacagcggtgatcccttctattccgcatgcaagtaccactggtcaatggcagggagggtttgcgccgtacgcaggatccagccaactggttccccccatgcgtacagaagctggaagctcgcagttccaaggagggttttccggtatacctcaaattaacatgcccatgttttcaatgggtacaaacgatcagtggcaaggagctcacacatacaacactggaatgtacagccccaaacaaaggatggaatatgccggcagcacacaatcctacggaaaaccatgtagctacggtggggggtcgtccacagcacatcacgagataggaccgtcacagcttgatgaaccgccaccaataactcagccaacccaagactacagccacgttgatttcagcggtgttgaggtggtccgtaggtctgtccgtgaaagacattcacctgaaagattatctttgttaggacgtagacctccaactggtgctagaagaaagggaaagacaaaggtcactagcacctcatga

SEQ ID NO: 95265 - DNA, 611 bp, Oryza sativa
  Clone ID: PAT_MRT4530_93477C.1
aaattaatgaacatgaaaagtataaacgatgatgattttgtgtgttccaagtaatttcactaacggattttcagctcgagcgacaggtcctgtctcagtttttttttcctcccttttgactatgaatgacgaattttagtatttactttcaaaattctgtattttgctattcgaacaaaacccaacctatgaggctattaatctgtgatgtattgatgtcaccagagaggtttgccatccttattacatttcgtcactggtcacgtgaacctgtcatcgcttctcccacgtctcgacctgtctcaccgcatccgcctgtcttttcttaagcgtttccaattcttcagagctgaaaggcggcggcagctcgcagggctctccggtgcccgaaccagcttccaccatggtgtccaccatgaactgcctctccagtccccgccggccgcgcgtcatggactccacggtgacctcgacggctctgtcaggcaccgtgggcttgtacttgagcagcttagcgtactctgtcagaaggtgaaacatgtagtcgtagacacggcccatcgttagatcctctgggatgaacctggtcgcgttcccggctaatttctggt

SEQ ID NO: 95266 - DNA, 573 bp, Oryza sativa
  Clone ID: PAT_MRT4530_93478C.1
atggacctgagaaggcatgattttaatgtcataagcactcggatccacgaactcctcaaatttcagctgccgtttttcggaacagtgacaggtaccactctaggcctgaaactgaagtgccaaactgttcaggtaaagaaacgtatcaacttttatcgaccctctgattttcaaagccactgctttgttaatgtatgtctgaaaactcaggagttgacagtgaaaaccaggcgaacaaaccgcggtatgattcagatgtcgcttcacatcgaattcagatcagcgcgcaattcattcaaaattaagtttgtaatgcgacatggatggaacagccgtgatgtagacatcattatggcgtacgacgtcgatcgcgcgcgttgcgagcttgcaacaccagcaatttttgagcacttttctttgttgcagaaaagagaccgtcttgtggttcttggatggatagggctggattctagcttgattggtgcaagggatggaggagaatggaggaggaggagaccccagctgatgaacagcggactgactgatgcctgcccgcgtgccaaccggccaaaa

SEQ ID NO: 95267 - DNA, 677 bp, Oryza sativa
  Clone ID: PAT_MRT4530_93479C.1
ctttaccttcattgtccggtcgaattatcgtagatggttctacaggccttaccgccggcttaggacgcgtggaagctgagggtcttgccgatgtggacggcctagaagtggaaggcatggaggaggtagacggtcgttccggaagggggtccgcgaacctgtgtcctgtgggacggtgcatgtctgatgcatgcctgcacgatgccgcgcgcataatacgtttgcatttctggcgcattcggtctagagcagacatcatatcctcatgggacccagctatattgtcacgcagcttctcccacagtgatgttgtttcagcatatagttcctccacaatatcaccctacgaaaataaacgttatgatcaatacatcgtcaggtgggtaactggcgctgactgcatagggtacagcatgtccacgtcggcgatttcaggaatatctacatctgctattgtcacaagccgtacgtgtgtttgtgcggtgtaccaccgcatgtacaacgcgtacatacgacggtcgtacggtgggtcagggaggacaattgcctgtcatgcaagtggcagccctgtaagcatggatacatcttgcagtgtaattgccatctctccacacgggagatggaatgtgtgtctccggccgccatctaagcagcgggtgagatgtataggagtaaag

SEQ ID NO: 95268 - DNA, 549 bp, Oryza sativa
  Clone ID: PAT_MRT4530_9347C.1
atggtgttgctgcggtggaacgggaaaacgaagcagaggccggggtgctacgtgatgcggcgaagccgacggtggcagtggcgtggcttggtggtggctagggcggcggtggcgcgctgccggagtcggcaaagtggcggtggagctcgggttcacggtggaatcggtgcccgggtggtttattgcggaagcggagcggtggacgggatgcggcaaagcgcggcgaggccggcgatgcaagcggcgcggcacggggacggcggtagcggcggcagcggccggctggagtccgccgggctcggggatggagatcgtggccgggagaggcgggatcggccggtgacgtggggaggtgaagtggagctcgtggggaggtcaaaccggcgccgtttcttgcggggtgagtgggggaaaaggtggaggacgtggagggggttgtgtccacgtggttggatgcgagctcgggtgcgggagggcgccgcattttgcggcgacgtgggcggcaatggcggttggggttggccggcgagaggtaggaggaggagctga

SEQ ID NO: 95269 - DNA, 540 bp, Oryza sativa
  Clone ID: PAT_MRT4530_93480C.1
atggtggcgccgtttttattaagttgtagcgtgttccaattagcaagacaagtacaactacatgtacatggtcccatgctgaattcagagctgcattattcacaggaaaaaaacaaaagaaaagttggtgatgtccctgcatggggcaaacccttgaaatttccaactggggcagaagctgagactgaccgggtttctacgagggaatcttcagagaaatggagcgcatctgcgtatgtgtatttgcaatggttgggccgtacagcagctacggtttgttgcaggcaaaagctcgcgtccgcagcgtgtgcgtggctgactgtttttgtgctgatcaacgatgctaaagcccgggaatccaatccagacggcggtgtcgatgtgttaataatccatgacgatggaaaaaggtttgaaacagtgggcatactgagattcaagaagggtggtggtgtcgtgtgtcgtgtggcagaggcatttaactttggaaatgacgggtttttcgaaagggccagaaaccgtagattttgcagaatctaa

SEQ ID NO: 95270 - DNA, 3177 bp, Oryza sativa
  Clone ID: PAT_MRT4530_93481C.1
atgggtcttgttctgaccttgctagtgctgctggtgatcatgtcgtcgtctacgtcaaccacggtggcggagcatcaccggatcaggagcaacgacaccgacctcgccgcgctgcttgccttcaaggctcgggtctctgaccctctgggcttcctgcgtgacggctggagggaggacaatgcatcctgcttctgccagtggatcggcgtgtcgtgcagccgccgccggcagcgcgtcaccgccctgcagctgccgggcgttcccctccaagggacgctcacccctcacctcggtaacctctctttcctcatcgtcctcaacctcgccaacaccagcctcacggggacactcccgggtgatataggaaagctgcatcgcctggagctccttgatcttggctacaatgccctgtcaggtaacattccagccaccataggaaacctcaccaaacttgagcttcttgatctccagtttaaccggctatctggtccaatcccagcagagctgcagggcctgcgaagccttggcagcatgaatctccgtaggaactatctcagtggctcaattccagttagtgtattcaacaacacgcctttgttagcctatctcaacattggcaacaacagtctgtcagggctaatacccactgcgattggctccttgtccatgctccaggtccttgttcttcagtacaatcaattgtccggctcactgcccccaaccatcttcaacatgtctagacttgaaaagctgcaggccagtgacaacaatctgtctggacctatcccattcccaactggaaaccaaagcacgattcagttgatctcactcgctttcaacagtttcacgggccgaattccaccaagacttgcggcatgccgggaactccagctgcttgcgatttcagggaatctcttgacggatcatgtgccggaatggctagcaggcttgtctcagctaagttccatctctcttgctgcaaatgaccttgtcggtacggtcccagctgtgctaagcaatctcaccaagctcaccgtgcttgatctgtcatattccaagctaagtgggatgattccattggaactaggaaagttgatacagctcaatatcttgcacctatcagctaatcagctaactggtccttttcctacttcccttggtaacttgacaaaattatctttgctagcattagataggaacctgctgactggaccactacctgtgacccttgggaacctcagatctctgtaccaccttcatattgcagaaaatcatctgcaaggggaacttgatttcttagcctatctctccaattgtaggaaactccaattcctcgatatatcaatgaattctttctcagggagcattccttcgagtctacttgcaaacctctctatcaatttactaaagttttttgcagaagataacaacttgaccggcagacaaattggaaccctaaaaggcatggtcacattatctcttggtggcaacaaaatttctagttccatccctaacggtgttggcaacctaagcacgttgcagtacttatcgctgtcatataactggctatcatcatatatacccgcaagcttagttaatcttagtaatcttctccaactagatatatctcataataacttaactggtgcattgccttctgatctcagccccttgaaagcaatagccggaatggacatctctgcaaataatttggttggtagcctcccaacttcatggggacagctccaactgttaagctacctgaatctatctcaaaacacattcaatgatttaattccagactctttcaaaggtctagttaatttagaaacattggacctgtctcataacaatctttcaggaggcataccaaaatactttgccaacttaacctttcttacttctctgaacctctcctttaacaatctacaaggtcagataccaagtggaggtgttttttcaaacatcactctgcaatctttaatgggaaatgctagactctgtggtgctcaacatttgggatttcctgcctgtctggagaagtcccactcgactagaagaaaacacttgctgaagattgtgctccctgctgtcattgcggcgtttggtgccattgttgtgttactatacctaatgattggaaagaaaatgaagaatccagatattacggcttcttttgacacggcagatgcgatttgccacaggctagtgtcctaccaagaaattgttcgcgctaccgaaaatttcaacgaggacaacctacttggagttggaagttttggcaaagttttcaagggtcggctggacgacggtttggtggttgcaatcaaaatcctcaacatgcaggttgaacgagctattaggagttttgatgcagagtgccatgtcttgcggatggccagacatcgcaacctgataaagatactgaatacatgttccaacttagatttcagagcactgtttcttcagttcatgcccaatggaaacttggagtcatacttgcactctgaaagcaggccttgtgtgggatcattcctcaaaaggatggagattatgctagatgtgtcaatggctatggaatatctgcatcatgaacaccatgaggtcgtcctgcattgtgatttgaaacctagcaatgtgctatttgatgaagagatgactgcacacgtagcagactttggcatagcaaagatgttgttagaggacgacaattcagcagtttcagcaagcatgccaggcacaattgggtacatggcgccagagtatgcactcatgggaaaggcatcacggaagagcgatgtgttcagcttcggaataatgctactcgaggtgttcactgggaagaggcctacagatcccatgttcattggtggattgaccctgaggctgtgggtttctcaatcatttcctaagaatcttattgatgttgccgatgagcacctactgcaagacgaagaaacacgtctttgttttgattaccagaacacttcattgggatcttcttcgactagcaggagtaacagcttccttacgtcgatatttgagctaggcctgttgtgttcgagtgagtcacctgagcagaggatggctatgaacgatgtagtttcaaagctgaaagggatcaagaaagattactctgcatctatgctggaaatgcagaggcgtcggcaatactag

SEQ ID NO: 95271 - DNA, 2766 bp, Oryza sativa
  Clone ID: PAT_MRT4530_93482C.1
atgggtgttggtcctcattgtactactagtctgctaataatactggccgtcgtcatcacgtcgtctttgctcacgacgacgatcaaggcagatgagccgagcaatgataccgacatcgccgcgctgcttgccttcaaggcacagttctctgaccctctgggtttcctccgtgacggctggagggaggacaatgcatcctgcttctgccagtggatcggcgtgtcgtgcagccgccgccggcagcgcgtcaccgccctggagctgccgggcattcccctgcaagggtcgatcacccctcacctcggtaacctctctttcctctacgtcctcaacctcgccaacaccagcctcacggggacactcccgggtgttataggaaggctgcatcgcctggagctccttgatcttggctacaatgccctgtcaggtaacatcccagccaccataggaaacctcaccaaacttgagcttcttaatctcgagtttaaccagctatctggtccaatcccagcagagctgcagggcctgcgaagccttggcagtatgaatctccgtaggaactatctcagtggcttgattcccaacagtctattcaacaacaccccattgttaggttatctcagcattggcaacaacagcttgtcagggccaataccgcacgtgatattctcgttgcacgtgctgcaggtccttgttctagagcacaatcaattgtccggctcactgcccccagccatcttcaacatgtccagacttgaaaagctgtatgccactcgaaacaatctcactggacctatcccatacccagctgaaaaccagaccttgatgaacatccccatgattcgggtgatgtgtctctctttcaacggattcataggccgaattccacctgggcttgcggcatgccggaaactccagatgcttgagttaggtgggaatctcttgacggatcatgtgccggaatggttagcgggcttgtccctgctaagcaccttggttataggtcagaatgagcttgtcggttcgatcccagttgtgctaagcaatctcaccaagctcaccgtgcttgatctgtcatcttgcaagctaagtggaatcattccattggaactaggaaagatgacacaactcaacatcttgcacctctcatttaatcgcctaactggtccttttcctacctcccttggtaacttgacaaaattatcttttctaggattagaatctaacctgctgaccggacaagtacctgagacccttgggaacctcaggtctctatactcccttggtattggaaagaatcatctacaagggaaacttcacttctttgcccttctctccaattgtagggaactccaattcctcgacataggaatgaattctttctcagggagcatttctgcgagtttactagcaaacctctctaacaacttacaatatttttatgcaaatgataacaacttaactggcagtattcctgctaccatatcaaatctgtctaacctgaatgtaataggcctttttgacaaccaaataagcggcacaattccagattctataatgctaatggataatctacaggcattggacctctctataaacaatttgtttggaccaatcccaggacaaattggtaccccaaaaggaatggtcgcattatctctcagtggcaacaatctttctagttacatccctaacggaggcataccaaaatacttttccaacttaacctatcttacttctttgaacctctcctttaacaatctacaaggtcagataccaagtggaggtattttttcaaacatcactatgcaatctttaatgggaaatgctggactctgtggtgctccacgtctgggatttcctgcatgtctggagaagtccgactcgactagaacaaaacacttgctgaagattgtgctccctactgtcattgtggcgtttggtgccattgttgtgttcctatacctaatgattgcaaagaaaatgaaaaatccagatattacggcttcttttggcatagcagatgcgatttgccacaggctagtgtcctaccaagaaatcgttcgcgctaccgaaaatttcaatgaggacaacctacttggagttggaagttttggcaaagttttcaagggtcggctggatgacggtttggtggttgcaatcaaaatcctcaacatgcaggttgaacgagctattaggagttttgatgcagagtgccatgtcttgcggatggccagacatcgcaacctgataaagatactaaatacatgttccaacttggatttcagagcactgtttcttcagttcatgcccaatggaaacttggagtcatacttgcactctgaaagcaggccttgtgtgggatcattcctcaaaaggatggagattatgctagatgtgtcaatggctatggaatatctgcatcatgaacaccatgaggttgtcctgcattgtgatttgaaacctagcaacgtgctatttgatgaagagatgactgcacatgtagcagactttggcatagcaaagatgttgttaggggatgacaattcagcagtttcagcaagcatgctaggcacaattgggtacatggcaccagtgttcgagctgggcttgctctgttcggctgactcccccgagcaaaggacggcgatgagcgatgtggtcgtgacactgaagaagattagaaaggactatgtcaaattgatggcaaccacccgacccggcaaaaaattgatggcaaccacagtaagcgttgtgcagcagtga

SEQ ID NO: 95272 - DNA, 428 bp, Oryza sativa
  Clone ID: PAT_MRT4530_93483C.1
ctccattctatcccgctggctggacatagagagagcgccccactttgcgagttcgggctcggtgccctgcggccgccctacatcccggcgcgcggtactgctgctcccgacggattctgaagctgccggcctctgcgacatgcagcgcatgacacccgttagggagtgtacaggctgcccgctgcaagctgctacagggctgcatccgccgagctcgagagcctgaatgctgtcccattggacttcaaggggaagcacctcgaggaccattttcatggtgctgagcagacgcttacgaaaaatgggtgggaaccgtgacagaagaaacggagctccgtatgacagcacgacatcaggcccaatgcttgagccaccagaggcttctgtggctgcaacagagccgacagctcttgcaagactgcacccga

SEQ ID NO: 95273 - DNA, 811 bp, Oryza sativa
  Clone ID: PAT_MRT4530_93484C.1
ctcagagcagcgtacaaggacacggaatcagcgaaaaggcacgagctcacgatcgagctagatcaagctaagctagcagtaagatcggaaggagaaatctagtcgttgttggtcatagacaaggaaaaaaaaaacaagccagaaaccgatggggaactgcggggcgtcgcagcgtgccgtggagtcgtgggccgacggcgacgagtgggaggacgaggcggcggcgtcgtcatcgtcggaggacgatggccaccgcgagcggatggagcacgtggcagaggtgaccatcaggatcaccaagaggcagctgcacgagctgatggagcgcaagggcgccgggaatggccacgggaagatcagccggcggtccacgcagcagctgctgggcggacatcatgaactccggcgaggtgcaccaccacgaccagcacagggaggcgcactggaagcccgccctgcagagcattccggaggccgtggagtcatgagttccattctacgccttaagcttggtggttaagtcgccgcttgattatttttccaagaagtttgtcgctttcctccatgtttcttttccatgaccacattttctttactctgcaccagatttaatttcggtgcttattgatgtgcatagctagaatacatttgggttaattcatcaattgttcagacaggacatgtacaaaaatccgcgcgctcaaaaagaagtcgaagaatatgtaaataaatgtaggggaaatcattgtaaagatattttacaattgtataaagaaggctaatttgaggaaaaaaaaaaaaaaaaaaaaaa

SEQ ID NO: 95274 - DNA, 483 bp, Oryza sativa
  Clone ID: PAT_MRT4530_93485C.1
ggacaataaacaatcaacatttcattgataaattgtaacttggcaacaatcaactttacttttgtctatgataaactgtacaattttctatatatagtttttatctcttgttaggcttgcccaggctaaaaaaatttctggctccgccaccggtagctggaatgaacggagtggactattctgcatgctgtccagacctgacaaaaatcagttcatctctgatccgtctttttttacacacttgatgtaatctgtaatatggatagacgagacaatgcaaaacatactaatgtctgaaaacaagaaataaaaaatccggctagaagagaaggcaaacatatttcttttcccccgtcttaggcgggcataaatgcaagaatccttctcttagcaagttatatgtgcagagtacgcagtgccaatcggaagagaggtattgcgagggatcatatgctcatccgatcccacagaaacaaaccaata

SEQ ID NO: 95275 - DNA, 159 bp, Oryza sativa
  Clone ID: PAT_MRT4530_93486C.1
aacatataaaaaatgcctaaagaatcaaccaggggattttttcaaatacagagcagttctctcaacatggcgaaattaggtatgaacgacaaaatgaaaaaacatgcaacaaatgggttgtattgacagaatgtcctgcactcactcaaatgcacaagt

SEQ ID NO: 95276 - DNA, 411 bp, Oryza sativa
  Clone ID: PAT_MRT4530_93487C.1
ggaatctccccataaaaacagcatatgattgtttctatcaaagagaactgcagcatattattggttacatcatgtcaagaacactaaataaatcagatacaacaccaatggtagcaaaatttgctatctacaaacacaaacttgtcaaaaaaaaagtgaacatgcatctctacatgtctccaaagctaattctgacggcttcaattacagatgtgactgcagcctctagagctcccaaactctacccctttatgtactgcattggcagaggaatacatttcatgatcgcactgttgcttattttgtagtcagacgtgggccttctggcttctggaaatcctcaatctcgaaacacttgtccttggatcagtgaaaaacatggctatcaccaataagaacactgcaactgat

SEQ ID NO: 95277 - DNA, 421 bp, Oryza sativa
  unsure (1)..(421): unsure at all n locations
  Clone ID: PAT_MRT4530_93488C.1
cccgcaccgccgtgcttcgcgagcacggcaccgctgcgcggcgcgaggccgcatttgacaagccgagcgtatatcccacgcccgcccgtccgcatcaccgccggatggccgccggtcgtctcccgtagggcgataggcgggtagatccaaatccggcggcgcgggatcatatacacccctcgcccatcgcagtctccgagtctgcgctgtttcttctggacatcaagggcctcgttctagtttggcgcgactaccgcggcgacgtttcctccctccaggctgaacgcttcttcaccaagctcttctatcaaggagggtgactcggatgcgcactcccccggtggtttacaactattcccgcgtcacctacatgttcatccagcacaacancgtgttcctactaaccgccttccgccagaac

SEQ ID NO: 95278 - DNA, 1581 bp, Oryza sativa
  Clone ID: PAT_MRT4530_93489C.1
ccacgcgtccgggagaagagatctaacagtcaactcgtaaaatactccctacgtttcatattttaaattatttgactttttttagttaaacttgttaaagcctatgtttataaaaaatatattagtattttaacataaaataaacatattataaaaatatgtttgagagtagaaacagccggcgaagcgtgacgatggacgctcgacggcggcggctgtccccggtggtggtcgtagcggcttttcttttcttccccctgttcttcgggagccagccggcggcggcgtacggcgaggcttcaggcgccggcggcatgacggcactgcagaagcacgcggcgttcttcgacaaggacaatgacggcttcgtctccccgaccgagacatacgacgggttacgcgccctcggacttggagctggcttctccatcttaagcgctgcgttgatcaatggcgtactttcactcaagaccagacctcgcggatatctggacacagaggccacacgccgtcgagactcgagagattcaggaacagaaaccgccgagagagttcgtagcagtcaacgcgcgaggcagggccgagaagaaaccgccggcgacgcacgcgcgatggacgctcggcggaggcggttgtccccggcggtggccgtggcggcggctcttcttttcttccccatgttcttcgggagccatacgccggcggcggcggcggcgtacggagaggcttcaggcgacgccggcgtgacggcgctgcagaagcacgcggcgttcttcgacaaggacggcgacggcatcgtctccctctccgagacatacgacgggttacgagcactcggactcgggtctggcctctccagcttgagcgccgccttcatcaatggcgtcctttccccaaagaccagacctgacaatggaacagcaccacgcttatctatctacatagagaacatctacaaggggattcatggaagcgattcaagcgcctatgattctgaaggaaggttcgttgctgaaaagtttgaggagatattcgccaagcacgccaagaccgtgcctgatgctctgacatcggacgagatagacgagctgcttcaagcgaaccgcaagcccggtgactacactggatgggtcgcagcatcgtcagagtggaagattctgtacaagatcggcaaggacaaggacggccttcttcgcaaggaggccgtgcgagaagtctacgatggaagcctgtttaccaagctggcggcggcaaggataaacgacgaaaaccaagcatgattggtgacagctgatgggatcatctccattgattctcctgattaagcatctcaaatcatgtgccactgtgatatgagaacgattgagatgatgtctgaacacaaaaagatagtcatgcaagatagaagtatgaacaagtgtggacagaatctgcagatggggatggatcgtttagttctgtccttttttgttggtttcttggggatattgaatgtttatattattatacctgcaaatggttggcagtgcaaggctgcaagcaatggcacactatttatacatttgacgtcccttagcccgt

SEQ ID NO: 95279 - DNA, 1082 bp, Oryza sativa
  Clone ID: PAT_MRT4530_9348C.1
ttcacattgataaactctgtgctttcctcaatccttgataaactctgtgctttcctcaatcccaacatactacatgtgttctttgcagctgcttgtctcagtggttaaagctattgttctctgccaagaaaaattgcctttggaggggaaacaacccaacttcaactcgaagatctcttgcttcttgggatctagtgtgcagaccaaaggataaaggtggactaggagtcatcaatctaagagttcagaatatagcacttctgcttaagcatctagtcaaattttacaaaggacatgatctgccgtgggttcaactgatatggaactcttattataacttcaaagtgccacatttagtttggaataaaggacctttttggtggagggatatagtggctctatctgttctactcctcttgaggattgtttcttactgcccctgaacacccaagcttatggagaattcactgttctagaggaggaatggtcctctctctttgcagaacggtaaaggtgatgaatggtctttcatccggaactgtgataaatacacagctaagaggttttataagctcacatactcaaatgtgcatgtgccaaggccttttgtctggatctagaaaacaaaatgtgtaatgaagataaaagtttttgcttggcttttattcagagacagacttaacataagagatatgcttgatagatgacattgtgcaaaggaaaacaaagacctcacttgtgaattatgcctgaataatatcagagagacaagagagcatctctttttcttctgccctttcagtcaacattgctggcagcatttgggaattgcatggaatcctgacctagaatttttccagatggtggttttggctcgcattcagttcaataagagaggtttcttggaaattttcttcattgctgcttggcacatttggaagcaaaggaatgggaaaatctttcgcaatgagcttccctcgttcagctcttggagggctttattctaagccgatgttcttctgcatttgtgcagaatgaaagatccactaaaacatattattttttattggttacaaacagtg

SEQ ID NO: 95280 - DNA, 1649 bp, Oryza sativa
  Clone ID: PAT_MRT4530_93490C.1
acggcgcgaaccgcttcctacgaaaccgcgatctcggccgagcgtgaggcgcggcccaatgggttgaaggaggctcggccgagccattgggccggcgcgggcgcaaggaggcggcccattaggggcgcgcggaagggagagggggcggtccgggtggaccgaacccaccatgcgaggtcccgggtggggcccgcatgtctgcgacatggttcacggagggatgggcgcacgcgaggtgcggcgcaagggtttcgggtgagcgcggttcacgcgcgagcaccggatggaccaaggatgcgcgggcccacgcgcagccggttggtgcaccgtggaccgtgcgtgcgagggggggggaaggaaggaggcggctgaccggctcggctcggtcaaagccgaggtggcgccgacgtggcgcctacgtggcagccacgtgggccggcgggaggaggaagaagggggcgcggccgaatggacggcggacggcggccgagttcaccggagcaaggcgctacctcaatggaaaaagaaagcgcaccggaggagggaagggacgagaggaagcgagccgacggctcggattcgccggaaagaggccggaggcggtggattgcggcgacgcgcaccgctggcgagcaaagggggaaaacggcggcggtcgaggagggatcaattcaaggcggtgggagtatctccggggttcaaggagttcatctccggcgtcggatggggcagagcgacgccgtggagatctggcgacgagcggcggcctccgggagcgagcggcgacggtggcaagcctatggcgggtggtggcgaggctaggggctttgtccacgcgcgagggagggggcaaacgggaagggagaacggagggaggcactaccgagccgagacgggcgctgtgacgagcggccgacagcgcgggagcgagctctccggcctcgggccggggaaggggaggaagatgggtgcccggagtcccgcgtcacgcgtcctcgcacgcaccggtcttcccggtgctcggcggcggacggcgacggcgagagcagaggaagggcgacaatggggagaaccgaccttggcggtcaagcgctcggctggcggcaacggcggtttcgtgggcgatgcgaaagcggcgacggcgtggatgcattgggcggcgaaggcggtggatcgtgcggggaaattgaaccgcgggagcgggaggagcagcgccggctagcgcggggcgagctggcgctgggtcaaggtgggggcggcgagctggcggtcgcgcccgtggtccaggcggtggcaggcggtgacgccgatgctgtgtggtgcagcgcggcagggcagcggggccggccggctgcgcggcgcaggcgcggcagggctgacagcggcagcgaccggccggtcgacctcctcgcgagcgagcgcgcgcgcgacgcgggggtgcggccggatttcgaacggcggcggcggggaaatcggcgccgaggagagggagaaaggaagcagagagagatagcgaggaaagagagaggaagaagagaggcgatgcctctctctctcggcacatgcagcgcacgtgcggggaggtggagaagcgggctgagaggagatgggccggggaagaagagtcagcccaccgaggcagagggagg

SEQ ID NO: 95281 - DNA, 1340 bp, Oryza sativa
  Clone ID: PAT_MRT4530_93491C.1
atgtcgggttttgaaggcttcacaaacccatttcccaagtcttcgacaaacaacggtgtatgtgggatatttggtatacgcgctcagagagcacgaatatcgagaaaagagaaatatttgtggaatattggaaaagacattctcaagaatatctttgactcattgacaagtggggtcaacaagaaggccgagcgtgaggcgcggcccaatgggttgaaggaggctcggccgagccattgggccggcgcgggcgcaaggaggcggcccattagggacgcgcggaagggagagggggcggtccgggtggaccgaacccaccatgcgaggtcccgggtggggcccgcatgtctgcgacatggttcacggagggatgggcgcacgcgaggtgcggcgcaagggtttcgggtgagcgcggttcacgcgcgagcaccggatggaccaaggatgtggcgggcccacgcgcagccggttggtgcaccgtggaccgtgcgcgcgaggaggggggaaggaaggaggcggctgaccggctcggctcggtcaaagccgaggtggcgccgacgtggcgcctacgtggcagccacgcgggccggcgggaggaggaagaagggggcgcggccgaatggacggcggacggcggccgagttcaccggagcaaggcgctacctcaatggaaaaagaaagcgcaccgggggagggaagggacgagaggaagcgagccgacggctcggattcgccggaaagaggccggaggcggcggattgcggcgacgcgcgccgctggcgagcaaagggggaaaacggcggcggtcgacgagggatcaattcaaggcggtgggagtatctccggggttcaaggagttcatctccggcgtcggatggggcagagcgacgccgtggagatctggcgacgagcggcggcctccgggagcgagcggcgacggtggcaagcctatggcgggtggtggcgaggctaggggctttgtccacgcgcgttcgggaggactaccgagctaccgcgcgagctataggagggagagggcaagcgggaagggagaacggagggaggcactaccgagccgagacgggcgctgtgacgagcggccgacagcgcgggagcgagctctccggcctcgggccgggaaaggggaggaagatgggtgcccggagtcccgcgtcacgcgtcctcgcacgcaccggtcttcccggtgctcggcggcggacggcgacggcgagagcagaggaagggcgacaatggcgcggtggagtaggagtgtgaagcgggagggattgagatgggaaggggagctcggcttcgggttttataggcacggggtgaggtga

SEQ ID NO: 95282 - DNA, 378 bp, Oryza sativa
  unsure (1)..(378): unsure at all n locations
  Clone ID: PAT_MRT4530_93492C.1
gcggccttctccgatcgcggcggcggcggcggaggaggaggagtacggggaggggcgtacgagggatcgagcggagacgtggttgacgagatgaagaatctgttcaagagtaagatcaagtggcagcaccggtcgaacgaccccgcgtcgtcgcaggggcaggggcaggggctgccgcagcagacgccgccgtcgccatcgccggcgagctccccgtcgggggggccgcctgcgctatccgtgtcgacggtatcgtcgtcgtccccttccgccgccgcgangccgacgggggctgctgcggcgggggcnggaggtgggggtgggggaacgggttgggangattacatgttgtcggagggaggagttccagatgcagct

SEQ ID NO: 95283 - DNA, 683 bp, Oryza sativa
  Clone ID: PAT_MRT4530_93493C.1
gcacgaggcccctttgtcgttctttctctccggttcttgttttctccgtcgttctctctctttcttgcatcttcctccctttctcgatccggctcttccctctcgtcgatggtcgatccatccccctccccgcggcgtccatcctcctcctctctctccgtccatgctcacctcctcctctcaagaaactcgtcaacaacagaagccaccatagccgggagaggcaaggatgtactcaaccacggccactcctccacggtcatttcgccgccgccgccagggccattgacggctgggagggcttcctccttagcttcctcacctgctggctccgcggtggggcgcagaaccagctgcagctagaggtggtgggggagagggggtgggaggttgcaggggagctgccgcgagacggtggctcagggcgaggttgcctcggcgcggatgagttccaggcggcggcggtgggcagatccagcggcggcggctcccttcgccccctctcgccttcctccagcggcagatccggcgacggtggcggcgtcggtagcagccgctggcagatcaggcggcggcaagcgggtccagcggcggcggctccctccgccccctctcaccttcctcctgcggtggatccggcggcggtggcagtgtcggcggcagcggcgggcggatccagcggc

SEQ ID NO: 95284 - DNA, 436 bp, Oryza sativa
  unsure (1)..(436): unsure at all n locations
  Clone ID: PAT_MRT4530_93494C.1
tcttggaatacagtccgcgtgacggcgcagtgcgaacgaagagcggcgcgcttcatggccttgctgcggcagttcagtgaggcgcatttccaccacttcaccgtcacaggcgccgccgttactggcgacgcgtacacggtgatgagcggcaccaagcagcaggctttgaccatttcgtaccccacgtggcgccgcgcgctgaaacagctcaccatctttgcgcatcggtgcggcatgctcctcatcgacgatcctaccttccaagtgggccactacacggtggaggcacgcgctatcgatctcgtgcgtctcagccgctggcacgactctacgaaagggggtccgggcanacgccgccgcagcggcggaccgcaacggtcgaaanaatgcngcgccgcgcttcctttggaagtgctgagcctttgtccgcgcggcc

SEQ ID NO: 95285 - DNA, 472 bp, Oryza sativa
  Clone ID: PAT_MRT4530_93495C.1
gcacgaggagcagattctagggctcactcttcccctcccagaaagcgaagatctatagcttgtctcgccgtcggccgccgccggcccgccggatttccgtggccgtgtggcggaggggcgagccgcgggcgtagcaagccggcgagccagactggcgggagggggggcaggggggacggagccatgggcgcgccgccggcgaacccaaattttgctaggagccaggcgcctagtcctcaagggcgcgtctcggcacgggtgcaggaacagtacaagaccatgtcttcacggagaggaggtggtggccgccgtggtcgtggccgtggccgtgggagaagtgctttggcagaaaatgatatggactttcatgaaacctctgcaccttcttccccgagcactatttctgataaagaggacaatattgagttcacttcgcagcaaccttgtcttgtaagcccagcagcagagcatg

SEQ ID NO: 95286 - DNA, 475 bp, Oryza sativa
  Clone ID: PAT_MRT4530_93496C.1
cccacgcgtccggccacgcgtacgcccacggcgttcgtccactcgtacgtgcactcgtgcggacttaccctttactactacaggcgccgctctcctgattcatacagcatttggctcggtgatgacatctgacagcgtactcacggacgtagaatatgacaggcggaggcatcggaaaccaccgaaggctggcggcgcggctgatgaggggcctcaccaccaagatcaagcccaagaagctcggcgtcggcctgctaggaggatgctgcctcgcgctactcagctacgtatgccttgccaagctgttggcagtgtactcccctgtgttagacatcacagtcaacacatccgctctgatgcagaactcaccgccttcctggccggatacgggacccattccgccacaggaaactgcagctggagacggagacattgacagcactgtggaccccgtcgatcaccatgatgacaagtc

SEQ ID NO: 95287 - DNA, 729 bp, Oryza sativa
  Clone ID: PAT_MRT4530_93497C.1
atggcgccgacgtcgaagctgtcgcagggcatcaagaaggcgtcgcggtcgcacacgtaccaccgccgcgggctgtgggccatcaaggccaagcacggcggcgccttccccaaggccgagaagcccgccgccgcagccgccgccgccgcgcccaagttctaccccgccgacgacgtcaagccccgccagcccagcacccgcaagcccaaccctaccaagctcaggtctccgagcagcagcaacttgcccgagttctctctgttccggttcattttgctgatgaggtcgtccatcacgcctgggacagtgctgatcctgctcgccgggaggttcatggggaagcgcgtcgtgttcctcaagcagctcaaatccggcctgcttctcgtcaccggaccttttaagatcaatggagttccgatccgccgtgtgaaccagccctacgtcattgctacgtccacaaaggttgatatctctggtgttaatgtggagaagtttgatgacaagtacttctctagggacaagaagcagaaggcgaagaagaccgagggtgaactttttgagactgagaaggaggcaaccaagaacctgccggagttcaaaaaggaggaccagaaagttgtggatgccgagttgatcaaagctattgaagctgtcccggatctgaaaacttaccttggtgcgcggttttctctcagggacggcgacaagccccacgagatggttttctag

SEQ ID NO: 95288 - DNA, 300 bp, Oryza sativa
  Clone ID: PAT_MRT4530_93498C.1
atgttgcaatctggttccataagctcgaagaggaattctagagctttgtatcatccattgagaatgatgtaccgatcgatcatccagcaagaacgagacacgggattaagggaatcagaaggtttcgaactcaccgtgaacctggtgatccaacgagcagacgagaccaaccccacgacgacgacggagaagaagaggaacgcggagctcgtcctcgacaacgcggcgacgaacttgggtggtgggccgccggaagtcctgccggccgcccgccatctccagccgcctctgttgacctga

SEQ ID NO: 95289 - DNA, 733 bp, Oryza sativa
  unsure (1)..(733): unsure at all n locations
  Clone ID: PAT_MRT4530_93499C.1
ccggccgggttcccaccccaccgccgcctccaccctctctctcgcgccgcagcgaagcgcctcccgcagcaatggcgccgacgtcgaagctgtcgcagggcattaagcgcgcgtcgcggtcgcacacctaccaccgccgcgggctctgggccatcaaggccaagaacggcggcaccttccccaaggccggcaagcccgccgccgccgccgagcccaagttctaccccgccgacgacgtcaagccccgcgcccccggcacccgcaaggccaaccctaccaagctcaggtctcagccatgcgaccaactatcggctgctcgtgatctatggatcggtgttcctgagtgatttttatctgtttgtttgtttgtttgcgtgatgcaggtcgaccatcacgccggggacggtgctgatcctgctcgccgggaggtacatggggaagcgcgtcgtgttcctcaagcagctcaagtccggcctgctcctcatcaccggaccttttaagatcaatggagtgcccatccgccgtgtgaaccaggcctacgtcattgccacatccacgaaggttgacatctctggtgttaaggtggataagtttgatgacaagtactttgcccgggacaagaaggcaagggcagaaagaccgagggtgaactntttgagacagagaaggaggcaaccaagaatctgcccgacttcaagaagatgaccagaaggctgtggatgctgaagtgatc

SEQ ID NO: 95290 - DNA, 486 bp, Oryza sativa
  Clone ID: PAT_MRT4530_9349C.1
atggggatttcactcttgcctccaatggactttgatctgagggatctcttccctaatccggaaaacttggattgtttggtggatcagttctacactcaggacatggatagccttattaaggttattccatcagacaaagcacctggcccagatgggtttaatgggttttttcttaagaaatgttggcaaatcatatcacaggacttttacaggggaatctcaagctgccgtatcaggactggatcctcagttcttttctgggatgacatttggaatgataagataagaagcaatgcttttccatctttatatatggttgccttagataaaactctctctgttaagcaaatgggttctactcctcttgaggattgttttttactgcctctgatcactcaggcttatggagaattcactgttttagaagaggaatggtcttctctctctttgcagaacggcattggtcatgaatggtctttcatctag

SEQ ID NO: 95291 - DNA, 766 bp, Oryza sativa
  unsure (1)..(766): unsure at all n locations
  Clone ID: PAT_MRT4530_934C.1
ttattccgcatccncgactatgggctccttacngacctctacaccggggggttcgccaccctaggcctcctncatcacncaactagagttgctctactccctggtggggtctggctttcccatggtccctacgccaacacccgacccacaacatagccccacacccgacctccggctaccctccaaacagaccaagggccgtttttccttgggctgggccaaacctccaccaatcgctgggccgcccacccaacgtccatcctncccgccacgccaacaatgccaccaccaaaccaccaacacctttgcctgggttccgcccccaccattcaatttcctgcaacccctgccaatgttgcaccccgcccaacatggttgtttgcggctccccaaggccctgccgttgccccaagcggtgcccaccattcgcgttgcaaatgggctcccggccatgccaccctctctcccagttgcacccatgcaagcggcaccaaacccaacttcanttgcccaccccaaccacctcacaccccccacctggtttgccgcacgttgggttggccancatttggccgggcccccagccccacacaatgggtccccttccagcccataggccanacattttcaattggtttggtttggccccaattttttccnaaaagtttttggccaagggggcaaaagccaacaccaatatcagnccaacaccaccccccccncaccaatcccccaagttgggccaacatnnatttttcaacccccc

SEQ ID NO: 95292 - DNA, 915 bp, Oryza sativa
  Clone ID: PAT_MRT4530_93500C.1
ggccgcgtttttttttttttttttttctcttaatcttctcataatatttgacaggcagacttcaacagaaatggagagttcactacccgggtacaaaattcagaagtacagaaacacactactaggcaaaaagacttcctcagaactcgaaacttgcgccgactaacttagaaagtcatctcatggggggcttgggccgtccctgagagagaaccgggcaccaagataggttttcagatccgggacagcttcaatagctttgatcaactcggcatccacaactttctggtcctcctttttgaactccggcaggttcttggttgcctccttctcagtctcaaaaagttcaccctcggtcttcttcgccttctgcttcttgtccctagagaagtacttgtcatcaaacttctccacattaacaccagagatatcaacctttgtggacgtagcaatgacgtagggctggttcacacggcggatcggaactccattgatcttaaaaggtccggtgacgagaagcaggccggatttgagctgcttgaggaacacgacgcgcttccccatgaacctcccggcgagcaggatcagcactgtcccaggcgtgatggacgacctgagcttggtagggttgggcttgcgggtgctgggctggcggggcttgacgtcgtcggcggggtagaacttgggcgcggcggcggcggctgcggcggcgggcttctcggccttggggaaggcgccgccgtgcttggccttgatggcccacagcccgcggcggtggtacgtgtgcgaccgcgacgccttcttgatgccctgcgacagcttcgacgtcggcgccattggatcagctcgcggcggcggcggcggggacccacgcgtccgcccacgcgtccgcccacgcgtccgcccacgcgtccg

SEQ ID NO: 95293 - DNA, 2592 bp, Oryza sativa
  Clone ID: PAT_MRT4530_93501C.1
tcagagcacggaaacggaagcctgcgcactatactgactgatgcctgctcggctcaacctgtcgaaatctctgtgccatctctgccgcctccggtgagagctgtccagggcctcctggctcggtgagcatgcatcccccacaccgccttctttgctgaccgccaccccaacggcgccgccggccaggagcccaggacaaccacggtctggatcagcagcggcatcaaccgcacaggatacatgttggcactgagtaccggcaagtatagtatgacagaagggatgtgctgcacaggaaacaactctctgagatgaaggaataaacttgtttgctgcaggtttcttttcatcggagcctcttatttcccccttgtagtcgacatggcatgctgaacttgtatctggatgaaaatccagtagatgcatgccaacagtattggaggcagatccaactgcataaattgaagatgtcggcaaccaggtcggttttctatgtagcttttgccacatgaagttcatgtgctccaaccaatcaggaggagggcagtgcaggtgactcacactgagggtgttaatgttcaaggctccagaccagccattgtcaagatggaaggctaactgatatgagcaactagggttgaagtctattgaaagaatttcactcgacacaatgttcgtttggtcctttagcgatggaattttgcccaacaaagttgatatcttcactgatgataattgttgaacctcattatggctttgaaaagcagctgatgccctccctccacggagatcccaggcatgaacggtgccctctttagttgcagcaaacacggtccggttatctatatttagcttgacactgctaaattgagattctggatgtcctatgagctcaagacagtgttttttacttagccgcatgtcccacatgaagaccgctccatcaaggccagatgcaaataaccccgtcttatcatctgaagaaaaagctacatcagtcaaacctttgcggaattcagagagcacaggatatctggatcttcctttccgtaaaatttcagttggcgtggacgagacacagccaatatcaaacaggagaaccatgtcagtttgtctagatacacaaactatctcatcttgatttgctggattccatcggacagcacataggggcattgagtttgatatatgtagcaaatagtttgatgattcatctggcaaaccccgtgatggaccatatgtggagcagtataaggtctcaaaatcatgcacggttaaacatcccgaggctgtaactgatgcaaggtatattccctttttatcaaattccattgctgaaatcccctctcttactgcttgaaatcccaggactgaatcgttaacaactcgattcatctcggagaacgaatcgcgcaggcgaacggactcccggtgccgaaacctagcgtcgatgcggccgtccagctcggcggcgacgcggctccaccggtgccgtctcggaggaaccggtgccgccggagcatcgccggaaggtggaggcgccgccacgaggaacttctccatttggtaggggcttagctttgggaaggaatcgtcaaacgaaggcttaacttgcaacgcaatagcttaattatggctcaaatgttatgcattgcacatttgagtaggtacggtaaccatgaaccaccaaagtagataatccttctcttaatcttctcataatatttgacaggcagacttcaacagaaatggagagttcactacccgggtacaaaattcagaagtacagaaacacactaggcaaaaagacttcctcagaacttgaaacttgtaccgactaacttagaatgtcatctcatggggcttgtcgccgtccctgagagagaaccgggcaccaagataggatttcaggtctgggacaacctcgatagccttgatcaactcagcatccacagccttctggtcatccttcttgaagtcgggcagattcttggttgcctccttctctgtctcaaaaagttcaccctcggtcttcttggcctttgccttcttgtcccgggcaaagtacttgtcatcaaacttatccaccttaacaccagagatgtcaaccttcgtggatgtggcaatgacgtaggcctggttcacacggcggatgggcactccattgatcttaaaaggtccggtgatgaggagcaggccggacttgagctgcttgaggaacacgacgcgcttccccatgtacctcccggcgagcaggatcagcaccgtccccggcgtgatggtcgacctgagcttggtagggttggccttgcgggtgctgggggcgcggggcttgacgtcgtcggcggggtagaacttgggctcggcggcggcggcgggcttgccggccttggggaaggtgccgccgttcttggccttgatggcccagagcccgcggcggtggtaggtgtgcgaccgcgacgcgcgcttgatgccctgcgacagcttcgacgtcggcgccattgctgcgggaggcgcttcgctgcggcgcgagagagagggtggaggcggcggtggggtgggaaggagaatcccggtttttttttcccggcc

SEQ ID NO: 95294 - DNA, 237 bp, Oryza sativa
  Clone ID: PAT_MRT4530_93502C.1
atggagggcggcgaagtggcgagggtggaggcggaggtcgtctccgcccttctgctccgagcccccggcgaccgccgccatcaccaccacccccgtgcacagcagcgggtcgacatggccgtgtctctcttcatcctcggcttctccctccgcgtgtgcttctccctccgcgtgtcgtcacctggctccgagtggtgggcggcgtcgaccagcgtggcggcagctgtcgacgtttga

SEQ ID NO: 95295 - DNA, 369 bp, Oryza sativa
  Clone ID: PAT_MRT4530_93503C.1
atggggctcggtgctttggcgaaacccgtgcctgtgtgccgaggctttcgccgcatcatctttgcccgtgccgccttctggcgagaactccactcggcgaaggtggtgttacccaagtcatggctttcgcccgtacggcttcactctcgaccttcaccgtccaccttcggcgtgagcctgttgcttgaacttttggttttggtaggttcggccaacggctctccgtgccactccaacgccgagcgagctcgagcggtggcgtcggagctcgagcttgatgaggtggcagtgggcgtggtgcttgagctcaagcgaggtgcctctggggccaaatgctcgatctaccggagcggcggagtcattttctag

SEQ ID NO: 95296 - DNA, 3114 bp, Oryza sativa
  Clone ID: PAT_MRT4530_93504C.1
atgtcgcatgggggccccttccagccgcggtcgccgccggcgggggatgacctgtcgccgtgggcggccttcgaggggtcgtcgtgggcggccttccaggaggggtcgtcgtcatcgccagcgtggcacgccttccagccgcggtcgacggtaggcccgagccaggcgccgttctacttgtcaccgggggggcacatactgtcgacgcctgcaggggatgaccggtcgccgggggggtcgtcgcagccgcggcgctctctggccgaccggtcgccggggaaccgctccgagctgcggtcgacgccggcagggtacccgtcgccggggagggcctcgcagccgcggcgcactctggagaacaggcaagggtggggtggagtactaccaaattttacatcggtattgccagtgccaaaaaccggatttggaaacttgatgggcctttctgtaaaactcattttatcagcaatgttttatcactgcggctgggccggggcggcacagactacgatggctgcggcggactccggcttgaatggcctgtctccgccaccgaatccgcgccgcctgcgcctccgcctgcgcctgtctccgcctgcctcgcgccgcctgcgcctgcgcctccgcctgcctcgcgccgcctgcgccgctgctcgcaggaaaacaatggtagctccaaaaatggtaactgtgaatgaactgttgggtttaacccaaatcagaggctatgtggaaaaggagttgtctaacctagccaaaaagaagcagatatttgtccctatcctcgttcgagctttggatggttctggtttacattggtacttgctcgtggtggacattgagaatggaataagatccgattgtggattctatatgctgctgtatatggaacgatttggtagaatgaaaatagatgacatcaatgaggacatatatgagaatcctaacaacaatcctaaggatgtaagtgacgaggtcatagctcaagatgaatatcacattttggacgacaccatatgtttgtcaccacccccttcagatttgcgaaattcccctccacgcccaaatctgacagtatcccccatgagtcatgaagatgggcgtaatgatggccctctgccaccatcctcaccagggacaagcgatggtaacaagaatctggaagatgcccaaccccaagaggaggctgacagatccagtgtgggaatagcagaaaatgccgaggcaggcaaccaggcgaatcatgcgaggacaagcgatggtaaccagaagctggacgatgcccaagctcaagggaaggccaacagatccagtgagggaagttccctggatacaagaacagacaatgaacgctcaaggacaagcgatgatgaggctggaggcaacgaggtggatgaaggtgaaaaaggggtgccatcatccccaccacgcagagaacaaaatccatcccatgccctcgataaagacatagtttattattctagaaagaagaaagagaagaaaaggaaagagaagagcaggtcaagcttggataatgacttaattcaactgggcaagaggtgccgaattgcaactaccaggactgctataaagactactagacgcgagtggcctgatgatgcgatagttaaagaggtttatgagcttgccactgattgtaaggaacaagtaatattgaatttcggagctatcgcaatgactggttctgaaatagaacagtcgttccagaaagttgagtgtgccggggatattatctcattatttattaaatacctggagaacaatacgtatcctgatgacagcaggatctttgtcccaccactatacaagggcaaaggaggtatgaagaaaaagattaaagatgcactcggtggatccaacgaaaagaaatcagcagtggagtttcctcatcgatttcccaatgacagtgtgttcgcagccatgtattttcttgaacatttcataggtgtggcaggagtgctcaacaagctgacttgggatgaaaaggacacagacttatccttgggttggttggaagatttatccttccttagtgacccgaattatccttcgtcgacagagttggaagattactatatttatccttctgcagtcattgaaattatccttctgacagagacttatccttccgtaggttgggagatttatccttgtctagttacccagattatccttctaagtttacaagagttatccttcaccaggacctccacttatccttctaagttactagatttatccttttgtaggacacagacttatccttccgtaggttgggagatttatccttgtctagttacccagattatccttctaagtttacaagagttatccttcaccaggacctccatagtaaagttgcatggtgtgcccagcagaattgtttcagatcgaggaactcagttcacctctaggttttggaagagcttgcataaagctatgggcaccaaattggatttcagctccgcctatcacccacaaaccgatggccaaaccgaaagagtaaaccagattatggaggatatgttaagagcatgcgtccttacttatggcaaggactgggagcagagtttaccctatgcagaattctcatacaacaacggttatcaagcaagcttgggcatgtcgccatttgaagccctctatgggaggaagtgcaggactcctctgatgtggtcggaagttggagagcgtgcactagttggacccgcattcataaaggaagcggaagaaagggtagctgaaatcagagagaagttgaaagccgcccagtctcgtcagaaaagctacgcggacaagaagagacgagaagtaagctttgagccgggagactttgtctatcttaaggtttcgcctattcgagggactcgaaggtttcagatacaaggaaaattggcacctcgttacattggaccatatcaagtattgaaaaaggttggagcggtagcatacctcctggagctaccagaaggaatgtcggacatacacccagtattccatataaaatgggcaccagcactcgcccccgcgccgccgtcccagaccaccggggcacggcggcaggacaagggcgcctggaggaaggttatttga

SEQ ID NO: 95297 - DNA, 5367 bp, Oryza sativa
  Clone ID: PAT_MRT4530_93505C.1
atgggcccttctgggagggagggatctggagaggaggtgaatttagaggttgcaaatatgggcgaggctgcttctactgaagagggggatgctgatgctatcaaagaagacgaggctgcttctactgaagagggggatgctgatgctaccaaagagggggaggcttctactgcagaggttgaaatgaaggatcccaagattcatacgcggtccagtccgaacagcgtcattttagcagctcaggaactgtcatcagatgcacggaacgtggttataacagcaggctttgagcagttactgtatatgtccttagagggttttggtaacagagagatattgaggtttcttatgaacaatacacatacagaacaaacatctgaaggtgttgagattaagattgaaggatctaagttaccccccatcacggagaatgtggtggcacatgttgttggtgttcctgaaggttctggtgagagccttgaatttgagcaggacactaagaagcaaggagaaatcaagaaagctgttcacaatttgttgaagctccctgacagtgttgatgattgtgagcccattgcagatgaaaagaaaagggatagaaaacataaaactattatgaatggcaagattggcgttgattatttacgtgatgtgatggaagaagccaaggagaccaaagatgttgagctggaagttaagtgcttcttcttcatcgcattccatacactgctgctcccagaaaaggatggttatctcactctacaccagatgcaagcgggtatgaaccttgcaaggatacaaagaattaattggcgcaaggttcttctcaaccatttaaaagatggtgttaaatcatggtggaaatcgcaagccaaatcaaccaagcctggtgccaaatcaaccaagcctggtggtgtcgcgtctgtatacataagtggtcctgtgactgtgcttcttttatattacttggacttcctaaagtcaaaatccgaaagcgatgtctctcagacgccaagaatttgttactacggcgaatctatggtgaccgatttggtgcaggaaactatgcaaaaggatggcaagaggtttgacaacctcaagtttcgcacaaccgaagagacctgttattcaagaagctataatgaatgtgagaaggtgaaggtgcagaaagtgtctggaaagcagaaaaaaaataagcgcactcgtcttggcaaaaacaaaggcgaaaaaggggataaagaagaaaagggcacgcatgtcaaccccgcggtaagaagaaaggaagttgtgaaaagatatggtgagagagctgagaaagacagtggtgccaagaacgacatggttgcgcacattcctgcattagaggattttgttaaatcttctttggagcacatgcctcgttatctgcacagcgacgctatcaagattgtaaagcaaaatcattcgtcgattgtagagatgtatgagaagatcatgaagactcagtcacagatgccctcgaaaatggaaagcttggtagacagatataaagatttggatgagttctattcaaaacacattatgtcaaaagccgattgggaacagaaacatttcggcaataaggctgcggtggatattaatggcattaccattgcagaacatgattttgtaaaaagcatgaaactgaatggatggataagtaacttcattgtggacgtgcaatgctccatatggagggaggaggaagaatggaaagacaaaataatccttagtcaatctgctgtgaatgaactgttgggtttaaccctaatcagaggctatgtggaaaaggagttgtctaacctagccaaaaagaagcagatatttgtccctatcctcattcgagctttggatggttctggtttacattggtacttgctcgtggtggacattgagaatggaataagatccgattgtggattctatatgctgctgtatatggaacgatttggtagaatgaaaatagatgacatcaatgagaatgatgtattaatgtatcgcaaaaaacttgtgaaggacatatatgagaatcctaacaacaatcctaaggatgtaagtgacgaggtcatagctcaagatgaatatcacattttggacgacaccatatgtttgtcaccacccccttcagatttgcgaaattcccctccacgcccaaatctgacagtatcccccatgagtcatgaagatgggcgtaatgatggccctctgccaccatcctcaccagggacaagcgatggtaacaagaatctggaagatgcccaaccccaagaggaggctgacagatccagtgtgggaatagatctggacaagttgaaatccaaaaggtttctaatcgtctttgatgatatatgggaacacgactttagtaaggctgcatccacaaaaagatttagcaagactgagtgggaaaagttgttagctccatttggaccgggagagaccaatggcaacatggttctggtcacaactcggttcccaaaggtagcagaaacagtcaagaaaggagccaatcaagttgatctacatgggctggagcctgatgagttttgggacttctttcaactgtgtgcatttagtgaaacccaagatgacaatgataaagaaaaattatttgacattggaaaacaaatagcaaagaagttgaagtgctccccactggctgccaaaacagttggaccactattgcgtaagaaacccaccaggaaacattggatggaaattcttgaaaaggaagaatggctaaaacaaaaggatggcgatgatagtattatcactgccttgaaaattagctatgactacctccccttttatttgaaaaaatgtttttcatatcttgcccttttccctgaggattatgagtttgatagtttagagattagttgttattgggactcaataggtatcatcaattccagtggtaagaatgatacaattgagggcattggatcacagtatttgaatgaactatacgataatggttttctaatgaaaggggatgataatcactacgtaatgcatgacttactgcatgaactttcgcagattgtttcatcaagagaatgcgcaaatataaattactctagttttagagctgatgacatccttccatctattcgccatctgtccattaccatacaagataaatatactgagagttttaaagaggaaatggaaaaaataaagaaaagggttgacattagaaatttgcgtagtgtgatgatctttggaagttacagaagtagaagaattgctaatgtggtaagagacacgttaaatgaaataagggcacttcgtgttctcttcatatttatgaattccccacattccttgcctgataacttttcgaaacttgtccacctccgctacctaaaaattggatcaccgtgggggttcaaagtgtgtattcctagcacagtgtccaagctttatcacttgaaattcttggatctcaaatcctggggtggtagtaacaataatttgcctaacgactttaaccgccttataaacctacgccattttcttgctaaaaaagaattccattccaatgttcctgaggttgggaaaatgaagtgtttacaagagctcaaagaattccatgtcaagaaagacaagattggatttgaactggcacaactgggacagttggaacagcttagaggggagctctgtatatttggccttaaaaatgcaactagggaagaagctattgaagctaaattgaagcataaaagtaacctaagcaagttgcgattagatcgtggtggtaatagagagaagaatacatcctcctcctcctccaggacacaagttgttagcaatgaaaatcaggacgatgatattattcttgatagccttcaaccgcactctaatcttacagaactaagcatcgtaaatcttggtggtggcatggctccaagttggttgggcagcaacatcatccacttggataccctccacctagatggacttgaaaggctcgactgcatttcttgtcccaagcttaatgagttgccattatcgagttgctctagctcatcttgtaccatgtggtttcctaagctgcgccgtttgaacattacccggtgcttggagctgtctgtccctcttgtgcctcacacctccacactgacatatgttcgtgtaaatgattccgttcgtggttttaatactagcaaaaagttgacactcgacggctacaatggtgctttggccttccaaaatctgggtaatcttgaggagatctacattggagatgtacataacatgtcattaatagatttccagcagctacgctccctacggaggctgacggttacgctttgcagggatacgttcttgagaggactggatgagcatgttgtagtcgtattcaattcagttagagtcctcaatctctctggatttttacttacaagaaagatgctgtcaaatttgttcagatgcttcccagctctctatgtgctgtctatgtcaccttccaaagagagccatgaggaggtaaaactgcagatcccatcctcctgctcactcaagacgatccggctttttaagtgcaagaacctgattctgccgcctcttgatgatggacaaggacttgtcaatctcacgtcgctccgaaatttacatatagatgattgtggcaaaatattctctcagtggtacatgggaaaaccagctcaaacaacaagtaaccctttcccttcttccctcctcgaacttagcatttgccgagagtcaagaatacattcaatggctttgctctcaaacctcacagctctcaccagtctacaactaatagattgctgcaatgtaacaatggatggatttaatcctcttatcacatcaaatctgaacaagctgtgcatctcttcttgtggctctgctcccgcggacctactcgccgagatggcaaggaccaaaacaacaatgcctcaagttgccttccaattgaaagatcttgtggtggacagcatatcggcagtgcttactgctcccatatgcagcttcctcgcccctactcttcacgaattaggcatcaaagacgatgttgacagggtctcaagcttcagcgacgaacaagagggggcacttgagctacttgtctccctcaaaaaactatcatttgatggtttatgggttctgcagtccctccctgaagggttacataagtttccttctctcactgagctaagtatcagccattgtcctcaaatccaatcgcttccaaagaatggcctcccaacttccctagaaacgttttcagtatttatctgcagcagcgcactcgaagaggaaagcaaaagattcacagaagagaaagaaagatactactcagaatcagacgactag

SEQ ID NO: 95298 - DNA, 452 bp, Oryza sativa
  unsure (1)..(452): unsure at all n locations
  Clone ID: PAT_MRT4530_93506C.1
tcgaccccgcgtccccccctcttccgaaaaaaaaaaacattttttctgtgaaaaaaaaaaaaaaaaaaaaaaaacaaaacaatataaaaaatccaacttacctccccatacataccacattcctaacctctttttttacctccacctaaattcatttctcttccccacaaaaaacttttttttaaacaagtattgttttaagnnnacccatcttaaacccttttataaacacccccctttcccctgctggcccaatccccttataccccccccccattgcccttaccaacaggtgccccccctcattcccctttgacccccccctgtaaccgaaccttaaccccccccgttccctgtgttaccccccccttgaccgttactttttccannnccctaacccccncttcttnannttttttcccctcctttctcccccctttcnccctttttcc

SEQ ID NO: 95299 - DNA, 688 bp, Oryza sativa
  unsure (1)..(688): unsure at all n locations
  Clone ID: PAT_MRT4530_93507C.1
gcacgaggacaagcccaagtcgcgtcgcaccgaagcagagtagagaaggagaggagcggagcgccatcagccgtccgatcgagtgatccgatggctctcgctctctccacctctgctgctgctgccgccgcggcgcgggcgctcgcggcgagggtgacgacgacgacgacgaggggttacgcggcgtcggcggcgtcgtcggcgatgaggcgtgcggcggcggcggtggaagggaagggcgcggcggggatgacgcaggcgaaggacgggtcgtcgtcgccggcggcgagggaggtgtcgtgggtgcccgaccccgtgacgggccactaccggccctccaacttcgccggcgacgccgacgccgccgacctccgcgccgnccacctcgcccgcagctacgcccgcgcgtgatgcgcgcgacctcgccgtcgttcgaccgacgacgacgccatccatccatatatatttgctccgcggtaactactcattacctcttgaccggngaccgcgccgcgccgaacgccgctccgtcttcgtgtgcacctggacgacgaacacgacccattatcgccgggcggcggatcggcccgcggcggccggatccccaccgtttccttggtgggtgtgggctggatgctttgctcgtgtgctggttctttctgcacctctcagtaacagcgagcagggn

SEQ ID NO: 95300 - DNA, 3960 bp, Oryza sativa
  Clone ID: PAT_MRT4530_93508C.1
atgacttcctacgccgtcagctcaggcgggttgcttcgggtcgtccccggcgagagcaccggatgtcttgcggctgccggcgtccccgcaacccgtcgccgccctcgcaacccgccgccgccgccgggcttccctgcctcccccggccccctttgtaagtcaggccatgagcagagcacagcacgggagcaacgaggcgagcggctgctacggcgttggcgcgcggctgcccagctaggcacctgcggcgcgggctggccagacgcgcggctgcggcggcgcagcaggccgatggccaccggcgagggcacggacctcggctgcggcaaagcctcacccgacgatcctcacccgacgctccgtgccccgacgttcctccacgattacctccggctctccttccccgagcgcacgggaaactgtgatcactttgggtctaggcgtctgatagaatcaatgggcccttctgggagggagggatctggagaggaggtgaatttagaggttgcaaatatgggcgaggctgcttctactgaagagggggatgctgatgctatcaaagaagacgaggctgcttctactgaagagggggatgctgatgctaccaaagagggggaggcttctactgcagaggttgaaatgaaggatcccaagattcatacgcggtccagtccgaacagcgtcattttagcagctcaggaactgtcatcagatgcacggaacgtggttataacagcaggctttgagcagttactgtatatgtccttagagggttttggtaacagagagatattgaggtttcttatgaacaatacacatacagaacaaacatctgaaggtgttgagattaagattgaaggatctaagttaccccccatcacggagaatgtggtggcacatgttgttggtgttcctgaaggttctggtgagagccttgaatttgagcaggacactaagaagcaaggagaaatcaagaaagctgttcacaatttgttgaagctccctgacagtgttgatgattgtgagcccattgcagatgaaaagaaaagggatagaaaacataaaactattatgaatggcaagattggcgttgattatttacgtgatgtgatggaagaagccaaggagaccaaagatgttgagctggaagttaagtgcttcttcttcatcgcattccatacactgctgctcccagaaaaggatggttatctcactctacaccagatgcaagcgggtatgaaccttgcaaggatacaaagaattaattggcgcaaggttcttctcaaccatttaaaagatggtgttaaatcatggtggaaatcgcaagccaaatcaaccaagcctggtgccaaatcaaccaagcctggtggtgtcgcgtctgtatacataagtggtcctgtgactgtgcttcttttatattacttggacttcctaaagtcaaaatccgaaagcgatgtctctcagacgccaagaatttgttactacggcgaatctatggtgaccgatttggtgcaggaaactatgcaaaaggatggcaagaggtttgacaacctcaagtttcgcacaaccgaagagacctgttattcaagaagctataatgaatgtgagaaggtgaaggtgcagaaagtgtctggaaagcagaaaaaaaataagcgcactcgtcttggcaaaaacaaaggcgaaaaaggggataaagaagaaaagggcacgcatgtcaaccccgcggtaagaagaaaggaagttgtgaaaagatatggtgagagagctgagaaagacagtggtgccaagaacgacatggttgcgcacattcctgcattagaggattttgttaaatcttctttggagcacatgcctcgttatctgcacagcgacgctatcaagattgtaaagcaaaatcattcgtcgattgtagagatgtatgagaagatcatgaagactcagtcacagatgccctcgaaaatggaaagcttggtagacagatataaagatttggatgagttctattcaaaacacattatgtcaaaagccgattgggaacagaaacatttcggcaataaggctgcggtggatattaatggcattaccattgcagaacatgattttgtaaaaagcatgaaactgaatggatggataagtaacttcattgtggacgtgcaatgctccatatggagggaggaggaagaatggaaagacaaaataatccttagtcaatctgctgtgaatgaactgttgggtttaaccctaatcagaggctatgtggaaaaggagttgtctaacctagccaaaaagaagcagatatttgtccctatcctcattcgagctttggatggttctggtttacattggtacttgctcgtggtggacattgagaatggaataagatccgattgtggattctatatgctgctgtatatggaacgatttggtagaatgaaaatagatgacatcaatgagaatgatgtattaatgtatcgcaaaaaacttgtgaaggacatatatgagaatcctaacaacaatcctaaggatgtaagtgacgaggtcatagctcaagatgaatatcacattttggacgacaccatatgtttgtcaccacccccttcagatttgcgaaattcccctccacgcccaaatctgacagtatcccccatgagtcatgaagatgggcgtaatgatggccctctgccaccatcctcaccagggacaagcgatggtaacaagaatctggaagatgcccaaccccaagaggaggctgacagatccagtgtgggaatagcagaaaatgctgaggcaggcaaccaggcgaatcatgcgaggacaagcgatggtaaccagaagctggacgatgcccaagctcaagggaaggccaacagatccagtgagggaagttccctggatacaagaacagacaatgaacgctcaaggacaagcgatgatgaggctggaggcaacgaggtggatgaaggtgaaaaaggggtgccatcatccccaccacgcagagaacaaaatccatcccatgccctcgataaagacatagtttattattctagaaagaagaaagagaagaaaaggaaagagaagagcaggtcaagcttggataatgacttaattcaactgggcaagaggtgccgaattgcaactaccaggactgctataaagactactagacgcgagtggcctgatgatgcgatagttaaagaggttaggactgctataaagactactagacgcgagtggcctgatgatgcgatagttaaagaggtttatgagcttgccactgattgtaaggaacaagtaatattgaatttcggagctatcgcaatgactggttctgaaatagaacagtcgttccagaaagttgagtgtgccggggatattatctcattatttattaaatacctggagaacaatacgtatcctgatgacagcaggatctttgtcccaccactatacaagggcaaaggaggtatgaagaaaaagattaaagatgcactcggtggatccaacgaaaagaaatcagcagtggagtttcctcatcgatttatatactgccctgtcttattctctggtgaatggattgtggtctgtttccaactgaagaatatgaaacagatcggtattctttgcaacaacggtggcgacgaaattaaaaatttcgctttggatttgggaaagaaattaaacaaagtcttaggagactgcaactacaaaacagtgtcatttgatgaaaaatctctgtcattttttccgtcttgtgtacagcccaatgacagtgtgttcgcagccatgtattttcttgaacatttcataggtgtggcaggagtgctcaacaagctgacttgggatgaaaagatgcgggatcaatacattaaatcttacagtcgagggattttgacatgccttatccagcacaaggaaaacactgcagatgtgcctgatggaattttagcattgttcgaatag

SEQ ID NO: 95301 - DNA, 669 bp, Oryza sativa
  unsure (1)..(669): unsure at all n locations
  Clone ID: PAT_MRT4530_93509C.1
aggattcggcacgagcaagcccaagtcgcgtcgcaccgaagcagagtagagaaggagaggagcggagcgccatcagccgtccgatcgagtgatccgatggctctcgctctctccacctctgctgctgctgccgctgccgccgcggcgcgggcgctcgcggcgagggtgacgacgacgaagggttacgccgcgtcggcggcgtcctccgcgataaagcgggcggcggcggcggtggaaaggaaaggcgctgcggggatgacccangcgaangacgggtcgtcntcctccgcggcgaaggaagtgtcttgggtgcccgaccccgtgacgggccactaccggccctccaacttcgccggcggggccgacgccgccgacctccgcgccgcccacctcgcccgcagctacgcccgcgcgtgatgcgcgcgacctcgccgtcgtccgaccgacgacgacgccatccatccatatatatctgctccgcgtcaactactcatcacctctcgaccgcgccgcgccgcacgccgctccgcctccgcgtgcaactgaacgacgacgacgacgcatcatcgccgggcggcggatcggccggcggcgncggcggcatncctaccgttttcttgctgcgtgttggctngatgctctgttcgtgtgctggttctttgtgcaact

SEQ ID NO: 95302 - DNA, 4061 bp, Oryza sativa
  Clone ID: PAT_MRT4530_9350C.1
ctacctcggtgcttgtggatgccgcctgcgaggttggacaaccgcgccacactcgtcgcttttcatcgtggtcagcaagaaactggagttcccgtagtcgtcatcgacaacgagttcagcctcgctgtcctgcttcatgtccaagcgtgccgccaagtgagatgcatgcgcgacccacgcatgcggtggacgagagcaccctccagtcctccacgcctgcttcgtccctgccgtcgagctccctgcaacattctccatctctggaatccagttcgcccttgcgccctccaccagcgagagatgaacacaggtcgagcggcggctttggcggctggacttccccggcgccgccggacctccggcggttgtgaatgggtagaagccgagcatgttataggtggcggttgacttcccatgtggcatcgacgtggcgcttacgtggcaatcggcgggatcacagagcggcgggagctcgacgagagcgatagaacagcgggagcggcggggcggcgggagctcggcgggagcggcgggacaggcggggtagcgggagctcagcgggagcggcaggacggcgagagtggcggggtggcaggatctcggaagagcggcgggagctcggcgggaacggcaggacagccgtgacggctgctgctgctcggtagcgacgttgccgacaaccttgctccccacgagctccacttcacctccccacgtcaccggccgatcccacctctcccggccacgatctccatccctgagccctatataaagcaccctcgtgctcccctcctccgttttcccctctctcccaagctcccccatgcccggaaccccctcctccccgtgagcccaagcgccgccgctcgccggcggactccagccggccgctgccgccgctaccgccgtccccgtgccgcgccgcttgcatcgccggcctcgccgcgctttgtcgcatcccgtccaccgctccgcttccgcaataaaccacccgggcaccgattccaccgtgaacccgagctccaccgccactttgccgactccggcagcgcgccaccgccgccctagccaccaccaagccacgccaccgccaccgtcggcttcgccgcatcgcgtagcaccccggcctctgcttcgttttcccgttccaccgcagcaacaccatctccaccgcgaagccgaggacgtcgccgcgtttgccgccttcggccgcctcttaccgctgttccttgccacctcgcgccacaccaccgcctctactgcgttcgccgcgttcccccataccccggccgctccttcaccttcattggagaccgccgaatcgccgccgtcgtcttcaccccgtggagcgccgccgcctccttccgcggccgctccctccgtcgccgcgcctctcggtgagccgcctccctcctccttttcctcttcgccggccacctcccgtgccagcgccgcgttgcgccgccgccgccgccggttgtctggccgtctgcgcgccgcccggccgtccccagccgtccgatcggccttggccgatctaggccgtccaacccgtggaccggcggtggaccgtccttgtggtcccggtccacggtggaccgccacctcgtctcgcgcctttatgcaaatagccacaaaccatccttgtatccccttgcacatctgcatcgttggtgtggcttgctgagtacggtggttgtactcagcctgcgtgacatctttacaagtccagcttggactttggttttcccaaacactactgtccacccattgaccaggaatatatcagatcatgtgccctgtgtagatcaaattgataccaagattccaaagtctccaattttcaaatttgagaattattgggttgaaatggaaggattctttgagcttgttagcagaatatgggcaatagaccctggttatgaagatccggcaaaatgcattagcttcaagctaaagtgtttgaggaaaagtttgctacattggagtaaaaacttgtctaagttaactgcccttttggttaattgtaatgctgtaatcaatttcctagacctaatagaagagcatcggcccttgtccatccttgaatggaacttcagagaaattatcaaaatacagatccttatgcttcttgagtttaaaaggctttattggaaaaaaaaaggagcacgaatagatggatattattgggtgaggaaaatactaaattcttccaagccattgctacggaaagatatagatcgaactccatttctcaggttcaggatcagcatgggcagatagccactggacacaatcacaaagcagatctgttttttcatagtttcaaaaacagaatgggaatttcgctcttgcctccaatggactttgatttgagggatctcttccccaatccggaaaacttggattgtttggttaatcagttctacacttaggaggtggacagtcttattaaggtcattccatcagacaaagcacctggacctgatgggtttaatgggttctttcttaagaaatgttggcaaatcatatcacaggacttttacaggttagcagctcactttcatgcttgctatacagatctgcagctgctaaacatgtcttacataaccttagtgccaaaaaagtcctctccagaaacagtcaatgattacaggccaatttcactgatgggcatcagtttaaagttcataaccaaattgatggcagataggttgcagagtgtaatgcctaaactggttcatgagaaccaatatggttttatcaaaggcaggacaattcaagactgtttagcatggtctttagagtatattcatcaatgccagtagtcaaagagagaaattatattgctaaagtatttgattctatagagcactccaccttgatatccattatgaaatgtatggggtttcctgaaaagtggctacagtggatacagatgattttttctacggcacatttttcagtactacttaatggggtacctagaaactcttttaaatgcagaaggggggttgggcaatgagatccactctcaccattgcttttttgttcttggtgctgagttgctgcagagaataattaacaaagcttgctccttaggtctgttgaccaagccaattaatgaacttgatgagaagggtttcccagtaatacagtatgctgatgacactctaattcttctcaaagcttcggagagagaggtgttttgtttcaaggcattgttgaattcatttgcacactctactggcctcaaagtgaattatcataagtcctgtctctacccaatcgatttatctcatgagaatgcagggctttttgctggtgtgcttgggtgcaccataggcacaatgccttttacttatttgggtttgcccatgggaacaactaggccaagggtagtggattttgcacccttggtagacagggtagaaagaagattaatagcaagctcacaatttctgccacaaggtggaagactcacattgataaactctgtgctttcctcaatcccaacatactacatgtgttctttgcagctgcctgtttcagtggtaaaagctattgacactgcaaggaaaaattgcctttggaggggaaacaatccaacttcaaccagaagatctctagcctcttgggatctagtgtgcagaccaaaggatgaaggtggactaggagtcatcaatctaagagttcagaatatagcgcttctgcttaaacatctagtcaaattttacaaaggacatgatctgccgtgggttcaactgatatggaactcttattatagctctaaagtgccacatttagtttggaataaaggatctttttggtggagggatatagtggctctgactgatgttttcaggggaatctcaaactgccatatcaggactggatcttcagctcttttctaggatgacatttggaatgataagataagaagcaatgcttttccatctttatatatggttgccttagataaaactctctctattaagcaaataggttctactcctcttgaggattgttttttactgcccctgagcacccaggcttatgga

SEQ ID NO: 95303 - DNA, 889 bp, Oryza sativa
  Clone ID: PAT_MRT4530_93510C.1
ccaccgggccggccgggcacacagagctcacaagcccaagtcgcgtcgcaccgaagcagagtagagaaggagaggagcggagcgccatcagccgtccgatcgagtgatccgatggctctcgctctctccacctctgctgctgctgccgctgccgccgcggcgcgggcgctcgcggcgagggtgacgacgacgaggggttacgccgcgtcggcggcgtcgtcggcgatgaggcgggcggcggcggcggtggaagggaagggcgctgcggggatgacgcaggcgaaggacgggtcgtcgtcgtcggcggcgagggaggtgtcgtgggtgcccgaccccgtgacgggccactaccggccctccaacttcgccggcggcgccgacgccgccgacctccgcgccgcccacctcgcccgcagctacgcccgcgcgtgatgcgcgcgacctcgccgtcgtccgaccgacgacgacgccatccatccatatatatctgctccgcgtcaactactcatcacctctcgaccgcgccgcgccgcacgccgctccgcctccgcgtgcacctgaacgacgacgacgacgcatcatcgccgggcggcggatcggccggcggcggcggcggcatccctaccgtttccttgctgcgtgtgggctggatgctctgctcgtgtgctggttcttcgtgcacctctcatgtaacagcgagcagggcctcactctactactactgtttttgttttttaactttcacggtttcaccacgtacccgagtgtgatggttttaatggaacaagtaataaatcagtttaatttcctttcaaaaaaaaaaaaaaaaaaaaaaaaaaaaaaaaaaaaaaaaaaaaaaaaaaaaaaaaaaaaaaaaaaaaaaaaaaaa

SEQ ID NO: 95304 - DNA, 489 bp, Oryza sativa
  Clone ID: PAT_MRT4530_93511C.1
cccacgcgtccgcccacgcgtccgaacgagggtagcggctcgatggcaacgaagggcgcacagcggcgggcggcaacaggcgacggcatcaagggtcaagggagctgggccccgacggaaagccgtgcatcggcgggcgggagcggcggcaggcaggcaaggcccgaacaactcgccatggccacccgccgccgcgccaacgcagccgtcgtcgtagaccctgaagccgtggagcgactcagacactcagtcgctcgccatggtgctctccttcgcagtgatggtcgcgcggcatccacaaccctcttcggcgaggcccgcatcaccatccataagtccgccgcgaagcccaagccgtccacctctggcagcccgtggtacggacccaaccgcgtcttccgcttcgccgatctggccaggcacgtgcggagcccgctagcgctctccatgaggcaggactatgcttgcattgattgggtagttggatag

SEQ ID NO: 95305 - DNA, 625 bp, Oryza sativa
  Clone ID: PAT_MRT4530_93512C.1
gcacgaggcctcgtgccgaattcggcacgaggctagtctcgagttttttttttttttttttaaatgcaatgcgtgattttaaattttacatcaagcataaaccagcgcttcacaatccattttctggctgcaccacctcatgcagcacagcttaattaacagaattaaaacacactctaaattgctttctgttgttgtttgttaactgtacggacacaataccaaactaacaattattcagaaaagatgaagaaataaaagaagaggatcctacactacacacacaccaatctcatcaatgtatatgccctgttcatagatcttgtgttttttttctccccaacatgaaaaatctaacacctaagttgcaataaacaacaaccacacatcattttgcttttgctttgatggtttggtaaagaattgagaccaccaaattctcccaatggagacagacagtaaccagagcagtgaacagatttgacctcttggagaagaagaagatggcgttcgtcagggtggcgacttgaacgcctgcacgatgagggagaatcccggcgcggcggcctcctcctccagccataggcggctctcgagcgcgctcctcgcccggagcatcaccacc

SEQ ID NO: 95306 - DNA, 388 bp, Oryza sativa
  Clone ID: PAT_MRT4530_93513C.1
cgagcgaatgatgctcatggtcatttcaaatcagatagtctgtactctaatttcctaaaacataaacacagttttggggcacaaacaaaacccccttcttcttcttaatgaaatttggtcgaccgaatccttcggctgacccggcaaaaaaaaaaaagttatgtggcatagtaaaccccctttattttatttttgcagcttatacttgtgaatccaactggagaggtcatggagaagatacaacgagcgaatgatgctcatggtcatttcaaatcagatagtctgtacttaaccactggggaagcagtggcttcactctctacattttccaagatgacagcgccttagagctgattcttaaggttgtcattttcattattattctaac

SEQ ID NO: 95307 - DNA, 276 bp, Oryza sativa
  Clone ID: PAT_MRT4530_93514C.1
tggacgccgtgtccaacgttgcctgtccgggtggagctccggagcggcgcggtcgggtggggggagtgctgccctgtgctccccctcctgtcacctgcctgatgtgaccatgccctgtgtgctgctctgcctgctgtgcaccctgggctgtgctgtgctgctctgtgcctggtgctgccctgcctgctgcccctctgtgctgcctgtgctccatggactgtctgcctatgttgccctccctgtgtgacactgacttctgcctcgtgtctagatgca

SEQ ID NO: 95308 - DNA, 390 bp, Oryza sativa
  Clone ID: PAT_MRT4530_93515C.1
atggactttaaaggagtaggagaatggagaaaaatacaaattgctgaacttgaagaatggagagagaaggcttctcacaacgcaaagatatacaaagaaaggacgaagcgctggcatgataaaaggataaaaatcaaaaaattcaagccattagacaaagtacggatattcaactccagggttaagcttttcggccacgggaaattgcacagtaaatgggaaggaccgttcgacgtcatcgacacctcttcgcacggggcaatcacactccgcgacgattcagttaatatattcaaggtaaacgatcaacgcttaaaaattttccttgagccaaatgaaactttagatgaagaagtggatgttattaaattaatcgataatgagccataa

SEQ ID NO: 95309 - DNA, 297 bp, Oryza sativa
  unsure (1)..(297): unsure at all n locations
  Clone ID: PAT_MRT4530_93516C.1
gntctccatcccgccagcagcggcgccggcatcctgcttccaccgcgtcctcgcagtagtagatagatctatttgcctggctctcagggaagagggtaggagtntggcatgtcagggatcctcgcgtgggcggccgacgtggtcgcggnggccggcgccgccaacgacgacgaagctgatgacgctcgggcggtggcgtccgcggccataaccccggagcagcgcctccttgccgctgacctggatgccaaggcagcatcgctcgggcgctcgatccacgacctccgnctccgggtg

SEQ ID NO: 95310 - DNA, 153 bp, Oryza sativa
  Clone ID: PAT_MRT4530_93517C.1
atgtcgtcagcaggcagccatgatcccgcgtcgcgcctgctcccggcgaaagtggagattgggagtttagagtctcacccagggtccccggccgaatcggcaaaggggggccagcgcggtctcccggtgaggagccccatgctccgtcagtag

SEQ ID NO: 95311 - DNA, 320 bp, Oryza sativa
  Clone ID: PAT_MRT4530_93518C.1
acgtgccagtttccagctttcttcccttccgcgtcacaccttatgtcttcagctacacacaccagatgggcgcgatgccggtgaccgcgggtagcacgcgtacgccctgcgtaccactgcgcaggaggccgccaccgcgcgctcgccggaggaggcgccgagctaaaccgcacacctgtccgccgtgcgcgtccaggccgagctcacggggtcttcgctgcgcacgaggaggggacggcgccgacagacgacggcgggccggatatgatagatgcgtacagaaggccggcattctcacctttgcggaggcgtcacgccag

SEQ ID NO: 95312 - DNA, 238 bp, Oryza sativa
  Clone ID: PAT_MRT4530_93519C.1
cggtatgtttttactctcgaagggcattcagatttgtcattttagacatttaagttatgcctcagtggccatcagttcttgtttgttttagtgagagaaaacctgagcctgtcataatttaatgccaaatgaaagtaagggcaagtagattcctaatgcactgctgttgaactagcaattctcttttggaaacttacaatcaggacatgtagaaaacatgctgaatttcgattcccaa

SEQ ID NO: 95313 - DNA, 743 bp, Oryza sativa
  Clone ID: PAT_MRT4530_9351C.1
atggcgtcggcgtcgccgagtagtaattcggtcgtaggaggggccggcgccggcgccggcgacgtgtgctgcatgtgcggcgaccgcggcctgccggaggagctgttccgctgccgtctctgccgcgtccggctgcagcacaggtattgcagcgatctgtacccgagggcgacggcgtacaggcggtgcaactggtgcctggtcagggagcctgctcccgccgccgccgccggagccgccggccatgtccacgcgatggtggataagccgacgacggtgcgacggaagacggcatcgtcgtcgtcgccgccgccgtcgtcgtcgatgacggatcaggagacttcgccgacgacgatgtccagtgaggcagagcggcagcggcgcctgcaggaggcggccggatggtcggcttccaggagggcgccggacacggccgggctcggccggccggtcaagaagcagaaggctgccgccgacgacgacgagggggaggaggctccgggcgcgagagcggcgccggcggcgaaggggaacaacggcggcaacaaggaggagatgcaagcggcggggaagaagaccggggtgaaggtcagggtgaggaggtacaagctcctcgccgaggtcatcagctgctagagccaattgcggttgctacaatgtgtacagtatgtgtactgtatacacgtatccgtcgttatgcacggcaaatagtgtacagatcttgtgagaaaaaaaaaaaaaaa

SEQ ID NO: 95314 - DNA, 295 bp, Oryza sativa
  Clone ID: PAT_MRT4530_93520C.1
atggaggccaccgccgccgccgccgcaacgcccgcgagatccgcgctccccttccggagccgcgtcgccggcgcagcacgcccaggacgcgcgccggcgctggcggccgccccgggaaagggcctcgcaccgcgccgggccggggggacggcaaggcggggcccgatagacctgctccacatacatagcctcaggcgcaagcggtttgtgcagcgttgcccccgccgtgagcccagcaggcgggagagtcaccaatcacgccggggaacagacatgaacgaccgccgggaggcgt

SEQ ID NO: 95315 - DNA, 621 bp, Oryza sativa
  Clone ID: PAT_MRT4530_93521C.1
atggtgcccttggcatcggggggcaccatgatcaggtcagcgagccctgacatcttcaaggtaagggcggccgaagatgatgttgtatgcgaagttttagctagtgatgtcgaagatgatagttccggtctaaaagatatccttggtcctgaaggtgacaagcagctgaacgtgctcgagggggatagtgtggttgcacggggtgatgtcgtggaacgccgcggatggcttaaggcgccttggccccacatgcagcttgtcataggccgcagggaacatgaggctcaagtccacactctcattgatcaatgcacgatggaccttcatgttgcagatggtggaggaaactaccatttccaggagggtgaagacgcccccgtcgaggcaggtgataacgttctcaagctcttccaactcaaggtcatcgtctttggcagtgtcttcggcattgaaggatgcacgacgatcctcgtgctatttcttgctgtgcacggagaggcctttcacctcccatcactccatgaggtcatgctagtcaatatcatggatcttgcagtagttgctggccctctgctcagggggcgtgggcttcttcttgatctcgtcggtgtcatcgcatga

SEQ ID NO: 95316 - DNA, 1029 bp, Oryza sativa
  Clone ID: PAT_MRT4530_93522C.1
atggaccgatacggcgagaagcagcagcagcagcagatgtttgcctcctacgtggacgcctccctcctagcagccagcggtgaggtgcagggcgagaggccgagagcgcggaggaggaggaggcgtggggcgaggtgcgttggcggcggcggcggtggtggcgaggtggacggaggggacccgaagaagcggcggctgagcgacgagcaggtggagatgctggagctgagcttccgggaggagcggaagctggagaccgggcggaaggtgcaccttgcctccgagctcgggctcgaccccaagcaggtggccgtctggttccagaaccgccgcgcccgccacaagagcaagctgctcgaggaggagttctccaagctcaagcacgcccacgacgccgccatcctccacaaatgccacctcgagaacgaggtgctgaggctgaaggagaggctggtggtcgccgaggaggaagtgaggcggctcagatcagcggcggggagccacacggcctccggagaaggcggagacatcatgggcttaggcggcagcggcgcctgcgtcgccgggagcccgagctcgtcgttctcgacgggtacctgccagccgccgagcttcggcggcggagatcacctcggagacgatgacctggtgtatgtcccggagtacggcggctacgctgataacagtgtggttgagtggttcagcctggaagtgatagtagtcaacggtggaaccacctcccgagcttttgggaagaggaccatggcggctccaccactaatagtggtgcaggtgtgggatcatgacttggatgtatgtcgacagcaagagaaggtggcaagggaagatggttatcgattttgtcacccgatagccatatccgtctcaagtgtgagtgtgagtggtccaaataagtccggcactctagactccgaagctgaccatgtcaactgttggctcggggccaaggtgaagccccgtgtgcatggacccggacaataccatgctcgacctcaagtatgcctctag

SEQ ID NO: 95317 - DNA, 1474 bp, Oryza sativa
  Clone ID: PAT_MRT4530_93523C.1
acggtactatcactgtggtacccgaaggcaagaaatagcacgaggatcgtcgtgcatccttcaatgccgaagacactgccaaagacgatgaccttgagttggaagagcttgagaacgttatcacctgcctcgacgggggcgtcttcaccctcctatctcattacagcctcaagatgatgtgatgtgagctatgcttggccaccttaagctcggaagccttccgacagctcaagtagcttgactcctaataaccttcaaccaggtggaccaccccgagaactcattgggggtcgggtacctggaaatggtagtttcctccaccatctgcaacatgaaggtccatcgtgcattgatcaatgagagtgtggacttgagcctcatgttccctgcggcctatgacaagctgcatgtggggccaaggcgccttaagccatccgcggcgttccacgacatcaccccgtgcaaccacactatccccctcgagcacgttcagctgcttgtcaccttcaggaccaaggatatcttttagaccggaactatcatcttcgacatcactagctaaaacttcgcatacaacatcatcttcggccgccctgcactcgccaagttcatgacaaacacacactataagtacgtcaccttgaacatgccagggctcgctgacctgatcatggtgccccccgatgccaagggcaccatcgcttgcattgagcagtcacacatggcccaagcttccttcggctctagtggagacagggccaatcagagcttggcaccccctccctccaagccgtggctcgtcacctatgacttcgttccaatcaaggatatcgcgttgggcgacgacccatccaaggtcgcaaaaattgatgatggcctagatcgtaaataagaaagcacgctcgtcaccttcctctgggcttatcccaacgtgtatgatcaaccaccgcctcaccgtgcactaggacacgttacgtgttccatagaaggttcgacgacatgcacctaagagtcaatacttcatccgggaggaggttcccaggcttctcgatgtcggcttcatccaagaagtcactcatccagagtgtcttgtaaactctgtcgtcatccccaagtccaacaacaagttgacaatgtgcatcgactacaaagtcctctataagacctcaacaaagtgtgaccttttgtatgttttggatgcgtactttggttaccattagacacatagataaggaggacgaggaaaaatcttcttttattaccctgttgacgacatacttgtaagtttgcacgccttttgggttgaaaaacacctgaccctcgttacagcgcatgatgtgcatcactctgaaatcatagctgggccacaacattgaggcctgcatcaatgatgtggtcatctagacccgtgactgagccttgctactcgaggacttattagctaagacttttgacagttttcgcagctcatgca

SEQ ID NO: 95318 - DNA, 273 bp, Oryza sativa
  Clone ID: PAT_MRT4530_93524C.1
atgtcgatgtcgatgttggtgaagagggaacggacggggacatgtgacgaggaggaggagagtgtcttggggatgggagagagggaggggggtgtgggcgtgtggcagaggagaaaacgtgacacgaatgggagtgggaaggacaacgaggggaagggtggacagcatggacgacgcgaaggtggcgttgatgtcggcaccggctggcatgttgcaagcctgcttgacagtcgacgctgccctgccgggcttgatcaactagaaatttgctag

SEQ ID NO: 95319 - DNA, 390 bp, Oryza sativa
  Clone ID: PAT_MRT4530_93525C.1
atgatgagtaaatctacgagtaaaatttttactcatgaggacgtggacgaatctcagacatccatttttcgatccaaagagcccaaaattgcagatatgagcagagcaatggatgaggaggaggagcacacatgcaggcaggattgcaggagaaaaacgaaggcctctatgaatgtggggcccacgccatcgcccaatggtcaagcccctatgactttttcattgctgcataataaactgatggtgatgatgatgggtacttgtgcaacaataattgaagagggctttgccccagactacagtgtgttctacgctaataagcaggcaagcagtgattgcccaactgatcacatagcggatcatatcaccggaaaagaatttggagaggga

SEQ ID NO: 95320 - DNA, 342 bp, Oryza sativa
  Clone ID: PAT_MRT4530_93526C.1
gtaaaaattgaagtgttttttatttttttattttttaacgggaaaaaaaaaaagggaggggggggtattatattttttttataaaaaaaggaaattatgggaataattaatttgtggggaaagggaaacccggttataattataaaaaaaataggagggggggggataaacaataaaaattgggaaatctaattagtgggctaaacatatttattagtgaggggtaaaaaggcgtgtgcaaaaaggaaaaatgtcttgccggttgaaataaagaattggtcaaaaatctgaaaaaaaaaaataaagcaaaaaaaaaaaaggggggtgggggtttttccaatt

SEQ ID NO: 95321 - DNA, 1464 bp, Oryza sativa
  Clone ID: PAT_MRT4530_93527C.1
atggcggcggctgggacaagcgtggcaagaatagcagcggcagcgaccacgagagtgtcggaagtggaacccccccctgcaactccgtcgagagcttcgacacctgtaccctcccctgtgccttccccgtcatctacgttccctgatttcgcggaggaatacatccgtcactccttcctggttaggcttacccaatcttcggatgccagggtggccgagaggttcatgcagtttctggtcaactacactgcccccggcgatcaactcccattttacccaacagaagctagagcccttctgcaaaggaaaaactctgattgtcatgagttgttggtgcacttcgaccacctgagagagatggacaaaatactcgccttccacatgtgcaacaaccagaacagaaaaattaacaagattttgagctctgttatacttgcagagttccttctgaacatctcccttcaagatgacgtctcagaagaaactcgcgaggagaaagtgataaagcacaagccaacgattgaatctaaagtgatactcagatttatcggcatgccaaattacaggattaccactctgaaagaattcctggtgaaaaatcaggatgcacttgttgaaaaagtgaggctcttttcaaaggataatgtgctggtaccagcaaaacttggaagctcattattccaatgttgcatcttgcacctcattgcaaaccataagatgggagttagctggaacggagaatttgagctaactgattgggaaatatctgatgatatggtatctctaaaaaaggttcaccatgggcctttacctgatgactcaaaagttgcagatcttgagaagctggtggatttattggctccgttctttttgaagaagggctctcccttattcttcaaacaattgaaggacgatgtgacccttacatctagaacattggtcagtgctagtgattgggaatggttctgggattatcttggctcacatgtgttctatatgcctccagtcgctcgactgcatcttatcaaagacctctttgtggctatcaaaacattcaaattgacttgggtgaaacctttctccactgtacttctagattttactgaatttggtgattggacaattggccccatgagtaagacagatgggcaggagtccatctattacaaggttttttggcacaaggttaagccggaggatattgatccaaaaaacccaaagtactggcccaattacggtgacctgctaagttttatccgtaatctgattgaacatttggatgaacacaaacacgaggagaatattactgatattgttgacgctgagctctttgcatccaacagttaccaagattttctcccacaatttctgcagcgtgtttcttcagcctgtctaatgcagggcaagtttaaatcatcttgggatgccttcaagggttccggcaacgtcaacctggctgcatag

SEQ ID NO: 95322 - DNA, 380 bp, Oryza sativa
  Clone ID: PAT_MRT4530_93528C.1
cgagagactgaaatttctggttgcaatgagcaatatatacaagtaatacaaataaattaagagaaatagcatgatgttgtaatgcacatagcaccagtaccattgatgtatagactcaatttatttacttatgatcagcaagcatcagagaaacgatcgaggccggctcaacctgaaaccatataaacattagacgtatgttcttgtcctgcactttttccccctgtaatgcaatcgaggagaatatgtgagatagaccttgaaatgtccaggtgaaattaacacatacttatacaaggatgtccaaactatattttgtagtaatgcatatattatctgactttattttttttatgttatgcaacactcttatagtgtat

SEQ ID NO: 95323 - DNA, 956 bp, Oryza sativa
  unsure (1)..(956): unsure at all n locations
  Clone ID: PAT_MRT4530_93529C.1
ccacgcgtccgctccacgcgtccgctcgtgtcgtgtgtccgccagctgcgcgcaggccggcgacgaagctgcgtgcgcgcggcaacgtcggccggccgcagcaatggccccgttcatcgacctcggccgcggcgggccgacggcggcgccggggaagccgaggctggtgatgatcatcgccgacccggggcgcgagtcgacggcggcgatggagtgggcgctctcgcacgccgtcgccgagggggacgccatcctgctcctccacatcaacatgccccccaactccgcgggcggcgccgggccgtcgcgcaccggctccggcgggagcgccgggtccccgctcacggcgctcctcggcgccggcgccgcgggggacgccgatttcatggagacgatgagcgccgcgtgcaaggcgcggcacccgcgcgcccgcgtccgcgccctgcgcgtcgagcccgccaccgagggccgcgaggccaaggcccagaccatcctcgccgagtcccagcgccgcggcgtcgagctcctcgtcatcggccaccgccgcgtctcctccttcctcgggttgaggagcccgagcgggtcgagccgagcgcacgacagcacggcggagttcttgatcgaacacagcaagtgcgtgtgcgtgagtgtgcagaagaaggggcagaacgccggctacctgctcaacaccaagacgcacaagaacttttggctcctcgcttgatcatgatcatcacggcctagatagtgatccacacatccatgcagcttcatatatgttaatggatcgaacaaaagctccaaaaacttttttttttgattcttctcgcagcaatgcttgtgtcagacacgatcgatcaatcgagttaattcttcattaatgcaaaaaaaaaaaaaaaaaaaaaaaaaanaanaaaannaananngaaannaanaaaaantanncanaaannaan

SEQ ID NO: 95324 - DNA, 2058 bp, Oryza sativa
  Clone ID: PAT_MRT4530_9352C.1
ctatctagctgccacctcgttcccaatcccgatgctgtcctccgagctgggctgccatagcctctcgaacgcgtcggagacggacagcggctgtccgagcaccgagaggctgaacgcgatctcggccatcttgggccgccgcgccgcgtcctcctcggtgcacgccctcgccatgccggccaagctgagcgccgcgtccacgccgtactcaccgccgagggtcgggtccatccacttcctcagcttcgccgccctcttgtccccgccggcgtccagcacggtgcggatctccgtccgcagcatgccgatctccaccccgacgcgcgcctccaccgccctcctcccggagaggagctcgaggaggagcagcccgaacgcgaacacgtcgctgctcgtcgccgccgcgtcgaccatggcggccggcttggccagggagaagttggacagcttcgccctgaagcccgcggtgaggaggatgttccgggcacggacgtcgccgtgcaccatgctcggctgcgtgtgctcgtgcaggtagagcaagccgttcgcgacgtccagcgcgatgcccagcctctggtcccacgacagagttgccacggagctcgacgacggctgcgagcacggcggcttctggtacagccacttgtcaagcgagcccttctcggcgaactcgtacacgaggaaggcgtagtcgccgtccgcgccgatggatatgccggccagcttggtcaggttggcgtggttcaccatctgcatcatcctcagctccccggcaacgttgcctttcgccggcttcaccgcgaacacctccctttcaaggttcgcgcggtaatacgagctgccgagcttgcactgttcgtccaagttcatcgtcgcttccatgatttcctcctctctaaagatgatcggtttgtcgatgaactgcgacacgctggtgagcagcttgtcccctccattgatcatgcgagcaatggagctattgctgtcgaatctgttcaggctcttggtccaagaaagcttcgggctgacgtgctttggcaccggcgccttcttgcggtacctccggtacgccaagatcgccgtgcacagcacggcgcacgcgacgaaagaccccgcgatgctcgtcgccacgatgatgccgtggcggtgcttgcccgctccgggatcggcggcgatggcaccgtaggtcagcggaggaaaacgcggcggctgcgacaccgggatcagcacgggctgccccgtcgcgaaggtggagttgcccgcgacgccgttcgacgcggcgatgttggcagcggaggcgttcatcagcgcgctcaccacggacacgtcgtccccgggctgccacacgtaggtgacgaggagccgtgacccggcgctgagctcctcccgcgtcgggcaccggcagaagagcggcacgacgacctcctgccacggctccagcctggtcgcctccgccgccgggttgagctcctcgacgaggacgaagtcggtgaggttctcgaacgcggtgacggcgagcccgaagaaggtgtcgcgaggccggatggggtacgtgacgttggcgaaggagcgcgcgcccgtgcagccgcacttgaccggcacgagcagcggctgccccggcaggagcaccccgtcctcggtggtcagcttgttggcgctggcgatcagcgcccggctcacgccgaacaggtccgagatgttgccgaggtcgaggaaccccggcgactgcgtccggtacacgacgaacgtgtcgcacggcgccgacacgttacaggcgaagcgacgtgcccgggcagtggcatcggtgacggcctccccgccggcgagctggaaggcgatgacgacggcgaggatgcacaaacccttgtgttccatttggagctggctgtcacggtgcttgtgaacgtactagttgtgaggagtgagagagctcggtttttcagtggagttaacgtgcagcgtggggtttttgttcgggtcaaacgccggtgcgtctgttgtcgcggctctgctgcttttgattcggtcgtgaaagtccctcctcgcggctcagatgcc

SEQ ID NO: 95325 - DNA, 295 bp, Oryza sativa
  Clone ID: PAT_MRT4530_93530C.1
cccattaaatattttcgaccttcatttgcaccaatctaaagcttctaaacagggggtttttgagggatgaattattcaccacatcaacaaggtagacggaaggcttaatcacaacagcaagggtagtgggcaccaagggcaggggctggaaacgtggcatttgaaaccaattaaaaagttctaaggggacaattgcagccaactgaagtacttttggaaaagggggcgggaaatggccaaaccataacccgtagccttcacagcatagagccccttcccggacggccattcattg

SEQ ID NO: 95326 - DNA, 793 bp, Oryza sativa
  Clone ID: PAT_MRT4530_93531C.1
ccacgcgtccgctcgccatcaccggtggagggaacgcgtcgccctcagctccgcctcgacaagccccgccctccagtcacctccgtctggacctacctcaccctccaatcgccatcgctggcggcggcgacgcgcgaccacctccacactggtagcgcccactcgtgacaacctccgttcgcctccacctagacgtcgacctccttccaccaagcactaccggctgagagcgtccgcagatggacgctaatccaaacaccgtccagaccggtgcagccacttcaaacatatcgaaccgagcgacagaaaaaagggagaaaaattacggcggcgctagggtagggcgccgccgccgcccacattgatcctggaggccgtcgccgctgccgccgacgccgtccagatcgaccccgggaggtcatcgcctccttccaacctgacacaggtagaccatctccgccgtttgcctcaacatcgagaggctgtagcagacgcccacccccgggaggccctcacgaccgcccgcatcgattctggaggacgctgccattggcggcttccaatttgggaggccgaaggttgctgtcttccccggaggctgctgctgctatctgcctcgactcctgtctcgttgttgtcgtcttccttcttccttagagattgcagccatcgtggacctccacggccagaacttcacccagaactcctaatcagcttgaaaatggctgacgatggtcggttcagtgatttactatggatgcctcatggccaacacaaagtatctaaaatttca

SEQ ID NO: 95327 - DNA, 791 bp, Oryza sativa
  unsure (1)..(791): unsure at all n locations
  Clone ID: PAT_MRT4530_93532C.1
caccgccgcctccgcctccgcctccacctccacctccacctccgcctccactcgccatcaccggtggagggaacgcgtcgccctcagctccgcctcgacaagccccgccctccagtcacctccgtctggacctacctcaccctccaatcgccatcgctggcggcggcgacgcgcgaccacctccacactggtagcgcccactcgtgacaacctccgttcgcctccacctagacgtcgacctccttccaccaagcactaccggctgagaggtaacctccactccctactcttcgattattcaagcaatttttccagtgaaatttctcaaatcgctgtgtacaaattgtgtaataaggcaagatcaaatttctcctgctctccaccccatctgatctgaagcaactagttagatcccctagtttttttttggtttgaggtttgctgcagctccagatttagggttgtatttctatgactctattgccagatcacctagttttgtggtttgaatttttcagaagctccagatgtgagacttagggacctagagttatatttctgcaattttattcctttccaatttgaccgaattttttatttataataattaataatatttaaattaaataattagtaattctgtgggaggattaaccaaaatacgaagaacgctattctaaacagcgtccacatatggacgctcctataaacagcgtccgcagatggacgctaatccaaacaccgtncagnaccggtgcagccacttcaaacatatcgaaccgagcgacaga

SEQ ID NO: 95328 - DNA, 1096 bp, Oryza sativa
  Clone ID: PAT_MRT4530_93533C.1
gaggaaagtttagggaaaatgtattgacatttgtgaaatgacactgtttttattagtgattagaaactgagggagtaattgtgtaccagtctgttgtaagctagctacctccagtcatgttcataaacagaggcagtctactgcctaagctgtccaagaactgacgaaaccatgtgcaaggagccggtcacgcagatcagcccagtgtcgccatcttcttgggtctgaagcagccgagaggcaaccctgatcaggtcggacgaaaatggcgtgcaacatccaatcagcatgggtttgtcaccgctcaaggaccgggatgtcgtgggacggctggcgatgatcggagcttcaacgccggtgatcgtccctatgtccgagtagcagctgatgccctggctttgtgcagcagccatccatatctccttcagtgatgaagctggcatagaccgggagcgtcctccagcaatgctcgcctctgtcagcaatacaacatctggtcttgggcatggattgatgggatgatagtatcccaagtgttctttgtcattggccattccaacaacaagagccaaaggccctcttggttggaccgttctttcctcttctgcggtagcctttgctggcgcccccgcaggggctccaccggcgagcactctgcaccctcctccgagcccaagtcccgcactctcctctttggtcacttcttggcttctccccggctcttccgtcttctcttttcctgcgcgggttggcgttcctgtggttttccttcctagctcacggagacataaagctgtgcagcaagctgttacagcattctggcgctgatgatctcccagcaactggagttttaaatcttgcaattcaataaacaatggaatatcatttgaaatctcaatgacaatgtcacagctttgataaggttttccacaatcccaaccaatgcattttgtgatgctcctgatgccgggatcgcatgcagatattacgggagattgtgttaagaatgctctatcccggagaatttgctcgatatctggggaaaatgggccaccaattataactggtcgctcctgcttgatgattcctcgtgccg

SEQ ID NO: 95329 - DNA, 730 bp, Oryza sativa
  Clone ID: PAT_MRT4530_93534C.1
ctcttctctctgcctcctctcttctctttgctcctcccctctcttagctctctctcccgttccctctctctccactgcaccacccgacggcgacctagcggcgggaggggaggtggtagcggcgccctcccctacggtccatccagctgtccagctgcggcggcggcggcccagcagcgggaggggagatggtggcggtgccctaccctatgctccatccggccgtccagcagctgcggcggcaccctcacctctgctagatctggcgggaaagggaggtagcggggccctcccctacgctccatccggcgtccaactgctgcggcggcggccggcccggcagcgggaacggagatggtggcagcgtcctcccctatgctccatcaggccgtccagcagttgcggcagcaccctcatctccgccagatctggagggaagggaggcggtggggccctcccctccgctagatctggcgggaagggaggcggcggtggcctggtgatgacggcttcccacggcaacgacagcggtggtggtggggggggcagcggcaccctcctcctctccatccgacggcaacggcaataatggagaaggcgcgtggggcgaggagacagttatgtgttcttgagtaatgttcttgatgtgttcttgatgaatgtgattttgatgtgttcttgatgaatgtgatgttgatgtattcttgatgaatgatgaacgatgttcttg

SEQ ID NO: 95330 - DNA, 1164 bp, Oryza sativa
  Clone ID: PAT_MRT4530_93535C.1
atggagcacggggagatcagctcgaaggcgcccctggtggcgccggtggcggccggcgtgaaccgcgccgtcgcggtggtggacacattcctccggttcatcgccatcatcggcacgatcggcagcgccatcgccatgggcaccaccaacgagacgctccccttcttcacgcagttcatccagttcgaggccaagtacagcgacctcccgtccttcacgaagtttgatgcagctagttcgattttttgcatgcacggccggacggacaggttcttcgtggcggcgaacgcggtggtgtgcacgtacctggtgctgtccatcccgctgtccatcgtgcacatcctcaggcccagggcgcggtacagccggctgttcctcgtcttcttcgacacggcgatgctggctctgctgacggcgggcgcgtcggcggcggcggcgatcgtgtacctggcgcacaagggcaacgtgcgggcaaactggttctccatctgccagcagttcgactccttctgcgagcgcatctccggctcgctcatcggctccttcgccgccatggtcctgctcgtcgtcctcatcaccctctccgcgaagaggaagaagctgagcgccagataccaggccgcccacaaggacccactgctggacttcaacgactggaggaagaaaggaggcgtgcccgaggtgaagcggtttgcagagctcaataaggtgagggatttgatctctatctctgccctgaatatttccttttgcagctatggttttggtgttactgacatgaacatggtcttgctaggccaggaggcatttgatttggtagcatcaaacaagattgccaaaggagatgttctaactgttgcaaagattgctggaataactggtgcaaagcaaaccagcaacctcataccgctgtgccacaaccttaatctatcccatgttcgtgttgatcttactcttaacgaagaagattctagtgttatgatagaaggagaagcttcaaccagtggcaagacaggggttgagatggaagcaatgacagcagttgccattgctggtctcacagtctatgacatgtgcaaagctgcttcaaagaacatatgcataacagatatctgtctccagcacaaatctggtggaaagagtggaagctggtccagaagttag

SEQ ID NO: 95331 - DNA, 282 bp, Oryza sativa
  Clone ID: PAT_MRT4530_93536C.1
cgacaacgtgaacgcggggtgcagcacacgggggtgtcaacagagagggacagacaaaaagcgcgcgcccgtaaacacacatcgaatcaatacgggtgtccggcgcgatcccagcctccagcggacacgataagggatgaccgaaacacccacgggccgaatcgcaacgcgaccgcacaagaagaatcctcagaggcatcacaacaaaaaacggagacgtacaacaaggatcgtgctccagccgacgcgacaagaacaaacccacgccccaccatccgataa

SEQ ID NO: 95332 - DNA, 513 bp, Oryza sativa
  Clone ID: PAT_MRT4530_93537C.1
atgcagcatgatgccatatccaacattgcataccatcctagcatggatttcacaagctttttcctgccgcaaaccgacgcttactcgcatgatctcagtgcattgctggacatggctgtggttgatccatacatcagctgcaatggcagcagcatcaccatgattccagtgactgaagatgaagcaaatgctcagccgatgaaccatggcaatgacgagaggaagaagagaaggctggtgtcaaaccgtgagtctgcaaggaggtcccgggtgaggaagcagaggcgcctggatgagctctcatctcaggtttcagagcttcgagacaccaaccagaggcttcttgttgagctgaatcacatgatctccaagcatgctcgcattgtcagggagaattcccagctcagagaagaagcttctgacctgcagagaaagctcagtgagatgaaaatggaagatgctgaagtagctgctgctgctgctgcagcaccacgaacattagaagtagcttaa

SEQ ID NO: 95333 - DNA, 360 bp, Oryza sativa
  unsure (1)..(360): unsure at all n locations
  Clone ID: PAT_MRT4530_93538C.1
gagggccaccancangnacaggacgcaggaacaaaaaaattttttttttatgatatgcttccatgagcaccttatgcatacactagaaatccccctcccccctcttgtccaagaacatacacaacatatcacaatggtagcctaaaatgtatgtgttagataggctaacgctcacacgagacaacatagtccaagacccatgcgtgntgccctgacgacggataataccatggtatggcccagctctgctatgatgagtccccttggcccagctaaatcctctcctctacattgacccttgcgatgaatgccccttgggcagattacacattataggtagaggccatgttgaagccccat

SEQ ID NO: 95334 - DNA, 471 bp, Oryza sativa
  Clone ID: PAT_MRT4530_93539C.1
gtgatccaaatgtatggttaccttgagattctgtatcggtgtcttcagctgactgccctcgttgctggtcactgaacaagcaatgacaggtctagtaacgccacatgcgcggccaagggcttgcttcgaagggacaaaaacatatggaacgttctgtcaaaattaaaaaaaaaacaagtgagttattttttcctctccatttcaggacaacaaaaataaatgagaaaagcatggtcaagaggagaaatatgcagaagatgacagctatatcacagactgaaaaaaaatgttgtggcatttgttcactactcactgcacaattaagcataacattgaaaaacagtaaaatatgagtactagaatctatcagtctacaacaatcaatgaattcataattgttatgtttcgggcagcaagaagaatcggagcccttctaaaagaagagttggagcaggttatttgtgttcatga

SEQ ID NO: 95335 - DNA, 268 bp, Oryza sativa
  Clone ID: PAT_MRT4530_9353C.1
ttgcccataagggtttcagcggggtttcagccgatttcatgacatcggacctccagccgatggatgctttaaccttcagaatagtgcttaatgctgttatatcaatgctagccgagtgggttatactggactatattggtattttattacatcatcatcaaccgattgcctttatatcattatctacattggatatattggcgattacttaaaccctatcgctatcggctggaactactccatcggcttgtcagccgatcggctgttt

SEQ ID NO: 95336 - DNA, 549 bp, Oryza sativa
  Clone ID: PAT_MRT4530_93540C.1
atgggcggcggcggggctctcctcccacctcggccctttccgcctcagcgctggtggcagactggtcggccgagcagggatgagaggcgttggaggagattcggatatgcagcttcctcgccagaagtcttcaatgggccgcggcggcgagagggggttgaggcaggtggacagcttgccaaggtcgcccatggcactggcatcgaggtatgccccgcccacagaggcggtcctcaaggggtgggcaatgaggaggggtctcgggcgcggtgcggaggcgagcgsccacgsccggggcgacgctccgtgtggtgggtcgtggcatgccgaccatgcatgcctacgcccatcgacacggccttccctaaccttcaggagctcggcatctatagcatcggcatggaaaaggagggccgtgagatcgagttgctcgtggcgacatcaacatccaaggagggctgcttcgcccttggctacttcctcaccctcagccggtctactcccgctagctctgaatctattgttccatggggagagaaaggggagtga

SEQ ID NO: 95337 - DNA, 957 bp, Oryza sativa
  Clone ID: PAT_MRT4530_93541C.1
atgctgagccacgcccacgccgccgccgggagccccgccgccacggcgccgtcaagccccacgcgccgccgctgcgccgggaaggacgacgtcgacgacgctgacgatgacggcggcggcagcgagcagttcttcttcttcagcgccccggccagccccgtgcactacatcctccgctcgccgccgtcctccacgacgacgacgacggcggcggcggcgcactatgctccgggcgtggacggtgaccacggatgcggcggcggcggcggcggggacttcgagttcgccgcgcgccagcatggtgcagggaatggcgccgcggcgatgagctcggccgaggagctgttcgtcgcggggcgcatccgcgtcgggtgcctctcgcccatacgccaggaggaggcgggcttcggggagcaggaggaaggttgcgtcgacgagggggagagcggcggccaacggccgccgcctcgccgggccagatcggcgtcgccgccgcggagcccgcatctcgccaagatcgccgagccctcggactccttcgcgtcgtcgtcgtcttcctccacctccacctcctcctcctcctcctcctcgtcctccgccaagagcactcgccggcggatatcgctgcgtgacctcctcctcggcagcacggcgaacagcgactccgccaccgccgccgccgccgccgagaggtcatcgggcttttggcccccgtccatctggccgtcgtcgcggtccaagaagacagcaacgctagcgttgccctgcccgtgcccgtgcccgccgtcgctgcagccggcgcggcggtccacctcgtcggagaggtcgtcggcgccgccgccgcggcggcgcgcgacgtcgctgccgtaccggcagggcctcgtcctcggatgcctcgggttcggggcccggagctacgggcttgccaagtcaatgcatccgctttcctctgggtaa

SEQ ID NO: 95338 - DNA, 502 bp, Oryza sativa
  Clone ID: PAT_MRT4530_93542C.1
ctacgtccggacgttatatgtgccgccatcgtttgcaaccgcaggcgctgcgcgttgctgcctcctcctccgctcgcccccactgcccgtccacgccgccgtcacacgctcccacctcgttgccgtcttcgctcccacgacgaccggcgcatctcgccgggggctcatcctagccggcgactgcgaggagcccgtccgccgccgctctgcctcgtcctccgccggcgccgtcgctcggcctcgacactccgttgccattccttcgccacatcggaccggagggagagaagaaggagagagaggagaggctgacaacggagcggcacacgagttggcacagcgcgactcgctttgtcttggcgtgctggtgcccgcggcgtggcgtggctcgcgattgggctgcgcgagcagcgggtgggagcaggcgacgcgcatcggcgcgtgcgtcctgcctggtgggctcgaccgcgatatcggccggttggctggttgggccgcctag

SEQ ID NO: 95339 - DNA, 505 bp, Oryza sativa
  Clone ID: PAT_MRT4530_93543C.1
aggaggagcagggacaagcagggtggccgaggctatgatgcacctgaagatgatgtagctgttccaccgtttggtgagtgggatgagggtaatgcagcatcaggcgaaaaatttactggtatcttcaacagggtgagggatgataaattatcgccaaacacttctaccaggcaaccggacactaatcgcagccaggaaaacaaagtgaaacagacatgcccttgctgtatactttgagacaacgggggataagatcacagatattgctggagaggttccttagctacttgttgatcagattgctacattgtgaattttcaattttcatcgaactctgttcatgtattgttttccacgtttattgttgtcggtgtgagtatgtatctgtaattgaattttccagtcatctagtttctatgattattcgaaacatatatagggtgccgtttggctctgggaagcatggagtgagaaattttctttgctgataataaaatgtttccag

SEQ ID NO: 95340 - DNA, 1041 bp, Oryza sativa
  Clone ID: PAT_MRT4530_93544C.1
atggcggcgccggcgccggagctaatggacgacgtcgtggaagagatcctcctccgtctcccgctggacgatccctcgtgcgccgcccgcgcgtccgccgtctgcaagcactggagccacctcctcgccgacgccggcttcctccgccgctaccgcgcgttccaccgccgccgagcacctccgcggctgggcttcatctacgacgccggctcccccttggcccggttcgccccgaccaccgcattccgccctgccgatctcgaccacgatggctggaagcccatggactgccgccacggccgcgccctcttccgcacatctgccagtgcggtgctgtgcgccgtgtccggctgcgaccacggcggctgccatggcggccccttcgccgtggccttcgtcgccaactatgtcatggagggggaggaggaggagatcacgtcgccgacgtcggcatggctgtactcgtcggagaccggaacatggagcgcgccttccaccgttcgccaccacaacgccgaacccttccccaagcccagcgtcctcgccggcgacggcgccgtctacttcctcacctggcacggtaggaacatcctgcgctacgacctgcgcaagctggacctgacggtgatcgcctcgccggagatagacgacgacgactttgagaatcatctcctcatgacgacggaggacggcgggatggggctcgcccgcttggtctcaggtcactccctccaactctggtcgtggaagccggtgtcggcggcggcggcgtgggtgcagctcagggtgatcgacctcgacctcgtgattcccggcgacgccatgcgacctcgtctgttgggcttcgcagagggcaccgacatggtgttcgtggacactacgtatgatggtgcccaggttgtccagcagattgagctcagcacactcaaggtgacgaaggtgttggacgagtgctacgcctcttgtgttcttccttacatgagcttctttctcccaggtcgtcaaaaaggcaagttgccaccttcagcaattacactgtaa

SEQ ID NO: 95341 - DNA, 795 bp, Oryza sativa
  Clone ID: PAT_MRT4530_93545C.1
ctaaggaacctctccagcaatatctgtgatcttatcccccgttgtctcaaagtatacagcaagggcatgtctggagaaaaagagaaaatagatataagtccataatatcacctgagtgtcagtgtaactcataacagagaatgttaactgtttcactttgttttcctggctgcgattagtgtccggttgcctggtagaagtgtttggcgataatttatcatccctcaccctgttgaagataccagtaaatttttcgcctgatgctgcattaccctcatcccactcaccaaacggtggaacagctacatcatcttcaggtgcatcatagcctcggccaccctgcttgtccctgctcctcctaggagtatgctggccatgtccctccgatgaagccctcctctctggagtctgcattccagatgacctgtgcttcggcttcgatgggttgttcggctgcgctggtgaagcggagccatgaaccatcctgtatgggcttctcggtgcgctaccgatgccaccgcctacctctcgctgctgagaaagcgaatgccgtcgatggggatcagcttcctgccttcttccatgctgtggattcattggactctgcccctgagcatcaggtgtgtatgctggatgcaaaggtgacttggatggaggttcagggtgcctccttggatcgttgggatgggaagaaatgcccgctttcttgtttttgcgggcattctcaaacttctgtgtgtatggtgtgttgccagtggtgtcccagttcccaaatgctggaatgtcaggttgcat

SEQ ID NO: 95342 - DNA, 2556 bp, Oryza sativa
  Clone ID: PAT_MRT4530_93546C.1
atggcctcgagggcgatcattaggagaaggaagtatgctctggagcatactaatatccctgttttattacgacattcatctatttctacttttgggcaagaaaagtttggatgtgaaattgagcaaagcactgcatctcaaaactcaagagaatcaaaccatgagaaggcacaatacatcttaaggaaacaaggacttttgggccttagtatcctgtgtcacccaactcgtggtgcttcacttgcttcttatgaatctaaaccacagacttttggtttccccttgggagccaggtatttcctacagtcagtacgcccaacatcaagcactgctgggcagcctaaagttggtattctggacgagcggagcgagaaccagaaccagaatcaggggaaaaaggaggcatccccagaagagtgtgatcaggcggtggaaggcttaagcactgcaaaagctaaagctaaagctaagctggtgcaggaagtacaaaagtctgaccagtcaatcatacataaattttgggcaatacttctaggtattggacctgctctgcgtgctgttgcttcaatgagcagggctgactgggctgcaaaattgaagcattggaaggatgagtttgtttctacactgcagcattattggttgggaactaagctgctgtgggcagatgttaggatttcatctagattgttagtgaaacttgctggtggaaagagcctaacaagaagagagaggcaacagcttacacgcacaacagctgatttgtttaggcttgtaccttttgctgtgttcatcattgttcccttcatggaatttttactaccagtcttcctcaagatgttccctaacatgttgccatcgactttccaggacaagatgaaggaagaggaggcattgaaaaggaaattgaaagcaaggatggaatatgcaagatttttacaagatactgcaaaagaaatggcaaaggaagtgcagacgtcacgtagtggagaaatgaaacagacagctgaagatctggatgaatttttgaacaaggttaggaaaggtggacatgtctcaaatgaagaaattttgagctttgcaaagctgtttaatgatgaactgactttggataacatgaacagagcacggttggtaaatatgtgtaaatatatggggatccaaccttttggtacagaccactacctgacattcatgcttcggaagaaattgcaagaaattaagaatgatgataagatgatccaggctgagggcgtggagtctctttctgaggaggagcttcgacaagcatgtcgagaacgtggccatcttggtttgttgtcaacagaggagatgcaaaatcagctcagagactggttggatttgtcacttaatcattctgtgccatcatctcttctaatactatcaagagcttttaccatgtctgggaaaatgaagcccgaggaggctgttgtagcaacattatcttctcttccagatgaagttgtagatactgttgggacagttcttccttcagaagattctgtgtccgacaggaagcggaaattggaattcctggaaatgcaggaagaacttatcaaggaagaggagaaaaggcaagagaaagaagacaaggcaaaacttgaggtaccaaaggcaactgaagaagatgtggctttgaaagaaatgactgagcctactgctagggaagaaaaggaactaaagaaagcaaaagttgagcatgacaggaaggagcagctttgtgatatcagccaagcattggccgtgcttgcatctgcttcttctgttgccaaggaacgtcaagagtttctgaatcttgtcaataaagagatagaactatataacaccatgctggaaaaggagggtacaaaaggtgaagaagaagctaggagagcatacaaggctgcaagagaggaatcagaccatgctgcagagatagctgcaggagaaaaggtctcttcagcattaatagagagggttgatgcaatgcttcagaaattagagaaagagattgatgatgttgatgcacgaataggcaaccgctggcagctgcttgatagtgaccgtgatggcaaagttacccctgacgaggtagcagctgcagcaaattatctcaaagacactatagggaaggaaggcgtccaagagcttattagcaatctttctaaagacaaagatggaaagatcctcgttgaagacattgtgaagctggcatcacaaacgggagaaagcaacgaacaagaagaaaccccacggcaataggtagataaacagtcgcttccgtggctgttgaagttaccagcccactcttttccgccggtaagcgcatggcagtgccatgtgtaacaaaaatggcaggacggtcattttttttgttccgactgactgccgtggagagagttagcgtatagttaggcatcaggtttctataggtgaatggcaactgaaattccaacctgttgtgggttgccattgaaatggacatgctgaacggccagatgggacaataattcatgcccaatccaaataatctgaataaatatatagatattgaat

SEQ ID NO: 95343 - DNA, 444 bp, Oryza sativa
  Clone ID: PAT_MRT4530_93547C.1
ctttgacagcagctctgggtgcagcagcgacgagagcggggaggcgtgcacccaacctagttcttgggcccggttgtggctctttcgagagaattacaggtgctagggagcttagacaggtgtcagattttggcggaagcgacaatgatcccggaaggccagagcggatgccacggttctcaagggagcaagggctcaacgcaagtgcaagtctggaggttcaggggacccaagaacgggcggttgttgcagaagacagggcaaaggcttcacatttgttgagcgggccagatgtttttgggttgatgaggtctccgtccgcggatagggaactgtacagtgaggttgtaagagctgcagaacggggggcgaaccaggagcgggagaggatggacgctgtgctttctgccactgtcgccgccaaccgggccggggcgaaccgca

SEQ ID NO: 95344 - DNA, 631 bp, Oryza sativa
  Clone ID: PAT_MRT4530_93548C.1
agtggatccccgggctgcagggggagatgaggagtgaagagtattttttttcttcttcttcttccaaaacacacaaaggggacagcaattgccagtggcatatcctcatcgcctggatccctacttactacacagcttagcttagcaacactgtctacagatctagcgaaggagaagagagagaagcaaattagtattaagcttagctgcagatggagaccgccctgggtctggtggacattgccgtgaagctcttcaaccttctcgatgagagctacgagcaggggaaggggctcgccgccggcatcgacttcatcaggagggagctccggtccatcaaggaagccatcagcatgcgctccgggacggcggatcaggaggggatccggagctggatggctgacctgagggatatatgcatgaagatcgagaactgcgtcgacctctacaacctgagggtcgtcgtcgtcggcaagcacaggaagaagccaggggtcgtccgcgacgccatccaccatctaacactcaggacaacgcttgcccgcggcaagctctccgaggacatcgaggcgatcaggaagctcgtcgagcaagctaattccagggtcaccgcgtatcatccccaagctca

SEQ ID NO: 95345 - DNA, 305 bp, Oryza sativa
  Clone ID: PAT_MRT4530_93549C.1
gtgaaaaatttgttcgttttggtggagccaaggtcgcggggaaagtactacagtttttaggggactaatatatttattttgagaagaagagaaacctcagcatatctcaaaaataaaataggtggagggtagaatggaaaaaatttaaatcgagaaataggtttacaccaactggaattatgagggctttgaaactcgttctgcaacttgcataatagaaaaacccacaactgttatttttgagccaactgccttggacaaataattaggatccttcttgatctggggggtgatattgacaacat

SEQ ID NO: 95346 - DNA, 536 bp, Oryza sativa
  Clone ID: PAT_MRT4530_9354C.1
gagtggaatccattgatccattgtgtagtgggagagagacttctctacgcggtcacgggttccccagcggaggagaaagatagatagagagagcaaagagcaaaaaaatctctcttttttcttcttgttgtttctgcagttacctttgtcttgccttcaatgccaccgctttactgccggatctgaggaaagctcccatccttgctgagttcttgtgctgcttcttccacaattcttccttttgttgagaattttgccttccatctgcttaatcggtgacaaaggtggtgggatcttgcttctcttcctgcaagaaaaggctcgtttttttgtttcgccgtttgctgcttgctcaggcaggaggaaggcgatgctgttcttgctgatttcagtcttcttcttccggtggtccacccctttttgttgctacttcaccttcgcttcgttgcgctctgcggagagaaagaaagcaaaggtggtggaaaagaagcgaaaattttgcttgcttcctctgcaaatctgaggaattttctcgc

SEQ ID NO: 95347 - DNA, 456 bp, Oryza sativa
  Clone ID: PAT_MRT4530_93550C.1
atgaagggcgaggtgccggtgttcccgccgcctgccgtcgaggccgatttcaccgccgcccgcgtctacctcccctccgccgctgcacgcactgcctccccgccgtcgcccaaggactccgacgccattgaggccgactccaccgcccaacccgacgtcggcaccgctcttgccctttcccgaccaacgctgcccccacccttccccaatcgacgccagcgctgctcgcgcccttccccaaccggcgcctcctcctcccggcgccaccgccccttcgctcgccggccgtggagacgggagacgaaggtggtgaggtggccaacggtggcggcgtcaccgctgcgcgcccttctccttgccgaaccaccgccgcctctcctcctcgccgaaccgccgccgtcgctcctcctcgtcgagctgctgtgtcacaccctgaagttctcctcccaagcctaa

SEQ ID NO: 95348 - DNA, 167 bp, Oryza sativa
  Clone ID: PAT_MRT4530_93551C.1
gctagaagcgaatccccgtagttcattttcctcaatcagcccagtagatttctagctaatggtatctgataaggggcaaattgttttttcaaggatacagctgaattcataagaactgaaaatcgcaattagctggtattacattgcggaagcttgagaacagaaag

SEQ ID NO: 95349 - DNA, 357 bp, Oryza sativa
  Clone ID: PAT_MRT4530_93552C.1
aaaacccaaaaaaccgggggcccggatttgggttataccccccggaaaaccgggtggtggtgttctgaaggggggcaagattcccaagaagaattcatttttgggggccttttggagcaaaaaaggggttggcccccaccaacctggggggggctgattgaccttcaggggggggcagctttgaaattcccccttgccatcgggggcccggggggggcccccctgacccggggccgggggggccccccccttgggggggccgcaccccgggagggccccccccgggggcttccccttttttattggcccctgggcccaaaagggggggaaccccaccccgcccttgggctttattgg

SEQ ID NO: 95350 - DNA, 1254 bp, Oryza sativa
  Clone ID: PAT_MRT4530_93553C.1
ctactcttttgcagccactaacccacgttcccacgactgcctccacaacagcgcgtccacgttcccacgatgttcccacgactgcctctctcctgatagataaggaggccgtgagtccgatcgactgcctccacaacagcgcgtccatgatcccacgttcccatgacgggtaggcaggtgatcaggtttttggggagtgcttcccgcacgactgctcgtcctcgtcctcgcccaccatgtctgcgcctggagctggcgccgctgctgctgctggaggagatggcggaagtggtgcgccacctggagctggagctggaggtggtgcgccaggagctggagccggtgccgcgaacaacaatgccaacggaggcagttctgcctcacaatccagcggagggccattctcagggtatatccttctcctgttcctgttctcgttgttagcgctttattgctatgttcctgttcctgatattcatgatgcctctagcatgttactgcgttactgctatgttcttattcctgatattcataatgttgttcatgatgtctttagtcgaacaactgctacctggcctcgagcactatgccgtactacgtatttattcatcgtgtctctcgaatctcgaccagatgaattactgatgcgtgaaccgaaggagatcggccatgctgacagcaaatttcctcacagaacagcattcaggcatccttgtaacacagtctctgaagcacccggggtagcagccccaagtggccgttcacagcgttctcaggccattggatgtgtcgaacggtgccaccagctcatcattgtcactggaagctgcagatgcgccacacattatcaggatcatcacggcaaagataagtcccgagtttgctctcattgtgaccgtccagtcacttgatcttgtcttctgaaaagcctttttttcgctttcacttggacctgactgatgcagagatggcattggtcatcagcaccacaggagtttgtgcagtgagcaacaggtgtatctgaaatgaagcagaatgctcgcgaaattgtagcgttctccaacatcatatgaaatctcacttgcacaaagtaaaaaggcacatcgtgccgcgacattgatcatgtccaccatggaccctttattttcagagagggagaagcagttctccacctcaatcctcggaggggccggtagatctggcgcttccatccccatggtctgggagaggatagacgcctgcagcccggggatc

SEQ ID NO: 95351 - DNA, 209 bp, Oryza sativa
  Clone ID: PAT_MRT4530_93554C.1
cggacgcgtgggtttcccctcccaacccgccgccgtttcttcaactccaagggaagggggaaaggcgacgcgacgctttcttgggcgccgcgtctacccttcccttccctcacgagtctcgtctactgatttgatttgattctcacgagcagttcggagattttgatctcatcatcgatcaggacgttttggttgtttttttttagggg

SEQ ID NO: 95352 - DNA, 1120 bp, Oryza sativa
  Clone ID: PAT_MRT4530_93555C.1
ggcgctctcgactctcgccgccgccgccgccgccgcgagccgcgtcgtgcgggaacgcgagggtttttccagggggatggatttggggtcgtgctacctcggcggcaacgccgacgcggtggagttctgcccgcaccgccccttccgccacgtcctcgccgccgccacctacacgctgcaggagcagggcggggagcggcaggaccgcgcgggcagcgtgtcgctcttcgccgtcgacgccggcgaggaggacgcgccccggaggctccggctgctccacacggtggagaccgccggggtgttcgacatgaagtggagccccgtggcgcctctgctcgcgcaggccgacgcccacggccgcctcgcgctctggcgcctggagcaggaggacggatcggacaaaggtgctgttctcagggatgtctgttctggagacatttcttcttcgatgtgcttgtttgtggactggaaccaaactgccaaggcactttccgttggattatcggatggttccctgtctgtggtttccatgagggaggaccgcttggaggtatcagaacagtggactgctcatcagtatgaagtgtggacttgctattttgatcgtgcaaatccacacttgttatacagcggatcagacgactgctccttcagctgctgggacttgcgacagaacccatcaaatgctgtgtttcagaacaaaaagtcgcataatatgggtgtctgttgcattgctcagaatccactagaggggaacatgctacttactggaagctatgatgaatttctcagagtttgggacataagatcaatggtgaaacccgttaatgtgaagtccctaaatttagggggtggtgtatggaggattaaatatcatcctcttattgcagatgttgtcttggctgcatgcatgcacaatgggtttgccattgttaaagtaggtactggggatgctgcagtagtggaaacatattgcaagcatgagtccttagcatatggtgcggattggcagataaatgaaggtgcagaacagaacaagaatttttcagttgttgctacctgttcattttatgatcgactcctccgtgtgtggcaaccggagaacctaggcaatctttaa

SEQ ID NO: 95353 - DNA, 429 bp, Oryza sativa
  Clone ID: PAT_MRT4530_93556C.1
atggccagtcccaaggcagaggaggctgtggcggcggaggtggaggcagaggcgactggctctgtggcggtggccgctgccgctgccgctgctgcgacctcggacgacggcggcgagcaggggcactccggcaagaaggtgcggttgcctgacccgtacgtcgccgccatcctctcgctgaagagggagccgccgccgagcgctcagtacctggaggtcctctcgccggagaaggaactggagtacactggccactgcaaggagctggaggacgagctggaggccttcgagaaggatggctactttgtggtggatgagagttacctggaggagactgccgcgtgcctggctatggccaatgaacagctggccaagttggacttcagcggtatcgtcttcggggactgggactacgacgatcttgattga

SEQ ID NO: 95354 - DNA, 138 bp, Oryza sativa
  Clone ID: PAT_MRT4530_93557C.1
atggcgcgcggcttgggcgacaccgtaggtgttgcccctctctgcgtcaccttgttcccatcggaaaaatcggtgctagcggtggagaaattaaggatgtggttgcggcgttggcatggttgccgagcttacacctga

SEQ ID NO: 95355 - DNA, 305 bp, Oryza sativa
  Clone ID: PAT_MRT4530_93558C.1
ggggaaagggtcatcatcaatcaccaaaagggaaacaaattattcccaaaagaagaagggttttcacgttttgatcaacgcgacccccatttcaaaaagatccctgtcatggaccatgctatcatttggaaagctccttccacaacaaacctgggaagaatcaccccgtattaacaaaatgcaaaagaacttggtttcaccaaaaaaccccattgaagggcggctctgtcataaaacctaaaggcaatagccccgggggttttttcttatgtgcaaagcgggaaaagaagcttttaagacccctt

SEQ ID NO: 95356 - DNA, 717 bp, Oryza sativa
  unsure (1)..(717): unsure at all n locations
  Clone ID: PAT_MRT4530_93559C.1
ccggccggactccgcaccctcctcgctgaaagcccctgcctcaacgatgccgccatctcctgtcctcagatcatatcgaagaactgggagcatccacaacaaacaagatcggaacagaggtaactaaaccacgaccgaaactccactctgactcccaactctttgggtgattcgtatgccattcatgatgcacttgaatcaagctaggcttgttgtagtngaaaagaatgtctaaagtcgactgcatcggatggtggtatagtggaagagaggcatcccgtcgcagtactcgcgcacatgagttcattcgcacaaaaactattgcgtgacttgcaggcataatgccgaagactgtgcgtgaatagaacgtgccttactcatagcactgaatgtaatgtgcagagagtgcgtgtagctgtgtctattgtgaacgagcagcaaccactcacgcttgtttacctttggcttacagataagaatcttagcaagagattaggaacttgcaagatatactctaatgtgaagcacaggaacgtaataacatgctcctgcacatctgtcagggcctatgttgaacagctccaggcactccacatatggcaggactatatgacatcgcactagatataacaatcttatgtccataactataagcacaagactcagtacgccccgttcaaatctatgctctgctcctatcgattgctagaacatgag

SEQ ID NO: 95357 - DNA, 569 bp, Oryza sativa
  unsure (1)..(569): unsure at all n locations
  Clone ID: PAT_MRT4530_9355C.1
tggccatacgtgagttgaagctgctccatatagccaaacttatggttctgacaccngtcaaggaagttgctcgagcagcacgcattactgttttggcctacctgtggattggaacattcaccatcggtagctcttgcactccccagaccggtgttgcaagcacacctgcaaaactgaacctctcccatctccagatgtactgacccatttttgcagagaatgcttgtgtaattttgtaaaagaagtcatcagctcattgttgtctggcacggaagatggagtgaactgcttcatcactgttagaatagtttagaaacctagacccacgttgtggttttctttcctgtagttacctaagggtgaaacactcctgcacccacgatagtgtagaccacgtgtagaccactgttgtacccttctgtacccactgttaaggttagtgtagacatgtaccttctataccgtgttaaggttatcattaccgagccgtttttttctccaaaaaaaaaaaaaaaaaaaaaaaaactcgagactagttctctccctcgtgccgattcctgcagcccggg

SEQ ID NO: 95358 - DNA, 1747 bp, Oryza sativa
  Clone ID: PAT_MRT4530_93560C.1
gcacgagggcggtatccggcatctccatcatgttcaatccatcgctaatcctcgccgcgttccccggctccgccctcgcacccaaatcccacggcattcaatccatcgcgcaatctcgccgccgcgacaaatcctcaaaaccgctgcgctcaccccgccaccgcgcatccatccatccatcgccatgtcgcgcatcctccccatccctcaccggtgagagagaggaagaatgtacacgccctctctcccgcatctcgcggtcagcctcgcgctcaccacctgcccttgattgccatgccagtccgggctccagcgccacggccggcttctgtcaccagatccgcctcgcctaaagcagccgacgcctgattctctcttgtgcatgtcgcgcatcctccccatccctcaccggctttcagccgccagcggcggccgctggatgtggcttatcatctctgccctcgctgctggatcgaggatgccgctcaccaccatagccgttcaagcaggggaagctggtcacttctgtggtagcaccggtaatcatcgtggtaaagttttacagcttgcttacacacatacagtgcttgctttaacaagtagtatatgtttatcgtgtttaacctacagctttacaagtccaggtgttagattagttgattcgaagcttattttggtaccatatttgaaggatggattaattcccccgagcaccccaattgatgttgcacaacataagcaccagctgttaaactatgtcaccctacgcgtatcccaacagcttgtgctctactttggcacctaccgtcctgggatcccttcgccggggtgttatctggtgctcaacacctgggccaactcggtcgccatcatcccgcctctgcacaccacctgcgttaccagcatgtcgcactgcggcattgggaccggggtcaccatcctacgccacaacgactactacgactacgtcctcgtcgagctcttctcacatcaggacacccgaacccatctcgcctccaataaggtcactctcttcttgtggtggtctcctagctctggcccgcggacagggatcttggtctgcgatcacattgacaagctcagcaccggcactgacgacgatgatgatcacctgcttttgttcttcatctcattgcctgaggaatgcgtcatgaagcctagccttctatcttggaagaggttggcagaagagcaccgcaccatgatctgtagggacccggagaccatcctgttcatctccatggacaactacatccaaggcctccccattggcgatacagtgctcacgacatggactctcaagttcccactcacgaaccattggacttgggagaagcactctgctccatccttgttcgtgggagaccttctaaatgaccttccagtcttgaaattaaagaatccaaggatgataggaaggcgctgcacattgccaactgcccgcctcactattaccgagtatgagaggaagcatgagcaagggcattggggagtcacgggattctgtacgagatcagcattgacatggatggtagaacggtcttggagtggtcttctcttgaaagtcgccactcaaagatatttgcagctgagtttaactgctgcttacaacagtttgcagcggagttggtcatcaacatttaagtcgttgagcgacgaagaagtggttgatgaggatgatgaaaattggaagtgggtgttcccggatgaagtgggtaatgagtga

SEQ ID NO: 95359 - DNA, 1776 bp, Oryza sativa
  Clone ID: PAT_MRT4530_93561C.1
atggatcagtatgaggtgctggagcagattgggaaaggggcgtttggctcggcgttgttggtgaggcacaagctggagaagaagaagtatgtgctgaagaagattcggcttgcgcggcagaccgaccgcacccgccgctctgcgcaccaggagatgcaacttattgcgacggtcaggaatccgtttatcgtggagtacaaagattcatgggtggagaagggttgctatgtctgcattgttataggatattgtgagggaggagacatggctgaagctattaaaagagctaatggtacatatttctctgaggagaagctttgcaaatggcttgtgcaacttctcatggctctagattatttacatgcaaaccacattcttcaccgagatgtcaagtgctccaatattttcattgccagggaccaaagtataagacttggtgactttgggcttgcaaaaatattgacttctgatgatctggcatcttctgtagtaggaacaccaagttacatgtgtccagaacttcttgctgatataccatatggtaccaagtcagatatttggtctctaggatgttgtatatatgaaatgaccgcgctcaggcctgcatttaaagcttttgacatgcaagcgctgattaacaagatcacgaaatcaatagtctcaccattacccactaaatattctggtgcctttaggggacttattaagagcatgctgcggaaaagtccagagcacagacctagtgctgcacagctactcaagcatccacaacttcagccttatgtgctgcaagtccaattgaaatctagtcctactcgcaacatacttccaatccatcaatctttgactgacaaagttaagaagatgacatttcctagtgacgtggttgattctgcacgcagaagaatggccaggaggaactctctgggaaatgagaggactgtgacatttagcaagccatctccggaacggaattcagttagctctacacggagcatcaaagaatacacaaccacccagagtgtcaaagggctctctgttgacagtagtgaggctggggatgaggttaccagtaaagccatcataacaaagacatcaagcatcctaaggacgcccaagagcttgccagccaagacttatacagctagaaatcagcttgaacctcccaaaacatcgtataacagaacataccgctctgagctgccctcaaaaacaactccaaacaaaattgcccgaccagcaagaagagcatcactcccgctgtcaacatatgaaacacccaccaagcgcagcatcagcattctggaacaactagactcccctgacgtctctgtgaatgcccctcgaatcgacagaattgcggaattcccactggcatcgtctgaggaccccttgctccccatccacaacaagctctctcctggccatggctcatgttccactcctccctttatcaaccggtcaatcaccaaggacaaatgcacgatccaggtgttacgcaccgatggggacaacgggagcgactcctcaggccgcaacgccactgctgcctcgagccgcggatccaatgactccaggcagcagcggttcgacacctcgtcgttccagcagcgtgccgaggcattggaagggctgctggagttcagcgcgcagctgctgcagcaggagaggtatgaggagctgggcattctgctgaagccattcggaccggagaaagcgtctcccagggagacggccatctggctcacaaagagcttcaaggagacggcatcatag

SEQ ID NO: 95360 - DNA, 621 bp, Oryza sativa
  Clone ID: PAT_MRT4530_93562C.1
atgtgcaaccccgttccattcggacaagacgtggcattctcaatttctccaaacacgacaccgcctccgctgtgccaccgtacggcagtaacatctaccgccgccacacgacgaaagcctgacatcgatcgatttcaccggactcacataggatcggccgtactgtaccccatcggccgtcggaggcaaccggaaaccggtcgaccacacgattcaccgacggacgggccagcggcacagcgccgacggcaacgccgcaccaaacgcgcgcgaggagcgagagaccattccgtcctcatcatgccgcgtgccgtcggcataattgcctgtgagggctccccacgtatcagatattcagatctgcctgtctcgttatctgacaagattaatcattttgcacaaaaatgtacaggtcacaatatttcgaggtacgagattgatgctgaacaaaaaccatttgggggagtttgtgtacggtggcatcagtatcgtgtcgaccgagaggccatatggttgatcacgagagattccatctgtgacgcacagacaaacaatgctaggtcaccaccgcgaccgccagcctgtgtgattttgctcatcagtacgatcgacatgtactac

SEQ ID NO: 95361 - DNA, 101 bp, Oryza sativa
  Clone ID: PAT_MRT4530_93563C.1
gagcaccccgtgcagaggcaaaagtctagtgtttacacttcgcacatcacgcaggctcgcactgtcaaagacgaggaaacatgggtcatggagtatggagg

SEQ ID NO: 95362 - DNA, 406 bp, Oryza sativa
  Clone ID: PAT_MRT4530_93564C.1
cgataatggtttgtgatttgttaagatgaggtatggttggtatattttgaataaaattggaatactaaataagtttgttgtattttagcacggaggcattatagcattgtatgcctaagaaataaaatagatgatagttgaagagaaaattgccctgtggacccctgaaagttgcacctgaatgtccttgctacgcccttgaattttgctcattcccttatgatacccatgaattttagttaggatctcttgccatggccctgttccgctcgttgaccgttaaatatattaataggggtatacattccatgcaaccagccgcccactctacacatcaggtacaaagacgcccaaactttgtcatagagtgatggaaatttgtatccatttcaaaaaaaaaaaaaaa

SEQ ID NO: 95363 - DNA, 1022 bp, Oryza sativa
  Clone ID: PAT_MRT4530_93565C.1
cactggccggtaattttttgttattattttgaaactgactagccaataacttacaacgctcaatttacgccaaataaaagcatctcttagagttggaggtcagctaaatagtttcagctcatccaaaataggaatggagctggataaaacgctctcacaaaataaactagagagatagaaataggtttagagcatctttcccatccttaaggaagtaccatgaggtacgaggtaacatgaggtaccaatctaatctaaccgttgatttaacaggggtataattgggctaacaaaaattaggtctctcttccattcttccatgtcgtcgtcgcccatcgagggccgtcccgcatcgaggccggcgccgtcgtcgcccatcgagctcgtcgccgcccttgccgtcgggcatcgaccgccgccgtcatcgcccatcgagctcgcccgccgccgccgtcgttgcccatcgagctcgccgccgccgtcgtcgcccatcgagctcgctgccgccgtcgggcatcgaccgccgccggcgcatcgagcccaccgtcgggcatcgacccccgccatcgcgcatcgaccgctgccgtcgggcatcgacctccaccgccgcgcatcgacctccgccgtcgcgcattgatcgccgccgccacgcatcgacctccgccgtcgcgaatcgagcccgccgccgccgtcgcgcatccagcgccgccgtcacgcatcgaaccctccgccgtcgtcgcccatcgaggttgccgtcgccgtcacgcgtcacgcatccagccgctgtcgtcgtgcatccagccgtcgccgccaccgccgctgctgccggcgtcggccatcgagcccgccgctgccgccaccgtcgcgcctctcgccgattgccgtcgcaccgagccgccgcgcctctcgccgcaatctcgctgctctccccgatttttcctctcgtgaaacaggaaaggatagaaatacccttccaccaatggtaccacttcaatgaggaggtgcagtaccatgagagatag

SEQ ID NO: 95364 - DNA, 1605 bp, Oryza sativa
  Clone ID: PAT_MRT4530_93566C.1
atgggcggcggcggcggggagcagcagcagcttgaggtgctccacgccctggacgtggccaagacgcaatggtaccatttcacggccatcgtggtggccggaatggggttcttcaccgacgcctatgacctcttctgcatctccctcgtcaccaagctgctgggccgcatctactaccgcgtcgacgggtccccgtcccccggcacgctccccccgcacgtctccgcctccgtcaacggcgtggccttcgtgggcacgctctcagggcaactcttctttggctggctgggcgacaagctcggccgtaagcgcgtctatggcatcaccctcatgctcatggtgctctgctccctcgcctccgcgctctcctttggccacaccccgacctccgtcatggccaccctctgcttcttccgcttctggctcggcttcggcatcggcggcgactacccgctctccgccaccatcatgtccgagtacgccaacaagaagacgcgtggcgccttcatcgccgccgtcttcgcgatgcagggcttcggcatcatcaccggcggcctcgtcgccatcctcgtctccgcctccttcagggccgccttcccggcgcctccctacggcgaggaccccgtggcctccacgccgccgcaggccgacttcgtgtggaggatcatactcatgctgggcgcgctgccggcggcgctcacctactactggcgcaccaagatgcccgagacggcgcgctacacggcgctcgtggccaacaacgccaagcaggccgcggccgacatgtccaaggtgctgcaggtggtggagatgcgtaatattggtaataatggtggcagcaggaggccgttcgggctgttctccggcgagtttgtccggcggcacgggctgcacctggtgggcacgtcggcgacgtggttgctgctggacattgcgttctacagccagaacctgttccagaaggacatattcagcgcggtggggtggatccccaaggcggcgacgatgagcgcgctggaggagctgttccgcatcgcgcgggcgcagacgctgatcgcgctgtgcgggacggtgcccggctactggttcaccgtcgcgctcatcgacgtggtgggccgtttcaagatccaggccgttggcttcttcatgatgaccctcttcatgctcaccctcgccctgccgtaccaccactggacggcgccggggaagaaccacgtcggcttcctgctgctctacggcctcaccttcttcttcgccaacttcggccccaactccaccaccttcatcgtgccggcggagattttcccggcgcggctgcgggccacgtgccacggcatctcggcggcgtcggggaagctgggcgccatcgtcggatccttcgggttcctgtacctggcgcagagccccgaccggagcaagacggagcacgggtaccctccgggcatcggcgtccgcaactcgctcttcctgctcgccgcctgcaacctgctgggcctgctcttcaccttcctcgtgccggagtccaaggggaagtcgctggaggagatgtccggcgacgccgaggcccaggaggaggcgccgccgcccctgcaaactgtactgtag

SEQ ID NO: 95365 - DNA, 300 bp, Oryza sativa
  Clone ID: PAT_MRT4530_93567C.1
aggagaggggatacggacaatcaacaccaaccataatctacggaacaacagaagccacaacatacaagccaacatacgccaatacaagacgccggatattgacttcagggataggcacggctagtcccctacggtgtctccggatactgttaggagagacgaaagcgctatctctgatcttgccgggcacggattcgaggaggaaaactaccctgttgtcgactacgagtcagaccttcagaccgccatgtcgacaatagttagataggctaccccaaatattgtattggtgtgattatg

SEQ ID NO: 95366 - DNA, 408 bp, Oryza sativa
  Clone ID: PAT_MRT4530_93568C.1
ttgtttgtttttttttttattttttttttttttattattttttatttttttttttattttttcttttttcaggaaaattacaagagggtaaaaaaaaatgtgaaaacaaggcaataatggatttgcaagttacagggtcagaagggcacaaattcccccattcaacaaacagaaaactggaaaaaaaaacacgttatatttgggtgaaaaattttccaagggcccaaaatttttattttgaaaaaaaaaaaagggaaactttatgaggggctttttgccccccaaaaaaaaattggcaaaaaggggggggccaactcccttcgaggttgactcaaagaattatggctttaatataaagcccaagaagacccccatcaagggtacaattttggctcattttaaggggaa

SEQ ID NO: 95367 - DNA, 470 bp, Oryza sativa
  Clone ID: PAT_MRT4530_93569C.1
aaccgtgcggttcgagctgatttctcaccgggaattaacacaaattttacagcaaaaatacatgctagtttgctttaactgaaagtctgaaacaggaggtgaattgtgcacgggcttaatcagcacacgcgcgcaacaatattggctttctttcttccccgagagaatgctagggagggctgatgaagaagatttattcagacgacttgacgatgaagttctggcgcctgacggggttcatcaccaccggcggcccggccgtccgcggccacgcctggaacttcttgtccgtctccttcccccactcgtcagtcgccatggtccgagtcgtcgtgcctccaagaagctttccttccgcgatgtagatctcgcagacataggcgaatgcgaaggatgcagccactgatccgatgatgtacttggtcgccatgctgtgtgatcaccaccagctagctagcccttgagcaaac

SEQ ID NO: 95368 - DNA, 552 bp, Oryza sativa
  Clone ID: PAT_MRT4530_9356C.1
atgtaggccccacatatcgaatcgtgcgtcgagattagtgtaggaatcagcgacgtttctcactcatttccccacttcgggcctgtttggcacaactccagctccaactccactcctcctggagctggagctcagccaaacagcttcagctccaccaaaactgggagtggagttgggcatgggggccctggtcaaccaggagctcggcggctcgcgcacggtgcaagttcaacagcagcagcagcagccggcgttggacttccaggagaacatcctcctcctcgtcggcgacctcaacgcgcgcgaatgccggccaaagaggaaaccatcgtgtacgaggcggatccggacgcactcaccgtggaccttgtcgacgatccgttggttaaagagttccgtgacaagttagtggatgaggtcctcaccatcgatgccggagatatggaggcactattcgaggaacaccaggagaatccggagctggagaggacgctgatgctgatctctcagtccgaccaagacgctgatgccgccgatggcgacaccccatga

SEQ ID NO: 95369 - DNA, 769 bp, Oryza sativa
  Clone ID: PAT_MRT4530_93570C.1
gttttttttttttttttttttttttttttttttttttttttttttttttttttttttttttttttttttttttttttaaaacatcggaaccccctaggaacaggttatttcaggggggaaaccgggcagaaaccccattacaggcacaaacaggggggggggcaacacaagttttttcaccccgattacgggctaatcgaacggaagaaacgaccccagcattaaaccccgggggctaatcgaactttaaaacacagccccagaccccccggaggggaccccaccgagaacccctgggggcgctggattttaggggcaaaaaaagaccttgagcccgggggggggggcccactcgggggggaacaacgggctgtcgcgcccgtagggaaaggcctgcggcccccccccctggaaaaaccccgagtccttggacaagcggaaggggcccggcctgttgtccatgttggggcaaaaaagctcgggggggcggaaggccccgaaaccgtttttgccccccacaaccctccccgccggggggcccagttggagctgggtggggcaggtctcggccaggttcttggggccccccaccacggggcaattgccccgccccccgtggggggtccccgaccgcccgacgttgaaccccccccccccgccccccccgaaggagggctgcccctccccggggggggggaaacctgccccaggggggggggccgccgcccgccagagccccgcactggaaccccccccccaaatcccccgg

SEQ ID NO: 95370 - DNA, 498 bp, Oryza sativa
  Clone ID: PAT_MRT4530_93571C.1
gacggtcgagtataggtgagtacgcttgagcgccatccattttcagggccgattcattcggcaggtgagcttttacgcactcctgagcggattccagcttccatggccaccgtcctgctgtctgaatgaaccaacaccttttgtggtttctggaatgagcgtacattcgggcaccgcaactcaacgtttggttgatcccacatcgccagttctgcttaccaaaaatggcccactaagaactcgttaccattcagattagttaataaaacccaagttcacacatcctgaataaatccaggttttgaagaaacttgagtatcttacccatttaaagtttgagaataggttgaaatcgtttcgactccaagacctctaatcattcgctttacgtgataaaactgttttcattttgaatttatttagagttccagctatcctgggggaaacttcggaagaaaccagctacttaacagttcgattggtctttcgcccctttac

SEQ ID NO: 95371 - DNA, 251 bp, Oryza sativa
  Clone ID: PAT_MRT4530_93572C.1
cgatcgccgcgaccgagtcgacaaagcatggtttaaaatgcatggaaagcttcgctaagaccgagaagaaacaaaaagaatacaagaaacttctgcaaagcggcaagttttctatggcaaagctactccggcagccgagtgagatccagtggcgacgtagtggcgacgtggtgggggctggccgtgtgcgcgcgaaaggctgcccccggctcgcaatattctacgcctcgcctcgtcgcggcggagggtag

SEQ ID NO: 95372 - DNA, 363 bp, Oryza sativa
  Clone ID: PAT_MRT4530_93573C.1
ttttgctcatccacgagggcgtacaggccgagggggagttactgaagttaggcagggtacctgtcctggattccaccgacatcgtcgggtacaagatcgggctcaccatcattcgcgacggcctcaaaggcgaccccagcaagtacctcgagatgaccgtaaggcttgtcggagtctccgcggagaccaccaccggtgtgatgaggcttttgcagatgctagacaccggcgccctcctgttagacgacatcaacaatcatcgactccgtgaccaatagcaggttggacaacctgtatggttgccgacactctctacctgatggtcttatgagggctacctatcttatgatcgctgacaaggat

SEQ ID NO: 95373 - DNA, 1359 bp, Oryza sativa
  Clone ID: PAT_MRT4530_93574C.1
atggcgcgcgcggcgagattccatcggctaggtatgggtccaaggagcacaagaggccgtgttctcatgttccttttgctggtcctgatgatggccgtcggagccaatcgcgattcaacagcggctggatttgcaaggacggtgtccaaggctgaagtgttggcatcacctcctccaatttcaccagctgtcaatgctgtcatcattataagaaatcgggtggttctgtcaattgctaatatttttagcgtagcagtctcattatggccgttttttgttcgatggagatacggttcttggtttattacacgccagattttttcagcaaaagtcgtggcgtgtaatcttgtggcatctgtcacttggactatctatatgatggttcaaatgtatgccggcgtactggatcctcatgatcctctttgctttggtggtatgctgcggaatgggatgtggaccataaccaagagcaacagtacagacttcagtttaacaacgccaattgttataaatacgatgttggcaggtgtattgagtgcattctgggctttgtatgcctggatatttgacccaaaatcacccaattactttatgatagcaaattcattggcggctggcatgagctcaatacaatttgtatggctgttggttctgcgcaattctcacagagaagtaaacggacagattgtagaagttgagagtctgcggtgtgtgttacttagtgtcgcaaagtcgttggagaggttgggagcagcagctcctaccgaggagttcttgcaacaaaccaagtatctgctgaggttacaagaaggtctgtccattgggctgcagtcgttggatttgatggagagtgcattccttcggctggaacaggagctagtgaagaacgttgctcgcactgctaatcatgttttagaaatgcaggataaacaagatgcagcggctaatttcgtggcaaggtctgatgacaacaatgcaaatgatgtgctaagagcctgtagaattttacgtgaaggatgcacaacgaacaagaatgcttttgatagcatgcaagaggctatacaacacaagattgcaaatgccgaaggaggagaaaacaacttgaaagacagaatcaatgccgcagcagcagccataagaggcttggccatttccatgggatacaatatgcaaaccatcaacggtcgagggattccacccacggtgaagatcgccttcaatttttgctgtgagcagattttgtcagttaaaacttgcgccgacgccccgtttgtgtggttggggtttggtggattttctctacgaaggcgtctgaacttacggtttgataacgtgaactggcctgatgtacccttgtag

SEQ ID NO: 95374 - DNA, 196 bp, Oryza sativa
  unsure (1)..(196): unsure at all n locations
  Clone ID: PAT_MRT4530_93575C.1
caaaatccccgaatccaatccnaaccggcagcggcaccatgacgccctccgccctcgcccacctagcctccncntcgccgctccccgcnttctcccccaagcccagggcgaggcccggttcggnggcggggcccgccctgcgacggntggcggtggcggcgccggagccgcgggcttacttttggtngtcgcccat

SEQ ID NO: 95375 - DNA, 231 bp, Oryza sativa
  Clone ID: PAT_MRT4530_93576C.1
ttgggagcaagcacaaactcgaacaaaacaatgcaaaatacggtcagccacccagcatcaggtgttgctaggtcaacagagcgcccccacccgcacggaatcccgcccacatcgaaatagcggtcacggccgccacgcgccacttttctccacgtgtgctcccgtccacacgtcatccttcgtgcacgcggtccatgcaccagccaccattcccttcgcctcgaaggaagc

SEQ ID NO: 95376 - DNA, 1263 bp, Oryza sativa
  Clone ID: PAT_MRT4530_93577C.1
ttgaaattgattttatcagtgtttgaaaagttgtctagcttgaaaataaattttcacaaaagtgaattattttgttttggtcaagcaaagaaatataatgatcaatattctaatatctttggctgcaagctaggttcttttcctgttaagtatctcggtattccaatgcattttagaaagcttggcaataaagattggaagattatcgaacaaagaattaagaagaaacttagtagttggaaaggaaaacatatgtttgctgggggggaagattggttttgattaattttgttctatcaagtttagctatgtttatgatatctttttttgagattccaaagggagttcttcaaaaaaaatttattattatagatcacgtttcttttggcaaggtgatgatcataagaaaaaatattgactaacaagatgggatataatttatcaacccaaagaccaagagggtttaggtgttcataatttagagatccaaaataaatgtcttttgagtaaatggttgttcaacttaataaatgagcatggggtttggcatgacttattgaaaaggaagtatctctctaaccattctataactcaagttgataggaaaccaggggattctcatttctggtcaggtctcatgaaagttaaaaatactttcttgaatatgggttcctggattgtgaataatggggaacaaactagattttgggaagataaatggataggtaacgtggcttttaaagataagtatccatctctatatgccattgttcgaaggaagaattcttcaattgctaatgttatgagatttgttccgctgaatgtttcttttaggagagctttggttggtcagaatttagcaaattggcataacttgtgtgcttctattgtgcatattcaattgagtcaactgaatgattgttttatatggaattatcatcaaaatggtcaatttactgttcggacaatgtatttagccttaataaacaatggttatattgagagaaacaagattatttcgaaacttaggatgcctctaaagatcaaaatctttatgtggtacttacttaaaggggtagtattaactaaagataatttggcaaggaggaattggaatggtagcttgagatgttgtttctgtatgaaaaatgaaactattcaacatctttttgtggagtgtcatgaagatagtgagcttttaaagactgcatgccgtattcttgagacaacggttatgcaactttttgtcaattttggatggag

SEQ ID NO: 95377 - DNA, 245 bp, Oryza sativa
  Clone ID: PAT_MRT4530_93578C.1
atggcggcggagccgcccactgccacgctcgccagcggccgctccgcacgccgcagccctgcccgccgccgccccctctctccgaggctccctctgctgccgccggcctccggagaagagaagagaagagagatacttgcttgggcgaaggaaaagagaccgagcataacaaatacatggatgattaaagaagttgattgtggaccaaaccaagaccttctccaagtctacttctacctcaccac

SEQ ID NO: 95378 - DNA, 745 bp, Oryza sativa
  Clone ID: PAT_MRT4530_93579C.1
tcgccggccgttgctttctcctccgttcatccaccacaggcgaccggcctgacgtcagcctgccgccgtggaagcctaggaggttctctcgtgcgcgccccccctccgctccgccggttcgttctggtggagtggacttggcgtggcggtggagtggggggatccatcgggggcttgcagtgattcccttcttccttcggctttcctagcgcctccgccggcctagccgaccgcctcgagagccgccgtacacctccgcttcgcgccgccggcccccgcaaggagcccccgcaccgccgacctcgggaacccgccgcctcgcgcacctgggtggattggagtacttcaaatgacaagggtcatccatgactctggagaaggcatgcagaaggaggcacttgctatggtatcttctgatgttaacttccccaagggccattttccagactacaagattgggccaaacaaccaaatcattgatccagaagagatacatgaggctgtacctttgaaggagatcgttgcgaaggaaacagcacagctgctagagcagcgaaggcggctttcagtgcgtgacctgaaggagaagtttgagaagggtctatcaggtgcctcaaaactgtctgaagaggctaagcgccgagaagcagcttcgttggacaggcaggttcttctgaagaagcttagagatgttttagacactctgaaaaagcgtgtggctggtagaaatagagacgatgctgat

SEQ ID NO: 95379 - DNA, 706 bp, Oryza sativa
  Clone ID: PAT_MRT4530_9357C.1
gcatttcccagaaaccgccctaaagcttttccaaagatttctcatttgtttttcttttcctcctgcgaatttttctgctccagatgagcaagagaagttaatggttttggcgagatttgcgtgggaaatgactaggagtaggtgttaggaccactcataaattctgcctgttctttttcagatctgcgctccgtgcttttgcttcgccaaacgaaaagaaaattctgtccacccaggacactgtcttctctctctctctctctctctctctctgcttcgagttcgtcgattcggttcaaatcactcgtctcgtagtcatagatagatggctcgtctcctcaatccaatcttgccgctctccgggctcacagtttcttgatttccccattcttttttcgtttccaaagtttttttcttcttttttgttgttctttgtgttgatttcttcctctgcgagtccactcccagtccagggtcagaagcttgctgttgaattccacactgttgaagcacaactcgagtttttctcatcaaatttcatcttttcttctgttcttttccctctctctctttttgttttggcttaaatcttactagagttcatcacagcttcccacactcgttttcccgtctcgatttcatcagctgaggtcggcacttgctcatctttgccgatttgtttcttctcgagagcctacaaaaattc

SEQ ID NO: 95380 - DNA, 791 bp, Oryza sativa
  unsure (1)..(791): unsure at all n locations
  Clone ID: PAT_MRT4530_93580C.1
ttttttttttttttttttttttttttttttttttttttttttttttttttttttttgaaaaagaaaaaggggttgttttttttttaaacgagtttacaaccaagggtttaactcccagttacccacaccaaattaattcgtttttaaaaggccctgctttgtttttttttacacaaaaacaatatgcctaatttgttatctaccaaacaagggacaaaggggacatataattaaacttttatttattttacacgggggtacaaaatatgcgcggggatttatccccaaaattacatgttctggttatggtttctgtaaagtccaaaaaaataatttgagctgagtaacattatgttacttgaaagggtttgggcccgacgaggcttttatgctttagtgaagtacttggggcaaatttagggggccatatagagggatgggttcaaactgatttttatttgtcaaaaaaaaagggcctttaggggtgaccttaagtgttcaaaaacggggcccctttgaggggggtttatggtatggaatcctgtgggggggaagcgatggtgaccaaaaggggggaaattttttcttttggggggggaaatttgacctcggaggagggcaccccaccgggggggacccttcccaagggggccaggccgcaaatgggcaagggtctcacccgggaggggaatgggaaaaaaagagagcgagaagtcaggaaaagnnnaaaaaaaaaatggaaataaaaaataatataaaaaaaaaagaaaaaaaaaaaataaanaatatac

SEQ ID NO: 95381 - DNA, 195 bp, Oryza sativa
  Clone ID: PAT_MRT4530_93581C.1
atgacactgacagatgatggaagaagaagaccacaccggaataaatggaagtggaacgaactgcatgcggtagtgcgcacggtcgatcgaaagagacgaagacgtcgacgcgcttgccgtggccgcggccaccactcaccagaggacgatttatccgacgtggcaaacgaccatggctctcgcctaacggccggc

SEQ ID NO: 95382 - DNA, 159 bp, Oryza sativa
  Clone ID: PAT_MRT4530_93582C.1
atggacactcttctcgtcgagccgcactccgcttttgacctcggtgtacttcgtcttttgatagatatggatccagatggatgcggcgtttttctccggcaggcgccatcttgcttctccggcaagggacgcggcgaggcacaaggatacgacggctag

SEQ ID NO: 95383 - DNA, 436 bp, Oryza sativa
  unsure (1)..(436): unsure at all n locations
  Clone ID: PAT_MRT4530_93583C.1
cccacgcgtccggttctagatcgcgagcggcncgccttttttttttttttttttttttttttttttttttttttttttttttttttttttggggngaaaacnnaaattttaaaaaaagttgggggtacaacccaattttttaaattcagcttgaggggcttttaaatcaccatggtggacacttggctgcagatattaaaaggcttctgaattaacttggggggaggatgagcacatttagtttataccaaaaaaggtttttgaggagggccacccttagggttttaaaaaaagaaaatcttccaaacaagtggttttttaccaaggcggattttttaatgaatttggcctcgggggatggaatttgggccgatttttttgaccaaattgtttgattttcaaaaaaaattggacttgaaaattttgccaagttcat

SEQ ID NO: 95384 - DNA, 1379 bp, Oryza sativa
  Clone ID: PAT_MRT4530_93584C.1
atcggctcctaatccattaaaactccggaccgaaccctaatccctaacccttcctttttccccttcctcctcctaccgcaggccactctctccccaccggcaaccgcgcaccttccccacctccgccgtcttccccgcgcccctcccccaccgccgcctctccgcgcccctcccccaccgccgccttcccgcgcccctcttcacctccgctgccttcccgcgctcctcccccaccgctacctctctgcgcccatccccgccgccgccgccttcccgcgcccatcccccaccggcgtcgtctccgcgccccttcccaaccagcgccgcctccgcgcccctccctcaccggcgttgcctctccacgcccctccccaccggcggcgccgctcctcctctccatctcctcctccgccaccgatcgaatatgccgccgccgccgggtgcgcttgcttcctctcccacatcgcgcgctgcttccacctaccacccccgcgcgcgccaagacgtgggccctctcctccatcgcccgtggcagtgcgggccctccctccggccgccgcgctcgctcctcctcccatccccagcgcgagccagccgcgagcctgccatcctcgcctcgccgcgctcggttccccatccctcgcgcactctaccgccaaccgcgccgcttctccaaaaccccaccccaccccaacccgcccccccccctcacccacacacacacggcggcaccccaggttgccccacccccagcgcacagtcctgccgcttcgcctccaccccccgatccctaccccgagtcacgggcgctgccttgtccttatcccctcctcttctcctcctcctaccctcccattttctctcctgcacctactcccccccccccccccccgacggaaaaaacacacacaaaactggtgcccttgctccccttccccttcacatcaaactccccctccccccttcactaacggcgacggcgacagcgagcggcggcctggcggcaggcgggcggcggcctcccctccagcggtggcagggccgcggccaccgaagccgccgccgccgcacatgacgccaccaagacagcgctgcctcctccacctcgtctgccgccgccgtctatttcggcgcctcctccttcaccactttcgctgccgtttccaccgccgcctctctcatctaccgccgattccattttcgccgccaccatctccccctgttacaccaccgccggtgcctccatttctgccgcccccaccgccacagcagccgaagtccccgtcgtccgccggcgagactaagccgacggccccctctcctcatcggagtaagaggccagtcgggttcggacgctgtccccccctcccccccactcc

SEQ ID NO: 95385 - DNA, 1422 bp, Oryza sativa
  Clone ID: PAT_MRT4530_93585C.1
gaatgccagttttcgggcttctctatacattattgcaatagctaagttcggatctcagccaaactgccaaaatataacacttgcaacacagcttgcaaaatcctcaaaagaaagaaaagaaaacaaggaatacaagaattgccttgcaagcctatcaagttgccgaaaggggttttgttgatgcaaagggcaaacaaagatcacaatcataaatccccaagtaatgggattcacatgaccctgccggcttccgcgccgcatgaaggcgaaaataccttgaaacaaagtatgaagtgttgactcgaggggctctcatctcaaataccttgaaacaatgtattcagcaatagccaaacttgacgtcagaccaggggattctattccaaacaagttgaccagcccaggaacaccatggatatcctccccctgaataacaaaatctgaaggaggctgccccgggccagaaagctttggtcgtatcccagaataactgggttccaaagaatcatccttgaggttaggaaaatacttccttattacaggataaaatttagaacatctggtaggattgactgagtaatcgaacctactcaggaagcatgacgtgacatccttaccaccatctatccactcaacatctgggccaaatctaacaacaccattcaaatctagcgtgacatgtacccctatgccaccatcctctggtagagggtagatcaagtggctgaaagggctcttggtttgagaaagggtgaagtaacatccacgcgcataataagcagggggcacaaatacttggttaaggccatggaatcttttagcaagtggagccgcactcaaacctgctgaatttatcagaagttttggaaacaaaatgagttgtggggacacaggagagcccacagaatgattctccagtgctttgctttcagaaatatgaagctcgaggccttcatctccaatatatccatttgtaaccgttgtgttgtaagatatggctgttcctaaattctcagcatcagccaaaagggagagcatgaatgaatgagagtcaacaatcccagtacgaggtgacagtaaagccttaagacagcgaagttcaggttccatctccatagcttcagaaccctccatcatctgaagatcatccaccccattttctttagcattcttgagaagcatgtccaattttgccgtctctgcaacaccagtagcaacgatgagtttaccgagctgtttatggggaatttctcgttctgcacagtacttgtagagcatttcccttcctcttacacaaagactagcctttaggctgccgggagggtagtagatgccggcgtggatgacctcgctgttgcgggagctggtgccggtgccgaagctgggggcggcctcgaccaccaccacctcgcggccggccat

SEQ ID NO: 95386 - DNA, 452 bp, Oryza sativa
  Clone ID: PAT_MRT4530_93586C.1
cacaggcaaagttggaataccaatctcagattaactgtgtcccatatgtacaacggtgcgacagggagttaggatagattgtgggtttcaaacatacccaaacaaactgttgcggtggtccttctaccaatctctcacaaaaagacatagaggcaaagctcgtttgtgcctggatcgttcatgccagcagagaaatctagtgccgggatgtaagagcccaaacctgcccccgaattgaagagaacctgattgctttgggcctggacaatagcctcctgatctggccctagtgagaagggctccagtcctacgggctcatctataatgtcgcgcactcgatgtaggtcagcatgagtgagggcttgctcacctgttattatctagatagggtcgactgtgatcactttgtcgatgaagtccatcgcggcgggctatatccgcaggaacgtgct

SEQ ID NO: 95387 - DNA, 282 bp, Oryza sativa
  Clone ID: PAT_MRT4530_93587C.1
atggagggatccatggcaagcgtggtggccttgtggaacgagtgggaaatccgcgtgcttgtgctctccagcctcgcgctgcaggtgttcctcctctttcccgccgtcatccgcaagcgcaacgtctccgccgtgctcggcctgctcctctggctcgcccacctgctcgcggactccatcgccatctacgctctcggagagatgaagacaggggagatggggatagaggaggaagaagaggagatgattgactgccaggggtatgaattagattccgcatag

SEQ ID NO: 95388 - DNA, 2953 bp, Oryza sativa
  Clone ID: PAT_MRT4530_93588C.1
cccacattctaagcaagcatattttatatgcgtgctttactgaaatgattcaatatctggtataagtatcctcaatgttctgaatcatgttcagttaaaacccagcaccaccagccagaagggctttcctacttctctcaagatagatcactaagaaagccgctacattgtcccccaaaagattgccatgatctaagtatctaacgatgaaaaccagagacaatacacttcccctctaagatgaacataatacctcttacaagaacacaatgtctctggttatacatcttaacaactaatggtatgtagcacttctgttgccagaaggcgggaatgcctgtcgcccccgaggattctggcgattcccctcgttctctccagcaccgaattggtttgaggttctacctttatctccagaatccttgtttattgccctggccactgcattgtctttgattctctcggctttacgctctccaaatgttatgttctttctggcttcagcgtaatcaaaaggcttcagctggtggttaaattctggttcttggtgtggcttgtggttctgttgttggtttctactttcgatgagtgactggaagcgttgcttggcaccagcagaagaatgctcaggaggggacctagacatctccatgtcatcaggtacaaggtggccttgtccatctttattgtgattttctgggggttggggaccatctgtttcagtgcccaactgtataacatcttccgtctgacaagctggatcactatactggatgctttctggttcaggacgcactgattcttccaatggaatgctagtggccggagattttgcaccgccacagaaattatggaaaggaagtgccactgaagattttatcttgtccaccatattctgcccgcttgaaaaccctgaaaaaaggttttgtcttcttccagaagttggtttccctaatagagctccaaaagctgtaggtctctttgacacttgaactgtggcttttgctacttgcttcctatcaccattgctcagtacctccatatcttgtccagaaacacccgacaagattcctaagctcttagtttctgcagggttttctagctgtacattaactgaagaagctccacttgtaacattcccagtacaatgagaagcagcgccaacattttcaacactggcaacagcaccatgttcatcactcgggccaacattatcatcatcgttattaccatcatcagcaggaaccatttcagtgtctccatcgttgctcttcatgtttgccactgccaactcttccagacgtcccttctttaactgctcagctatactttcaaaagcatcacaatttgcaatggcactcctgatagtggaaataacatggccaagatggcgttcaagatacgaattttttgatttcactattctttttaacctcccagtggtcgcaggcatctgctttgctatctcaagcagcgtcttattcggcaatatataaccagtgctctcatcctcgccacgagcaacggaatctctccatttatatatattagcaagaactgacagctgccttgcatcaaattcattttctttcaacccatgtatgtaaagatatgatgaatgtgtcagcagttctttctcatatagttgcaggcaaatttctttgcttcgcttgtaaacctctaaaagaagatcattttcatctgaagactctttcaccagtctgagtctcatcaaatcatatatgtaaagcagataatgtgtatcttctctagcatactctttgtttgcagtcactccacagaaatgatgcaaaagatgctccaggctgttgcggtccatctgcaagattcttgaagcctggcctgtgtcaaaaaggttgcatacatatatgccaaagtcccgttgaagccatattatatcacgatctgcaccatgcattacctttttctttgttgggtctttaaaaatttctcttaagtaatcaccaagatatttgcgaagcttaagagtgtccactataaagtcctcagttctagttgaaatctgcatcaggcaggtcagaccctgaaaagacctatagtggttgtgttccaaatcaacagcaaactcggttgcactcttcagctttgtagctagcacctccaaggatttcaagtcttcgacatgtgtaaaaggggtatcatccaaagcaggaggctttatcggctcgctttcaggaaaatctctgtcaaccaattgttccatggggatcttttccaatggatggacaacacgggaaccatcatcgctcttctcaagccatgaatgctcgaatggcttgctcgagttgtccaccaatatgcggtgcacgtcctgcggccgcgggatggtgggaatgtggaatggcaccttcgccttcgcccccggcgcggccgacttatccctggtggccatcttcaccgagccagaaccaccaccaaacgcctcaccacctctaccaaccccctcctcgccgccgccgccgcccatcaccttcttcttcttcttgccgtaaacaacctggaacccgtcctcctccgtcgccctccggccagtcgcctcctcctcctcccgcgccgccttgaactcgtccatggaggcgccgaactgctcggccaggtcgtcgatgacgccgacgacccagtcctgggcgtcgtcgaggtcgtccccggggaacggcgggtgccgcttcgggtagaagggggcggcgccgagggcggcgagggaggcgcccgccctggcggcggcggcgccgacgggggacctgaaggaggggaagttgttgtagaagtggaagtcgcgggaggatgggagcgcgcgggagcggccggagaggcgcgcggcggcggcggcgaggggccccgacgagccgtcgatggccgccgccggcttgctgggcctccacggcggcggggcgtcgtccgcttcttccat

SEQ ID NO: 95389 - DNA, 612 bp, Oryza sativa
  unsure (1)..(612): unsure at all n locations
  Clone ID: PAT_MRT4530_93589C.1
cagggggcatgcttggaaggcatagagatgcagttgttagagggattaaacttgttgtaatcaaaatagatagagactcccttctttgaagcatcattctttgtggaggagccatcatcattacctccacttggtctctttgggtcgatctcctcttgtgacatgttgatctctccaagactttaagcctattcgaatattaggctctgataccaattgaaagggccttgctaatcgtctatgttgccaagagggggggagggtgaataggcattttctgcgttttctgaaaattacaaaacttgcngcagaattagacctggccggacaatccggtgctgggtanaacagtcaggctntggaatggattcagacattccggcctctggtcggacnntctgatcagtncagatgacaggaaaaactngaagttcccttgaatagtccgantttnngtgggattgtncggccatacnaganatctnancttgagcnaanatnacctgatccnnctatanaaatctactcaanttcccttttctncnaganccngcttngtnatnttccatgttatanntgcgnncnagatccnttnancccatnattaanncn

SEQ ID NO: 95390 - DNA, 305 bp, Oryza sativa
  Clone ID: PAT_MRT4530_9358C.1
aaaccgattatcctagaagaaattaaaaatagagtaaagtccatcaccggtccctaaacttgtactgttgtgtcatcgcggtccctaaactcgcaaattgaccgttcaggtcctcaaacttgttcaattgtgtcatcccggtccctaaacttacagatcactcgtttaggtcctccaacttgttcagttgtgtcaccccggtctctaaacttggatttgaatatcatctgggtcaaatagaacggtctaaagactttatatttaaaaataattcataattttttcatgtgaactctaatgaagac

SEQ ID NO: 95391 - DNA, 681 bp, Oryza sativa
  Clone ID: PAT_MRT4530_93590C.1
atggcatcctcctcccttctactcgcctgtgttgtggtggcggctatggtgtccgccgtctcctgcgggccacccaaggtgccaccgggccccaacatcacgacaagctacggcgacaagtggctggaagccaaggccacctggtatggtgcgcccaagggtgctggccccaaggacatcggcggcgcctgcgggtacaaggatcccgcctttatccacgtcaccgacatgaacgacgagcccatcgctgcttaccactttgacctctccggccttgccttcggcgccatggctaaggatggcaaggacgaagagctccgtaaggccggcatcatcgacacgcagttccgccgcgtcaagtgcaagtatcctgccgacaccaagatcaccttccacatcgagaaggcctccaaccccaactaccttgcgctgctagtcaagtacgtcgctggtgatggtgacgtcgtggaggtggaaatcaaggagaagggctccgaggagtggaaggcgctcaaggagtcatggggtgccatttggaggatagacacccccaagccgctcaagggccccttctccgtccgcgtcaccaccgagggtggcgagaagatcatcgccgaggacgccatccctgatggctggaaggccgacagcgtgtacaagtccaacgtccaggccaagtga

SEQ ID NO: 95392 - DNA, 928 bp, Oryza sativa
  unsure (1)..(928): unsure at all n locations
  Clone ID: PAT_MRT4530_93591C.1
atggcatcctcctccctcctactcgcctctgtcgtggtggcggccatggtgtccgctgtctcctgcgggccacccaaggtgccaccgggccccaacatcacggcaagctacggcgacaagtggctagaagccagggccacctggtacggtgcggccaagggtgccggccgcaaggacaacagcggcgcctgcgggtacaaggatgtcgacaaggctcccttcctcggcatgaactcctgcggcaacgaccccatcttcaaggacggcaagggctgcggctcatgcttcgagatcaagtgctccaagccaaaggcatgctccgacaagcccgtccttatccacgtcaccgacatgaacgacgagcccatcgctgcctaccacttcgacctcttcggccttgccttcggcgccatggctaaggatggcaaggatgaggagctcctcaagtacgtcgctggtgatggtgacgtcgtggaggtggaaatcaaggagaagggctccgaggagtggaaggcgctcaaggagtcatggggtgccatttggaggatagacacccccaagccgctcaagggccccttctccgtccgcgtcaccaccgagggtggcgagaagatcatcgccgaggacgccatccctgatggctggaaggccgacagcgtgtacaagtccaacgtccaagccaagtgagcattttaagcaaggaagaaaccagcgtacgtacgatccggcgcggctgcctatatatatatatatatatatatatatatatatatatatatatatatatatatatatatatatatatatatatatatatatatatatatatatatatatatatntntttntntntntntncncntttttncccccccccctccccatctatattctttcatatatatccacctctctctatctctataaa

SEQ ID NO: 95393 - DNA, 456 bp, Oryza sativa
  Clone ID: PAT_MRT4530_93592C.1
cgcccctctctgaatctcgtgttgcagggccgagcagtgcacgcagcacagcgcaatcaggctaggtagctggtaagcttgggcaagcaggttgcgagcttgcagtgcaggtggtgtgttgttgtcagcggatggtcttaatggccgggatgcttcccggagtggagttcgcgcggcggcgccggctccggcagtcgtccggcggggcggaggcgccgtgcgggacgcggcggccgtccctctgcctgtacaccggcgggagtgaccacgcacaccttggctcttcggcagcctccaaggagaggagcagcagcagcgtgtgcaaggagatggcgcgggcgtggacgctggacagcaacgccagggaggcgaaggagaggctggaccagaagctcaggggccagagagaatctgtggtcaagaggcatctgactagcacgggcaacgtgcgaaccc

SEQ ID NO: 95394 - DNA, 1292 bp, Oryza sativa
  Clone ID: PAT_MRT4530_93593C.1
ggtccggaattcccgggtcgacccacgcgtccggcaataacattatattgcagcaatggcatcctcctcccttctactcgcctgtgttgtggtggcggctatggtgtccgccgtctcctgcgggccacccaaggtgccaccgggccccaacatcacgacaagctacggcgacaagtggctggaagccaaggccacctggtatggtgcgcccaagggtgctggccccaaggacaacggcggcgcctgcgggtacaaggatgtcgacaaggctcccttcctcggcatgaactcctgcggcaacgaccccatcttcaaggacggcaagggctgcggctcatgcttcgagatcaagtgctccaagccggaggcctgctccgacaagcccgcccttatccacgtcaccgacatgaacgacgagcccatcgctgcctaccactttgacctctccggccttgccttcggcgccatggctaaggatggcaaggacgaagagctccgtaaggccggcatcatcgacacgcagttccgccgcgtcaagtgcaagtatcctgccgacaccaagatcaccttccacatcgagaaggcctccaaccccaactaccttgcgctgctagtcaagtacgtcgctggtgatggtgacgtcgtggaggtggaaatcaaggagaagggctccgaggagtggaaggcgctcaaggagtcatggggtgccatttggaggatagacacccccaagccgctcaagggccccttctccgtccgcgtcaccaccgagggtggcgagaagatcatcgccgaggacgccatccctgatggctggaaggccgacagcgtgtacaagtccaacgtccaggccaagtgagcattttaagcaaggaagaaaccagcgtacgtacgatccggcgcggctgcctatatatatatatatatatatatatatatatatatattatatactatatatgtgttgctgcatgcttgcatgcatgcacatatatatccagagaaatattttttaaacgaaataatctataaatttctgagctaggattgtggagcatatacacgccagcactataatggcgtctgctctcccatcgaactggccctgtgacaatggggtcatttgtttttgcccacaatattttctgctaaattcattctctgattttgcgtgagattatcatgagaagcagtaaccatgttgtgtatccttttcttcacgtcaaattgcactgcgctatttatttaaaaaaaaaaaaaaaaaaaaaaaaaaaaaaaaaaaaaaaaaaaag

SEQ ID NO: 95395 - DNA, 468 bp, Oryza sativa
  Clone ID: PAT_MRT4530_93594C.1
atggaaaggtcgctgctgcctgcggctcgcgtaatcctcactactactcctctcactcacactcacactccccctcactctcgctcgctagcttgggcggcggcgaggatgcggaaggacgcggccgctggcggcggcggcggcggcggcattgcggccgggccggcgcccgcgctcctctgcttcgacctcaagccgttcctcgccgcgctcaccgtgctcacgctcatcaccgccgcgtggcagctccgctcctacagctccgtcctcccttccccattccccgtctgcgccgacccggccgcgctctcgccgccccgcgcgctcgccgtgcgcaccgtggcgtcgagcggcaatgcgagtgtctcctccgaccctggtgggccgcccgcctcgctgccggaggtggggaacaagaagccggtggcggcggcggcggcggccgatcccaacaggcgggagttccgc

SEQ ID NO: 95396 - DNA, 2731 bp, Oryza sativa
  Clone ID: PAT_MRT4530_93595C.1
cgagcggcggcggcatgcggtcgccggcgacggcaaccgcacaacatgtgctgtgaatttgaaaggggaaataccagctatggaagcagcgatagtgagtgcttcgacgggagtgatgcgttccctcctcgccaagctcacaaaccttcttggtggtgagtacaagctacttaagtggctccgtagggagatggagttcctcgagagcgagctccgtagcatgagcatcttcttggagaggttggaggacacgcaaaagcttcacccccaaatgaaggattggagggatcgagtacgcgagttggcatacgacattgaggattgcatcgacgacttcatactacagcttgattccaaggatgcgaaggttgggtttgggcaaaagcttcttgcatcccgtaggattggccacatgattcgagaactcaaggcgcgtgtaatggaggagagtgagagacaaaggaggtacatgcttgatggcttggcatctgggcctagtgttcgtgtgaaggttgatccacggctatcggctctctatgtcgacgaggacagattagttggtattgatgccccgagagatgagatcattgggcggctgttggacaagcggagaagtgcctcagcaaaacaggtcatgacaatttccatcgtgggttgcggaggattggggaagaccacccttgccaatcaaatttactgcaaaatcaaaggaaaatttgagtgcgcagcttttgcgtcagtgttccaaaatcccaacaccaagaaggttttgacgaatattctttcccaagtggccactactgctgctgtggaagacgatgagcaagccatcatcaacaagctaagggaataccttagtgacaagagcagaattatcacaacaacacgtatacatgatattgctaaattgtgctgttcatctcatggcgattatatttacgaaatgaagcctcttggagttattgactccaaaatattgttcgacaaaagaatttttgatccagaggaaaggcgcccaccgcagttgacagaagtttctgaggaaatattgaaaaaatgtggtggtttgcctttggcgatcatttccatatcaagtttgttggcaagcaaaccaaagtcaaaagatcaatgggacagggtcaaggtttctcttagctctacgcttgaaaggactccagacattgaaaccatggaatgggtgctatcactcagttactctgatcttcctaatcatttaaaaacatgtctgttatatttgagtatattccctgagggctatgagataaacagggaacgtttggtgagtagatggattgctgaaggattcatttacaaaaaacatggacaaaatccatatgaagtgggggacagttattttaatgagcttgtgaacagaagcttgattcaaccagcaaacattaagcctgatggtcagacaaatgcttgtcgagtggatgacaccgttcatgattttattgtgtccatgtcagttgaagaaaatttcgttacattatttggtggttcaaaattggtaccaaggtcacatggtaaggttcgtcgattatctattcaaaatggcggcattcaagaaaatattgtcacatcaacgcacttggttacatcgcaagtccggtcactaactttatttgctgtagaaatgccatctcttttaggttttggtatgttacgtgtattggacctagaagattgttatgcattagaagaccatcatcttacgaacctggaaaggctagtccagttacggtatttgagtataagaacatcacccattagtgaactcccgaaacaaattgggcagcttcaatatctggaaacactagatttaagagctacgggtgtggaagaattgccatcaaccattggtagactaaagagtttggtccgtttattcgttgattatcatgttaaattaccaaaagaaatcagcaatatgcatgcactggaagagctaacaagtttctcagccttgatgtactctccagactttctgaaagaactaggtcagcttacaaacatgagggtgctccgagtaatttgtgactgtgatagctttaaaggtgatgcaggaagttgcttggaaaatttagcttcttctttatgtaatctaggcacatataaccttcattccctttttgttgacatcaatggatatggtgaagacaacttctcactagatacatggcaacctgttccatctagactaagaagattttccattgaccggtggtgccccatcaataagattccgaattgggtgggttcactgatcaaccttgaagagttagtcctatatgtcaacaaaatttggcaggaggatttcgaattgctaggacatatgcctgctctgtcatctctgaccatatactcaaatactgcccttcaagggaggatcatcatcagtggattccattctaccaagtttttcaagttctattgcaatcctgcagggttaacctttgacgcaggaagtctgttaaagctcgaatgccttgatgtcataatgaatgtgttcaacacgaagtcttcaaatggtagctttgattttggcattcaatatcttaccaaccttagaaatgtctacattcaacttgattgtaatgggtcgactggtggagaattggaagcagctaaagcttccatcaagagctcagtaaacaaacttccaggacagcctaagctgaacttgagcacattgaatgaaaatatgtta

SEQ ID NO: 95397 - DNA, 385 bp, Oryza sativa
  unsure (1)..(385): unsure at all n locations
  Clone ID: PAT_MRT4530_93596C.1
gcaataacgacatgtgtctttctngtctangaacctctgaccncttncccgggngcgcccncccttcgnaagnnncctccaactcccctgctgangnggatcagatgggcgatcgtcatacccncctcnntnnggccaagnaaacancgcngcctcaatagccntgacnnccacgccntgctcncaggcagctcccttacacangaagtgcttctcngcacccatggcggcnttctngtattcanccnaangacttcaccntcgatccggccaanacatcacgttnnggggagnngncgnccgnttccctcacaaacattgtgttctacnaaagacccngttccnancgggcgtcnacntttttttttntttnttttgaaagaat

SEQ ID NO: 95398 - DNA, 1047 bp, Oryza sativa
  Clone ID: PAT_MRT4530_93597C.1
atggcgtgcgacgccgacgctcctctggcctattcaagcaaatgcttactaccaattgtcgtgtcagagaagataaggccactgcgaaggatgaggttcctgagtagcactcttggttgctccatggaccaggactccatctcgctgccgttccggcgttcgacgcgcgcgcgcggctgcatttcggtgccattcggcggagccgaggcgacgccgcgcttccacttccacccacacgcgcggcaaccgttcgacggaatgcctcccctggctccccggaagaggaaggcggtggcggcggcgagggggaggaagaagaaggagcgagtggcgccggaccgcatcagcgccctgccggacgaggtgctccacctcgtgctgtcgctgctcccggtgcacgacgcggtggcgacgtgcgtgctcgcccggcgctggctccacctctggaaggaagcaccgggcctctctgtggagtgtatcaacatcaatttcccggagttcttgcctgaaaaagagcagctcttcgtccgctggatccagcgagctttgcgctgccaagctcgggtgctacgaatcagtttgatcgattgggtcgagctgcctaacatgactctcatctctcagcacctcacgaggttagagcttcaaggtattagtggcgatgataattttcttgatctgtcgggctgcccatcgctggtgaatctgaatatggatacttgctgtatctatgtcgataaactgtcgtcttcatccttgaaaacattggctccgttccttgaaagcatgccatccttgctacaagcaattgttagattcgatgaagcttgtgaggacaaatgtcagaagagtgtctctggtggttgtgatgatgatgatgatgattattgttttggttgtgctgatgaggttgttgctggttacggcaccaatggcatgtgtcttcaaggcttgtcggaagctacgcacttggagttatcagctgatcctgcagtgttttcatataacttggtcgtggtcacaatgcttggtactgttggttcttga

SEQ ID NO: 95399 - DNA, 1076 bp, Oryza sativa
  Clone ID: PAT_MRT4530_93598C.1
tttttttttttttttttttttttttttttttagtatacgtaatcctccacaaacaaccataaatacagtggcatatgggtagataatttttcacggccaatgattaatagtaccagtactgtaccacgcatgtcacaaagcacggtaaaaactgaggtggttacatacatctctcactcgctcactcactctcaaaccagagatcgatattaggtagctcctatagctacctattctctttttttttttttcctatgaaaaaaaaatacatatataccacaatagatatacacgaacaaattaatattccgtgactaataatgttattggggcggccatggtatattagacgagatcctccctcatcctggcggcgaagtcgtcggcgtggtccttggtgacgcagctcgccagcagccgcgtgccggcgagcggcgccggcgcccgcatgacgatcaccgacgagatgaggtcgcagttcaccagcggccccgccgacgacggcgcgccgtacccgtagtcgacgtcgttgaacccgagcttgctccagtccgacacgtacacggactcgtagtcgaacgtcatctggaacgggtcggcgccgccggtgcgcccctccgcccagcgcaggcactcgccggccatccgccgcttcgcctcccggaccacgccgacgagctcgatcaccgacgacgccgccacctcccccgccgccgcggacaccttcaccgggaagatggcgttgccccagtagccggtctccaggccgagcacctggcgggcgctggcgaagaagcagagcttgacggccgcggcggggtcggcggcgatggcgcgcgtccggcactgccagagcttggcgatgacgatgtcgaaggcggagcagatcttgctggcgccggcggtggcggcgtactgcgccttgagcttgccgaggtaggcggcggggaagtcgaaggcgatgtactggagcggcagcacggggagctccggcagcgggccgggcttgatgtccgggtccgggaagcgtcgcgcgcccagatcggccggacgcctggggccgattcctgcagccc

SEQ ID NO: 95400 - DNA, 6709 bp, Oryza sativa
  Clone ID: PAT_MRT4530_93599C.1
atggcgataggagggagcgattgggagagggaaggggacgagggcaacctgttcgacggaatgcagcagggagcggcggggcaggctgggccgtcgggtggtggtggaggcggtggcggtggcggtggcggtggcgcggaccgcctcagcgcgctcccggacgcggtgctcttccggatcgtgtcgcacctgggggcgcggcaggcggtgcgcacgagcgtgctatccaagcggtggcgccacgtgtgggcgtccgcgccgcgcgtcgacgtccgccacccctgcgcctgcgacgagagcgccgaccaggagaggttccacggcttcgtcaccaccatgctcctcaggcgccgcccgttcgcccccatcaaggcgctccggctgtgctggagccacgacggcgacgccaacaactggatcgctcatgctgtcaggcgtggggccgaagaaatcgatttctccgcgaggcatcaccaagatgatccgaaaccggagctagagtacacgagcttcatttctcacaagatcaagatcttgaagctgacgcgtgtccggatgggcatcaagtttatcacgcagatctgctataggtgcacttttttggaagaattagagctcaagaatgttaattcacttgaagggcagattcaatcgacctcgctgaagcgcttgtctatcatcaactgccttatctctgatggatttttggttgatgctccgaaccttatctcgctctgcttcttcagacctctcagcggtaagagcacggagggagccaatcactcgtctgataataggagttggccattctcagcgtcagtgtgggagtttgatgacgatggatctgatcatgatgatgatttctttgcaattgctagtggtggtgaacactttgatgataagagagacaatgaatctgatcaagacaatggttctagtgatgaagactcagatgataagagagaccaagaatctgatcatgatgaagatgttccctcttccccatattctgattctaaggactcctgtgatggcagtgacagtgaatgcgagtcttatgaatccagtgataaggagggtgatgatcttgaagattgcgacagcaatgatatgttggaaaacttgatcaaggtagctaggggcttgacagcttatcatggagaggtgcttctgaggaggcaattggaaaatttccccatgttcaataacctgaaaactctgtcccttggtgaatggtgtatggttcctgacttcagtgctttgtcaaccatacttaagaaatcacctaaggtagaaaggctttatcttcaccttgacatgatccacagaggaagaggggacatcgatccaagtggaggatcatttgcttgcaacaacctgaggaaggttaagatcacatgttgtaaagatgatgaaatggtccatatgctgaaacaattcctccaacgtaacggcatatcacttgagaagattgttcatcacacttctagcactcataatggcgaagaagacggaggcggggactccagcaacctgttcgacggaatgcatcagggagcggcgcggcaggcggggcagtccggcggtggcggtggcggtggcggtggcgcggaccgcctgagcgcgctcccggacgcggcgctcttccggatcgtgtcgcacctgacggcgcggcaggcggtgcgcacgagcgtgctctccaagcggtggcgccacgtgtgggcttccgtgccgcgcgtcgacatccgccacccctgcgcctgcgacgagcgcgccgaccaggagaggttcggcgacttcgtcaccaccatgctcctcaaccgccgcccatttgcgcccatcaaggcgctccggctgtggtggagccacgatggcgacgccgagacgtggatcgctcatgctgtcaggcgtggggccgaagaaatcgatttctccgcgaggcatcaccaagatgatccgaagccggagctagagtacacaagcttcatttctcccaagatcaagatcttgaagctgacgactttcgggatggacatcaaggccatcacgcatatctgttctaggtgcacttctctggaagagttagagctcaaggattttcgacgacttgatggacagattcgatcggcctcgctgaagcagttgtctatcatcaactgctttatctctgttgcctttttggttgatgctccgaaccttatctcgctctgcttcatcagacctctcagctttgagagaaccaaggaatccatttgctcgtctgataatcgtaggtggccatccccagtatggaaggatgacaacgatggatttgatcatggtgatatctttgcaattgctagtggcgaacactttgatgataagagagagaatgaatctgatcaagactatggttttgatgatggctctgatgataacatagccagtgaatctgatcatgatgatgatggtcccccttccccatattctgtttcctacgatggtgacaatgaatgcgagtcttatgaacccggcaataaggaggagtctgatcgtacagtggcctatggtgagattgcagatgagtactccagtaatggtgatcccggtgatgaatatcggggaaattatgtgaaccatgattctgcgaattacggtagagctaataagtttggaaatttgaacttcccagtgaagtcaattgtggatgcgtcagctcatgaaggagagctgcttctgaggaggctattggaaaatttccccatgtttaataacctggatactctgtcccttggcgaactgttcgacggaatgcaccagggagcggcgggacctggcccatccggcggtggcggcgaccgtctcagcgccctcccggacgcggtgctgttccggatcgtgtcgcacctgaaggcgcgggaggcggtgcgcacgagcgggctctccaggcggtggcgccacgtgtgggcgtccgcgccgcgcgtcgacgtccgctacccgtgcgcctgcgacggccgcgccgtcgaccagaagagcttccgcgacttcgtcaccatcctgctcctcaggcgccgcccgctcgcccccttcaaggcgctccggctgagctggagccacgacgaggacgacgtgagcgcgtggatcgctcacgccgtcaggcgcggggccgaagaaatcgatctctccgcgaggcgtcaccatggctacccggtgccggattacaaacacttcatttctcccaagatcaagatcttgaagctgacgcatctcgggacgacgaggttcacggccgacaacaccctcgacctgctctgctctggctgcacttctttggaagaactggagctcaaggatatcaaatcactctgggggggaattcaatcagactcgctgaagcgcttgtcgatcatcaactgccatgtgacatccgatggcttcctggttgaagctcccaatcttatatcgctctgctgcatcagacctgcccgagctgttccttggttcagccacatggtgtcgctggtggaagccactgtcgtgcttgatgattctcgcttgagtgatgactatcagcagccagtgttggaggatgacaacgatgggtctgattatgatgataatttctttgcacctaaagctgagggccctgatgataagagagacaatgaagctgataatgactctggtgataagagaaatagggacggtagtaaatctgatcttgatgatcatgatggtgaatatgatcatgaggatggttctgagtctggtgataaagaggttgatgatcttgaaggtggcgatgatcgaactgtgacctatggtgagattgcagatgagtcttccagttatggtattcccattcccagtgatgaatatggcggaaactatgggaaccatgattatactattttcggtggtgatcatatgcttgaccacttgtcagatgttagaactttgggtctgttaggccatcaaggagagatgcttctgaggaggcaactggaaaattgccccattttcaataacctgaacactctaacccttggtgaatggtgtatggctcctgacttcagtgctttgtcaaccatacttgagaactcacctcatgtagaaaggctttatcttaaccttgacatggacatccacagaagcagagggggcatcaacccaacgggaggatcatttgcttgcaacaacctgaagaaggttaagatcacatgccgcaacccgttcgacggaatgcagcagggagccgcggggcaggcgccgcggcgcgacgacggggaggcggcggggccttccggtggtggcgggggcggtggtgaggaccgcctcagcgcgctcccggacgcggtgctcggcaggatcgtgtcgcacctgaaggcgtggcaggcggtgcgcacgagcgtgctctccaagcggtggcgcgacgtgtgggcgtccgcgccgcgcgtcgacatccgccacccctgcgcctgcaacgagcgcgccgaccaggagaggttccacggcttcgtcgacaccctgctcctcaggcgccgcccgttcgctcccatcaaggcgctccggctgtgctggagccacgacggcgacgccaacaactggatcgctcatgccgtcaggcgcggggccgaagaaatcgaactctccacgaggcatcaccaaggttctctggaaccggagccggagttcacgagcttcatttctcccaagatcaagatcttgaagctgatgcgtgtcggcatggacatcaggtctatcacgcaaatctgctctaggtgcacttctttggaagaattagagctcgaggatgttcgcctacttgaagggcagattcaatcggcctcgctgaagcgcttgtctatcatcaaatgctatatcgatgatggctttttggttgatgctccgaaccttgtctcgctctgcttcatcagacctctcggcattgagagaaaggggggatccaattcctcgtctgatagactttggtggccagtgtggctgaatgacgacgatggatatgatcatgatgatgatttctttgcaaatgctagtgctgtacaatctgacgataagagaggcagtaaatctgatcaagatgatcttgaaggttgcaatgatgatgattgtactgtggcctatgatgagattgcagatgagtactccagtaatggtggtcctggtgatgaacatggaggatattctgagagcgatgattctacaatttgtggtccctatggtttatttaatgttcttgtaaagacatctctgatcatgatagcccgggaaggagagctgcttctgaggagggaattggaaaatttccccatgttcattaacctgaatactctgtcccttggtgaatggtgtatggttcctgacttcagtgctttgtcaaccatacttgagaaatcacctaatgtagaaaggctttatattcaccttgacatggtccacagaggaagaggggacatcgatccaagtggaggatcatttgcttgcaacaacctgaagaaggttaagatcacatgttgtgaagatgatggcgaaacagaaagagcaagaggatcatttgaggctcgcaaagaagtggtgaacgtcgttgttgaggaagaggaagtccggccggccatcgtcgttgtcgtcgcgggcttgacgtggacggcggcgacgatgtgctcggttccgatggcggtgatgcggttgcagcagcgacggtgtcgacgacgaggcgtggcgcggcggtggacttcccgtcactggctgcgccccctcgatcggttagggtttatggggtggagtggcggcggcgacgaacctcgttccttgtgtcgttatgccgtcccgtcctccacccctctttatatggcacagtgtgacgggggcccaccagccattgggctgggcgcccccgatcagggcgcgggtcaaggcccccttgagccgttgggctcaaggggagggagatccatctaacacaaaacactgcaggatcagctgataactccaagtgcgtagcttccgacaagccttgaagacacatgccattggtgccgtaaccagcaacaacctcatcagcacaaccaaaacaataatcatcatcatcatcatcacaaccaccagagacactcttctgacatttgtcctcacaagcttcatcgaatctaacaattgcttgtagcaaggatggcatgctttcaaggaacggagccctaccagggcagtaacttagctccaacgaaacttgaagctctaacctcgtgaggtgctgagagatgagagtcatgttaggcagctcgacccaatcgatcaaactgattcgtagcacccgagcttggcagcgcaaagctcgctggatccagcggacgaagagctgctctttttcaggcaagaactccgggaaattgatgttgatactgcagtaattcagaggcgcgctgctgctgcggagcgtaaaaaagcggtccaccaagctgatgaacctgtcgcccggttcatcgtaatcccaccactccacagagaggcccggtgcttccttccagaggtggagccagcgccgggcgagcacgcacgtcgccaccgcgtcgtgcaccgggagcagcgacagcacgaggtggagcacctcgtccggcagggcgctgatgcggtccggcgccactcgctccttcttcttcctccccctcgccgccgccaccgccttcctcttccggggagccaggggaggcat

SEQ ID NO: 95401 - DNA, 1351 bp, Oryza sativa
  Clone ID: PAT_MRT4530_9359C.1
gagagaagagaagaggtcaagaagagaagcaagaggagagaggagaatcgctgcctctgccactggaaagcagcagcagcaggggagaggcagcaggcagcagcagaggagaagcaagaagcaagaaagagagagaaagcgttgggacttttcattggatcctccgcttttgggaggagcagcaaaggtctcgtctttcctctcttcttctcttccttgttgccggcgaggaggaagaagaaagaggaggagatgttcccgcctgggctgatccaccaccggccggacggcggcgaggcggggcgtgcggcggggggagggcccagcctggtgctgaccgccgatcccaagccccgcctccggtggacggccgacctccacgagcgcttcgtcgacgccgtcgcccagctcggcggccccgagaaagcaacacctaaaactatcttgaggacaatgggtgtgaaggggctcactcttttccacttgaagagtcatcttcagaaatatagactggggaaacaatctggaaaagaggcatcggagcaatctaaagatgcatcctatcttctagatgcccaaggtggaatgagtgtgtcgcctagagtttctactcaagatgttaaagaaaatcaagaggtcaaggaagcattgcgagctcagatggaaatgcaacgaagactgcatgaacaagtggaggtccagaagcatgtgcagatcagaatggaagcctaccagaagtacatcgacactttactagagaaggcatgcaagatcgtctccgagccagcttgcctcaagcggcttcagcatctcggacaatgatctcccggagctctctggtggtgtcatgtgcgggctccgctgacacattgagctcctccatcttccaccagctctctgtcagcccaatcaacctgcatagtcctgagggcaagccgacgccctcgggcatcgaaggccaaatgatcctccagaagtcacctgagcttaagcgcaagtcttgctgagccgtgtcgttcgacgcaatctggatgtgcaaacaccagttttcttgtcatgggggtagtcatgtcgaatttcggaattcgaatttcggtaagaaggggggatgctctgccaatcttgtagaggccatcttgttctctggctaatgcatgccaacattgtcaagtagcaaggttttctctcttatgttatcaatccaatcagcatatcttatataaaatgcctaatgtgctagatcaagtgccttccttgataaataatattattaccgtgagatttgggttctgacatgattaactgatatatccatctgaaacaatttcgaataaaaaaaaaaaaaaaaaaa

SEQ ID NO: 95402 - DNA, 1209 bp, Oryza sativa
  Clone ID: PAT_MRT4530_935C.1
atggatgttaaatccgcgttcctgaatggggaacttcaagaggaggtatacgtgcagcagccaccaggattcaccgtcggcaaggaaggacaagtcctgaagctgaacaaggctctgtatggactatggcaagcaccgcgagcctggtactcgaagcttgatgcatgcctcgtctccctcggcttcacccgtagcgaccacgaacatgcgctgtacacacagcgatatgcgcacaagccgctaatcgtgggagacgacctcctcatcactggccaggatgctggtgacataaaagagttcaagttggagatgctgcagcaattcaggatgagcgatctcggcatgctctcctattatctgggaattgaggtacgccaagatcacaacggcatctctctctctcagtctgcatatgccttgaagctcttggagaagactgggatggtggactgtaatccctgtcacgctcctatggaggccaagttgaagctgagcaaatccaatactgcagctcttgttgatgccacatactatcgcagcattgttggtggcctacgatacctcgtcaatacaaggcctgatctggctttctctgttggctatgtgagccgtttcatggcggagccgcgcgaggatcatatggctgcattcaagcacatactgaggtacatcgccggcacccgagatcatggtgtgtcgtactcaggaggcaagacagaggagctgaagctgattgggtacaacgacagcgacatggccggcgacgtcgacgaccgcaagagtaccactggcgtgctgtttttccttgctcagatccccatcacctggcaatctcaaaagcagaaggtggtggtgctctcttcttgtgaagcagagtatgtggctgcgacaacggctgcgtgtcaaggggtgtggttgcaggggctcctcagcgaaatacttggagcgccagcgacgacgccaattctcaaggtggacaacaagcccgccattgctctatcaaagaacccggttcaccacgatcgaagtaagcacatccaaactcgttttcatttcattcgagagtgtgttgatgccgggaagatcatcatcgagtatgccagttcagtggagcagctagttgatctgcttaccaagtccttgggaaggcagcgtttccaggagctgagcgagcttgttggtgtgatcaacacaaaaggccaaagttga

SEQ ID NO: 95403 - DNA, 438 bp, Oryza sativa
  Clone ID: PAT_MRT4530_93600C.1
atcaaacctgaacgccggggggaaaaaagcaccttttttattcacccaagcatagcaggttcatcacactgggatcactgatcatcagttcatcacaagaaaaaaacgacattttgcgaatcttgtatatatttatgtataatatgtatgtaaatctcagggcaaaaatttggggtttgcccgacactttgcaagcctaatgggtggtagcagtttttaatatacacatccacaacaacccagttaatgatcagttaataatttgagctttaaacagctaaattttccttgtatacatggccaacactaccatccttttaagagtttttgaatccattattggcaattttgcatggatgcgcaggccgaaaattcatcaatttacctttctgtttagcaagattccacgagcacgatttttcgatcattttgggacat

SEQ ID NO: 95404 - DNA, 663 bp, Oryza sativa
  Clone ID: PAT_MRT4530_93601C.1
atgtcctgtagcaccgcattgaccaagccgcagctactggcaagcaaagctgctccggagttcatggagacattctcttctgtgcaattggctggtatattcaacttaatatcttcccgtcgcgcagctgccctcgatgatgagtttctgccgccgcctcccctctccgccttttccacgcgccacgtagctccagcactcctcgatctccgtcacgcccaaatccaatcatatgacatcgtcgccggtggttatggggctccgccttccacccatctgtacaacgcaatctatggggccctgtcatcctcctcggcgcccgtttatctgaagctgtcgacgttcccgacggggatacacctgaacgtggtggcatgcttccagggacatgaacggaccgcgacggcagcaaaaatcgccgaaggtgctgcggctggatctacacggtgttgtgggagacattggcatggtgggaagaaagatcttgagctacaggcctacagcagatgggacacgcatcgccagcctatgctgcgtcgtgcaggaagcgtctgcggcactgcgagtgatgttaacgtctgtccaaggccgcgaagccatgatgatccaacagatcaggaaacactgactcacggccactatcccaatgcctcgaaatcctaa

SEQ ID NO: 95405 - DNA, 164 bp, Oryza sativa
  Clone ID: PAT_MRT4530_93602C.1
caccaaacagcgacatgttttgttatattatatggaataagtaaaacaaattatgtatattaaaataatactaaaaaaggtcccaaatactacccatcaagtttaacatgtgaatgattattaagacgataaattgggatacggccaattattagttaaaaatg

SEQ ID NO: 95406 - DNA, 255 bp, Oryza sativa
  Clone ID: PAT_MRT4530_93603C.1
atggggcaccatgaaggatttgtcgccatgttcttcctctccgtccacggccgcaagctctccgaccaagtcactggaacccctatttctgtcagaatcgtcaacaccaacgggacgagcatgatggatgaactcaggaagaccctggatagaagaggccctggagttcagcgatgtgatgcagttgtcggaagcatcaacaccagcaagatgagtgatgctaaagtgtttacttttgtttcgtttcctgtttga

SEQ ID NO: 95407 - DNA, 1899 bp, Oryza sativa
  unsure (1)..(1899): unsure at all n locations
  Clone ID: PAT_MRT4530_93604C.1
atgtattgttctcactgtcaagataactgccccgtcgtaaaggaccctgacaaaaactacacatgttgtggtttgtgtgggaaggttcttgatgatcaggtttacgatggtgagccaactttccaaaagggcgccgacgggcaggcccggttggctggtagtattctatcaagcattgagagtggtaattcagtatcccatgaaagaactataaataaaggaagagaggagattaggcagattgtcagcagcttacatgtggctggtggagatactattattagcatggctcatcgctattatacactagctgttgacaagaattttacaaggggccgtcgaacaactcatgttgctgctgcttgcctttatattgcctgccggcaaagtaaaaaggcatatcttcttattgatttctcggaccatttgcagataagtgtctttgccaagttttgctacttgcggaacatccagttatccaaaagctcatcgaccccagccttttcatacatcgttttacagaacactgggaggaaaccaagtggattgtgtggtgcagcactatatatcgctgctctctctcatggatatgattataccaaggcagatattgttgctgttgtgcatgtttgcgaggcaacactaactaagcgcttgatagagtttgaaaatacagattcgggtagcttaacgattgaagaatttttggcaaaggctgatgaacaagtgcttgttactaaaatttcaccaaagtctggagaagtactttgcaagcacaaggataaagctgagcattttgctcatggactctgtgaaaaatgctacaacaaatttatgaaactgtctggtggactggagggtggctctgatcctccagctttccaacgagctgaaaaacaaaggttggaggctgctaaaaatgctaaaggaactgctgcatctaaagaggcagcactggaatcagtttgtgaggcacgcgaatctgatgttgagaataacattacgacaccgccaaagaatataattggagataagcattcgacaattccttctgtgaaagttgctggtgattctgtagctacagaagatcctgaaggggaaggtaaaaatgataaagcagatgaaggtcctgaaagtctctctgatattgatgatgcggaggttgatgggtaccttcacaacgaggaagaaacacagtacaaaaaaattatctgggaggaaatgaataaagagtaccttgaggaacaagcagcaaaagcagcattagcagctgagctggcagctagaggagtggttgtggaagaggggaagaggaaaagaagaagacataatgaagatggcaagaacgcaacacccgctcaaacaccagcagaagcaacacagaacatgttgaagcggaagagacttggatcgaagatcaatgatgaagctgttaacaaactgtacaataccaaagatgaagatggcaaagcagataaagagatggacttcaacgatgagtatggacaggacacaggtgatggtgaaacattcgaaggtggttatgattatcctgattacaactatgatggctatggtgatggagcctacggcgattatgatggtgttgatttttaatacccgatatatcaatgctgggtagaattgttacaattttatttgtgtgtgtatggcaacaattatcaattttacatgaatagttctgattagttgacgaaaacggagttaatcagtactcagtagacagtatagcagtgtagctcgttgatttctctggtgatatgttgagaagctgttgtagtaactgtattatttcattcagcgacctatacttgcaagttgtatattaaaaaaaatataaaaggttacaagtgggcgncgccccntggtggtgtccag

SEQ ID NO: 95408 - DNA, 456 bp, Oryza sativa
  Clone ID: PAT_MRT4530_93605C.1
atgaggtcgtcgccgtttccgtccaccgcttcgccgccgccgaagaccgtcggagcgccgccgactccgtcgccccgaagctctccaccgtcgccgtcggtccagccgcgccgtgccgctgttgcagccgtcgtcttcggtcaccgtcgccaccatcaggatcgcgaggaggagcagcatctcgtccacctctccgttgccgacgtttctcaccgaagcaccgccgtcaccgccgacccgaaggccgccgccgctcagcctcgccgccgtcgtcatccgtcatcgtccgccgccatccaagccactggtgagttcgccgagtcgagctctacccgctggtaccctccgtttgcgccgtctcgccgccgttcgccgtcgagcacgtgctcccgagtcgccgccggtgatgacgtcaccgctgacgtcatcgtcgccatgtcccgtgaaccgcggtag

SEQ ID NO: 95409 - DNA, 388 bp, Oryza sativa
  Clone ID: PAT_MRT4530_93606C.1
gcaaacagaattagttgaatccttactttttgagatgcaagatttaggtataagaccgagtgctggatcgcacaattgtctcataagtgcctatggtcgccagaagaaaatgagtggaaaggctgaatatgctttcttgaggatgaaaagggaaggtattaagccattatcttcttcatataatgcactactctttgcatatgcagttaatggattgcatgaaaaagctcataccatatatgtggatatgaaaagagaaggacttaaacctaccttagaaacgtatacagctctactcaacactcttaggagagcaggtgacacacagaagctaatggagacatggaaaactatgattgatgaaaaggctggcggaacacgagtcata

SEQ ID NO: 95410 - DNA, 274 bp, Oryza sativa
  unsure (1)..(274): unsure at all n locations
  Clone ID: PAT_MRT4530_93607C.1
atataaacaaccacaggatgtcaccttaagacacatcatgtccgatactgatacatttgatcacacacttattccgacatagtacatcntnctatcgtacttatttaagctaacatccaatccagctggcacatgcagagtttgcagaggacatataggctcgtatgtagtggcctgggccaataaactccggacttgaaagcgggaacggatgcctcggttcccttacttgtgcgcggtggagtactaactcgggctacctcccaacttgcgg

SEQ ID NO: 95411 - DNA, 1104 bp, Oryza sativa
  unsure (1)..(1104): unsure at all n locations
  Clone ID: PAT_MRT4530_93608C.1
tttttttttttttttttaacaaatagatgagtttccnttattgatatcccccttttgtttttcttctcccgtgtcccaagaacagctcataaatggctgtgactaaatactcagacccaaagtgctaatatcatgtttaaacatgaaaatggtcactagatccaaaaaataaattacaattacacccaaagtgcataagtccaaagcataattttgtaaccagtttgaaaacataaatattctatattgtcagagcagcaaataaatcctcttgtactcagaccatgtccttctcctatggcagtctagtagctttgagtattgaccttggatccattctgtcaccctggcgaccttggaccatgtacttccattgttttccttcatcaaatgtgtcaactttggtgatgctaggccatttcacttctcagctaaattaaagcagactctaagtcatcttcgcaagcacacataaagacttctctatttgctggggtcttaagaactgcataatcctttgccttctcttgtttggtaacatccattgagctcaataaatacacacttgacaaaataatctgttgcttgtgaacataccttctctctagctgcaacttcttcctcggcttgtttactcctcatctcaaggtatcgctccatcatgctctccactcttgaattcttactagtcttgttatcttctttttttgtctcctctttgctattaaagcctgtcttctttgctcttcagtaacaattcttgaatcctcagcttgagtttctttgtctctcgggtttctttggtctccaagcagcacaacatcagtttcttcctctcttgagtttctttggtcttcgagcagcacaacatcatcttgctcttgactatcatcttccaattcctgtactagcctcaggggtttctcatcttccattgaatcaaaggaggtgcagttgtgttttccctcagcaagatggccgtcatatagctcaccaagtgcatcatacaagggaaagctggccttgttgttgcgaaactttttgatctttgggaatgtctacacatgcaaaagcataaccacaaatcattgtaaggcatcaaag

SEQ ID NO: 95412 - DNA, 508 bp, Oryza sativa
  Clone ID: PAT_MRT4530_93609C.1
gactaaaaacctatttttagtctaagttttcagggcaggataatacatctacaatggaacacattagccgattcttagcacaatgggggaggcatcgactgaagaagctctgaaagttagattttttttttccattgtctttgactggatcggctttcacatggttttcatcattatcatcaaattctatcagaggataggccaatcttgagaagtaatttcatgattacttctttactggaatcaatgagttgaatctttcagacataatatcggttgagcagcaagaaggagaatcggctatggaatatattcagagatttcataatgtctgcagcctatattatggtttgagcctaaatgatgagcagctagcagatcttgcatttcatggattgtcagcacccataagagatagattcttttgccacgagtttgactgtctagctcatctaatgtaaacagtatcggctcgtgaaagccgattgcaagaagcaaaggaagatca

SEQ ID NO: 95413 - DNA, 213 bp, Oryza sativa
  Clone ID: PAT_MRT4530_9360C.1
atgccttgcggagtcccgcaaggcgggctcttgatggagccctgcgaagttggcaagcccgtagagggcagttggctccggaggcctcggaaccaactgaagggctccgagggtctcgaagcccagtcaagggacccagagaccccggagtcggagcctaggatggcctccagaagtgggcatgggcattgctcaccctccaaccaccactga

SEQ ID NO: 95414 - DNA, 2187 bp, Oryza sativa
  Clone ID: PAT_MRT4530_93610C.1
atggcgaagatgattgaagcactcggctttggagtatctagttcgagagaaggttatctttccgactgtgaaggtctcaggggctactgtggagattatgggtaccccatacccacacggcatgaggtatatgctgaagagccaaccatagttgacctatgtgactcatcagatgatgacagcagttatgaggctgatgagagtgaagatgattcagaggagatggaagtggcagaaggtggtatggagggtactgaaaatgcagtagctcttgaaggaggtgaaattaggaccaagacaaatgaagttaggaagggcaaagccattagttctgaaattcctgagaaccgacttgtggtttataattgtgacaatgatccattggcaagccaggcaccttcagagagtgagtctaatagtgagtacattcctggagatgatgcagggtcagatgatgatgaggagatcatagagatagagaagcactacaaggatatgaagagaaaggtgaaggcaggacagctggataatttagatgatgtatatcttggaggacaaggatggcaaaacatgaataatgaagctggtggggaaggtgatggcattgctgctgagagcccagaggatgaatcaatggaggagattggcacagatggtgagtttaagaaagctgtcactaagtatgctctagctgagaggaaggttataaacttcatcaaggatgacttgaagaggatagttactcttgagagcttgcatgcatgtccacctagaagggataacaaaatggttacagcaactaggattgcagagaagtatggaaagattatccttgccaaccctgggtggaatttggcccacatgaaggcaactgtccaagaggagatgtttggtgaagcatctgttccaaagctgaaaagggctaaagctatggtgatgaagaaagcaatggatgcaaccaaggggcaatatcaaaagctatacaactaccagcttgagctccttaggagtaaccctggcagcacagtagttgtcaacagggaaataggcactgatccacctgtgttcaaaaggatttacatatgcttggatgcctgcaaaagggggtttgtagatgggtgcaggaaggtagttggcctggatggctgcttcttcaagggggcaacaaatggagagctgttgtgtgctataggtagagatgcaaataaccagatgtaccccattgcctgggctgttgtgcacaaggaaaataatgaagaatgggactggttcttggacttgctgtgcagtgacctcaaagtgttggatggaactggatgggtgttcatttcagaccaacaaaagggaatcatcaatgcagttgagaaatgggcaccacaagctgaacacagaaattgtgctaggcacatttatgcaaactggaagaggcatttcagtgacaaagaattccagaagaaattttggagatgtgctaaagctccatgtaggatgctcttcaacctggcaagggcaaagctagcacagcatactgtcatgctatatgcaatggagctgacagctttgagaactaacacactggatgagttcactgctgattgctacaaagtggatgctttcaagagcacatataagcattgcctactaccagtggagggcatgaatgcatggccagaagatgatagggagccactgactgcacctgggtatataaagatgccaggcaggcccagaactgaaagaaggagagaggctcatgagccagctaagccttctaaggcatcaaaatttggcaccaaggtcagatgcaggacttgcaagcagaaaaaggaaggcaactggcaccttgactaccactacttcagcctctcagtcaaaggcaaccaagccgacaaaaaaagcccaataggagggaggaaatttagacttattctgaggaaaagcacgacggcccatcgtgccttcgggccggcccggcacggcccgaggcgtgttgggccgtgcctgggccgtgagtgcggcacgtgggctggcacggcacggcccggtgcgttggtcgggccgtgccggcccgacaagcctcggcccaggcacggccgggcctgggccgtgccgagccgggcggcccacatggccaactatagtttcagctcaagaacctgccaggacaactacaaagaacaaagctaa

SEQ ID NO: 95415 - DNA, 430 bp, Oryza sativa
  Clone ID: PAT_MRT4530_93611C.1
agtttagtatacattctagcagtagttttagttcgtgtattgattatgtgcgatctggttggtttatctttgtttttttaaaaaaaccagaacgcacactgccatttttagggctttatcaccgaatatttgattttcaaaaaatttctttgatcattatgagtttagagcactatctcgcgtgatccaacaaaaaaaggggggtatcctactagatatgagggaaaccagctaaaccaaatactggccggggaaaaaaataccggactagtggggcccaacccggcacataaacaagaagtgaaccgcgtactagcctgccctagaaaagcctaacacggggaaaccccggttgatgtttgtagattaccggaaaaaaccttgcttagaaaacccctagccggaaaacccctggttaaaagacaaaccc

SEQ ID NO: 95416 - DNA, 2742 bp, Oryza sativa
  Clone ID: PAT_MRT4530_93612C.1
atggatttgctggacaaactagtggttaggttccatttcaatggggagtttgtgacatctgggagggagaagaagtattgtgggggtagagaggcattgtcctatattgatagagataagatttcactgccagagatatttggacacttgcgagaccactgtaaggtgatggaaggtacaatgttgcattggttgttccctgggaaggatttgaatagtggacttagagctttgttggatgatacggtttgtaagttaatggaagattgcatagatgatttaggtgtggcagaggtatatgctgaagagccaaccatagttgacctatgtgactcatcagatgatgacagcagttatgaggctgatgagagtgaagatgattcagaagagatggaagtggcagaaggtggtatggagggtactgaagatgcagtagctcttgaaggaggtgaaattaggaccaagacaaatgaagttaggaagggcaaagccattagttctgaaattcctgagaaccgacttgtggtttataattgtgacaatgatccattggcaagccaggcaccttcagagagtgagtctaatagtgagtacattcctggagatgatgcagggtcagatgatgatgaggagatcatagagatagagaagcactacaaggatatgaagagaaaggtgatggcattgctgctgagagccccagaggatgaatcaatggaggagattggcacagatggtgaggttagcactaaggaaaacaagttcccaagatacaaaaaaaaggtagggactccttgttttgaactgggcatgaagtttagctcaaagaagcagtttaagaaggctgtcactaagtatgctctagctgagaggaaggttataaacttcatcaaggatgacttgaagagggttagggcaaaatgtgattgggcaagctgtccttgggtatgcttgctgtccaagaatactaggagtgatagctggcagatagttactcttgagagcttgcatgcatgtccacctagaagggataacaagatggttacagcaactaggattgcagagaagtatggaaagattatccttgccaaccctgggtggaatttggcccacatgaaggcaactgtccaagaggagatgtttggtgaagcatctgttccaaagctgaaaagggctaaagctatggtgatgaagaaagcaatggatgcaaccaaggggcaatatcaaaagctatacaactaccagcttgagctccttaggagtaaccctggcaacacagtagttgtcaacagggaaataggcactgatccacctgtgttcaaaaggatttacatatgcttggatgcctgcaaaagggggtttgtagatgggtgcaggaaggtagttggcctggatggctgcttcttcaagggggcaacaaatggagagctgttgtgtgctataggtagagatgcaaataaccagatgtaccccattgcctgggctgttgtgcacaaggaaaataatgaagaatgggactggttcttggacttgctgtgcagtgacctcaaagtgttggatggaactggatggggaatcatcaatgcagttgagaaatgggcaccacaagctgaacacagaaattgtgctaggcacatttatgcaaactggaagaggcattttagtgacaaagaattccagaagaaattttggagatgtgctaaagctccatgtaggatgctcttcaacctggcaagggcaaagctagcacaggtgacacctgctggagcacaggccatacttaatacccatccagaacattggagccgtgcatggttcaagttaggctcaaactgcgattcagttgataataatatgtgtgagtcattcaataaatggatcctagaagcaagattttttccaattatcaccatgctagagacaataaggaggaaggtgatggttaggatttcagagcagagaaaggtttctgctagatggaacactgtggtctgtccagggatcctaaagaaattgaatgtgtatatcactgagtcagcatactgtcatgctatatgcaatggagctgacagctttgaggtaaaacaccacaccaataggttcactgtgcagctggacaagaaggagtgttcttgcagaactaacacactggatgagttcactgctgattgctacaaagtggatgctttcaagagcacatataagcattgcctactaccagtggagggcatgaatgcatggccagaagatgatagggagccactgactgcacctgggtatataaagatgccaggcaggcccagaactgaaagaaggagagaggctcatgagccagctaagccttctaaggcatcaaaatttggcaccaaggtcagatgcaggacttgcaagcagagttgtgcacaaagtagaaaaaggaaggcaactggcaccttgactaccactacttcagcctctcagtcaaaggcaaccaagccgacaaaaaaggcacaaatggagcccctccaaattgtcagagtgaatgcaagggcaaaaatttctacaccttctggtggctcagctagggttgatttgcaggccaatgttgcaggctccaacagctctacaagtgcagctgtcactgttacttcagggaaagcatctgtatctgtttcagctcaagaacctgccaggacaactacaaagaacaaagctaaagtaccactgcttcttctccctccatgggaatctgacaaactatga

SEQ ID NO: 95417 - DNA, 1355 bp, Oryza sativa
  Clone ID: PAT_MRT4530_93613C.1
ctaggcacgggtgtgggggcggctgatgggcgacgggagacggccgtgcacggtggacaggcaaggacgcaaggtgccgaggaggccagcacccggcgacaacaccagctgacgagggtacgagtaggggtggcaatggggcggggcggggccgggttgggctgctggtgagaattctcccccggtcccgaccccgtagggacgggttcccgccgggtcaccggacccaatagggaaattgccaccccaggcggcgatcctgcgctgacacgccgggcgggaggtgccgagcctggagccggcgagggcgcaaggtaggcaggcagcggcgcagtggccggcaacaagcaggcgaggcggcggcggcggcggcggcggagcccaacgacgacgacgacgacgacgacgaggaggaggctgcgtcgacgaccgcgacgatgcccggagcttgccatcgtcaaccgcggccatctgcgccccgcggcgctcgtcggccgccgccgcgagctgctgtcgctgatcgctctcctctttgagccgccgctcctcctcgagtctcgccacgaacttctgcctccggtgctcgggcatgcggcgccagtactcctccctcaccctggcgatcagcgaccggacctcctccctgtcgccggcgccgtactccggccaccgcgccatgccgcggtcccgcaggagcctctcctcgtaccacgtcctcagctccttggcgtcgaggtcgtagacgatccagtagccgaggcgcgtcatcctgatgagccgccggtgcgcctgcgaccacacgccgtagtcgttcctgatgaggaaagacgagcgggcggcgaacttcctccggtatatgtggagcccgaagcttttcgacggccacccgccacggatgagccgcagcagccgccgccgccgccgccgccgcctcctctcattgcttccttttcgttgatgatccgagttcttatctctttccttatctctaactcccctcctctccttctttttttccttcaccactatgcaggcggccggtgcggaggcggcgacgcgggggacggcgcggaggcggcctgcgcggcggccggcgtggcggcgcggggggctgcgcggcggcggcggtgggcggcctgtatagatggccatgtgggccgcccggcacggcacggcccaggcccggccgtgcctgggccgaggcttgtcgggccggcacggcccgaccaacgcaccgggccgtgccgtgccagcccacgtgccgcactcacagcccaggcacggcccaacacgcctcgggccgtgccgggccgacccgaaggcacgatgggccgtcgtgcttttcctcagaataa

SEQ ID NO: 95418 - DNA, 322 bp, Oryza sativa
  Clone ID: PAT_MRT4530_93614C.1
tttggcggcggcggcgagcgccacatccgcctgccggggcttgtctaacgcctgacacgctggtatcaccgagcccgtgagcacgtccgagcgcgtctgtctcgcactacgctgcacattgtcatctaacccgctcgcaccaacgcctacacctacgcctccgaccacacccacatagccaagctgactctgcttctggaacccagcgacgagagcgcttggactgacgagacgtgctagatgggccactacctagcaccggaccacatctgctactacgagcgagcacagcctgaacaccacactctgctaccgatcggat

SEQ ID NO: 95419 - DNA, 2897 bp, Oryza sativa
  Clone ID: PAT_MRT4530_93615C.1
accgttcagctggatattacggcctttttaaagaccgtaaagaaaaataagcacaagttttatccggcctttattcacattcttgcccgcctgatgaatgctcatccggaattccgtatggcaatgaaagacggtgagctggtgatatgggatagtgttcacccttgttacaccgttttccatgagcaaactgaaacgttttcatcgctctggagtgaataccacgacgatttccggcagtttctacacatatattcgcaagatgtggcgtgttacggtgaaaacctggcctatttccctaaagggtttattgagaatatgtttttcgtctcagccaatccctgggtgagtttcaccagttttgatttaaacgtggccaatatggacaacttcttcgcccccgttttcaccatgggcaaatattatacgcaaggcgacaaggtgctgatgccgctggcgattcagaaattcgatgataagctgtcaaacatgagaattggtcgacggcccgggcggccgcaaggggttcgcgttggccgattcattaatgcagctggcacgacaggtttcccgactggaaagcgggcagtgagcgcaacgcaattaatctcaactgaaaagttacctgcacaacgccatccggttactcaaaattctaatggacgtggggtagctcaagctgataatggacgcaaagaagtcaagccttctaatgaccaaacagtgggacaatctgatgggatgattacaacaatggttggttcacatgcagttctagcaaagggtaatcagaacagagtgcttgctgtgccatcaggaacaaataattttactggtgaactttgctgctcttcgtcagatccaatacatgtaccctctcctggttctaaatcagctgggacttttggagcaataaagcgtgaggttggagtagttggtgctaggcaacggccatctgataatacagcaacaaatacatccacttcaaacagttcagttaaggtgccaacaagtacagcaacaaaagagaatgcttcaaatggacagcaatctagatcctctggtgtatcatcgaaaaactcccgtcctagttcatctacacacttgagcagtagaccatcttcttcgagtcaatatcattctaagccaaatactcctgttggtcatccaaaagtgaacccacaattggagtggaaacccaaatcagtaagccccagtcctgccaatcatgcagataatgtggtacattctagtgctgcatcatctgttgatggtaatcaggcacacatggctggtttgtctaagaagctttcacaaactaatgtttctgaagatgagcatgtcatcatacctgcacacctcagggtaccagactcagaaagaacacatcttatatttggtaattttgaatgtgatgttgagtcgaaggcttttacattagctcctgatgcttcaactaacagagagtttaatgcccattcttcttcaagatcaactgatgatgtgcctcctactgaccagacggatcttgttggctcttgtgtcatgcttccgaaatcagattcctttgtttcagtttccgaatatcagcacccattgactgaggacatggaggtcttgagtccaggtgtttttggagagcataggacaaatgatatgatttcaacccaggtctcacattcttcacctcaaccccagcatcaggacaattcagcagtgcatgactttaaggaatatgagccagattctaggtatgagatgccatttatcactaaagctgttgatagtgaggcgacccaaaatataccttatccgtctgaggtgatgggcttgcatgctgcaaatttcaatcagttatctgttactgcagcaactcagcacccagtgcctcaaatgtaccacatgcatgtatcgcaatatccaaactgcttgccatatcgacatgttttctctccatactatgtgcctccagtggctgttcaaaactattcaagcaatccagcatttacacaattgccaagtgccagcagctatttggtaatgccaaacggaacgtcacagctagcacccaatggcatgaaatatggaccacctcatcagtgtaagcaaatgttccctggtggccctgctggatacggtggttttacaaatcagaatggttacccagtcaatactggtgtaattggtggcactggtagtgtcgaagatgccaatatgagtaaatataaggacaacaatctttacacactcaaccctcaggctgaaacagcagatgtgtggattcaggctcctacagatattcccgtcatgccgtcaacaccattctacaacatgatgggccaaccaatgtctccccatacagcatacttgccaccgcacaatggtcatgcccctttcagcccagttcaacaccctgctcacctgcagttcccagccatgccccacggactgcagccgacaacgatgaccatggtgcagaacccacaacccatggtgcatcagccagcctgtccgccgttggctggaaatatcggcattgatatggcagccatggcttctggagctcaggttggagcatttcagcaaaaccaactcagccatctcggctgggctcctcccagttttttatgatgatttggatggcagtgctctcatgagacgacaagtgagctggtttcgtatcgacaagagaaaataatgaactggtgggagagttccgtttaatgcagtcactttgatctttgccccatcggcattgcgcggttgaaattataacattttattcttgtccttttattattttgtcaagataagaaacaaattatccgtatattatcttttgactgagggtatcggtgtaccgctcggtattattatcgccacggtttggaaggaag

SEQ ID NO: 95420 - DNA, 330 bp, Oryza sativa
  Clone ID: PAT_MRT4530_93616C.1
atggcggttgcagccggtcggatggagcaaagggggggcggcgccgacatgcgggaccagcccgacagtggctcaagggggaggaggtggcaccggctggtgggtgggccccaccgggcagtggctcaggggggggagacgcccggttggctcagctcagctcggcttcaaactggccggccggttaggcgatgcggctgcggcgagcggccaccgacggcggcgaccggcggcgcgggagacagcggtggcacactgccgaagcggcggcgcggacaggaggcggcgaagcgcccaaagacggcggcgcacacggggaagggggagtaa

SEQ ID NO: 95421 - DNA, 600 bp, Oryza sativa
  Clone ID: PAT_MRT4530_93617C.1
atggcgagaacagccctgtacggcagcaaagaggtggaccccttgttggtgctacagaccaaagtcataatcctgttctatggtatggtgacgatagttttagtgctggggatcccggccgctgcccttctttctaacgccgccgagaaggtcaagtacaccttggatctcgccgccgtcgaggggatggacgtcgccgccgccgccacggccggcgccggcggcagtacggtcatctcgcccgcgttcaacctcacgctgcgtgtagagaacccgcgcaccttccggccatggtgtctcgaccgcggggacgtggtggtgtcctactccggcgtagcgctcgcgtgggggcgcgtcccgggattctgcgtgcagaagaggtcgacggccaagctgacggtggtgccctggggaaagaacgtccacttgtcgcaggagctacgcgaacgctttgtctcagagctgcaggaggggacggctaaggtctacgtcgagatgaagctgcactactacgctaatttcggtatggctgccttcgcgcctagcactgggatggtggggatttcacaggagcttacgctgggaggaagagatgaataa

SEQ ID NO: 95422 - DNA, 496 bp, Oryza sativa
  Clone ID: PAT_MRT4530_93618C.1
ttttaaaaaaaaaaattaaaaaaaaaaaaaaaaaaaaaaaaaaaaaaaaaagggaggacgaaaaaaaaagaaaccaaaaaaacaaacaaaaacgggggggccgcattataggggccaagagtacgcccgcgtgcatgtgaggggccaacgttttttcaagggggccacaaagaaaaccctgtgggcgcggggctacaaaggcctgacagggaaacccctggggccacccggcttaaatagcaaagagggcagctccctttttccttcggggcggtaaccaaacaggcccgcaccgggagccctccccaaaaaaggcgcacacctagaaggcgaaaggggagccccccccaaaggggcacaaaaagcggggggggggggggggacccccacagtgagcgttttactttcctttgccccaaaggccgccccctttgcgctataacctttaaattgggggccacgtttggggtttccccgtaaaggcttaaaaaggggg

SEQ ID NO: 95423 - DNA, 222 bp, Oryza sativa
  Clone ID: PAT_MRT4530_93619C.1
ctctttcgcttcgctgaccccccaaaaccctagctcgagcgctcccttcttccccccacctctgcggcggcggcgggccgcgagatggcgaagtcgctgcgggcgaagcgggagaagcggatgagcacgctgcggggggagatcgcgcagcccttctacgacaagaaagaggttggcaaactcgccgggcaggccgccccgctcgaggcgcccgcgctggcg

SEQ ID NO: 95424 - DNA, 1393 bp, Oryza sativa
  Clone ID: PAT_MRT4530_9361C.1
atgttcccgcctgggctgatccaccaccggccggacggcggcgaggcggggcgtgcggcggggggagggcccagcctggtgctgaccgccgatcccaagccccgcctccggtggacggccgacctccacgagcgcttcgtcgacgccgtcgcccagctcggcggccccgagagaatagacccttttcgcgacaccaatgtcattggcgccgtgggggacggtgccaatgtcattggcgccatcatgttggactacagcgtcaatgatgttggcaccgcaaaaagggtctattcctggaaagcaacacctaaaactatcttgaggacaatgggtgtgaaggggctcactcttttccacttgaagagtcatcttcagaaatatagactggggaaacaatctggaaaagaggcatcggagcaatctaaagatgcatcctatcttctagatgcccaaggtggaatgagtgtgtcgcctagagtttctactcaagatgttaaagaaaatcaagaggtcaaggaagcattgcgagctcagatggaaatgcaacgaagactgcatgaacaagtggaggtccagaagcatgtgcagatcagaatggaagcctaccagaagtacatcgacactttactagagaaggcatgcaagatcgtctccgagcagcttgcctcaagcggcttcagcatctcggacaatgatctcccggagctctctggtggtgtcatgtgcggctccgctgacacattgagctcctccatcttccaccagctctctgtcagcccaatcaacctgcatagtcctgagggcaagccgacgccctcgggcatcgaaggccaaatgatcctccagaagtcacctgagcttaagcgcaacctagcgctgccgtcgccgccgtttgtccaaccgtgcgtcgcccccgctccggtcgtcatcgtcgctcagggaagccgccgtcgtgatcgtcaagtcgtcgccgacctcgtccgcccctccgtcgtcgccttaggtcaccggagcaccgccgtcgtcgtcaagccgaaggtcgccgccgcttcttcctcgccgccgtcgccgtccgttgatcttccgccgccgttttggtcaccggtgagttcgccgcgtcgcccgcaacccgtaggtgctgtccgttcgcgccgccgcgccgtcgttcgccggcgagcatgcgccgcccgagccgtcgtcggtgatgacgtcaccgctgacgtcatcgtcgccgtgtcccgtggaccgccgtgaaccctagccgctgacgcaataatcccctttttaagccagcgtgggcaacggctttactttctgtatagtatggttcatagtagagcaccagactgtgaagtggcggagataaggccacgggggtcgctggggagtccat

SEQ ID NO: 95425 - DNA, 513 bp, Oryza sativa
  Clone ID: PAT_MRT4530_93620C.1
agagatcacaggggccagtcaaggcttgggtaaggccaccaccaggctggtctaagctgaatgttgatggctccttcagtaatagcagcggccaagcaggcatagggatgatcctcaggaattcagaaggataatccatatttacagctcgtcaggttatagcaaattgtgttgatgcgttggaatcggaactaatggcctgtaaagctggactggctttggctttacattggtctatacttccaatcgtccttgagtctgacagcatcttggctgtatccgtgattaatggagaaactgaggacaaatcaaggtttgcttacttgatacgagagctgcgtttcgctccagagaggagaaagggaagttaaaattcagaaagtgcatcgagatcacaataaaattagccttgaacttgcaaatagtgctcgattagcaaataggtcagatttctggtttggccatgagagcaactgtttctctgcacttattctggaggagtgtaatcactct

SEQ ID NO: 95426 - DNA, 468 bp, Oryza sativa
  unsure (1)..(468): unsure at all n locations
  Clone ID: PAT_MRT4530_93621C.1
tcantaaagtcaaatcattnttccccccaagccaagnctccgtttggaacggggttccattttngcctngctctngnccttncancanatttggtctcgaagcagagtacnncganancggnccttccattgtcccccccaagtnnttntaagngcataatcntanccnccgttntttcaagtttccgaccaactcgcancaatntcgncgncaanntaaaccganatnttgggctncttgcgnctttganaggcccatgtcttcgaaattttttggccataatgttggtgtnttnggggnaggcntgtntaaaantgcagnaaaagtacgatngtttttgtctttaagtagttcgncgttgtcncncgganaaaccgggcaggnggnccncgtattcgggaggttgnncancccatttagctctgttccccttaaaaaaaaanaaataanaaaaaaaaaaaaaaaaa

SEQ ID NO: 95427 - DNA, 540 bp, Oryza sativa
  Clone ID: PAT_MRT4530_93622C.1
ctagcaccggtgcagctggtaagcggagaaggccgccgacgccacggccttcaccttgctgccgccgcgccgcctggactggatccatccacctcgtgtcgtcgtcggtgagctgctggagaaggagccagagtcccaacccgtccagccaaaacccctccttccaagacactccgtgttgagcttggcgccctgcgcgaagcgttcttgaccttggaaggttcttgcggtgcgtgatgttggagtgtataaagtgaattgcccgcctttccctatcaagtttaggcttttaggtgcaactggctggtgcatgcaacttaatatggtatcagagccagaggtctcgagttcgaatctgctgagtggctgtgtcatccggtcgtcgcagtgcctcgggccgaagcagcgtataggatgctcaccaagcgcctggctcgacccacgcaactcgtcgagacgattctttatattgccgctggcttgccttcgttgccgccgactggtttttctttcgcctccacggctgcacgactccgccat

SEQ ID NO: 95428 - DNA, 189 bp, Oryza sativa
  Clone ID: PAT_MRT4530_93623C.1
gacgggcagaatctgtcatggaaacaacgacgggcactgaacaaaagaaatcggagggcatacaagacacgatgctcaatggttctgacacacacaactgcgcttaacaaaaggaaagagaaacaggcccataaccagatcgtcgggacaatcaccactactggctgaatttaagcagcgggtcaaaat

SEQ ID NO: 95429 - DNA, 231 bp, Oryza sativa
  Clone ID: PAT_MRT4530_93624C.1
atggcccatggagatcaaagctatcgctgtggccttaattcccgagccacactaaaggggaggagctgctaccatggccgctcgctcccactgccgctcctgagggcaggggcggcggagctaccccgaggctaccggatccgcacgtcggcgccgctctcgagggcgggggcagtggatccgctcaccaacgtccctgaggctgcctctgtctcagtcgcctgcccctga

SEQ ID NO: 95430 - DNA, 164 bp, Oryza sativa
  Clone ID: PAT_MRT4530_93625C.1
catcaaaacccacactcccatagtggtgattattatatacctgtacaacccacataaaatcactaacattctcaatacttacatttaatccaaaaactaatcatttcaaactatatcaaatgcaaattccttccatatataaaaaattactatttacaaacttc

SEQ ID NO: 95431 - DNA, 526 bp, Oryza sativa
  Clone ID: PAT_MRT4530_93626C.1
ctcgcccgccctcccaccgtcgcccaccaccgccgtcgccgacgtctcgatgccagccgccgagtggtgcgggatagtttctttcttgtcctacaaggacttgtatcaacccatgggtataaatatgtacacccggagtctatgtaatctatcaatcacgatcaatacaactactctcggcgcatcgccaccctcttccccgaggtttttacttatcctccggcggaatttgggcacctaacgcggggctgcatcggttcagttcgatctccggcgaaggggtaagtcctacgttccgtcgggccctggtgaatctgtcatttacatcggcgtcgttcaaggctgcatcacttcgatctcttggatcgctctggtttggttgatatatttgcctacctgatatctcaattctatttctaattgcattgtttgcttaaaccctattgctatcggctggtatcagtatcaactattattggctatcggttggaaatactccatcggcttgtcagtcgatcagctgttt

SEQ ID NO: 95432 - DNA, 451 bp, Oryza sativa
  Clone ID: PAT_MRT4530_93627C.1
tgatataatgatgaatgagaagagagtctcacccctacatcctgtgtctccaattcttgtagacattacgggacactcttggactactttgtgtagcaggagggttgcgtaatacgttaccagcacgacgttctacgggagaccgagaaagaagaaggtagagaaatctcttagaatcctcttgcatcttcgacattgaattgcacaaacgaattccttgcatcctcctcgttccgtttttgtggttttcgatggattccgtcgtcgccgacttggagtcgccggtgaataccgattgtcggagttccaccaccggcagtctgccgcgccatgccatggccgctgcacgacgtcggaccgcatcaaccacaccctaaacgacggctgtgcctcgcacagcacctccgtgagccaccgccggacgcgccccgcacggcgtcaaccacggcgc

SEQ ID NO: 95433 - DNA, 480 bp, Oryza sativa
  Clone ID: PAT_MRT4530_93628C.1
tcgctttcctcgatcgagggcacgcgacgcgccatggcgtcggcggcggaggcggcggaggagctcacgaggatgcaccgggagctcccgccgagcaccgccaacgaggaggcggaggcggtggatgcaaaactggtctcggtggacgaacaccgaggcggcgcgcctaaccgaagtgtaccgagaagaggccgccgcctccggaggctgagctcatgggcgtcctggacggcgggatggacagctcccgggccggctgcggccaggcaagcgagatcgcctgcccttcgtaccaaacggagcttgcgctgctggaggcctccaaggcaagaggagaagggcggtctaggcaccacgctgcgtggattggaagaggcattgcatggaggaatccccgcatggacgctcactgaagtcgatgggccctcgccgattggcaagacccaagtttgtctgaagcttgctttgctagcaacaata

SEQ ID NO: 95434 - DNA, 540 bp, Oryza sativa
  Clone ID: PAT_MRT4530_93629C.1
acatgccagagctctaatactgactcactgatgagggaaagctgggtacgcctgcagggtatccgtgccgggaattgcccgggtcgacccaacgcgtgccgagtggaggaccctgatgtgggatgtaaagatactgatgcaaaccaaggcccttgcaggcatgcggatgccaatctatggatgtcaagctaactggtgctgtgcctgtgccagtgatttgaggaacttggacgtgctgcttgagtgccaaattgttgggaatgatttggtgaatttggcactttgacgtgttggaaggagtgtgcctttgctgagccccagtcaacagacccaacactgtgcccatggatggatgaatggtgatgggctgccgaccccctgcgttgctgctgggtggtgttggatggttgatggatgttgtaattgacaagatcggacacattattatgtttgtttacatggtagttttggccttggtttctgtttttaatggatcccacccgacatgtgatttttgactgtaaaaaaaaaaaaaaaaaa

SEQ ID NO: 95435 - DNA, 350 bp, Oryza sativa
  Clone ID: PAT_MRT4530_9362C.1
ggttttattcaatattaatcccataaatctgatgaaattgaaattgcatccagtgaagagcctgggatccacattgattggaggtggctaaatgccctaaggaagagccttacgatctatattttcttttgtgcttctattatttctattgcctgtgattgtattagtgtattttggcctgcgacagaaatatgtaaaaacacgttagtgggcgtgctagctaaaaatagcggaaagaaaagtgggatagactctaactcggatagagtcgagatagaatctgacttctgccgtgggctggctaaactggagtaggaaacggtgtgagcggcgaaccaactgactcctgc

SEQ ID NO: 95436 - DNA, 261 bp, Oryza sativa
  Clone ID: PAT_MRT4530_93630C.1
atggttgaaacggaagaactcatcgagatatgtcgagatgaaggattgtggccggaaaaactcctcggcggtgaagaacagagcagcgcaggggcagcggtgctcggcttggtgcggcgagaggatggatggagaggtgtggagtcgatcgtgcacaaggtgttcgaccgacgggcaatgaagaagtggatgagctcgggcaccgtcatcgccatggatgagctcgatctttggatagggctagggcggcagaggctgtga

SEQ ID NO: 95437 - DNA, 251 bp, Oryza sativa
  Clone ID: PAT_MRT4530_93631C.1
tttttttttttttttttttttttttttttttttttttttttaaatggatccggaacgattcagatgcagatgaaacactggtgagatcccactcagattacacacaatacaaatacctccgacaaactggctcaaaaaccaccaaattggttcaaaaggaaaacgggtatttagggtatcttcccaccggagactggcataaaccctaaaccccagaacaaattgggatccactgggacccagatttattc

SEQ ID NO: 95438 - DNA, 356 bp, Oryza sativa
  Clone ID: PAT_MRT4530_93632C.1
acttgaaatgatatttctattaacgcggatgactaagtctatgaaatcgaagaggttccccgggtactccgggattgctgcgattattgtcaccaccttaatctctccctaattttagtatacaataaaaaacattggagcctcttatgactcagatcaagattgtagagcgtgatatgaattgaggatgagagctccttcaataactatgattgacggtggatgagcatgctagtgatcggaaatgccctgcctctgccatcaggagtaaatcaagagcgttcatgccgaaccctgagatcagacagcgatgatcacgattcggccggaacctggcttggcccaactggcaccaa

SEQ ID NO: 95439 - DNA, 2478 bp, Oryza sativa
  Clone ID: PAT_MRT4530_93633C.1
atggcttccctcccactccctgctcttcaccacgagcccctcctctcccgctcgcaccgccgccttcctccctcgccaccgccaccgccactcccctctcgcctcgccgcggcgcacccctcggccccctctccgtctccgcgcgacgatgagcgcctccgactccgagccgaggagctccggtcctacgccgcggcactccagggctgcgccgccagccgcgcgctccgccgcgggaaggccctccacgcgcgcctgctccggtccgggccgcgcccggacgcgttcctgcacgactcgctgctcaacatgtactgcaagtgcggccgcctcgcggacgcacgcagcgtgttcgacgggatgccgcaccgggacgtcgtcgcctggacggccatggtctccgctatcaccgcggcgggagatgccggtgctgccctccggctgttcgccgagatgagcgaggaaggggtcgtccccaacgggttcgcgctcgccgcggcgctgaaggcctgcacggtgggctcggacctggggtttacgcctcaggtgcacgctcaggcggtgaagctggaaggtttgcttgatccatacgtctcttcttccttggtcgaggcttacgtgagctgtggcgaggtggatgttgctgagagagccttgttggactcgccggtgagaagcgatgtgtcatggaatgctctgctcaatgagtatgctcgggatggtgactacgccaaggtcatgcttgtttttgataagctggtggaatctggtgatgagataagcaagtatactttacctactgttctcaagtgctgcatggagctcggtcttgcgaaatctggtcaggctgtgcatggtttggtgatcaagagagggctggaaacagatagagtgttgaacaattgccttattgagatgtattcaaagtgtctgtcggctgaagatgcctatgaggtctttgccaggatagatgaaccagatgtggtgcattgcagtttgatgatctcttgtttcgatcggcatgacatggctccagaagcattcgatattttcatgcagatgtcagacatgggagtcaaacctaatcaatatacatttgtcggcttagccatcgttgcatcaagaactggtgatgtgaacctatgtcgcagcattcatgcacacattgtgaagagtggattttctaggacaaaaggagtgtgtgatgccattgtaggtatgtatgtgaaaactggtgctgttcaagatgcgattctcgcctttgatcttatgcaggggcctgacatagcttcttggaacacacttctctctggattttatagtggaaacaactgcgagcatggtttgaggattttcaaggagttgatttgtgaaggtgttttagcaaataaatatacttatgtaggaattttgaggtgttgcactagcttgatggacttgaggtttggttgtcaagttcatgcatgtgttcttaaaagtgggtttcaaggagattatgatgtttcaaaaatgcttcttgacatgtatgtgcaagctgggtgctttacaaatgcacgcttggtatttgaccgactgaaagaaagagatgtgttctcatggacagttgttatgtcaacatatgctaaaactgatgaaggtgagaaggcaatagaatgcttccgctcaatgttgcgagaaaacaaaaggcctaatgatgccacattagctacctcgctaagtgtttgttctgatttggcgtgcttgggcagtggcctccagctgcattcatataccatcaaatcaggatggaacagttcagttgtttccagtgctttagttgacatgtatgtgaagtgcgggaacttagcagatgctgagatgctatttgacgagtcagacacacatgacttagttgaatggaatacaatcatctgtggttatgctcaacatggtcatgggtataaggcattggaagccttccaagagatgatagatgaggggaatgtacctgatgagataacatttgtgggtgtcctctcagcttgtagccatgcaggattacttgatgagggaaggaggtacttcaaattgctgagtagtgtgtatggaattactcctacactggaacactatgcttgcatggttgatattctggccaaggctggaaaactagctgaggctgaatctcttattaatgagatgccattgaccccagatgcatccttatggaagaccattcttggagcatgtaggatgcatggaaacattgagattgctgagcgagcagcagaaaaattgtttgagtcacaaccagatgatatatcttcttgcatattgttgtctaacatttatgcggatttaaaaaggtggaatgatgttgctaaacttaggagtatgctagtagatcgtggagtaaagaaggaaccagggtgcagctggattgaaatcaatgggaagttacatgttttcctgtcacaagatgggtgcgctaaatactaa

SEQ ID NO: 95440 - DNA, 1340 bp, Oryza sativa
  Clone ID: PAT_MRT4530_93634C.1
aaaggaaaggaaaacgacaggtcggataacatattctgaaaatccacatagtcaacttctaagaacaaaaaatgtacacagacagatggacttcgaagggatagactctacccaatatagattcctcgatgtcattctagatgatttctctcactatgtatggaccttcccacttcgttttaaatccgatacctttgccaccttatcacgcttttttgcctttgtgaagactcaatttgcagctagcatccggaacatccagtgtgaaaacggtcgtgagtttgacaactctaccgcccgcacctttttcctcaccaacggtgtctccttgcggatgtcgtgcccccacacctcccctcagaatggtaaggccgagcgcatgctacgttctctcaataacatagttcgctccctgctgtttcaagctagcctaccaccttctttttgggtcgaggccctccatactgccacacatctcattaatcgtcatcccaccaaaacccttcatcaccacaccccgttttttgccctctatggtgctcacccatcctacacacaccttcgagtctttggatgcaagtgttacccaaacttatctgccactaccccccataagcttgcccctcgctccatcatgtgtgtgtttttaggatatcccgagaatcacaaagggtaccggtgttttgatcctgtctccaatagggtctatatttcacatcatgtggtgtttgatgagcactcgtttccttttgctgagatgactaacagtgcagatgctcctaatttggactttcttgaggatttttcatctcctctgccagctcccatcggtcgacgcataggcagcagctccagccggccggctggaacaccccctgggccgcgtgcctccgtcggcacgccatccggctcggctaggcaggcgtccccggcctcttcaccagctcggcccacagaggctgggccttcctccgctggaccggatgaacatgccatggtcacgcgtggcaaatctggcatacgacgaccgatcgatcgcctcaacctccacgccgcacccttgtcgccggtgcctcgcacctatcgtgcggccttggcggacccccattggtgcactgctatggaagaggagtacaatgctcttctcgccaaccggatgtgggacttagttcctcgtccacccggcgtcaacgtcgtcaccggcaaatggatcttccgccacaagttccaggccgacgggtctctcgacaggtacaaggctcgctgggtcttgtgtgggttcactcagcgtcctggcattgactttgatgagacattcagtccggtcgtgaagccggcca

SEQ ID NO: 95441 - DNA, 1233 bp, Oryza sativa
  Clone ID: PAT_MRT4530_93635C.1
ttttggtaggcaccaagccatagtatattgcccgaaacctcaggttcgcccggagttccagacgaataccatagttccctgtcccaaacgaagtcctttggttcttctacctccggcggcgctgtgacggcggccggcgatggccgcgcacaccacgcccacctcgccgctgccgccacgaggcccgaggcccccagcacgtcgtcccccaacaaccgaggcacgaggtccgccgcctgcatcacccgcgacgacctcgctgaggccgcgcgcctcgtcgaccgctcacgtggggaggcacccgacgctgccgtgaagaccaacgccggcgaagtcccctcaccctccgcctcccgggctccctcgccgccgccgtccccgaccccgaccgcaagcgctcctcctccaaagccgacaactcctcccccctcgccgccgccgccgaagccgagaacgagacggccgccgacggcgaaggggaagccgtcgtcccgcccgccgccgtcatcccgcactctgctaccatcccgtactccgccgccatcgtcctctgcggcgcgctggccacggcgaggcgctggcctgcgccgccgcgctcgccgcagcgttcatcggctcccgctaggccagagcgtgggcgtccagcgtggccatcctctgcggtgcgctaaccacggcgaggcgctggccggcgctgccgcgctttccgcggcgttcattggctccggcgaggccggagcgtcggcgtccggcgtggccgtcctctgctgcgccctcaccgccgccgccgttgccgcggccctcctcgagcatcctcctaatccgacgccgccgccgccggccgcaggccgccgtcgcagcgccaccgcccagccgtctgctccctaacccgcgctctccttcgtcaagctgctgctcctcaccggctcctcgtcgcccgccgccgccgcgcgccgcggccgcgccctccccgcagctcgccgcgcttgccgcggtcaacgccggggagggcgccgccaccgcgttcgtcaccgacagcgccgaggacgccgacagcgccggccgctcgctccgcggcggctcggcggccgaggacaacctcgccgccgccaagggccgcctctggcacttccgcgtcgccggcggcggcccgccggacgcgttctgctcgaccggccccgcccagatcttgtaaggatggccggaccaataaccaatgctccccggagacat

SEQ ID NO: 95442 - DNA, 1095 bp, Oryza sativa
  Clone ID: PAT_MRT4530_93636C.1
gcacgtcgtcccccaacaaccgaggcacgaggtccgccgcctgcatcacccgcgacgacctcgctgaggccgcgcgcctcgtcgaccgctcacgtggggaggcacccgacgctgccgtgaagaccaacgccggcgaagtccgtgagtcgaagcaccaggcgcacacagccgctccagtcgtccgcggtgttggggcttgacttcgaggacaccgacctcaccctccggctcccgggctccctcgccgccgccgtccccgaccccgaccgcaagcgctccttctccaaagccgacaactcctcccccctcgccgccgccgccgaagccgagaacgagacggccgcgagttgggcgtctagggagatgaggagggagcgggagaagaagaagagggcagcgcccacctcgaacggcgcggcggtgtcacgcggggaggcacccgacgccgccgtcgccaccgccgtgaagaccaacgccggcgaagtccgtgagtcgaagcaccaggcgcacacagccgctccagtcgtccgcggtgttggggctcgacttcgaggacaccgccctcaccctccgcctcccgggctccctcgccgccgccgtccccgaccccgaccgcaagcgctcctcctccaaagccgacaccgccgacaactcctccccctcgtcgccgccgccgaagccgagaacgagacggccgcgagttgggcgtcgggcggagcccgggtcggcgccgccgccgtggtggtggtcgcagtactccatgacgcgggcgagggcggcgcccttgacgacttcggggaggttgacgacgacgtcgtcctcgccgccgccgccgctgccgcggccctcctcgagcatcctcctaatcgtgcccgatgccgcggtgatcaccttcgatgaggacggaacgggagcgggagaagaagaagagggcgacgccgccgccgccggccgcaggccgccgtcgcagcgccgccgcccagccgtctgctccctaccccgtcggcctggcctgagagagagagagagagagagcagagaggggaggaagggagagagaagaggggaaatagagatgatgtggacacctgacat

SEQ ID NO: 95443 - DNA, 342 bp, Oryza sativa
  unsure (1)..(342): unsure at all n locations
  Clone ID: PAT_MRT4530_93637C.1
cccacccccatccccacggagaatcgtcaccggcttcctcttgagcttcacttgacacgccacgagaccacgantagccnaagtggtcctttgctcataccataccacctccggtgaatgtaccaagttgtgtatatgctagcccaccaccnattgctcactccatacttgtaatcttactcttgttcttttcgattacctcttttttttcgattacctgaaagacaccgtgtacatacgtaatgtaacgttgtacagctattttgaccccggtagaaaggaatggggaagtaaataagatcacggaaacccccctttccctttttaaaaaaaaaaaaaaaa

SEQ ID NO: 95444 - DNA, 618 bp, Oryza sativa
  Clone ID: PAT_MRT4530_93638C.1
cggaattttcaccgggtacgactccactgcgtcacgcccactctctcctccctcccgtcccttcgcttctgctggctcctacccctccgccgacgccagagaggtgcaacagcttgtcgcgacccacatgacacgtgcctgcttgacccgattcacccatgcctacttcaaacgattgcaaggcaagattgacaaccggacgcggatcatgattgcctaccggggcaggatcaggctcaccaaccaggataacagcttggacgacacaccgacataccgatatgtctgagagatttacagactatgctatcacagctcatgttgtctatgctgccgttgcctacgttcttgagctggctggtgcctactcccatgagctgcctacctattgtgctgaagctgaccgcaccgactatgcttcaggcttactgcgctgtctcgcttctggctcggcaccagctctccctccgcggtgtggaccacaattgcgaggactacgatgatgcccctgctgatgactactatgctgtaccagctgtttagaggagggctctccgtgctacctcgactgttggcctcgtttttacagccactgaaaaccctgtgtttggtgccctc

SEQ ID NO: 95445 - DNA, 780 bp, Oryza sativa
  Clone ID: PAT_MRT4530_93639C.1
cacctcttcccgagcgcggcacgaggcccgtctcctcctcctctcaaagatcgcaagaagcaaacaagaacacaacaaatcgatcgatcagtcaacctcactcattctcatggcggcggagcagagacagcagcagcagatgatgcaggaggggttcgaggactacctgccggtgatggcggagaggctgggggaggaagggctgatgcaggagctcgcaagcgggttccgcctgctcatggacccggcctccgggctcatcaccttcgacagcctccgccgcaacgcgccgctgctcggcctcggcgggatgtccgacgacgacctccgggggatgctcgccgagggcgacttcgacggcgacggcgccctcagcgagatggagttctgcgtcctcatggtcaggctcagccccgacctcatggacgagcctcgccggtggctcgacgacgccgtcgcccaggcctcacagttcctctttcattagaaagttcgacatggataggattcttcttctttttttctttctttcttctttcttctcgttgttcatagcatcaggattcatcaagggcactgctcattggttcgcggattccaatcgcatttgtactctcatgtactacactctgcttgtttcttcgttccaagtggaaactggaatctgaattaattgatcagcaagcttcttcgtttcaaaaaaaaaaaaaaaaaaaaccaaacacaagtcctctagctctctctctcctgctgcccgggggatccactagtaaaaaaaaa

SEQ ID NO: 95446 - DNA, 426 bp, Oryza sativa
  unsure (1)..(426): unsure at all n locations
  Clone ID: PAT_MRT4530_9363C.1
tatctagaaattaaattaatcagcataaattatggaattaanctaaaaaaataataaaatctgctccggataaaaactgatacggatacctttcggatcggatagttcggatatggatagctatacaaatatggatattgtctcccagatacgaatactgatatgttattggggtttctgtcggatacggataataattcggatatccgaaaaaaatatttccgtattcgtgtccgatcatattcgattcttatttgcattcaagataatccgtatttgtttccgtattcaagctatccgtattcattttcgtatccgaatacacaactaccatgcttgtcaaatcggggccgagtaaccgcaacaagaaacatcaccttctctatgaagtatatgcttttaacccctctttccggtcttggttca

SEQ ID NO: 95447 - DNA, 2043 bp, Oryza sativa
  Clone ID: PAT_MRT4530_93640C.1
atggagccgcagctcgccgcactctgcaacccccgcctcctccactccccccatgccttcctccccaaggccacctccacctccacctccacctcctcgtcgtcgtcgtcggcggcggcggggggagaagccctcaagcctcgcccgcgtctcccgccaccgcagcagcagcagcccggcgtctcccaccaccaccacacgcggcgacggagggagctgggcgccgccgcgctcgcctccctctgcgcggggatcgaggcgctggccgccgaggggcggcacgacgaggcgcgcgacgcgttccgcggggcgcgcgcgggcgccccgttcacgccgctgccggcgtccacgtacgacgcgctggtggcctccgccgccgcgctgcgggagcccgggttcgccgcggcggtgctgtggcacgtcgagagctccgggttcgagcccggccagcgcgcgtggaaccgcgtgctccggatgcagctcgcgtgcgggatgctcgccgaggcgcggcaggtgttcgacggaatgcccgcgaggagcgaggccacctggggcaccatgatgggcgggctgatcgacgctgggcgcccgcgcggcgcgctcgcgctgttccgggagctgtgggaggaggtgggcggggatgctgcgccaagggtggtggtggtggccgtccgtgccgtgacggcattggggtcggcgcgtgccgggcagcagctgcactgttgcgttgccaagacagggatgtacgaggaccagtacctgtcgtgtgcgctcatcgacatgtataacaagtgcgggaagcttgatgaggcgaggcgggtgtttgacggggtgcctcagaagagtgtcgtagcgtggaactccatgctcgcgtcgtattcgcttcatggatgcagtgaggaggcattggatttgtatcacagcatgtgcgagggtggtgttgacatagaccagttcacgttctccacgatgctcagggttttttctaggctgggcttgctggagcatgcaaagcaagctcatgctggcctgattcagacagggttacctctggacattgtcgggaacacggcactggtggatctatattgcaaatggggtctgatggaagatgcaaggaatgtttttgagaggatgcctatcaggaatttgatctcttggaatgctctaatagcaggctacggctatcatggcatggggcaaaaggctattgagatgttcgaggagctaatagctgagggaattgctccaaaccatgttacatttctagctgtactaaatgcatgcagattttctggctttgttgaggaagggaagagaattttccagttgatgactcaaaatcaaagaacaaaaccacgggcgatgcattatgcttgtattatcgagctttttggtcaacaagggcgattagatgaagcctattcaatgataaggaaagcaccgttcatccctaccgcgaacatgtggggtgccttgctcactgcttccaggatccacaggaatttgcagcttgctagattatctgctgagcaactgttggcgatggaacctcagaaaataaataattatgttgagcttcttaacttgtatattaactctgggagacagactgaggtctcaaaggttgtcaatactttgaagaggaggggtttatgtatacatgctgcttgtagctggattactgttaggaaaaaagatcacaggtttttctttaaagatagtctccatccacaaagttctgaaatctataggaagttagattcattattgaaggagataaaacaacttggttatgttgctgaggagaatgaattgctccctgatattcttcctgatgaacaaaagacatcgaaagtttaccatagcgaaagacttgccgttgcttttggccttatcagcacatctttgtctactaccttgagggtcacccagtgccatcggttgtgccatgactgccacaagctgctcatttgcagaggttctgaaaccaattctggactggaaatagcatggtttaatgaggacaaagcagtctgttga

SEQ ID NO: 95448 - DNA, 243 bp, Oryza sativa
  Clone ID: PAT_MRT4530_93641C.1
agtggcggcaatgccacacaaaaccaacaacgtttcgacggccacttgaccgctagatatacgtttccgacgggtgttggacactttggcagactagacttcacgttcacggaccaaaactcccagacactcttcaccatgggcgctgcaaaacgacgtaccatggtttaaataccaccgacgacctattttttcctttaccctactccaatgaggcctactctcaagatgtaagtggtacgc

SEQ ID NO: 95449 - DNA, 540 bp, Oryza sativa
  Clone ID: PAT_MRT4530_93642C.1
aaggggaatggttaaaccccgggatcttttttttttcaaaaaaaaaaaaaacatggtttttaacaacccccccgggggtttggcaaaaaactaaacattaaaggggacccggtttggggggattataataaacaaggggggcccctgggggggctttaacaaccccggggaatcccccttttccccaagggggccaaaaggactattggccggaacccccttaaaccctacccaaatcccaaagatccaacaatagcgggaaaggctaagccaactagttcccgaaaagaacccctttgggcctcacagaaaacccatggggggaaaaacccttttcctaaatttgggaaaaaaaaccgttctaaaaaaaggctaaagaaaggccctgaaaacacggttccccctcgttttcagggcccaccaaggaaaggtccccctgggacgcccctgggaaaatcatggggacgtaaacgccttttttccgaaaaacatggaaggctttctaaaaaaaaaggacaatctgggaacattccctaaaag

SEQ ID NO: 95450 - DNA, 507 bp, Oryza sativa
  Clone ID: PAT_MRT4530_93643C.1
ctattgagtttcctaaaattaagtcatcgctggatcatcctttctccaatagatttccacgtgcttatactaccacctaagcgactgataataaaatatgttattctaatagtagttgatctcttcagtaatggcttagatcacgtctaccggtgcggatacatgccaccagaatacattgaaagacgccaaatcaccaagaagtttgatgtattcagtttaggtgttataatcatagatataattgctggaccttcgggctactctaaatgtgctgaaatgacttcccaacagtttattgaacttgtacaaggaaactggaagaaaagactgcatgcagcaacatcgaggtatgcatcgcaggaagcagatagcctacaagtgaagacatgccttgaaatagcattaagatgtattgataaagaccgagcaaaaagacctactataagcgatattgttgataaaatgaatgagatcgataccctaaaaatgtcacttctaagcaag

SEQ ID NO: 95451 - DNA, 504 bp, Oryza sativa
  Clone ID: PAT_MRT4530_93644C.1
tggaggagggcggtgggccggtgtcggcggcaggggcaaagcaagagtgcggttaggaggcggcgggcagtggaaagtttatttcttttcctacaaggactagtatctctccatgggtataaatatgtacacccggggtcattgtaatctatctccacgatcaatacaattcggcgcatcaccaccttttaactttttactttattttatcatctggcgggacttgacacctgacgcggggctgcatcacctttcgatctccggcgaaggggtaagtccaatgttccgctggctcaggcaactgacttgtctacgtcggcgtcgttcaaggctgcatcagtacatttgacctcttgtattgctctggtttggattgtatatttgcctgcttatttatcatatgtcttagttaatgtagccttagtatcctaatttagctctatgggttgtctctcgctttagggtttctgccggtatcggctaaattgttttactagatttcat

SEQ ID NO: 95452 - DNA, 3573 bp, Oryza sativa
  Clone ID: PAT_MRT4530_93645C.1
tattatatacgatcactatagggaccactttggtacaagaaagctgggtacgcgtaagctgggcccctcgagggatactctagagcggccgccgccgcatcttcgacggcctccccatcccagccgacaaatcctacctcaaggaagggctctcgcggattgacgaggggtgggcggcggcgcgcttcgactcgctgccgcacgtcgtgcacatcctcacctccaaggaccgcgagggcgagatccagttcctcaaggagcagagcgacctcatcgaggacgtcgtcgacgaggtcgtccacgcctaccaccatggcttcaacaaggccatccagaactactcccagatcctgcggctgttcagcgagtctgcggagagcatcaccgggctcaagggggagatggccgaggccaagaaactgcttgggaggaagaacaagcacctcgggcagttgtggtaccgctccctcacattgcgccatgtgctctcccttcttgatcaggtggaggatgttgccaaggttcctgctcgaattgaaaacttgatggcagagaagcagctctatgctgcagtgcagctgcatgtccagtcaatgctgatgctagagcgagaaggccttcaagcggtaggtgctcttcaagatgttcgctctgatctcgcaaagctgcgaggtgtactattttataaaattttggaagagctgcatagtcatctatacaacaatggagaatacagctcggtgactttaagcatggttgataatgaagaactaccaacatctacggctactggtcgattagtaaacagcatgcaacctctgtccaggagaactaggtcaattaaaggtgataatcactttggtgcgtcagcagatgggattcctaaaaccagttctgttggaggcagttcttcatttgatggcccagatgatgatagtagcatagacatgcatgaaagtgatggtgggcgtagtcggagggattccaaaagtatttctcgggaagtgccaattttcctttcgtgtgctacaccagatgagtttcttgaatcagtgacaaaggcagatgcttctctcagtgtgaaatacttgagaacattggtgcagtgcttatccatgcttggaaaggttgcggctgcaggagctgtgatatgccaaagagttcgccctacaatccatgatgttatcacctcaaagataagagcctactctgaagaaacttcaaagtccaatgtaaacaaagctgcaaatgaaaattctgatgtgtcacactcaaatggacgtgctgctcgttaccaactgctcaaacagaagacgaaaaatggtgcatcactaatggcaagtcaactagttgtcagtcccatctctccagctatggcacccactggagatgctcagtgtgcagctagtcaacttcttagtgcaatatttgaatgcctggtagacattcttgagaaccatattactgttggagagcttcttgaacagaaatcatcaactgaagttgataatgcaaacactcctcacatggcaaatggggatgcaagctggaatccagattctgaatcttcccaggctactggtggttttactgtcgcattctctttgtcagttgtgcagagtgaatgtcagcagcttctgtgtgaaattttgcgggcaactccagaggctgctactgctgatgcagctgttcagacagctaggcttgcaaataaggacccagtgaaggaaaagaggcaagatggatcagaaggcctttcttttgcttttcgcattacggatgcagcaatcactgcgccaaacgaaggtacacactttgcaggtcaaggatggcgaagaaactcaacagtaccacaagaaggctatggaacagcaagtgtcatacctgaccaagggattttccttgcagcatcagtttaccgtcctgtatttgagtttatgaataaaattggactgatgcttccgcagaaatattggcaacttgggaatgatgggctattggcttttgtgaacaacttcttgaaggagcacttcttgccagcaatatttgtagattaccgaaaatgtgttcaacaggctatatctagtccagccgcatttagaccgcgtgtccatgcaacctcagtgtatagtccattagtcgaaaatgggcgtcctgtactacaagggcttttggctgtcgatataatagccaaagaggtacttggatgggttcaattgatgccgaactatgccactgagcttgttgagtatgttcgcacatttttagaacgtacacatgaaagatgccgtgcatcctatatggaggctgtccttgaaaaacaaagttatattctcctctcaaggaatgatgttgaaagtttaatgcgcttggatccagcaaatctatctttacaaaattcttttggtcaacttgaccacagtattccagatgcagaagctgtagaagtagagattgaactaagtgatctcctattggatatgtgcccaataaaacaggaaaacttgatccatgatgaccagaaattgatactgttagcatctcttagtgattcattggaatatttagcggattcagttgaaaggcttggagagtcattcattaattcatctaccatgttggagaacaaaaatcacatccaccagggtcgccatactcgctcaactagtgcaattccgaaaagccttgcatcacttgctaatgagtatagaaggctagcaattgattgtgtcagagtcttgagattggaaatgcaattagaaactatatatcacatgcaggaaatgacgaaaagagaatatgtagaagatcaagatgctgaagatcctgatgacttcatcatctcactaacaactcagatcgcacgtagggatgaagaaatggctccttatattgcagaatctaaaaggaattatgtatttggtgggatttctagcgttgctgctaatgcatcgataaaggcactcgctcagatgaagtcgatcaatttgttaggggtccaacaaatatgcagaaattctatagcactagaacaggctctggcagccataccctcaattgacagtgaagccgtccaacagagaatagatcgtgttcggacattctacgaactcttgaatttgcctttcgagtctttgcttggatttattgcagaacatgaatatttattttctgcaaaagaatacttgagcgtgttaaaggtcaacgttcctggaagagagatgccaatggatgctgaacgacgcatctctcagattttgggccattaaaacgaattggaatatgaggatggtttctttagctatattctgttgctaacgtctccgcatttttctttatgtatcttttatggcggcagttattattatttttggctatttcccccctttgtttgaatgtatatcagaagtgtaggtggtggtatcttcttgcgtatgccttctcattgattgtaaattttcacaaaatttcctttttcttttggttcttgtaaatgtgtaatttatctggatgctttcgtaataaaatcgtcatactcctgtttttatttgttaaaaaaaaaaaaaaaaaaaa

SEQ ID NO: 95453 - DNA, 702 bp, Oryza sativa
  Clone ID: PAT_MRT4530_93646C.1
cagtccaccacagcgcgcggcgccatggacgactcgtcgttcggttccgagccgaccacgtcctcctcgggcggggaggcgccggcctccccgccgtccaccgcgtcgtcgtcctcagacggcgccggcggcaagaagaagcggccgcgcaaggacgggcaccacccgacgtaccgcggggtgcgcatgcggagctggggcaagtgggtgtcggagatcagggagccgcggaagaagtcgcgcatctggctgggcaccttcgccaccgccgagatggccgcgcgcgcgcacgacgttgccgcgctcgccatcaagggccgcgccgcgcacctcaacttcccggacctcgcccacgagctgccgcgcccggccaccgcggcgcccaaggacgtccaggccgcagccgcgctcgccgccgccgccgacttcccggcctcctccgccaatgcgggcgccagcaataaccccgacggatcggacgacgcgagcgccgggtccgcctcgccgcccccgccgccggacgccgctgacgacgcgctgttcgacctccccgacctcctcctcgacctcagatacggcccgcccagctcgggcctctcgtgcgcgtcgtcttgggaagacgaagtgggcttaatctccggcgccggtgccgccgccgccggcgtgttccgcctggaggagccacttctgtgggagtactaa

SEQ ID NO: 95454 - DNA, 374 bp, Oryza sativa
  Clone ID: PAT_MRT4530_93647C.1
agaaacaaactcaacgtttcttttaaataaatactaatttgtagatcgcttcaattttgatacttacattacatgccggatgaacactaattgctaggggtacaacagctgtaaaaattcatagacggttgtatgtctactcaatttgcaaggaacttgctcctggcaatgatttttagcacgctggctgctgctgctgctttggttgctcaccctggcaagcccaaactatgtccattaaaggctgctctcatgtattgggtcaagccctcacggtgtctaagagtgtcaccatttgacttacttagcttcacaagatgaaagtgtgaagtgaccacgaatatgtctgcattaacggccattacacctttact

SEQ ID NO: 95455 - DNA, 573 bp, Oryza sativa
  unsure (1)..(573): unsure at all n locations
  Clone ID: PAT_MRT4530_93648C.1
cacgtctcgcctccccatccgcgcacagaggcagagaatggcgggacccagtcgtcagtgggtgcgagctgcggcgcacgggagcctcgacgtgcgccgcgcggagggtgcggcggcggcgacgcgtggagggagtggcgacggcggcggcgactgcgcgcggagaaagcagcgggcgtcggcgccacgggagctccggcggcacgcgggaacctcgagatgcggcgcgcggtggtggtggcgcacggatgaagctgtggcgacggcgcgcgaagaaagctgtggcgccaacccagtcctccgccccaggcgcttctccttcctggtcctcagccgtgcagctccactcgtctcagcctactccgtgccatcatcttcgtcacgatgccaacaatagaccagctcatggagttgtgcacaaattatgctgttgcacatggatttgtgctttgggatgtctttgttagacatgaattnacttatgttctttatcttttgacaaatattggtcaaatttnncaaaaatatgacaaatctnggtcaaatctttcttgatannaataaaaanaanaa

SEQ ID NO: 95456 - DNA, 1221 bp, Oryza sativa
  Clone ID: PAT_MRT4530_93649C.1
atggctcttgttccgctcgtgacagtgctcctgttcgccggctcatgcctcggatcagcgccgccgacgacatcgccggcggcgtcggcggcgtccacggcgacacgtacggtagtagtcgacggcattacggccatctacaaacctcggcgactcgctgtcggacaccgcaacctcgccaggcaaggcgccaccggcgggctgctccggtacaccacgaggcttccctacggcgtcaccgtcggccgcgccaccggccggtgctccgacggctacctcatcatcgacttcctcgctagagatcttggcctccctctgctcaacccgtacctcgacgagggcgcggacttcgcccacggcgtcaacttcgccgtcgccggcgccaccgcgctcaacacgacggcgctcgccgccaggcggatcaccgtcccccacaccaacagccccctcgacctcagatggttcaaggaattcatgaactccacaactagttctcctcaagagatccgtgaaaagctgtcgaagtcactggttatgctgggagagatcggaggaaacgactacaactacgccttcctccagacctggccgatggacggtggatacagcctcggcaacgtcacacgcatgatcgaaagcgttgccacggccgtcgatcttgtaccggaagtcgtgcagtccatagccagcgcagccaaggaggtgctcgacatgggcgcgacgcgggtggtgatcccgggcaacctcccgctgggttgcgtgccgagctacatgagcgcggtgaacgcgacggaccgggcggcgtacgacgcccgcggatgcctcgtcgcgctcaacctcttcgcggcgctgcacaacgcgtggctgcgccgcgccgtcggggagctgcggcgcgcgtaccggggcgccgcggtggtcgcgtacgcggactactccgccgcgtacgccgcgacgctggacggggcagcggcgctcggcttcgacgagcggcgcgtgttcagggcgtgctgcggcaagggcggcgggggcgcgtacgggttcgacgtgcgcgcgatgtgcggcgcgccggggacggcggcgtgcgcggacccggggaggtacgtgagctgggacggcgtccacctgacgcagcgcgcgtacggcgtcatggccgagctgctgttccgccgtggcctcgtgcacccgcctccgataaatttcacgaacagcgcgcgcgcgtga

SEQ ID NO: 95457 - DNA, 1150 bp, Oryza sativa
  Clone ID: PAT_MRT4530_9364C.1
ccatctggtcctggccccttcaggtctccaattgaatctattgatgtctttatttcttcgacaataaactcagccattaagcattcattcatctcttctgttactttcttcttcactttgcttaagaggcgctgctcctccagtttctccagtttgtatttcagcaccccttctttcaccaccttctccttgcagatatttcccctgcggcacgcttccagttcctttttcagcttctttattctcttttccagatcacccaggacgtttgtactctagtttgacaaacctgaagctaccaccttcaccgcattcatcacatccttctgccaaagttgaggccatctcccaattctcgctcaccacttccctgcacttctcttcagccagccacgcagcttcaaacctgaagcttgatgatcccctctgcattacccccttccttcccccacatgtagtaatgatcactggccgatggtcagagtgcctcggatccccattgacaacccgaaagctcggaaacttcaccctccattcctgatttgccaccgcccggtccagatgctccctaatatagccctcttctgtgtggctattattccgccaggtaaacatgtctccctcaaaaccgatgtcaatgaggccacaatcaggtaaagtgtcccggaacttgtccatctgaggttggcacttcggcctacctccctgtttttctgcagctacgagtatctcattaaaatctcccgccatcagccatggctgagctggattcatcgccaagcttcgcaaagtgtcccatgtctgaatctaagatcactttgtgcctctccatacacgcaggactggatcgcaagtcccgcttccattgggttttgttcctcactattctttagctctccctccttccttcgctttccgaaacttcctcccctccctccatctatcttctctttcccgggatcaccgtccccgagcctgctggcaaaatcttacctctagtctcccatgtcattcttttgaaagttttctgtttgctacctcctggcccttttactcccgatggcacctctccctgagcagcccctccgtcgacgtgcatgggctgcatggcgttgttttccatgtatttcccctgggcgtccgctttttc

SEQ ID NO: 95458 - DNA, 370 bp, Oryza sativa
  unsure (1)..(370): unsure at all n locations
  Clone ID: PAT_MRT4530_93650C.1
agagaacggggtgctctgtgacactgatgtctacaatggtttgttgcttaggctgtgtgtggaagggcatgttggtgaggccttggcgttggctaagaaggttgctgagagggggattctcatagaggcttcttgtgctgatcgtttgatggatttgctaaagcaatatggtgatgaggagctagcaccaaaaatatcagaactgaggaggtgctctgaagtgctgtcacattaaccaatgtgtgatccgaaccctcctacaagtatcatgcttggttgatttcaaatcaaganaaattcttccgagctgcatgattacagcaangaaaaaggctttgaggggtttgttaccgttgnaatagattggtgg

SEQ ID NO: 95459 - DNA, 1248 bp, Oryza sativa
  Clone ID: PAT_MRT4530_93651C.1
atgaagcacaacaacctgctcgtccggagagcggcttccaccaccgggcttctcctcatcctcctcctccttgtcgccttcaccgtctgcaactactcctcgctgaagctgagcacacgccagtacatcgatggcacgtcggcgagatcgtcgtcgacccgtgcaagctacgccagcggcggcggaggaggcgcggcgtgcgacgtcgcgaggggggagtgggtgcccgacccggcggcgccgtactacaccaacgagacgtgcccgctgatcgacagccggcaggactgcatgaagtacggcaagcctgggctggagtccatcctccggtggcggtggcgtccccacggctgcgacctcccccgcttcgacgccgccgccttcctccgcctcgtgcgcggcaagtctatggccttcgtcggcgactccgtcgcgcgcaaccacatgcagtcgctcatgtgcctcctctccaaggtggagttcccgacggagatcgaggccaaggactgcatccactgcacgcgcaagtaccactaccgcgcgcacaacttcaccgtgtgcgtgttctgggcgccgttcctggtgcggtggaacctgacgcgcgccggcgcgctgcagttcatggacccgcacaacgtgttcctcgacgaggccgacccggagtggtcgcgcggcgtcgccggctacgactacgtcgtgctcaacggcgccaagtggttcacccgccccaccatcctctacgagggaggccgcctcgtcgggtgcaacaacgactgtcacggcggcgatcccaacgccaccgccgccacggcgccgccggagtacgcggtgcgcgcgtcgttccggaccgcgctccgcgcgctgcgcgagcaccccgtgttccgcggcacggtgatcgtccgcacggtggcgccgccgcactacgagaacggcaagtggtacgacggcgggaactgcctgaggacgcggcccatgcggagcgacgagacgggcctcccggagacggaggccgcgttccacgccgcgcaggtggaggagttccgcgccgcggcggcggcggcggcgggtgggaggttcttgctgatggacgtcagcgggatgatgcagatgcgcggcgacgggcaccctgggcagtacggccactggccgcacgagaaggtcggcttcggcatcgactgcgtccactggtgcttgcctggccccgtcgacgcctggaacgagctgctgctccacttgctccgtggttag

SEQ ID NO: 95460 - DNA, 205 bp, Oryza sativa
  Clone ID: PAT_MRT4530_93652C.1
cctgggttaattttgtctacgaatggacagtcgttgtcaagctcaatgtatggtgcatcaagttccttgaaaagaaaagcatgtgaatcaaatcatggagacggtggtttctgctcatgatgatattagagactgatgctgatcatgatgatgatattggagtactatgtgacgatcttgatgatatgaagtcatatcttgccat

SEQ ID NO: 95461 - DNA, 274 bp, Oryza sativa
  unsure (1)..(274): unsure at all n locations
  Clone ID: PAT_MRT4530_93653C.1
ccggccgggacctttctcaattcanacatttcgggggggctaggagtcgaatcctacaaaaatgaagatcattttcgtatttgctctccttgctattgttgcatgcaacgcttctgcacggtttgatgctcttagtcagagttatagacaatatcaactacaatcgcatctcctgctacagcatcaagggcggaggccatgcagtgagttcgtcaggcggcagcgtatcatagtggcagcccccttgtggcagccagctacgtccccacttggt

SEQ ID NO: 95462 - DNA, 641 bp, Oryza sativa
  Clone ID: PAT_MRT4530_93654C.1
gcacgaggagagatcgatcgatcacaagaacagtaataagctagctaccgcaccaacagttaataagacatggccggcgggaagaaggcggcggtggcggtgctgctcgtggtgatggtggttgtgtcgttgtcggcggtggcgccggcggccgccgcaggtgcgccgttcatggtgtgtggcgtggacgcggaccggatggcggcggattgcgggtcgtactgcagggccgggagcagggagcgggcgccgcggcgggagtgctgcgacgcggtgaggggcgccgacttcaagtgcctgtgcaagtaccgcgacgagctgcgggtcatgggcaacatcgacgccgcccgcgccatgcagatcccgtccaagtgccgcatcaagggcgcgcccaagtcgtgctagagatctagctagctagcttcagttacgagccaatagctagctagctaagctcccgacttaatttaattagttttcaaataatcaatgggccacgtaggatttgtactcaatatttgcttcttgggttatcacagtatttcatttggtattgtcaaactatatattccctccgtccctaaatatttaataccgttgacttttttaaacaaaaaaaaaaaaaaaaaaacagagcggcc

SEQ ID NO: 95463 - DNA, 327 bp, Oryza sativa
  Clone ID: PAT_MRT4530_93655C.1
ctaacttatctctctctctttttaacattcttctatcgtctcatttttcttactctcttctttctcttttaaaatatgcttatcatctttttatctccttatttacttttatacgttgttttattggaccccctgaagctgaggtggattgcatgcttgaattggcctccggccggcgatgtcaagatgaatcctgcccctgctccttagctgttgagtgtaccatcgaacgccattgcccacgtttcgttgtcgatctggctgtctgattggttatcacgcatggcccacccagatgcacactcggcgagtacttgggactcgacg

SEQ ID NO: 95464 - DNA, 1279 bp, Oryza sativa
  Clone ID: PAT_MRT4530_93656C.1
atgattatggaagacctgattgtttccctcgatccggaggtgaccaactttgtgttccaacaagaagaaaggcttttccagatgtggtatccggactcgttcatcaggatcattggcaccgacagtctgatcaggacacacgggttgttacacaggcatatcaagaacctggccctccggcttttcggccctgaaaatctcaggcgagaaattatccatgatgtgcagaaaacggtggaggctagcctttcctcatggcttaatcagccaagcatcgagctcaaggaggcagtctcaagcatgatattcaaggttacagcaaagaagttaatcagctatgattcctcgacctccgacggaaagatgtggaaacagtacgatgctttcactcagggactttttgcatttccattatgcattcctggcactgcattctacaaatgcatgcaggggcgaaagaatgtcatcaagatgctgaaagaaatactcgatgagaggaagaacacagaagagcaccatgaaagcgttgacttctttgatgtgatagaggaagttaaggccaagaatcctgatcaaatgaccgagaatgccgtgttggacttgctctttttgcttctatttgccagcttcgaaaccacatcatccggaataactgcaatgcttatatttttgacagataatcccgaagccttgcaagaactaatagaggagcataataacattcggaagagaaaggctgataagaactccgaaatcacgtgggaggaatacaagtctatgaaattcacatctcatgttatacatgaagctttaaggctggcaagcatcgctccagtgatgtttagagaagccatagaggatgttcatataaaaggttttgctatcccaaaaggatcaaaaattatgatttgtccttacactgttcacttaaaccctgtggtttataaggaccccaacacattcaatccttggagatggaagtggtgcctccaaggatttcatggcctttggaggggggctgcgcttgtgtgttggtgctcattttgccaagctgcagatggcggttttcctccactgcctagtcacaagtccagttggaaagcaatcaaaggaggaagaatggccctttctcctggactacgatttcctgaaggttttcatatccaacttttcccaaaagcctgaagtacttggtccatttacttcttgctcctacacaataaataatgttcataagcatctatgtttcagatgcaaattgctcaatgctttgatgtaa

SEQ ID NO: 95465 - DNA, 426 bp, Oryza sativa
  Clone ID: PAT_MRT4530_93657C.1
ctccaagcatggcagcctcctcgacccctccgtagcctcggtggcctccatgacccgtccagatcgaggcgccaccgaggagagtgtaaaggtcgtgccaccactcgttattgttgctctaaactacgggcaccggcgaggagaggggagaagggatttggcgccggcgaggagagtagagaagggagatccgcgagccccgggttggatttggccacgccactactctgcctggtgccgtcgctgcttgggtcatcgctccccgtcgcggcgcggtggactgaggagagcacaagcaacaagcaaggcaacaagcaaccaagaagtcacacatggagaaaatatgaggaaaagtcacaaaagcttgctgcaagcaaccaagaagtcacacccacgtggagaatatcaggtactaccgcacagtag

SEQ ID NO: 95466 - DNA, 243 bp, Oryza sativa
  Clone ID: PAT_MRT4530_93658C.1
atggacaatcaatcaactcccatcgagatcaatctatcaacacacagttctatccatcggcatccatctgtctctgcccagccatcttcaactcatatccatcgacaacacaccggccggcggcgaagcagtatcacgtacgccggtgtccctcgggaggggcagatcgccgagaggcggcatcagcgcacatcatcggcgtccggcgagctggtgtcagtccgatctactaccatagattga

SEQ ID NO: 95467 - DNA, 1944 bp, Oryza sativa
  Clone ID: PAT_MRT4530_93659C.1
atggccacaatcgggtggatccgtggttacaggacgtccttgttacttacgggaaaatgggataaacccgacccctttgatggaagaggtcttttatggcacttgaaaatgtaccaagaggacaaatattcttgtattgatcattcaacatcatatctgcacgtgcaatctgttagggatttccccattgaaaaactcaatgcagaggtggttctggtgcgacttgattccgaactgatctgtaatcctctaggatcatgtagtttgtcgctggaaaggactgtgtcaactatcaaatacttgcaaaaagctggagcaaaagtgcttctggtcaccagttggactcctgttcttcaatctgtttacccagtactcaagtcaactgaaacttttgctgactatatgtcatcgcttcttcaagtaaaagtggtcccagtaaatggtgtgcctggtttaacatcatttaagccagaagggtggatgcagaatgacattattttgtttgaaaatcttttgaacttcaaaggagaaaatgcaaactgcaatgatttttctcagaagctcgcttcaggtgctgcaatctttgtcaatgattctttctcactgtctcataagatgctagcatctactgttggcatcactcgcttctgccatgcatcccttgctggtttccattttgaggaggagcttatgcaattgagaaagatcacggacaccacaaggcgcccattcattgcaataattggaggcagtaacttcttgggaaaggcacctgctctgaatctgttagcctctctatgtgatggattattctttgttggcaaattgtcattgcaaataatgaatggctttggaataccagtgccctcttgttttgtagaaaagaattcaactaaggaagtgctacaacttatacaaacagctcataacaggaatattcctatttattatccaactgacacctggtgtttgaacaacaagaacaacaatcatgaaaagttggaaattctcgactctgctgaactattgcctggctggacaccagctgatatagggccatcaacattggagaaaatttcctcgttaatgccattatacaagaaggtcctatggattgggccaacatgttttgatttaacagaagagttttctggtggggcagcacagttgggcaggatactggacaaggcaagccatgatagctgcgatgttattttagtggggagtgcagcatgcaaggcagtaaaaggaatatcaggatcatcatcaaaatatacaacatttaaaaatgcatctgttgttttggaattcctgaaaggaaaaatattgcctggtgttgcagcattggataaaagttatccctatcagataccatggaatgctatcttttctgattcttcacaaccgttagtggttgatattggaagtggaaatggtttatttctttttcaaatggctagagactgggaaggctccaattttcttgggcttgagatgaataaaaagcttgttgtaaggtgccttcgggatgttgcttcagttgacaaaaggaatctatattttgtttcaacaaatgcaacatccacatttcgatcaattgtttcaagttaccctggacagttggctcttgtcactatacagtgcccaaatcctgatttcaacagagagcagaacaggtggagaatggtacgaagaatgcttgttgaagctattgctgatcttcttcagcccaatggaaaggtttatctgcagtctgacgtggagtccgtcctgctcagaatgaaagagcagttcatgacgcacggcaagggccagctggtggtggacgacgatggcggcggcgaccaccagatggacaacccgttcggcgctgcgtctgactgggagcgccatgtgctggctcgtggagctcccatgtacagaacgatgctacgcaaagtgtga

SEQ ID NO: 95468 - DNA, 3186 bp, Oryza sativa
  Clone ID: PAT_MRT4530_9365C.1
ttttttttttggtgtatagtaagttgataaattaaaatgcataatacattctttttcatatcctccacatgtacatttcctcttaaatacacacgcacttgtctaagtgtgcttcaatgccttgacgaggcaaaaaaaaatgtaccatacacaacgagttaacgtaactggtggtacctgaccgtaaaattcctcgcaaactaaacaaatatatactagcaaattaagtgtggagactcgatgtgatgatggcatatgatacgtgatcgatcatttgacgaagcccatgacgttgggcgtggcggtgttcttgagccacgtcaagccgtcgatgaagacgccggcggtgaactgcgtggcctcggcctggccgatgacgcggtatcccggccacgtcaccctcttgcttgtgccggcgcctggcccggtgttggcgtactcggcgtagtagagcgtcttgagccccacgtcgcccatccactccgaccacccctccggcttgatgaagtcgccgatgacgctctccatcaccaccgtcctcgcgtactccttccatggccggccgaggtagctggcgatctggaggcggacggggaagagcgcctgctccggcacgatgcggcaatcctggagcacgatgccggtgggcatgttggggtcggtgcgcccgtgcgccgtcaccatgttcgcctggttgtccatcggcttccgcaccgtcatgaggcagctctggaacaccgccgccgagttgccgaagatgtagtcgatggtccccgtcacctcgcagttccggaagaactgcctgttggcgtgcacgtacagcgtgtcctggtacccctcgaacttgcagttgaagaacaccgacatgtccccctgcacgtgcagcgccaccgcctggtgcccctccggccccgccgtgttcacgaaccccatcgacttgcacacgaatccattcccctccgccgagaaggtgcgggtggccatggtggcgacgccgtccttgttgctcttgttgccgaggacgcgcgtcttggtcgggccgtcgccgtacatgaagatgttgggcaacgagctggggatggtgacgtactcgttgtactcgccggccttcacgtagatgacgaagcgggtcggggagttcttgggcacggcgttgacggcctcggtgatcgtcttgaagtcgccgctcccgtccttggcgaccaccttgtcgggcttctgcgtgccggcctgcaggagacgccgctggtgggcggacacccacgacgggaactcgccgggcttgggctggttgtggcgctcgtgttcgatgtcttcgatcgtgccgacgacgtccgtggtgagcagccggtggtggggggtggccctgtactcatctccgagaattcgctccgggatggcgtcggagtgcaccgtgccgttctcgatcttgtcgagctggcccttcgccgccgtggttgcttcgttgagctccctgagcgtcgtggacaggagctgccgcttgccggcgagctcgtcggggagctccgccgcgaggaggtggcggttcatctcggcggacatgtcggcgatgctctggagctggatggacagaagcgcgcgcccgccgccctcgtgctcggtggcgtcggagccgtcttgtggcatgctcagcagccggcgcttgacggtgtcggccttgctcgtcatgttgtggatagcgttgaaaagcgtgcccagctgccgatgctcggcggcggcggcggcggcgggctccccggggacggcgtttttggagtcatcaacggccgcgggctccttggggtcgccgccgggcgtatcggagtcggaggtggagtccgtggaggagccagcgtcactggaagacacactcagctgccgatgctcgccgctgggctgttcggtgccggcctcgttcaaagacatactcagccgccgatgctcgccgccgtgcacctcggtgtcggcgtcgttcaaagacatgctcagctgccgatgctcgccgccgtgcacctcggtgtcggcgtcgttcaaagacatactcagccgccgatgctcgtcgccgtgcacctcggggtcggcgtcgttcaaagatatactcagccgccgatgctcgccgccttgcacctcggggtcggcgtcgtttaaagacatactcagacgccgatgctcgccgccttgctcctcggggtcggcgtcgttcaaagacatactcaaacgccgatgctcgccgccgtgcacctcgtggtcagcatcgtggaaagacatactcagccgccgatgatcgccgccgtgcaccccgtggtcggcgtcgtggaaagacatactcagcagccggcggccggggaggccactgtcgtcgctgtcgtctgtggcttcgctgagcgtgacgccaagaaggcggcggcctgcgtcgtgggacatctcggtgatcgcgtccagcgtctcggacaagagatggcggctgacgtctttcacatctgtgagctcctgtaccttgtcgtggacggcaagaagctcgcgcaagcttaccccctctgccgcctcactgccctgcaacccgagaagccggcggtgcgcgccggtggatccgttcgacttggcagccggcatgagttcgccgaggctggtgatgatggcgagcgcgttgctgctcagctcggtggagttctgcaggagcttgtccatggcctccttcagctccggcttgtcgaagccgtcggcgcaggtgtagatgtacgtcatgacgctggacagccaacaccggaggtcgttgacgtgcttcgtgacctcctcgggtttgaggctcgccatgcccctgagatcttcgatggcgtcgtcgaggagcttcttgcacatctcgatggcgctcttggtgatcttggcgtcgtcgtccttgccgacgtccatggagcggttgaacgcgctggtgacctcttcgagcgccacctgcagcgcggcgcggaggacgctctcggggtcgatggtgtcgttcacgacggggccgaggctctgctcgcacctgccagggtaccgcgtcacggagcacacggtggagagcctgacgttggcggtgagctcgccattgcgatccttcttggagctcgtgaccgcggcgatcgcgcagaccacggcgacgacgccgacggcggcgacgatgcttccgatggctgcgttgttgggcat

SEQ ID NO: 95469 - DNA, 1302 bp, Oryza sativa
  unsure (1)..(1302): unsure at all n locations
  Clone ID: PAT_MRT4530_93660C.1
cccaaaaaccccccaaaccccccaaaacacccccccccaaaaaccccccaanaaaaaacacaaacccaccacccnnnaacaaaaacccccccaaaaacccanaaaaaaaacccccccccaaaaaaaaaaccaaaaancaaaccccccccaaaaaacccccncnaaaaaccccacccccccaaaaacaaaaaccaaaaccccccccaccaaaaaaaaacaacccaaccaaaaaaacccaaaaccnaaacccaaaaacccnaacaccccccaaaacccaacccaaaaaacaaaaaagccaacaancaacccnncacannnnccaaaaaacccccccaaaacaacccccccccaaacaaaccaaaaannaaaacccccacaccccaaaaaaaaannccaaaaacaaannaaaccccccncncaaaaacccccaaaaaaaaccnnccacncacccccccnnnccncaaccccccnnncccccccccnnncccccccccccccacaacnnnccnngtccccncnnngnccncnnncantntccccctcctccactcccgcccccatggtcctaacgtcggcggccggccgtccctctcctcgtcgctcgccgcgcctgcctccgcctccaccgccgcacacaccaccaacagcaacacacctctcccccgccgccgcccctcctttcgtgctctcggtcccgtcctgaccttgggcagccgctcctccctaaacgctgactcctccccgtccaccatccttcctcgccagccggtgagtgcgcgccctccacttcctcccgccgacccttcgcttctttcctccttgttgaggtccaccaccagcgtcacgccctgcagcggtcgctccgccactgctgccaccgcccgccgcctgccgtcgctccgcctgtcaccccctttgcgtcgccgccgccgccgccctcctcccaacccgcgcggcgccgctcgctcgcgcagtccatcgagccgcaacaaaagcggaaataaatcccccacaaaccctacccttctctcccctccactcccccacctccgcgcctctctccgccgtgttcctcccgcccgccgccgccttcccgccggacctagctcctcccccgccgtcctcgacctcaccggaggtgagcccccctcccccccgggaacccccaccgttgcctccacccggacctgttcatcagcaaatgcacgcaccaccgcccagtggctggccgccggcgccgcgcattccggcttgccggcgaacaacgtcgtgcagcaggcttgtgggcggaggggcggacga

SEQ ID NO: 95470 - DNA, 2848 bp, Oryza sativa
  Clone ID: PAT_MRT4530_93661C.1
atgaatagagtattggggtacgttgaaacaggggtctacataattacaaagagagtaatcgaaacaggcgataccgacgagatcgtagtcaagggattcgacaagatctcccggcgagttggctccgtggactctggcttcgtaaactttggtgggtgtgttggcgatgagatgcgatgccctttgcctccccctaggggtcccttttatactgtggaataccttgacccccaagatagagagtatgccttattcgtaaccctgacacttccccttacccaccttacccacaatactattacccaccctacaatcccaattggcttccagctcctaaacaacatcaaccaccttggcctctttgtgatccatctattctacttgacagaggaccttttcaaggcaaagcatttggtgaaccatattgtcattgtgaacacacactccacctccaataggaaacatgtcgattttcctattttcgatggtgattatcctaaggcttcgattcgcaaagtagaaaaatacttctttctcacacaaactcttgaagatgagaaggtcttaatggcagaggcctacattacaggctaagctgaccaatggatatctagttacgatatcccaacagaacatttatcctggccggagttttgtaagatgtgccagaggtttggggccaagtccacaattgaaattactgatcaattcaggaatttgaagcaatatggctcagttgatgcttatatcgacaaatttagataagtaatggcattagtaaaaagaaacaggccaaatctcacagataattactttttggaattacttttttggattatattaagagaccactcaaatctctgaatattcactccttggtggaagcttatgaacatgcttggaattatgatggagctaccaaccctaacaaacctcaaccatcctcccatactaccttgaaagagtttcaaacctcaaaccaaaccccaaatagccaatgatgctccacctcatgacgagaaaacacatgttgtctatacaagtaaatggggagggaagtgttttaaatgtcaggaaccttaggtccatggtcatggttgagtttgcaaggcaactaagatgatatatcttgtgacaatggaagatgacatttaggcgttgaagagatacaagagcctccttttaccacacctcctggcagtcctcaagccacttatggtaatacatctgcctaggaattaactctgcatgatttggctgggaataattctgctgctaccactttcacattacacttgtatttggacaaggtgcttgctacagcacttgtagatagtggcagttctaccacattcatttcaccaaaattagtttctggagctaatatccctatcctcagccactcccccctctcagtaaaggttgctaatggtgacacattgcagaccagtgccatctgccacaatatctcttataccatccaaaatgagcaatttgtctcttccttcaggtttttggatatgaaaggttatgatatcattctgggtagtgattggattttggcccatagtcctctcactgttgatctcaaagcaagagagttgacagtgttcactcctttagggaaagcaatcacattctcaaatgtcacaattccccctgccaattttgttatctctgctcatgaaatggacaagcttctagtgcatgacagtattggtgcacttctatattgcaagaccttgcagagtactgtgtagccttgggctcatacacctttagaactccttgcagttctccaagactttcttgatgtatttgaggaagctaacaagttacccccacacagggagtgtgatcataccattcccttgctgccactaactaaaccaatttcagccagaccttattgacttcttcaccacaaaaaaatgcattggaagatttggttcagcaactcttggatgcccagactattcaaccaagcatgagtaattattcttctcctgcaattcttgtcaagtaaaaagatggaacgtggtgtttgtgcattgattatcgtcaattgaatgcagtcacaattaagaacaagtaccctattgcaataattgaggatttgctggatgaattgcaaggagcttgttacttctctaaaattgaccttcggtctggctaccatcaaatccgaatgaatcctgcaggcattcataagacagcttttagcactcacattggccattttgagtacttggtgatgccatttggactcacaaatgctccaaccacatttcaagctttgatgaacaaaattttggctccacatctcagaaaattcgtcttagtctttttttatgacattctaatttatagtaagaccttatctgaatatttacatcatgtgagacaagttcttcatattctcagaactcataatctctcagctaaaccaagcaagtgtgtatttggtcaccaacaagtggagtacttaggctacatcattacttctcagggggttgctactgatactgccaagataaaagttgttcaggattggccagttcctgctaatgtcacactgctcaaaggatttttaggtcttgcggactactacaggatcagatttattaagaattttggagttatttgccgcccactctttgatgctcttaagaagaacaatttaattggggttcataacagcaggctgcctttgagcaaatcaaacttcaattggcccaatccccagtcttggccatgtctgatttctcacaaccttttgtattggaggctgatgctagtggatttgtaattgcagcagtgttaatgcaaaatggtcggcccttagcat

SEQ ID NO: 95471 - DNA, 1097 bp, Oryza sativa
  Clone ID: PAT_MRT4530_93662C.1
cccacgcgtccgcttgttttagttttgttgttaagaataacactgttctcggcttccatgaacagtatgcgaagaaagaacttttatctcttgagaagaacaaaaaccttcagatgaggagtccaaacagggcacaaccgcacattcatacaaaccgtatgtgagtatatggacaactctatttgatctgcatggtaaggtgttctttttttcaaagcattcagtacaatgatgactgttgctgcaaagtaggcctattggtagtctagaattttcaatcctgtttccaacaacagtacacagggagatattgaaaggaacaacctgaacctattgttctatccctttgtatataagcttattctgtctccaaaacataacttgccttctgaataatgtttattgaaatatatctctattggaggtacaattcagacactgatttatattattgttcttttcaagaagtatttatattattgtaagttgtggttgttgttaaatctcatgatttcatattgtttacgttgtcatggagcacttttgtgttcaggtgaatatagcagattaaggcgtgaggacagtaactggaataggacttcaattgttcacagaaatgcctgcaagcagcacgcccttttcctcgggtgtatctgacgcagcttctgttgctctcatcgaagacgactaggcaaactgcagcctcccagatgaagcaattcctgtgcccagtgcggcaatggcctcaaggtcgccgtcgatgtgaggcgccaccagcttggagagcctgcagaagagagtccatggtggagatgtgacacattccgaggcagcatcagccttgtcaatgcctgaagctactgctctggaaccagctttgtagtgctgccaatatatggcttactaaggtttttggtaatggtctaatggagtttgtggcatcaggatgcatagtttaccttcagttctgtcatgcccttttttgtattatctaatcactaatatgacatggcactaataatcaacaagttatatacaggaggcgcgccattggcgcgccccatcatctagtttgatgagaagatggagacaaggag

SEQ ID NO: 95472 - DNA, 628 bp, Oryza sativa
  Clone ID: PAT_MRT4530_93663C.1
aatccctctcctcccgtcccgccgccgccgccgtcgtcgtcatataatggatggatggatcggctgatcgatcagctgggttgggcgtacgtctgcgcactgctcctcccagttcaagtacagatgatcgatctcattcttctctgctctgcatgtatgatggtagaatcctgagcaagatgctcgcggaagttggcgattcccaaacagctttgcctcttgctgcttctttttcgtcgtccaaagcatcgttggtagcatctgtactgatgaagaagatgctcgccctcgtcatcgttgacggggaaaagcttcgatcctgtcgttgtcgttgttggacgccgttgttcatgtgtttcggcccacattagtactcataagatttggggcaaaagtatttactaatattcatgcattttcgtgccaaggtaagtatttatgaaatttaggaccgaaagctaatattccttcattccttttttatccaaggataatactcatgcaatgttaagcctaaggacaatactcatgtgctttggggcaaaggctaaaattcattcaattttggtcagaagttagtactcctgaaatcttgaatcaaaatctaatattcaaaaaaaaaaaaaaa

SEQ ID NO: 95473 - DNA, 122 bp, Oryza sativa
  Clone ID: PAT_MRT4530_93664C.1
ggacacaaaaaagggggggtttatgactcacccaccgcctgtccagggataccaatgaattatatgtataacaaataacgggcccagaggaccccaacctgttttataaccgcaaaacttta

SEQ ID NO: 95474 - DNA, 707 bp, Oryza sativa
  Clone ID: PAT_MRT4530_93665C.1
aggaaaagaggtttattgcgtcagcggctaggatttccggtggaccgggcgcacggcggttcacgggaacggacggccgagattgatccatccaaaacggacggccgagatccatcggtccacgaccgggccacgggagacggcgacgatgacgtcagcggtgacgtcatctccggcgacggctcgggcggcgcaagctcgtcggcgaacgacggcgcgacgacgagaacggagggcaccaggacgtagagcgcgacgcggcgaactcaccggtgaccaaagaaatggcggatgatcaacggacggcgacggcgacgaggaagaagcggcggcgctcttcggcttgacgacggcgacggtgctccggcggtctacagcgacggcgaaggggcggacgaggacggtggcgacttggcgaccacaatggcgaccttcccgagcgacgacgatgactggagcgacgggggcacacggctgaagcggcggcgacgacggcggcgcgaggtcacacgacgctagggcgctaccgacggcgagagacgaaggcaaggggggcgacgggtagcggcgggcttggggatccttttaaaggggcaaggaggcggcggcgaaggcccacggcgaccggcgacgcgaaggaaacttcgggtttgggagagagagaggaatccgattcgatctcgaatccatcgatttccaaaccgaaa

SEQ ID NO: 95475 - DNA, 1055 bp, Oryza sativa
  Clone ID: PAT_MRT4530_93666C.1
aatggagcccgcatttcccaacggaggtgcggctgctccaccaccgcccatggcggcggagcagctgccgccggcggcggcggtggtccgggagcaggaccgcctgatgccgatcgcgaacgtgatccgcatcatgcggcgcgtgctcccgccgcacgccaagatctccgacgacgccaaggaggtgatccaggagtgcgtgtcggagttcatcagcttcgtcaccggcgaggccaacgaccggtgccaccgcgagcaccgcaagacggtcaccgccgaggacctcgtctgggccatggaccgcctcggcttcgacgactacgtcccgccgctcaccgcctacctccgccgcatgcgcgagtacgagggcggcggatcaggtggtggtggtggtggtggccgtggcgccgccgccgcccccgccgtcgtgccgccgccgccgccgccgcctcccgaggacgcgttccgctacgtgcaggtccatcatcccgtgtacgcggcgccaggtgagccggtgcaggggtacggttaccccgtggccatgtcgtctgctctgccggcgccgcacgtgcacgtcggcgtccgcggcggcgggcagcacgaggtgttcggtggcgggccggcgcccctggctgtctactacggaggagcgccgtacggcgaggccagcagccgcggcggctgctctgccgccgacgaggggagctcgtcgtcgagcgcctcgccggcgccggtcggccccaactatgagtaaaaacaaaagaagaagaaaatcaaactcttccccggctgacaggtgatcgagctcgtcgtctacaaattatcaatcgtctgtcgatcgattagcatgtaatctaataaaaaaacttaagctagcttaagacttaattagacatgttctgttcatctttccgccaccgtttcatcgaaagagattaagaatgtggtagtagctagaaatcatttcgagctcgaattacttaatcgtgttgattaattgcaatgatgaactaacaagaggaaatgatgtagtagtattaaaaaaaaaaaaaaaa

SEQ ID NO: 95476 - DNA, 954 bp, Oryza sativa
  Clone ID: PAT_MRT4530_93667C.1
atggggcaggggatccaggtgacggtgcttctagcccttcaaacggatgagaagcccaaggaaccaaagattccaattcctccgcatgtcatcgagcatttcatcaaggagttgtaccttgaacaaaaagcgtccaaggaagctgatttctgcaaatcagctggtttgaaaagcctggacaatctagatgaacttcaagaggccccaattgtaatgcggttccaacttgaggccacctacctctgcggattctacgtcatgcggtacatgctatattttgtagaggatggatacaatcaccgcaatgctgagaaattgggtctcgatacaagtgaaattctaccacacgtcttcaaaactctcactgacgagttttgcgggttcattcgtcattatgtcatagacccaactggcgaatacaacatcaacaaggatccccaagcccgccgctacccgtcgccccccttgccttcgtctctcgccgtcggtagcgccctagcgtcgtgtgacctcgcgccgccgtcgtcgccgccgcttcagccgtgtgcccccgtcgctccagtcatcgtcgtcgctcgggaaggtcgccattgtggtcgccaagtcgccaccgtcctcgtccgccccttcgccgtcgctgtagaccgccggagcaccgtcgccgtcgtcaagccgaagagcgccgccgcttcttcctcgtcgccgtcgccgtccgttgatcatccgccatttctttggtcaccggtgagttcgccgcgtcgcgctctacgtcctggtgccctccgttctcgtcgtcgcgccgtcgttcgccgacgagcttgcgccgcccgagccgtcgccggagatgacgtcaccgctgacgtcatcgtcgccgtctcccgtggcccggtcgtggaccgatggatctcggccgtccgttttggatggatcaatctcggccgtccgttcccgtga

SEQ ID NO: 95477 - DNA, 1042 bp, Oryza sativa
  Clone ID: PAT_MRT4530_93668C.1
tcatcgagccggcgccgcgtgtggtccgggaagaactgaactacctggcgtcggctttccggctgggatctgtcgaggtcgtcgaggaagaggaacgagcccacggcacagggacgcctgctggtcgccgcggcgaagtcccgccgggtgttcccgcctgttggctcgtttgcgcggcgccgcgttgaagcgatctgttgatctcgcgcggtggatcaccgaggccgccttccctctcatcgcgacgacgatgggaggggaccgagggaagaagccggtggataccccggcggacatgcttctttccagccgcaaaaggtggctcggggacggaggttcggatcgcgctcacggcggctgcctgttttacgaaactactccttcgtccttcacgcatgggtcttcttcctcttcccccaatcgcccgctgcacgataggatggaggtggatacaaaggaatcagagataccaagacagaggacagaaaatgaccgaaagattagtgcccggatcaaaagaagtcatcaagctcgcaggaggcaacggtacgaggaccaggaagaccgcgtccacgggaacgttcatttcgcctccatatgccctccaccggtgtcttggctggaattgaagcacaatatggaggttaagctagacttaaatcttgatgacatagagaaatctattgtcattccaagatgccaagagatggacacctctggtaacccagacaaggtggacaaatacctcgtcgccgccaagaaccttacacgaatactgaacttggagcaccctgtcctaaccgaaactggacatctccgtgaccgtgcaagatcactccacggcaccaccatctcttccattatcacggagttttgctacctcaaagtctggaggatgacattgcaagcatcatcactgagggcggatatcagcaactcctccgaggagctttcgatcgacactactccgaacttgcaagtagcacaaccgggatattgggttgacactagtgcagagaaggctatcattgatggttcataa

SEQ ID NO: 95478 - DNA, 251 bp, Oryza sativa
  Clone ID: PAT_MRT4530_93669C.1
tttagatctcctactcctcctcctcctcgccgccggcgatggccaacgaccctctcgacccgtcgtcggagccgcagtctcatacactgccggcggtagcagtcgcgaccccgttccccgacccctcagccggtccttctccgccaccgtcgcgaggcctttgagcacggcactcttccccatccccaagctcattttccccgagggcacgcttgcgcacactcttgctcaggtcaaaggacaagctcgcc

SEQ ID NO: 95479 - DNA, 260 bp, Oryza sativa
  Clone ID: PAT_MRT4530_9366C.1
gggaatgtgatgatgatgatgatgatgattacaccaaacaatttggcaccccaactgaaaaggaaaccaccatgcccagattccttattctaaattgaccacccaacttttgtatatcattggccctagctggccttttggccaccaccaaaccccttcgaaaacctcgcgccatctcaacctcaggggggccagaatgcacgggactgaacccaccaagaagagtgcttgagaacccacccaacccgggtggagacgcc

SEQ ID NO: 95480 - DNA, 197 bp, Oryza sativa
  Clone ID: PAT_MRT4530_93670C.1
tcggcatgcgtgccgccactccttgggtactttgaacatattttggactatcatacgctgacagcgctggtgtatattacatgagggcgggccccgcctttcgttgtccacaacaatggagcgacagagttcaacggcgagcttcgctaccgacggattgtttttataacacatcaatattccggcgtaaagaatgc

SEQ ID NO: 95481 - DNA, 549 bp, Oryza sativa
  Clone ID: PAT_MRT4530_93671C.1
tggatccccttgttctcctgacaccatcaatttcgaacggtcctagccgctgatctagaaggaatttcggggcccatgagtacttgttggaaagcttatggagtctactttcagatggttgtggtcccacatcaaaattcctatcgagctaccgggaatcttcaaaacaagccacggattagccttctcggcgaggtcatccgcgtttcgacacgggtgataaccaaaggagacatggtgctgcaattgcggggctcaagagcgtgcgcattcaagaagccagatctatttgtgtcgcgactccgcccaaatcgttgtttatcagaacctttcggaaggtcgggaaccctagtgcacatcattccgaccattccaaccatcacaaccatcattgggaggctatataaacccctcgccttctcacttcactcacagacctcaagcaatagctctctcatttctctcaagtttagtttagtagtatctagctggtggaatagaaatagtgttgaaatcaggtgtccggaagccttcggaagagttcgggta

SEQ ID NO: 95482 - DNA, 412 bp, Oryza sativa
  Clone ID: PAT_MRT4530_93672C.1
acacacaaagggggtggttttttatttttccccccacaaaattaacaacaggggtgggggacatttacaaaacattatacagatcattagttaattaacagggaaattaaaggagggccccaatccagagacaaggatgcatgcagttttttatccagccaaaggggtttcctacttaaagaaaccctgggccattttgaacagcccaccgggggggccgccgttgccggggtttttctccccggcgccctttttttccataagggactgggcccccttaatgacgttggggagaccgaacccttccgaagacgagggggggttgccttccttcttttaaggcggggcaggctccttggggggctcccccgccgctggttttggcgctggggcgtttccggctgccgggggg

SEQ ID NO: 95483 - DNA, 318 bp, Oryza sativa
  unsure (1)..(318): unsure at all n locations
  Clone ID: PAT_MRT4530_93673C.1
atgtcgccaaggtgctcgacgaattgccccaacgccggggaaggcgcgcncgncggtgcggtgncccgctcctcggtgttcgggctggagataatgagcaggcggtcccacgccgccgcgaggggcggcagcgtgaagatcctgagggagctcatcgagcgccgctccgacgtgtcggagtatctcgacttccgtggatccaccgtgctgcatgctgctgcagggagagggcagctagagaaggggcggagcctccaagctgcaggtgctgctcgcgtggatccgccgtcgacggggtaccgcattcctcaagtctan

SEQ ID NO: 95484 - DNA, 391 bp, Oryza sativa
  Clone ID: PAT_MRT4530_93674C.1
acgctcatggagtgaatccttgagtgatttgttggatagtatgagtgacaagagcaatctaatggacgatcatatggaagatgattgataatatggcccatgtactgattcatgtacagattcatagagagcatttgcgtacacaacatcatccagcacagcatcgctctgcgggtggcactccggcatgccagcgccggtagaacctccacggaagctttacctgtaagattctatgttggacactatgtgcagaggcgtgtgcacagatatgagtcctgaatgaagactgacaggagcaacgacgggtggaaactgacctagtaccagtgtaactatctgtatgatctgccgtatcatggatacaaccatggattcgacgacgctatag

SEQ ID NO: 95485 - DNA, 240 bp, Oryza sativa
  Clone ID: PAT_MRT4530_93675C.1
tttaatattgatcgagaggattctcgatttgagctatgccatggctgaggaagggtcctgcacacaacaagacgtgagatccaccgtctgcctgcctgcaggaccttctcgcactggaccaccggcagcctcgcctcatgtaatcggaaattgacaggcagtgggcaaccattccccagggtgacatgaaggaatctgtacccaagaagctgccatttgtgcactagggagctgatgaga

SEQ ID NO: 95486 - DNA, 463 bp, Oryza sativa
  Clone ID: PAT_MRT4530_93676C.1
atatggaacccataatcattcattattctgtccatagatttagttcgtttttcttatgaacttatactgaattaattggtaggggtgaaagacacggtgataatccaggaggtcgccggcgagagatcggaagaggcggaggaggcggcggagcgtgtcgcggcagattccggcgacgaggctgcacctgccagtcgccgacgaggacaacgccgtgaagaccacggccgccgtggaagaaaccactgctcgtcccgaccagccatgtacccatcacacacctgcacgcagtcaaattattgcagaattccaaattccgttgaaatttaattttctcaagagaaaaaatcgtgtttcttcttcttttacagtggaggagaagaatcagcagcagcttccggtgaagctgcaggacgccggcgagccaactcgcacgccggagcaaacggtgacgtcacgtacg

SEQ ID NO: 95487 - DNA, 222 bp, Oryza sativa
  Clone ID: PAT_MRT4530_93677C.1
atgtaccgcataatttacaaaggaaaaaaggcagcggcggcggcgccgtccacggcgggacgtggagcaaggcgacggcgcgacgtggagcaaggcagcagcggccacctccttccccaccgtcgcggcagcgcggagctcggacacgccggcactacggcggccgccccttccccgcgcgccgccgtccatcatagttgccgccccgccgtcgacgcgtag

SEQ ID NO: 95488 - DNA, 483 bp, Oryza sativa
  Clone ID: PAT_MRT4530_93678C.1
atggggctcaaaacgaccgtcaaagtgcgcacgggggccaaggcctcgcccgcgagcacctcctcctcgtgctctagcagctacaaaaccatgacctccaccattaggcgggccatggagctcagaattagcaacatcatccgccgaatgtgcatccacaatttcatccctgggatcaacaaacggtggctgaaccactccacttccggcagccggaagtcgtgcattcaacaaacgttccatcccttgaagaagattattccctatttgctgcacctcagcctggactccggggacgagaggaagcgggagagggggcgcggaggtggtagcgctctggttaagggtcaaagtggagatggcggtggtggcggcggcggcgggagaggcctgtggatggaggggcgaaggaagaggagagcacgagctcccgaacgccgccacctcttctcatcatcgtcggcggcggcggcggcttggtag

SEQ ID NO: 95489 - DNA, 1247 bp, Oryza sativa
  Clone ID: PAT_MRT4530_93679C.1
atggagtcgcttgcgtcgcaagcgaagccggcggccgtgctctggctcgccggcttcctccaggccgcgcgcctccaccgcgtcgtctccttctgcgccagctcgaggcctctgtcggccaggatcgcgcagtgcttcctgctcaacgggttcatctcctggggaggtattatggttttatccactttacatcttcaggttcgtgttgagtacactttgtattacaatttttggttcagaagttacccattttcaatttgtgggatgttctggtattatgagctcaaacataaaatatttcaatgtaattactctctttatgctttcatttctctaaatcttaagtataatgacattgctaagcatgctttggatgttgtgaaaagaaagagcctagatgcaactaaagcattggatgctcacaccatatctgaatcaacagagaaacctgaagggtttgatgaggttgcaattggtattggagaacaggtctattcaattcttcttttaactattttctttattgaggtttcagtaattggttacataccttactttgggaagcctatgaatttcctgctattatctttgatgtatgcctactactgcttcgagtacaagtggaacttctttgcagtgagcctgaatgagcggcttgatttctttgagtcaaattgggccttttttgctggattcggtagtccatgtgtacttccaattttcttcttctctcctcttacaagttatggtgtaatggcaatactttatccactgtttgtattgactgctgcaggtacccaagcagaaaaagtaattgatcaactgaaaccttcgcatggagggaaactgcagagaatacctgttttcttcatagctaagcgactaacgactcaagtgctgcaattgtttccagaggtacacaaagaacaatgaaaggatccacataaccatagcaaaggaaacaaacgctgtgctgggctttatcacagtgctgctgttgaagttacacccgaagggtgtataaccagaactgtaaaactgtaaatattccgccattgcgattgtatatatggggataaagggaattaaaaaaaaaactatacttgtgcaatgatgtcattcatatttgtgtacataagtacataacaacagcaacatctctttgttctacgaaatgttatagccagcagaaaggttaatgccaaaaaaaaaaaaaacttagtccaaccaaactagaggatcctagc

SEQ ID NO: 95490 - DNA, 768 bp, Oryza sativa
  Clone ID: PAT_MRT4530_9367C.1
atgcggcgcaagtatgctcggtcggcggtgggaggccagtgcatcgtgaggacgtgtgctggtggctggcatggagcgcgcgacaagggtgatcatgtggcggcatgcggaggctggccggtgcagcggtatccatatgtcgacatagatttagacgatggtggagcaatgggtttcgacgatgaggttagcgaaaggaggttgagaggtagcggctgtagcggcctcggcggtgacattagcagcaggaggcagcgcagtgtagcggggtggggccaacctatcgggttcgccccccacctccagccgccggaggcggcctccctcctcaaccgccgccccgcccttctcgctcgccccacgcacgtccccacctcctccgccttccctgcgcacccccgcacccccacgaccctctctccaactagctatttccggaagtttggcgatctctccgacttctttcttgatgagtgtagctttctaggaggaagatctggagtagtaccggagctgtcgggcgtaaggcccttcatagtgcgtatatatggcgttcggtctcgatgtgccagctcggagattcccctccacgtgagtgttggtcgtgaccctgtgaagttcgtggagccaattttgggcactcattcttctgataaattgagattgcgcgacatgggggagaacggcgcagacgcgttgtggaggtcgtggcctcgccggttcacggctccacgtgggggttcacctccccatcccctgggccagtga

SEQ ID NO: 95491 - DNA, 1127 bp, Oryza sativa
  unsure (1)..(1127): unsure at all n locations
  Clone ID: PAT_MRT4530_93680C.1
cggcacgagggggcaaccgcaccaccccctcccctctcctctcttctctccttcgcttcgccaccgcgttcgccatggccttcgtctccgccttcgtctccgccgccgccgccgccaccaccgccgccgccttcctccccggcgtctcgtccgcgtcccgcgcaggaacacccttgctctcgctgcaacggcagccgctcgcgggttccctgcgcgcggcggcgcaggggtcgagcgcctcttcggggcaggtggtgatggagagcaaggtcaaggcgaagaagaagaaggggtccggcgccgggaacctccccggagccatcgacgcggagatcagggaggcgcaggactacctcgccatcgacgagcaggaacctgttccggaaaacttcccttttgaaatccttgacgaagaagggatgagtgtggttattctgaaaagggactacaaagatgagaagattgaggtcattgtcagcatgccaaatttagaagggggccctgagtttgacgacgaagaagccgagggtgagggcaagaatgctagcaaggatgatgaagatgaagaggaagacgagagcgctggagatagcagcgtgtctctaaaggtgacagtctccaagggctctgggcccaaacttgagttcacctgcacagcctttcgtgaggagatcaccatcgacgacatgttaatagtggagaatgcagccacagaaggagatgagaaattcccttacgagggccctgaattcaccgagctaccggtgaatgtgcagaagggcctattcaagtacctggagcaaagagggatcactctgccgaccaccaactacatgcacgattacatggtgaccaagcaaaccaaggagtacgtcgggtggatgaccaagctgaaggacttcgtccggcaatgagaaattgccgagcaatttggcaggatttttggtagcttagccttttagcatacctgcatatgtaacaaggattactagaattatgcgaagcagtgcaacaaccggggaaactgccttccctgcaatgtgcgatttctgatgcccagtagtcaatctgaggctattggcacttatgatatcagtgcttattttactaaaaaaaaaaanaaaaaa

SEQ ID NO: 95492 - DNA, 1488 bp, Oryza sativa
  Clone ID: PAT_MRT4530_93681C.1
atgggagggaggctcggagggagagggacgtcgcgctccatcgagtcacatggcggagggaaggggtgcgatataggttgtcgtcgtcgcacagcaccaccccgtcgtcgtcgtcgcagcgccgccctcgtcgtcgtcgtcgcagcgctgcccccgtcgtcgtcgtcgcaacgccgttcccatcttcgtcgtcatcgcaactgccgccgccgcaacagccgcggcgtcaaggtggcaaggcagccaagcggcgccggtggccagccgaggcggtgctcggtggcgcggcagcaaggcggccaagcggcgctcggccttctcctcgctggctcgctcctgcgccgcatcgccgtgctcgaccctgccaccgccgccgtcgacgtaggtgacgccgcaccctcgccacgcccatcggaatctggcaagctccacgccggcgaccttgccaccgccgccgtcgacgcagtaatgtgtgcctgtgaggtgcaactactgtacaagctaggggacaacacgctggacgaggtgaaggaggtcgtccatgtgaagcaagatgctcctccaccatcttctttcttgcccaattcctcggtctgcacttataagctacattaccttagcaccacatgggcacaagtgcgtaccatcgcccaagtcatcatcgtagtgcatgccatcacccaagggttacaatcattatttgtcaaggcatgtggggttaatatatctgtacaagtggatttatctaacacaaaagttgattatctaatcaactctgcttgtcaaaagatgagagtaaatgttaaggacacatatgcagtattatgtggaaagattttagagtacaataagcccatgacatttgatgagaagtttgatgatatccatgcgaacacatggttctacacggttgatttagtacctgcacttcaacgtcaaactcgtacaaatccgccggttctaccatggttatcagtaagatacttctcggactttgcatcatacaacatccaaaaggttttgaaccacatcactgcaatgcactgggaaaacctgagctacaatggcgctttcaatagcgacaacatcatatttcacaatggtgctgttaccatccagggtgttcttacagtacaatttaatggtgtgacatgtgcaaaagattttgcaaagctttattccatattcattgcaaaatttacaccacatggatgccttcactttgcaaacaacttcttgaaacatgcacaaaacagattcatgttacatgaagttgaggctgcattttcaaattgcctggaggaatatctaccccatgtattaaaagcgatagcgcgccttgctcaacataacccccaaggccggcagtatctagttgacgtgaagcagcaatctggaggtgctgcgaatgagtcgtatcttgctcgcctcatggaggcatcatggcgggatggcggcatgctggaatacaaagaaaaacaaccatag

SEQ ID NO: 95493 - DNA, 365 bp, Oryza sativa
  Clone ID: PAT_MRT4530_93682C.1
agcagcatcttctccattctatgctccgctcattaatccttgtggacaaagcttcggaaaaccttatggcggccggcctacgaggagggggaacttcactactactggctccacggatggagaaggctggccaggaccctgggggaaaggagatacctggttgaaatttaaagccctaggcttttgagatggggtcccttgaaaccaaatgaaggttttttcactttgacccccgacccccggagatggagaaccctaaggttttgtttgagacatggttcagggtgagaaggtccccgttcatatgttggccgtggaaactcaataaacatgagtttttttgtttcaattcccgattgaatgga

SEQ ID NO: 95494 - DNA, 395 bp, Oryza sativa
  Clone ID: PAT_MRT4530_93683C.1
agcgccatgccacccgcaaggccctgttccctgctcgactccttacatgaagatccgctggatgggataggatcatatgggatgccctacatcatccatgatcaaccattgtacaatataatgcctgagccgattccaattcttcggatgatgaggaagaagatcatctcatgggaggcgactgctgacgcaaacaatgcagactgaggtgaaaccacaccttgtgagcaacaaaaagaggtgtctgacacccccggagataccagccaggacagtgaggagcatacagactctgctgatgactcatatctatgcaaacttcgcgtacaagatcctccgatttctgaacggactgcaccacttgagcctgctgatgagccaacagagtccactga

SEQ ID NO: 95495 - DNA, 240 bp, Oryza sativa
  Clone ID: PAT_MRT4530_93684C.1
atggatggtctgggtggacctggaaatggcaagcgaatagatccaggaggatttggtggcatagctcctgctcctggaaatgctgaacttgggcgagctaaattcataggagctggaggttgcaaggatgatggtggaacaaaccgtgaaacttggacagcatggtttgtgccctggaagaaaagaaagcatcaacagtcagtcagtgagtcagagaagaggattcagatcattaagtaa

SEQ ID NO: 95496 - DNA, 352 bp, Oryza sativa
  Clone ID: PAT_MRT4530_93685C.1
gggaaagaagcactttttcccccttggaaaagggggggggggaaaaaaaaggccagaatttggctttccattcaccaaaaaagggggtcctgggtcctaggtaaaccaagaaggggagggtacggggccacactaaccccccaaacaccccggcgggtttcggtaattacacgggcctttaaggagaaacgcattaacccgcagacaaacccccaccccacctggatactgggggggtaaaccccggccatgggggggggggctcatactagggcaaaatccgggggggggcggccgtcgtcaaaattgggggggtatctgagcgcgtcgtaagggaagctgaaccgggggg

SEQ ID NO: 95497 - DNA, 506 bp, Oryza sativa
  Clone ID: PAT_MRT4530_93686C.1
tgttctagcgagctgtacgaatccatatgcatcccttcaactccctcccctctcttccctttctcgattagtgttagatctgagcttacagagctatagctcaaatctgcggcatttgggttttagatgcgatcctggctttcgtgtctcttcttcccagttcgttgtattcctgcttcttttagtcgatttcggaccaatttaggtgcgtgcaagaagcagaagttttacctgttggcgtgtgattgggcgaagttcttggaatagatttgggcgcagaggcatcgcgcagctattccctgccaaatctttacccgtttcgttttttttttactgtgatttggatttataaatgaggtaaatataccaaacagtaggattttttttttcaggaagtcaggatgagatcatgggagaggcgaaaataatcaataatgtgccaaagtgggtatgaaacccgactactagtagttgacaatcgtgattagtgattactatgaaacagc

SEQ ID NO: 95498 - DNA, 475 bp, Oryza sativa
  unsure (1)..(475): unsure at all n locations
  Clone ID: PAT_MRT4530_93687C.1
ggttccgtctggagctngtctnngataaaacncccgtggtgtacataggtgcaatcctccatgnngtaaaatgatgtatttncgtcatggagtgggaggganggntgannantancnnntgtncctntnagaagggcaaantggtggtgtccacttaccaattntgatggncaaaggacnanagtgttaattantgtgcnaaccannaaatcanccncnggtgtcnctttggcnttgncactactggatnnagtccaancacatttcnnacaagaaatcnctnggancancacatgtgtatgaacnatgtanaaagattttcatgtacaacangntaactcgttccttgacnatcactacgacgactataaccggcgcgtgtacatgtatcnctaccccgaatggtcgaacgtntgtcntgcggtgctagtncctcctgacacgatgtactcatcacattactctggcattgtag

SEQ ID NO: 95499 - DNA, 291 bp, Oryza sativa
  Clone ID: PAT_MRT4530_93688C.1
ccgccgaattcccgtcgccacgcgtcgcgcttctaatcagcgccgtcagactaccagatgacaccccgcacgcacacctagtctactatagggcgggacattgataacggggggagggtgacacaacacctgcaatggacccagtgcacccgtagctaactcaccgggctgcatgcctctaccgccagcgtggaggacatgctaataagcgccgaccaagtgaccttctaaaaattcgacatcgacctatagcagaggagacggacagatgtgcaggggattatgcgcggt

SEQ ID NO: 95500 - DNA, 303 bp, Oryza sativa
  Clone ID: PAT_MRT4530_93689C.1
atgttggagccgtggaccgccttgaggccgtggctgatcgacgggccctcctccttgccgacgaggagaggtggtgaccaagttggccacatcatccaaccagcgctggacaggggtctccggctccaggttcacggggtgatgccgcagaagggcacccgccgcttgaagcgcgcctcggggacctcgactatgattgtcgagggccgagggaaacttggggcggaaggaaacgacttctctttaaagcgcgcgacctccccctacctggcgcgccagctgtcgaggagtgatcctctctag

SEQ ID NO: 95501 - DNA, 320 bp, Oryza sativa
  unsure (1)..(320): unsure at all n locations
  Clone ID: PAT_MRT4530_9368C.1
tgctggtnanaactttnaggncaaggtcgagtaagaaatagactacggccaaccctnttgacgtcaaatcaaaaaatgaaagcaacatactttttttttcatgcncgatatgggtcncttttctggagctattttgggcgggggcaactggcgtgttcggatcaatggatttattgagcaagcaaaagtntcggttatcttctctttgaggagcggancaaaggccaggaatgcccttactccttgngtcgttccgtcctgacgacccagaaatancagaaacatgganccaaaaaaaaaaaaaaaaaaaaaaaaaaaaa

SEQ ID NO: 95502 - DNA, 264 bp, Oryza sativa
  Clone ID: PAT_MRT4530_93690C.1
atggtccctggatcaaatgctacgcccacccaaatgaatgggactggctcaaagaagaattcaaaatttcgtggtaccaggagtgccaaacaatactggtgtcctcatgaggcacacatggtgtatcgtcctgttgtgtgaatggaaagtatactagtcgtcaaatccccaatgctggtccacatgcatagagatcgttgttaaattaggaacgttattttcttattgccatcagataagactaataaccaacgcaagccggat

SEQ ID NO: 95503 - DNA, 2340 bp, Oryza sativa
  unsure (1)..(2340): unsure at all n locations
  Clone ID: PAT_MRT4530_93691C.1
atggcggaggagagagaaatctttgaaagtcaatgggctccctccgatgtaacagaggagaacttgaaggagatggtggcacacggtgttcttccggcgaaagaaatcatcggctggcgcccagcatacggcgaagcattcccgaccccggacacgcacgaggtcgtcatgttctcccatttcttctacggaggtttttctctcccaacttcaaaattcttcagggggattcttgagttttatgggattagcttgcatcatctgaaccctaattccatagttcatatcgctaaatttgtccatgcttgcgaagcctttcttgggattaggccacattttgccctattctgccacatcttcttcctgaagccccagccaaataaaaacaagccatgtgttgttgggggagccgattttcagctaagaggcaccctgagccagaaatatttctccatgcccttcaaaacatcgaagaaaggctggcacgcaaactggttttatgtgcagaacccagagccagcgcttcccgagtactcttgcctccctccgacataccaagaaacctggaactcgcttccaatgggagatgaagcttctcaagcgcttaccctgatggagtgcatgctaaagcttaaagagcaaggtctgcaaggggaacaaatcactcgacactttatcaagagccggttggcgactatcaaggagagatcccgcaccgcttttgagttcgatggcaaaaatgaccccaaccgtgaagatccagagtccctcgaattcaagatcatgaaggagaggatgcctaagattttctcaaccagtatcgtggtcagctattcacacatattaccggtggtaccatataatgctttcaaccctcctccgcaggaattttctctgatgaagtctgaccttctaaccgcccaacgccgctctcctcgacaacatggtcaagctagtgggggtccgaaaatccagccgactcctcaaccaagcaccccaaaaccgactaaccagtcaggctctcagaagaagaaactggtcctaagcgacgatgaaggcaacaatgctaagaaagccagtaacaaagaggcgactggaaaacagccaagacaggctaacccgccaaagatgaaaacatccagtcgtccaatacccaaaatcaagaagtcgtccaggaaaccatctaatatcgatccatctggaaaagaccctaagtcgactgataaggaagaagaccgcccgactggtagtcagtcggcgaccgacaatgtagagactgggaatgagccctcgactggaaaccagtcggcagaagctgaaactggtgctaaccaggagcccccgactagagatcagccgggtgttgaacaaaataaagacatcccagagacagagggacaagcgagcagccctcccttaaatgataccaatactggtccagaggccagtacttttgacaaaagaatccatcttcgaaacgaagaaaaaactgcaacccttgagaaactagtccctcatcttggaactctggaagcaaccagagctcaacttcatgaaaccagggagctagacagtaagactgaacatgatctcagggatcgacttgctgagcttcaagaagtcaacttcgagctgagtggttcatcaaaaggatgtacaacagttacaaactgccaagatcaccgagctagaaaagtgaatcaaagctcttgaaaaagacaaggacgaactgaccaagcatagagactcggctctcaaagatgtcaaagatccgcaagattaatctcaagctcaattcgaagtcttagtcaacaagatcaagaaacttgaaggagtctagggatgaggtttccaatgctcgctacaccacttgtccaagctacgttctttaataacaatggtccgagttcattcgacgctgttgaaatcattaaagaagctgagaactactccggatatatatgtcaaaaatattaaagaagctggggagcatgggagcaagcatggccttggcgagtgactaaatctcttgtatccgaagatcaatattaatgacattgatgcctttgcagccggaacaagtgaagaagacgcccttgagcgttatctatgatgcccagaaagctgcggtcaagattgtttgtagacgcttcgtagacgagacttccaagattccaaccttggttcgacctggggctgatataactgatgatgaaaaaacataatcctgattgatgatgtaatctttgatgcctggaggctcaatttgtacaatactgatgtatttatgtggcctggataatctncccccttaccttgattcttaaaaaaaaaaaaaaa

SEQ ID NO: 95504 - DNA, 300 bp, Oryza sativa
  unsure (1)..(300): unsure at all n locations
  Clone ID: PAT_MRT4530_93692C.1
tgctatatgtaaattctgcatgtgggtngtccctctcatttttngtctatacaacctctgataaaacatacaaattactgcctatttctcacaatgttccacatatgttttgatcgcttgatagggcacttataatttgcagttgccccatggtggattatttatttagtaccatgacatggagatttcgtgatccaaaattttggtagctttaggtctcctacatatggatttctttgcatgtacatttttcacaccttntcttacaatggagagacattttgnccaaaaaaaaaaaaa

SEQ ID NO: 95505 - DNA, 198 bp, Oryza sativa
  Clone ID: PAT_MRT4530_93693C.1
atggagtgccaaaaccttaaccttgctgctggggatgtagtggccggtcagaccgtccacggctcggtcagaccgccgtcggctcggtctgaccggttgtggctctggcggctctgtatcgccaccaaaaaccagaccagtgtaacagaccaatggggccggtcaaaccggctttaccacgccggtcagaccaactaa

SEQ ID NO: 95506 - DNA, 457 bp, Oryza sativa
  Clone ID: PAT_MRT4530_93694C.1
cccgcaaaaacttattcatttgttttgacaacattttttcccacccatgcttattgggggaaaacccactgacccccttaaacttttaattcaccctttttttttaaaacaagccttcctcccaaaaataaaacccatggttaccagccaaaaatccaataacccgggtgggtggtttaaaaaaataccaaaccaacaccttaacaaaataaaaaggcccgggatggaaaccagggcaggaattggtacccaaaggtcccttttaactaataaaacactcaatatttttcctcaaacgaatcttttcccaagggaaaaaaatggccaagttaactttctttaacaggaccagggttaaccattttttaaccctcaaaccagggcaaaacaaattggggcaacccaccagaaccaggtcctttttaattagcggaaaacctttggaaaataaggaggc

SEQ ID NO: 95507 - DNA, 1557 bp, Oryza sativa
  Clone ID: PAT_MRT4530_93695C.1
ccttccctctcccacgaccctcttcctctctcccatcccattatcctctcgtcgcgccgggaacgtgccgccgccgccgccggcgcccgcgcgctgctcccgctcgtcgtgcctcctccgccgcttcgacggaagccgctccaccgcaccctggcgcgcctcgccgcgcgccacggcggcgccgtgttcggcctccgcctcgggtcccgccgcgtcgccgtcgtgtcctcggcgcccgccgcggaggagtgcctcggcgcgcacgacgtcgcgttcgctgaccggccgcggctgccgtcgggcaggatcctgtcgtacgactggtccaccatgggcaccgccagctacgggccctactggcgccacgtccgccgcgtcgccgtcaccgagatcctgtccgcgcgacgggtgcagcacttcgccgacgtccatgtccgggaggcgcgcgccatggcgcgccaccttcaccgcgcggcggtccgccatggcgtcggcggggcggcgcgcgtacgagtggagctcaagtcgcggctgttcgagctgctcatgaacaccatgatggccatgatctgcgacaagacgtactacggcgagtaacgacgacgacggcaaggtgagcaaggaggcgaggtggttcagggagatggtggaggagacgatggcgctgaccggcgcgtcgacggtgtgggacttcctgccggcggcgctccggtgggtggacgtgggaggggtgggccggcgcctgtgccggctgcgcaagagccgaacgaggttcctgcaggggctgatcaacgacgagaggaaggagatggagcaggagcagggcggcgaccgtgcgcagccggcggcgagccggcggaccatgatcggcgtgctcctctcggtgcagaggcaggaccccgacgcgtgccccgaccagctcatccgctcattgtgcatcagttcccttgaagccggaacagatacttcagctgatacaattgagtgggcaatgtctctcctactaaacaacccgaatgtgatgagaaaagctcgtgacgaaattgatgcattcataggacaaccagtaggctactagaggcgagtgacctcacaaaactacaatacctccagtgcattatcatggagacactccgcttatacccgccagcgccacttcttgtgcctcatgaagcgtctactgattgttcaattgctggttttcatattacccgtgggacaatgcttcttgtaaacacatttgccattcacagagatcctcaagtatggaatgaaccaacaagcttcatccctgaaagatttgagaatggaagaagtgaagggaagatggcaatcccatttggcatggggaggtgcaaatgccctgcagagaacttgggcatgcaaatggtaggtcttgcccttgggacaatgattcagtgctttgagtgggaaagagttggagaggagctagtagacatgaccgagggatctggtcttaccatgcccaaggaggtgcctctgcaagccttctatcaacctcgtgcgtcactgatgcatctcctttattagctttaa

SEQ ID NO: 95508 - DNA, 500 bp, Oryza sativa
  Clone ID: PAT_MRT4530_93696C.1
ctccatccctatcccgcaggagcgagtggcaggcggcgccaccagcactgacgatggcgaggaagcagccgggaatggctgcatccctatcctcgcccgtcaccgccgcctccaacaacgacgagaaggtggctggcctggagtagcgccgacgatgatggtgatgaggtggcagggagtggctccatccctgtctcaccggggtcgccgccaacaaccaggtgacccaatccgccggcggtggctccgtgaccgctggatctacgcctccgtcaccatcggggagctcggctcctagaagttcaatcccctctggtgttgggatgtcaagcaccaatgacatctgattgccattaacccttgccacctggacccttgcgtagtccgccagaactgggctatcatagaagtgggccgcacgggataatgcattatcctgtgcagcccatagcccggcgccggtcttcgccttgttccaggcggagccacttacggcccgc

SEQ ID NO: 95509 - DNA, 458 bp, Oryza sativa
  Clone ID: PAT_MRT4530_93697C.1
gggacgacggcaaaggaccgtatcttattcttacacgaaatcatgataacaggagtagtttaaaaagaccatgtgccagcacacatgattacagccttgtaactcccaccgcagccatgaggagaaaccagatggacacttcttggagcgaaccaccgcttatctacaagctacactctcccatggggcggagatcactccgtcctggtgcctgtgcccctaggtggcacaggggatctgccatggacgagagcagggggtcaaacggggggcactccttctggatgttcatggagacgccggggaccctttcattgtaccggggcactttgttgacgctgcaccacctgtctacaagcttggcggcgcgggccacgagcaccacgttctcctgttccacgcacgcggactgtgcggtgattactttggggggcgccagcacactcgcgtgggacgct

SEQ ID NO: 95510 - DNA, 439 bp, Oryza sativa
  Clone ID: PAT_MRT4530_93698C.1
cccacgcgtccgagcaaatgttgaattatatatatggttgttgttattattgacttggtgttgaatacctttcagatgtggcatctcaactgggctacagtagcatcgactcagtgaccctagaggacatggtccttgagattgtgaggcaaatagagaggctgatccgagcgaagtcgatgatggaagctgctgggaagcccttctaaaagaaggaaggatccattgatgtatagactgttggtcatgtatgtacctcctgatccctgaggaattgccttagatgttccaggaccaggaagcaaaaagtgccgccacagctactgattgattaattttgtaccgaatgatcaatcattcgattgatatttttacattcccttgtgacttgtgagggagacatatgtagcagaatgaaaaagaagtcgaatttattttc

SEQ ID NO: 95511 - DNA, 381 bp, Oryza sativa
  Clone ID: PAT_MRT4530_93699C.1
atgcatctccgcccgttgttgtcgttagcttggctgctcgtagccgcgctcttcctcctgcagagctctccgaccagcagctcgtcgtcacctccaccgccaccgccaccaccaccaccatcaggtgcggcagctggtgaagataacggcggtggttcggcgatctgggctggtgttgtggcggctgatacaggcggcggcggaggcgagaaagcggcccaaagacggtctttgcggcgggtgggtctacaccggacgccgccgccgccgacgtcgaacgacggtgggatagaatctatttcgccgcctccgccgccggagcaggatggccagtttttcagctctacgggctatccgacaaggccgccgccggcgagctag

SEQ ID NO: 95512 - DNA, 336 bp, Oryza sativa
  Clone ID: PAT_MRT4530_9369C.1
acaagaattattaccatgttaatttaaagattattattccatacatacaagattcaaaagcaggcagaccttttgcagttcaccctacttgtaaacaactaagcaaccatacatgccgaggacttagctagggaacaaaacgggggaaaaatgagaaaaccttaaaaggaaaaaaggttgctgggagagcaaatgcattcacaggtatttacacctcaaaagcaaatgttgcttagggaggaggggccagggagaggaggagctcggatccgcgctggatgacgtattgctggacccaaacacggggaagacggtttcccaattgaggaactccct

SEQ ID NO: 95513 - DNA, 567 bp, Oryza sativa
  Clone ID: PAT_MRT4530_936C.1
agtcgtagagctcatcagatcacttggatgcccatctactccaaaaccaacatattttgagacgtcgtccctacagctaatatcgctcttgccattctggttcaaattgacttggatgagatgctacttgtcattgtcccttatcctagcaaatttatcaaaaggatgaggatcgatggttgaggtccaacccaatgcctctaaattttgcccttccattgtatggtagtgtatacctttgagcagctcgccaatacctacatgtaaacgattttgtttgtgtacagctcaaagtttctgtctaggaatgtaggcatagctgaagttattccaagatcttggctgagttttgtaagctgtatattgccccctacctgggtatgtaatcaacagacgaggcaagtaaggaaatcttacatgcttgcacgttgcctgatactgaactttttgctatcgaattgcaaaaggttttataccaaaccaattaagtgcttgggctgtgttcctgtgaatgatctgaagatattttgggtattatgatcactcagcagtcaagttcagttacag

SEQ ID NO: 95514 - DNA, 299 bp, Oryza sativa
  Clone ID: PAT_MRT4530_93700C.1
atggccgctagccactcgctgccactcgtcgatcatcgcctcccactacgagggtacaggtcaagcaaatccctgaggaagccccttcttccgccgccctcctctccatcccttgctcccaggtcctcgcccacgcggttttgctgccctggcatggaggttgaggtccgcgtcgatgggcttcaaaaatttgcggaccaaccgcgcccgcgccatgctcaatgcctcaataccggcaactctttggaacctcagcaaaaagaggagaaggggaggaggaagcgggagaagagggagga

SEQ ID NO: 95515 - DNA, 228 bp, Oryza sativa
  Clone ID: PAT_MRT4530_93701C.1
atgcggccaggacaggcggaggtttctacccacggggacccagaagggacggggcagagattgatttcgctccattcttcacttcaagaccagggccaggggcattcttatccaacccgcctccacccccgccctattgccatccctaatcgggaaggaatgaagcgtcgacagcggcgtaagaattctttccataaaaagatctactatgttcctattgagcgttaa

SEQ ID NO: 95516 - DNA, 312 bp, Oryza sativa
  Clone ID: PAT_MRT4530_93702C.1
tcgtcacgcgacgaccacagagtctaccgttcgcacggagcgcaggactacggcgacaaggactacacggagccaccggcagtgacgctgattgagacagtacagctcacagtcgtgtgccttctaccacgcatagatcgccgagttaatggtcacctttctcttgctttacatcaccgtgctaacagacatggtggtcatcaactacaccttcaagtgcgccaccgtgatctgcagagcactgtctgtgccttcgagagcatgatctatgtactagagtactgcacccatggatatgcgaatgccacataa

SEQ ID NO: 95517 - DNA, 756 bp, Oryza sativa
  Clone ID: PAT_MRT4530_93703C.1
atggcgcccccaatcgcccggaacggccgcgccattcccggccgccttccatggccgccggccgtgtttcccgtcgccgttccgccctctcccatgcccggctccctctcctcccctataaaatggaatcctcatcctccgttctatcgttttagcctcatcccgagcctccccgtggtcccccagtcgccgcgccagagcgtcggccgacgtcgccgtctccttcgtcgacgtcgcggattcgccctccaccccggcctgccctcggattcgccggaacaccgccgccgccgcgccgacctctccttcctcctcatcgacgtctcctccggcagtcccttccgccgtgcccgtgcgccgtccaacgtcgccatctcctccttcggcatcgcagcggcaagcggcgcattccacgccgtcctcgtctccgtgcagcactgccggctgcccttgttgcctcctcgccggttccggtcgtcgtcctctcgtcgttcccggtcgtcgtggcgttcgtccctccgtcaagccgttctcgttcgtcgtcctcactccctcaagtgccgcagccccgtcgtcgtcttcgtcctcgcctccgcgttgccaagccttgtgccggccgcgtctcgccttcgtccaaagatcgccgccgaagtcgctccctcgccgttcgcctccgtcgttcccggccgcctccgccgcgcccgttcgtcgttgtcgttcccacgcctcgtcgcatggtggccgtgtggtgtctag

SEQ ID NO: 95518 - DNA, 1011 bp, Oryza sativa
  Clone ID: PAT_MRT4530_93704C.1
atggacagcaggagggagtcctcggagaccctgaggaacaaatgcgcggcgtgctacaggcagtacaaccggatggagcacctggtggagcacatgaaggtgtcgttccactccgcccacgagccccgctgcggcgtctgcgccaagcactgccgctccctcgagtccctccgcgagcacctcatcgggccgttgcccaaggtggagtgcgcgcgcgtgttcgcggcccgcggctgcagcatctgcctcaacctcttcgacagcgccgccgccgtcagataccaccgcgcctccacctgccagttcacccgcgccgccccgatgcccaggggtagctacggaggccgtgcggtggccatggcgtgtaagatggtcggaggaggaagcgatggctcgctcgacatctgcgcgagggtgtgcctgatcggagaggacgagaacgtcatcttccagacctatgtgaaacccaccacgaccgtcacaaactacaggtatgaaatgactgggataaggccggagtacttgagggacgcaatgccactgaagcttgtgcagaggaggatccaggacatcctgtgcaacggtgagccactatggaagatacggccaaggagctctgggagggcaaggatcctcgttggccatggcctggagcatgaacttgagcgcctgggactggagtacccggcattcatgatcagggatactgcaaagtacccaccactgatgaaaactagcaagctgagcaactccctaaagtaccttacacaggcatatcttgggtatgatatccacactggcattcaggatccctatgaagattgcgtggcagcgatgaggctgtacattaggatgagatcgcaagcccacccgagagactacgcctccggttcaggtgagacgcagaacaactacccagcctggaggcagagggagctagagaggatgagcccagaagaactcctggcactctcgggttcagattactactgttggtgcctggatttctga

SEQ ID NO: 95519 - DNA, 210 bp, Oryza sativa
  Clone ID: PAT_MRT4530_93705C.1
atgcgcgccaccgccgcgtgggacgtggacggacgagatcgccggtggcgcgtggcgtggccgccgtctgggatcccgggccgggagagagaccacgctgcgcctggtccaccggggagtggggcccaggaaggggtttacgtggagggagagagtggaacgaggaagtgtgggggcgcccgctcccgctgcggcggggacaaatgttaa

SEQ ID NO: 95520 - DNA, 934 bp, Oryza sativa
  Clone ID: PAT_MRT4530_93706C.1
acggaatttgatcggtggaatcaaacacttcaggcgacggtctgaaccgttcgatggctgcaatcaacagggagacgaccagacgtggtgctcgggttgatggcggcagaagcgattggcgaaccaatcggtgggtcggacacttcgggcgggtggctcgaactttccggtgagctactttcaatggggagacggtcagacgtgacgctcagggttgattgaagctggagatgatcagcgttctcgattggtggaatcgaacactctaggcggggtggcccaggcctttcgatgagctgcgttcgacagggagatggctagatgtagcgctcgggtcgttcggcggctgagaagacggcatgcaatttatcggcttcggcttgtggctagattgatgatggtcaaccgaaggtcggagcgggttgcgggctcgaggtggagcagcaacagtggtgttagccacgggtggacttttgtttctgatttggaggtgttgacaaggtgctgcatgatcgactgctacggaggtgacgcacagcgacaggtgtggcgggaaagactcaacatggttcgacagagaacaacggcacttgtcgttggtgagatcgaaggatgtgttgagggctggcactggaagttgtcgggaaggtgcgtgaaggctcggaagtcactggacatggcggtgtgcacgtactgtgtcgaagccagggaccatggagaaaagaaggggcggcggcgacgctcctgtgtcggggaggcggctcccgtgggcgtcggcatcctcaccggcgggaaacccacgacggcagcaacagcggttgccctcaccggcgaagtcctgaggggaggcggcgcaagggagtcgagctcctgtgcgtggcagcgccttccagcggacgacaacgttgaagagaaacctaggctgcggcagtag

SEQ ID NO: 95521 - DNA, 614 bp, Oryza sativa
  Clone ID: PAT_MRT4530_93707C.1
atatctatagaagcattattataacgcattttattatagatcagcacaaattacaatactacaatacctgacacgaccctacgactgacgacaccaaaggcacggattgttgcgtacgtatagcccttgtataagagcatatacatagtagcactagccgtgtgtacacatgtacacacagcagagatcgatgcaatcctttattgaccaaagcaaacaactatagggagaagtagctggacaagcacatcgtcattcatgtatatatagcagatatatatttgtataaggtttacgtgcgtttaatttgccatcgatccattcatcgtcttcatgagcagcacgaatggcacttgccccatttacagcatggaccgctgtcgccgctgcagtactcgtagcacttgtcatagtggcagcagcctttacacttgcaaggcccgcacttcttgccgtcatgatcgccgtgatcggcagaggcgacgtcgacgatggcagatgcagccaccagcatcaggagagtgaacacaacgaaagccttgttggacgccatttttgcaagctagctagttgattaatcagctccctcgatctcacttacgctcacgcgtccg

SEQ ID NO: 95522 - DNA, 1426 bp, Oryza sativa
  Clone ID: PAT_MRT4530_93708C.1
ccaagaagaagcttagctactcacctagcaaagcttgccatccatccatggcgctcctcccttgcattgccattgccgtgctgctctcctcctcgctggcggcggcggtgaccggaccgccgggaacgatcgagcgcgtcgtcaagcagcagatcctcgccagcatcccgccgggtggccacggcgccggcgacgtccacccgcccgtgctgttcctcacctcgccgtccggcaagtacgcggcgtacttcgtgcgctcgcacaccgtccccggcgccggcgggctcggcgccgacttctgctacgtcgaggtggtcgtgaacaagggcggcgagggcgacgcggcggtggcggcgggcggggggatgagcgtgtgggagtcggagtgccggccggtgagcacggtgaacacgtgcactctgctcttctcgtggcacgggctggaggtgttcgacggcagccaggaggtgtggcacggcgagaccaacaccgacggcaccaacttcctgcagaggctcgagctcgtcgacgacggcgacatgcgcatccgcgacaaggacggcgagctcgcctggcgggccagcgacgagccccgccacgcgcagcactgcggcgcgccgggatcccctggcctcgccaccgcgttcccgcccttcgccgagcccatcggcgcccacagcagcgacctccccttcggaatgttccccggcggaaacggccgcgccgccgagctgccgcaggccgcggatgccgccgcgggagcactgggcggcgtcggagctgtcgcgccgctgccgggagccgtcggcggcgccggagctgtcgcgccattgccgggagccgcgggcggcgacgcggcagccgcgccattgccaggtgacatgggtggcgacgcggctcttgcgccactcccaggggcccttggcggcgtcgacccggcgttctcgccattgccaggggacctgcctgaccctgctgctgctgctgctgccggcggcgccgccgcaggggttggtggtgtcggtgccggcgctctcggcgccggcgctgtcggggcgttcggaagccagccgctggtggacaacagcccgtacgacagcggggcgtggaaggtcgacggccacctcgtcgccattgtcgtcgctctcggcgtcgtgctcggcgccatctgaggattgggaagcaagcttgggaattggtttgagatttgaggaggaaaagcataatggcagctgcttcgggtaattaattggtgtgggtttaattttcctttttccgtatggattgtaaattagtcgtcggaggccatggccaccgaacgatcgaatttagtgttttcatcggggtttaatcaatcgcgaacaattgtaatcaaatacacttgtttaaatctcatcaatgttttcatgaaaaaaaaaaagcttaa

SEQ ID NO: 95523 - DNA, 214 bp, Oryza sativa
  unsure (1)..(214): unsure at all n locations
  Clone ID: PAT_MRT4530_93709C.1
gaacaaagaataangaagcatnanataacaaataaaggatacatacattgacccacccagcagaaccaacgggaccaccatggtttattatgccacgagctataaaattataatgtgagtgcacgccatcaagaacatcagatcctggggatctggtgaaccgcactcctatatcagcgtcaatctttctcaaatttctttaaaacttgcaatt

SEQ ID NO: 95524 - DNA, 126 bp, Oryza sativa
  Clone ID: PAT_MRT4530_9370C.1
gacccaaaaatgccgttttcatgtctttttacaattacatcgggttaaccacatttcctttttgtacacattgcacacactccttttttccagggtccacatatatacattgcactttataccttg

SEQ ID NO: 95525 - DNA, 858 bp, Oryza sativa
  Clone ID: PAT_MRT4530_93710C.1
ttaagagttaattacagagaggtatgaggcccagttgcggagctgttgtttgctctcggcatttttacatctgtgggaccaaagatcaatgtcgctagcacaacaccggagaactaacgtggcgggttcgtcaacggaattgaagaccttgttgttgcgtcctttccaaatattccacatgacggcaagcaggatagtgcgccagactcgtggagtggcgggttgtccgggtggagggatgtcccagacaccttcaagctgcggcagggaggcgatctgttgttcgtccaggccaaaggtgtgccagattgttgccacttcggcacagcgtaggaagagatgctccacatcttcatcagaggagcaaaatggacaacgtgcggatgctgctaatccacgttgagctcgtctctcattggtgaagatgcgcctcttgtgtgtagtccaaaggaagatcttgcatttgacttgagcttggttgtcccaaatgggcagggcttggatattggccaattcgtgtgtggccatcgtcgacattcggggccgaagatgaaggagcaattcaggagtggctagggcttccgcgacagaaatgttagggcgagttgcatgtgagaacaaggcagggaatagttgaaagagggcgtcaccgccaatccaattatcaaaccagaaggaagtggaccgaccatctccaatgatggatttcgaaacactgcgaaagtgtgtaaggcccgtgatgatgtccttccagatgatcgtgtcaagccacgaaagatcgcctaggtcacgcaaggcggaccatccatagtgatcgtgaaagcagtcgatccacggcacagaatcacccttgtgcat

SEQ ID NO: 95526 - DNA, 454 bp, Oryza sativa
  unsure (1)..(454): unsure at all n locations
  Clone ID: PAT_MRT4530_93711C.1
aaacaaaaatttttttttcatggaacaaaggaaaaaatttcccccctccccccagggacaaattttagccggggggaacactttccaccggggaaaaaaaaaaaaaggcctttactcctttccaaaaaatttacccgaggggggagcaggcccacgggggggggtttacaagcgccgggaccaggtttttcctcccgggccccccattcgggttgaaactggccccggtggccgggtccaccaggagggacccagggaaacccgggtacccccccttggcgaacactccggggcacggggggggggcctccaggggggcgtgggggtccccctggaaaaaaccgttgccaaacgggttggggacggggcccacaatcattggggggggggatataaccatgccgtaaaccccaacattnccctttgggcggcgtgaggggccccccctgggggc

SEQ ID NO: 95527 - DNA, 2913 bp, Oryza sativa
  Clone ID: PAT_MRT4530_93712C.1
atgggtgacagcagcgacgacgacttccagagcgcggcggcgaagaagatggaggccgtagcgacctactgggctgccgtgaagaaagatgacccgacgctcaacaggttcgctcttagcaacctggagagcaaggtgttctcttggtcgatcagggacatcttcaacagggacctgctcaagcaccagggtggttatgcttatttacttgctgtagtgagggctaaccaaccatctgggtattcatcacaggtcaagaggataccagataccttttcatcattggagagttacttggattcatttacctgccctctggtcgaggaagtgcatgccgatgtcttctcgtcattggatggctatgcccatgcaaactttatagaagtagttcggatggagaagcttgataatgagaagtttatatttggttttgaggtttcagaaccatcaaaggatgagaaatcgagggagacatatgatccgacagaaggtgatataatagccatgtccactcaaaagccaaagcatgttcggttctcaaatgtggagatgatgagatttcccactgattgctgcattgttcagctgtcatcttctattcctgttgaggcagatcctgaaaccaaaatgcctaaaggagcaatatttgctgtgtttctcataaatatgaagacatacaatcgtatatggaaatgccttcgattgggagcaaatgatggtaatcttgccaatcttcagaacaaaagcagtactaatatggtcaatcttgtgcggcaatacaaaccaaaggtagtggaagacaactcatcccaagtatctcagtgcttgaaacatggatcaatggatttccttggccttgagaagttaaacctaaatgcttcacagctgaatgcagtagcagattgtgtctcagtaatggagaaccaattgtcttccctaaaactgatatggggccctcctgggacgggtaaaaccaaaaccatcagcactatattgtgggcaatgctcatcaaaggccgaaagacacttacttgtgcacctaccaatacttccatattggaggtagcatctcgaattgtccgtcttgttaggggatgttcagatggtagtgcctgcttcctaagtgatattgttctgtttggaaacaaaaagaggatgaagatagatgatggtcatgagctttctgtgatatttcttgactctcgtgctgagcgattgttaccatgttttgtgccaaacacgggttggaggcattgcttgtgctcactgatagatcttcttgagaattctgtgaccaagtacaagtattacattgaggatgtacttgagaaaaggaaggatatagaaaaggagactgctgagaaggatcaaggtgaaaatgttccttggagaatgcaatttggaaatggtagctgtgagaagaaatgtgggagacctgaagataaggaagaggcatccagattgcttccattcaaatattatttgaaagatggttacaacaacctttctcagaatttgagctattgcattgagatactgtacaacaatcatccaagaaattcaggaacagaacggagctttcagtgtatgctggaggtacttgaattgatcaaaattcttcatggaatgataaactgctataagggcaatgctgacatatggtcagatgaactgcttgaaaccatgatagaagaggatagtgatcctgttttgtggtctgagcagttagtctctgtgcaaactagcacatgcattaaatccaagttcaggcttgccagattgctctctttcaggctgtacaacgtgcccatggatgtttctccctcgggcatatgtggaccgttcaagcagcctgaaaaggcaaatcttctggagatgctaattgttgatgaggctgcacaactcaaagagtgtgagaccttaattcctttgcagcttcctggtattacgcaggctgttttgattggagatgaatatcagctacctgctttggtgaaaagcaaaatagctgacaatgctttctttggacgaagtgtttttgagaggctaagtttgttgggctacagtaagcaccttctcaatgtccaatacaggatgcatccagaaataagcaggtttccagttgctacattttatgatggcaagatatctgacggctccaatgtcactagtaagaattatgaaaggaagtttttagcaagcaaaatatttgggccatattcgtttattaatgtagatgggggtcatgaaacagctgagaagaatggtcgtagcctgaaaaacacaatagaagttgctacagttttgagaatagttcagagattattcaaagaagcagtttctacacaaagcaagctctctgttggtgttgtgtccccatacaatgctcaagttagagctatccaggagaaagtcggtaaatttatcaaaaatggactcgatgcatataagccggccaaggtttcagaaaccaaggccaaactaccgttcatgagaagtctgaagcttgcaagattcagtttgtctggacgcttgaaatatcgtatggcgtcggtgtcaaggcttgtttgttcagttgtcactcgggtttgccgaaggaagaaaaccatgtgtgttactgttagtattgtgttgctgacaattttgttgatattccgcggatataccgtttccagcgtccaccgacgggatagcgaccaaccgttggatatcccttgcctcctgctgtcttcgcttgcacgggtgagaaaacaggtgagcaagatgagtgctcgcaacaagtctaggaggcagaaacaagtcaagaaatctgagtgtgtggatgcaatccagtctgtggtgaattactgggagaagttgaagaaacgtgacagcagcctcagcaagtttgctctaagttatctggtgagataa

SEQ ID NO: 95528 - DNA, 2453 bp, Oryza sativa
  Clone ID: PAT_MRT4530_93713C.1
gggcgggtccccggcctgctggcgcccccccctcttgctcttgtttttctggtgcgcgttttttgctgcctgtttgctgttttttttttttttttttttataccaagaaaaccctatgcaactttcatgttaagacccagtattcttttcctttcatttctgatttctgaaacaaggacaagcatgagtagtaaaaagaaaacctattctttcagagcaccgcacacctatgtgcctccaacaccagacagaatttcatttagtattccttctgggaaaatgagggagaaaaccttaaaacctcttttcagcagggaaaattttctactcatgaaacatccccacatcgctgaaacatcaacaaaaaaactcaatttgttaagctagacagtcatactgacggctgaagtggttgccgaaaaccatcaagatacagcttcacatccacaggttatcagcacgatgagatcccccgtcatgttgctcggtaaaattctggcgttactgcattaacccctacactcctcaagcttctgctgcagcctaacattgtgacataaacaatcagcaatttcttcctgtttcagaggtggaactatttcatcctctttccagccaagagaaaccaagaaagccatctcctctggactaggtctgtcttgagcaggataggattcctcttcccctgttccaatgggttcaaacaacataacagtttcatcatcactacagttggaccccatggagccatcataaatttctgcaggtatgatggacggagaggaaccagcattatttgtatggggcttcatatatacatcttgtgtgtcagcaatttctgatgaagagttaaaatccctgttgtcagacagaacctcttgcattccttcatcaaaaacatcatgtggttcccatggtggattgatttcctcattgtcagaaaggtgctgctgagatccctcacaagaatttgcttcctcacaagaactacttccatgttccatacatttgactccagaatcaaacaattcaagacaagagttgttttgctcatcaagcaatgtagatgaagacacagtagaagtgcacgaaccattcaatgatttgctgcgcagcaactcaaagaatttatgcttatctttcgcacttgattttctctcaccaaatgatccttgcagttgtaaagggagaccattagcaacaccctttagcttttggtttacaataggctttctcagtggttctactgaatatgatcggcctagaacagggctcgcaggattgctagtactttctttggcagtatttacagtaccattctgctcacggctaaggacttgaaagcttcctgattgagttggctttacaagctcatgttttactggagcgcgaataaagctgccagaaagctgtaatggcagttgcattgtacccttgacagggccattagaatctccagctcttgcacctttggattttaacttatctgaagaacttgatacataaagctctagtgattgtttttcttttcctgaatgtggagattttatcctgtgagagttagaaattttgttcgaagaaggtgtccgaggtcttaggatgcactgcttcatagttctttcttcaatcttatgagtatcgatcgataactggggtgttgtcgagatttttaacggagcttgcatcactgtttcagccatacttaatgcagtcccgcagtttggcacttccatctgcttactggaaccagtgcgtaacaaagaagatggaacagggcagttggttggtccactaagtacaggaacttctgctagcactgaactccgcccatcaagtgcagtgcccaaaggcatactctgaatcggggtgctaattccaggagatggaactctacctacatcttgctttccattcttgtcgtcagaaccaaggtgtggaaattctcgctcaaaggagacaccaccagaaacctttcttgatacactacgaacaccattgtctaaactttctcctaccgcctgattcaatgtatctaccttcaaacgagtatgattaagcctgtccctttcaggtctgcatgagctgaatggcttgaagccatcatacaagggatcatcaggtggacccaacctactctcccaattacgggattcagagtccttctcaccccccctgtcccggttgctccttccaaaactggcatagcctcttgactttgctgtaccatcccggtcatgccgtctaggtccaattgagccagaactcctccgtgagatggactgttgtgagctccgttcacggtcacgacctgatgattggtttcttgatgaaatgctcctaccttgatcatcagcgcgcggcgaagaagttccagtccagaggctcgtggcagccactgcgccatgcccccgcaccagccattctggcttcagcgagggctcacctcggtccat

SEQ ID NO: 95529 - DNA, 367 bp, Oryza sativa
  Clone ID: PAT_MRT4530_93714C.1
aaatacggggttttccgcctgggaatgaaacaaggggaatgacatatatgacgttccagattcacaactcaaacggcagccggaatgaccaaaccggcagattagaacataatggccctcgattattagccgaaacgacccgaaaaaacgagagggactatggcactggagggggtgatctgcaacgggtggtgtggacaggggaaggtgggaaaaaaaaatcaaaccacagtgaacccgatgcatgcccggagggggctagaaaaattgcatatggatctaggaaagggactcggttgggtgagccaaatggtggatgaaatgtgggaacggtgcgcgacaatggatgtgaacgatcgatccacag

SEQ ID NO: 95530 - DNA, 473 bp, Oryza sativa
  Clone ID: PAT_MRT4530_93715C.1
aaaaaaaaggggggtggttaatttaaatttggaaaaaagtttttggtgttgtacagaaaatttaattttcttccaaatacaaaggggggggtttttcaggggggggttttttttttcccacctttccggggcccgggggtttaccccggaatttcgggccgggtccttggggggttccaatttttcttttttgggggggtttttaaggttgggggaaataaggggataagttttttcttggggaaaatttttttccgtttaaatttccaaaaaaattacggccgggaaaattaaaggttaaagctggggggccctaaggggggggttaactcaatttatttggtttgggctaattgccctttttcaagggggaaaacttttgtgcccattttttttaatatatgggccacccccgggggggggggtttttttttttgggcccccgggtgttttttttttttcccagggggggg

SEQ ID NO: 95531 - DNA, 822 bp, Oryza sativa
  Clone ID: PAT_MRT4530_93716C.1
atgggcaactgcctcgagagatcgctcggcggcggtggtggcggcgcgcattgcgacgccgggaagaagaagcgcgcggtgttggtggaggaggaattggccgcggcggcggtggaggaggaggaggaggtgcggaagcagggcggcgagaaggtgacggaggtgaagatccggatcacgaggaagcagctggaggagctcctgcggcggctggaggaggggagcgatggcggcggcggtggcggcgccgtcgtgtcggagcttctgtgcatgacgagcagctgcaacttccggcacaggccggagcagtggaggccgtcgctgcacgtcataccagaggataaactacgtgtgggcttcctggggcggacgcagagcgacaaggcggcggcggtgccggagtggaggagcgcggtggcccgaggggaggcggtggcgggggcggagcacacctccatcgtgcctgggctccggcggcggcgctcggacgaggacgatgcagcggtgccggagcggaggagcgcggcggtgcggcggcccgaggggaggcggaggcggcaggggcggagcacgcctccatcatgcctgtgctccagcgatggcgatggtgatggcgggagtgaatctgaagacatggccaccggcggagacctgatgcggatgcagctgttcctagccgaggtcgtccatctcgtgctgctgctcgtctggggacgacggccggagttgagggtggtcgctagcgctggagttgaagaagaagacggagggataaaacatgtgaaacattcctcggtaagacggtgcaacaccgtccgatga

SEQ ID NO: 95532 - DNA, 226 bp, Oryza sativa
  unsure (1)..(226): unsure at all n locations
  Clone ID: PAT_MRT4530_93717C.1
cctcctcatccactccgctctgcgnccatggccgcgtgcngctcctccctcgccaccgccgtctcctcctcctccgccaagcccctcgccggcatcccccccgccgcgccgcactccctctccctcccccgngctcccgccgncaggccctccgnctctncgcctcctcatccagatccgcccgggccagcagnttcgtcgtccgcgccggcggttgtggacgatg

SEQ ID NO: 95533 - DNA, 540 bp, Oryza sativa
  Clone ID: PAT_MRT4530_93718C.1
agagtttgttgccggcactcgttcgaaatgatagccgaggcgtgaataccccttcaggaaaagcagggtccaagtttccttgattgtgaagacgctgaagtttcgatattcatccctgggagtacctatgtgcgtagtcgacattagtccatagaagcgtgaagccggagcaaacctcggaatggcgaaaattctcccgccgcaaatcatcgacgaagcttctctacaacagggacgtgtcgattgtaagaacgctccgatagtcagacccatcgtctacggaaacgaggcacggtattttcggtaaaaaacgggaaggggatggacatacacacgagtggaaagtatatttgaagccttttaacaatgaggacatgagcacctggatcaagaaagtccattttaaactgcatgacagctattagaacccgaatcggatcgtcatgaaccccccgtacgaggtggccgagacaggctggggagaattcgacatcgttatcaagggctatttccttgacccaaacgagagaccggtgaccc

SEQ ID NO: 95534 - DNA, 2463 bp, Oryza sativa
  Clone ID: PAT_MRT4530_93719C.1
atggtgtgcaggcgagcaagcattccagccgccacagaggcggctgctgtggcttcatggcctctcggcccactggcgctcgcgctcgcgctcgccatcctctcggcgatgccccacgtcgcgctctcccagaacctgacgtgcaaggatgtcccctttcccttccgcgaggaaaggagcggagcaacctctgtccccgggttcatggtaacatgcgggcgaaacaacgaggccatgctccggatcggcgagcatatctacaaaatcgacaaggtgtcggtgccggaacacttcatcaccatacgtgcagggcccatccaacaggtgtgctacgaccgcagcaggaggccgaagcagatcaagccgatcaccagagtcgatccggctccggctccgacgagcttgcaggccacgcccttcaccttctccaggcgcaataaactcgtcgccaccggctgcaactacaggttcttcgctaacttcacgagctcgtcgggtggtggggacgggacacccacgagctgcgacacctggtgcaacgacggaagctccgacaccatcttcaacggctcatgcgccgataaggcctgctgcacgaccgagatgcagatggatggcgcgcaggaattcaacctgacgttaaagccgtcggggaatgtcgaggccagcacctgcagtgccgtcttcttcctcgacaaagacgagcaagtcttcactagcgccggtgatggccggaatatggcactgaaagaagcgctggtgccgctcggttaccgcaagatgttcttggattgggcgattccgggcaactgcgagcagaactccgtcgtcacagtacccgtgtggcagcatgagcacatgcaaatgaagggtacgaggggaacccgtacgagcaaaacgggtgctcagcttcgcactatttatgaagatatcaacgaatgccgggatatgaataacaacaactgcagcagagatgcaacctgtacaaacactgatggaggctttacttgctcttgccccaagaacacggttggcgatggttacagggctgggacaggctgcagtattgactcccttccgccatctggtctagatgtgtgtgctcacccagaaaggaacccttgcatgtacccagagtactgcaaggatgaacaaggagtaacttcgtgtgcttgcccggaaggcagaaatggcgatggcaggaagaagggaagtggctgcaaaaggcactttcctttagatactgctttgggtgtaggtcttgcactgacggtcacgctggctacaacattgctgtgctactactggacaatgaagaaaagaaaggtggcaagaaagagagctgagttattcaggaaaaatggagggttgctactgcagcaaagatttttgatgatcacttctcaaggtgaggagtcatcagcaaagatatttagtgcagaagaacttaagaatgccactgacaattatagtgatggccgaatccttggccgaggtgcaaatggcactgtttacaaaggaatccttccgaataggactacgattgccataaagaagtctattttgtttgatgaaagccatgtggagcaatttgtcaatgagattaccatcttatcacagattgatcacccaaatgttgtcaagcttttgggatgctgtttagagacaaaagttccgttgttggtttatgagttcattcctaatggaacactcttccaacacatccacaacaagaggactttaacatgggaagattgcttaaggatagctgaagaaacagcaggtgcacttgcctatctccactctacatcttctacaccaatcattcacagagacattaaatcaagcaacatattgttggatgagaacttcgtggctaaaatagcagacttcggtgcatcaagatcagtcccatctgatcatactcatgtaacaactctaattcaaggaacaattggctaccttgatcctgaatatttccaaactagccagctcacagagaagagtgacgtctatagctttggagtagttcttgcagagctgttgacaagacaaaagcctatttctgtaggtaggccggaggagtcctgtaacttagctatgtatattgtgatcttgcttaatgaaaggcgtctactacaggagatagagccacagattttggtagaagcaggtgaagagcagatatacgctgttgcacagctctcagccagatgcttaaatgttaagggagaagaacgaccagttatgagggaagtggcttcagttctacatgggctaagagagtcgtttgacgaggagcaaatcatcagaagtgatgagtcaatacagataatcaatgaacaagagagtgtacatagtgaggcaaggccaatttccagcctgcagtcttcagacgaaactagtactacccagtacagcttgccatctgaaatactatctgcttctcatttggaaagatga

SEQ ID NO: 95535 - DNA, 664 bp, Oryza sativa
  Clone ID: PAT_MRT4530_9371C.1
tccaatcctatgcatattaacacctacggtcatctctcagttgcttctagtttgggatgcggtgcttcctacctagctcttatcgggcgttgaggatcgtttcgtttggtgttggacgagtgatcagtgttacttggcgcgctcagcataacaggcattcttctttggctagcactcatttgcctgtgccaacctgctctggcacgcgaaaggccatgccaaatgcaaattctttcttcggtttgcatatcagcagcgttgctggacagctgatctttttcaaaagcgtggtattgatagccactatgtctgtcccttttgcgctcaggagtttgagacggcgaaccacattctcctcgactgtgtgttcccttgacagacctaacaccatgttttgtcacctgagggctggactgccctcctctccggtggcaatttgcttaaggactggtggtcgtctggtaggacttgcttacctaagcatcttcgcgcatgcttcgactccctagtcctactgatctcttggcagctgtggaagtaacgaaactctagggttttcgactcggccctttcctcggtttctgtgtttatagagtctatccactcggaaggttgtctgtggttttccgcaggcattacagcttttgagggtttgctaggagtg

SEQ ID NO: 95536 - DNA, 299 bp, Oryza sativa
  Clone ID: PAT_MRT4530_93720C.1
atgaagttaagcatgaaacgacccccgtacaaccgcacttctcgtatgagtcttcccttcccgggtgcgccagaactcctatcactgctagaaatcgtattacgcctggagtgcatgaggatgtaaagtttatggagcgggtactgccaatgcgaggttgtcgaaaggctttgccgtgacgcgtttcatgtgttggggcgaggctcatatgttgggcagtcgcgaagtgcgggtaaagtgtacatccactgcagtgtgagtaaacaaaataaacggacacaattacaaattgagagccc

SEQ ID NO: 95537 - DNA, 1971 bp, Oryza sativa
  Clone ID: PAT_MRT4530_93721C.1
atgggcccgccggaattggtgaggtcagcagagaggaaggcaaccagggtagcaagatcgacgttgtcatcgctgaggagggagaagagagaagaagcgaggaggagaaggatgaggcttggggcatcggcgacaaagtggaggcagtcattccccaccgtggagggtgatcttggagttgacaaagtggaggtcgcaagggaaggagtcagcgagcatagctacaataccgagcaggctcctggctggggaaagcgccgccggtgcagttctgctcggagtgctgccactggcgaggtggcaagggacgaggatttccgctcgcgtatcgggaacgatggccgctacttcgatcttgtcgacttcagcgcaatcgacgtattctacgttccgaatagcttgaccgtctacgagttcaagataccttataggttcaacttgtcacagggtacgctcatggagaaatttggaacccctgtgcaatgtcaacacctctggtggtgggctagacgactaaacaaaacataccgtgtagacaggccattgacaaccgaagaggagaaactatctgtgtgcagtaaaaagtattcttttcattttggccttaagtctgctgtgttgagtaagaaatcagagaaggaagggtgctccaccctcattcccaaccactcagagatcaacgaagatgatgcgctggtgtttctaaagctttttgacccagaaaaagcacagctacagttccctgactctgaaataaacagatttatctcatttgtactggtttctcactttgataagcaggagataaaatttgatccatcagtgatgtgtgaagctattgacattcatttaaccttttcagatagtgggattacaactggggacattatttgctaccagaaaagcctgccacaaaactggcgaatatattcttctgttgcatcttttctccagcatgtttgtgatcataaggaagaagaatggaagagacacattttagaagaggagattgctgtgttaaaacgccaggctgatacagatcggcttcagaaagatgagagcatgacagcaatatataaaccccatctttgtaatgaagtgtgtgatcagttgaaacatgaacgagacaatgctgtgcgacaagtgaatgaattatgtgatcagagcacacctgtcattctcaatttctctcgcaaggacttggagcaagcaatagaacatttcaaaaatactggtgattttggtgatactgaatatgggcacttatataaaggcatgatacactataccatcgtggcaatcaagctgtctagttcccaaagcttatttcaacaagagcctactgccttggtccatagtgatctcaggccttgcaacatcctcattgatgccaactacagaagcaagctctgcaactttggtttgtccaacctgtttctgcagcctgggacctgcccgccaaacctgatggcaaggctgccatacatggaccctgagttcaacaccaccggggagctcacaacactctctgatgtctactcgctgggtgttatcatcctacagctcttgaccgaaatgccccccttaactctatcagagaaagttgcagaggcattggagagtgatagcttgcacttgctgatagataaatctgcaggggactggccgtacattcaagccaaacagttagcactcattggccttagctgcactgaaatgacgaggaagaaacggcctgatctcttaaccaaagtgtggaaagttgttgagcccctgacgaggaagcctcttgcagccacctggccatacttgcaatcagcaacaggagatagttgtgtcccttctgctttcatttgtccaatcagcctggagatcatgaaagatcctcaaatggcatctgatggattcacctatgaagcagaagccataagaagctggtttgatagagggaatatattaggtctccgatga

SEQ ID NO: 95538 - DNA, 489 bp, Oryza sativa
  Clone ID: PAT_MRT4530_93722C.1
caccggttctagtgtaagtgtaaattatcggggcagcttggcgtgagtggtgggaagaaccaactcaagtcctggtacacggatgtcgagcaggtaacagattcaggttggcgtggcatattcaccaagatggaggcgcatgctcggcgacgtgccgacgggacaaggcttacctgcccccactccgcctgacacagggcgagacatgggtgcgctgctagccgtcccatccgcctgtgatcggtcacagactggtcaagaccgattgacgcatgtcaatcgggcggcgcctcacgggggggaaggcaggccacgtggccacgtggcaaggtggaatggctctttccctctactgtgcacgcccccgggcccatatcaccgatagactatttgtgttaccaaccgggactaaagatcatctttagtcccggttcgaatgctgtcagggtttcgtggagacttgattctcttgtaagccgccataggcgt

SEQ ID NO: 95539 - DNA, 456 bp, Oryza sativa
  Clone ID: PAT_MRT4530_93723C.1
atgctcggcgacgtgccgacgggacaaggcttacctgcccccactccgcctgacacagggcgagacatgggtgcgctgctagccgtcccatccgcctgtgatcggtcacagactggtcaagaccgattgacgcatgtcaatcgggcggcgcctcacgtctgcccacgccatattaaatacggcgagggatggttggggcaccgttcatttaaggcgctcggcagctcctcttgctccgcccacccggccgccacgcggcagccggataggggccttggggcaacgcggtcaaaaaccccgaggggtgagacgggacaccccgaggccccctggccactttgtaaccgcccaacctcccccgagggggggggggaaggcaggccacgtggccacgtggcaaggtggaatggctctttccctctactgtgcacgcccccgggcccatatcaccgatag

SEQ ID NO: 95540 - DNA, 581 bp, Oryza sativa
  Clone ID: PAT_MRT4530_93724C.1
gacggccagcggcaggagctcgtgaactgggtgaagcaggttggcggcccggcgacggcgcactttcgctctataatctagaagccatggtccctctaaatataagttcttcacgtggttggtactgcaaaataggctttggaaaaccgaccaagtacaacggtgaggataacccaaccaaagaatttgcccactatgttgaacttgcaacgagacagctatatacctcatagcacactgccaagtcacaaagagaatctcgggagccatagcaaggtgggcacagatcaacctacaaatggagcaatgaaacaccatagatatggtggaaaacttggtgggcaaccttagcccacactaccggaatattgaagaacacgctccggtcactcattctcctagtcagttgggaaatatggaaaaagaggaatgcttatgcatgtgttccaggcttccaacgcatcacattaacgcctactatcattatagcaaaaataaagtaggaggccagagacatacacccggacctactctcataacattgttatctctctaagtttttttttttgcccccaacagtc

SEQ ID NO: 95541 - DNA, 470 bp, Oryza sativa
  Clone ID: PAT_MRT4530_93725C.1
cgcttcctcatcaccggctgtccgcatcggcggcagccgtctgaccccccccccggccgacgtcatcgtcagccccacaagcagcagcatcgcgccggccggctcggccagcagcaaccacgccgtcgccaggcagccggcagccgccggcaacaaccatggccggtcgccggcagcccggtgaggttctcagggggagacgcggcgttgagccggagcagcagtggccgtggagtgacgtcttcgccgccgacgacggacgatgacgtcagcgccgccatggagcagtgctactatcatggcatctctgaacctcactcctccagcctcactggatgatggcagcttagcttcagtcaaattaatcacatgagctgctataattgatttccatgaactgatcccccagaggtcatcaacatccgagaatattagtagagaaattttgccaaaaaaaaaaaaaaaaaaaa

SEQ ID NO: 95542 - DNA, 459 bp, Oryza sativa
  Clone ID: PAT_MRT4530_93726C.1
gaataatataacatattattgtttaattgtgttaaactaaggtgtgctgatgagcttgttagagaagttacttaacaattaatgattgtagttacatgtcttgattacattaatgcattgcacattacagaatggtcctgtacttaattcactctggacttctggagagccaggaacaccacaagtttgagataaaagcataaggcagtgcaagtcgcagccgtggcagatggacgccacgacgagcagtggagcttcctcctctctacccctccaccttatcatagatgatgctcttgcccttgtttctccgttgcagcagtcgtttcagaggtcacagcgccattgctttggtggctctgctcctggagaattccccttggctgcaaacccatcaattgtcctccatgtcctcacatcatgcaatctggaacctgatgacctcgctcacttggaggc

SEQ ID NO: 95543 - DNA, 531 bp, Oryza sativa
  Clone ID: PAT_MRT4530_93727C.1
tatgagattagacgaacgagttagataaacaataatagagatatactactactagtactaccaccagggggacaatcatgctatccaaacagctgacctccaggctcaaagaggagcaagaaaaagaccaacatcagctcaatgtagctcagtgtgatcgtctcattcggaccgtatcgtgcaagcacgaggcaaatcatgcaatcaagaaagtcaatatcaatgtgttgcagttgttcgacgacatacgcttgtacgtgccgcccagctatgttgtcctaacgagcgggaagacatcgggaccgggttctaggagtggtgagcaatcgccaccctcggtgatagtggccgatcagaaagagagtgcactatcgtcgccatccaagtcatcagagacacaggcacagccagctactagtacaactggcgaagtgcttgaggttaatttcaaagacgtgctggcgcatatcatagacagtcttagtccgtctaatgtcagcagctggtttagcttgactctacgtcgacttc

SEQ ID NO: 95544 - DNA, 334 bp, Oryza sativa
  Clone ID: PAT_MRT4530_93728C.1
cgacggcgccagcgttggcggcgcgttcttgccgtggcattgccgccgctccataccaaacaaagtaacaaaaaccacccaaatctcagcaaaatatcaccaaatggcgcgcgcgacaaagggatcaggcaagaaattctatatacgccgaggagatcaagacgtgcgcggaggtggaggattatataaacacaagctgcaggggggagtggagcggtggtggcagctgcagctgcatgcgttggcatgtgcacttccgtcccgtggatctcactcgttcgtcaccaacctgccgcgaattattggcagtgagtggcttgctattatcacttga

SEQ ID NO: 95545 - DNA, 315 bp, Oryza sativa
  unsure (1)..(315): unsure at all n locations
  Clone ID: PAT_MRT4530_93729C.1
acgttggtgtacccacgctgatatatnagcttgttcccggcttcgctatatgttgtttgtggaaattgtgtgaaagccggattatacccacactttcacacacacacggaaacacacgcgctattgaccccacgtgattanacgcccccacgctctaatacgactcacctatagggaaagctggtacgccctgccacggtaccggtccggaattcccgggtcgacccacacgcgtccgccggaacgcgtgggaaatttattccccttttaaaagatattttcgtggtatgggtccaaaaaaaaaaaaaaaaaaaa

SEQ ID NO: 95546 - DNA, 2057 bp, Oryza sativa
  Clone ID: PAT_MRT4530_9372C.1
cggacaagcaatcacgcactacaggccaaaaaaattaagctaaccatgcagcagctgcaagctcgccgccggcgaggtgcaccgggtggtcgccggcgcatcacccatggcgctccactcctcgccgccgtggccgtgcttctctgcgcaagtgttcgcttcgccggcgccagcccgccgccggggccggtcaggtgcgcgtcgggcacggccaactgcaccgtgaccaacgcgtacggcgcgttcccggaccgctccacgtgccgcgccgccgccgcggcgtacccggcgtccgagcgggagctcctccgcgtcgtcgccggcgccgcggcgtccaggaccaagatgaaggtggcgacgcggtacggccacagcgtgcccaagctggcctgccccggcgacggcggcggcggcggcggcggcctcgtcatcagcaccgacgcgctgaaccgcgtggtcgccgtggacgccggaaggatggagatcacggtggagagcggcgtgacgctggcggagctgatcgacgccgcggcgggcggcggcctcgcgctgccgcactcgccgtactggctggggctcaccgtcggcgggctgctgtcgacgggcgcgcacgggagctcggtgtgggggaagggcggcgccgtgcacgagtacgtcgtcggcatgaggatcgtcacgccggcgccggcgagcgaggggcacgccaaggtccgcgtgctcgccgccggcgacccggagctggacgccgccaaggtgtcgctcggcgtgctcggggtcatttctcaggtaactctaaagctgcaaccaatgttcaagcgctcggtggcgttccggcggcgcgacgacgacgacctggcggaacgagtcgccgccttcgccggcgagcacgagttcgccgacatcctctggcttcccagccaaggcaaggccgtgtaccggatcgacgaccgcgtgcccaacaccacctccggcgatggcgccgtctacgatctcgtcgtcttccagtcgagccccacggtcgccatccaggccaataggattggcgaggacgccctcgaagcgacggcgaactccgccggcaagtgcctcgccgggtcggcgacgatagcccgcctcgccgccggcaactacggcgtcacgaggcgcggcgtgctcccgccgccgcccggcgcggcggtggtcggctaccagaaccgcatccagtcgtcggggtcctgcctctccggcgccgacgacggcctcctcaccgcctgcacgtgggacccacgcgtcaggcacaactccttcttcttccagtccggcatcagcgtgccgctctccggcgcggcggcgttcatccgcgacgtgcagcggctgcgcgacctcaacccggacgcgctctgcggcctcgaggtgtactacggcgtcctcctccgctacgtcagggcgtcgacggcgcacctcggcaagcctgaggacagcgtcgagctcgacctcacctactaccggagccgcgacccggcggcgccgcggctgcacgaggacgcggtggaggagatcgagcagatggcgctgcgcaagtacggcggcgtcccgcactggggcaagaaccggaacgccgctttcgacggcgccatcgccaagtacccgaagtccggcgagttcctcaaggtgaagggcagctacgaccccgaggggctcttctccagcgagtggagcgacaaggtgctcggcgtcgccggcgccggcggcgtgagcgtggtgagggacgggtgcgcgctggaggggctgtgcgtgtgctcggaggacgcgcactgctcgccggagaagggctacctctgccggccgggaagggtgtacaaggaggccagggtgtgccggcgtgtcgccggcgatcactagggcgcgcgccgccgccgcatcgcgcgcggcaatacgaatatggctgtattggcccattggatttcaggcccgttttgggtctagttcttgtgtaacgtggcgtggcccactacagcccaccaaaatatgtacccgattttatctcccttattaaaatcaaactatacattaataag

SEQ ID NO: 95547 - DNA, 297 bp, Oryza sativa
  Clone ID: PAT_MRT4530_93730C.1
cccacgcaagcaaacaggggtaccatactcaacgccagaagaatggtcaatgaatgaggcgtggagctggtgggcttaggagacaccgatgctaaactgtatgatcagaaattggatgctgtaactgcgagagaaacttctggagacagacgctacatcacatagctgatggagttgatgactttgactggtctcaacatgggatcaagctgctttcatgagcgaaagaatacacacactctcatgacatatgaagaagccgatcagtgctcgctgatcgtgagcagacgaagacac

SEQ ID NO: 95548 - DNA, 220 bp, Oryza sativa
  unsure (1)..(220): unsure at all n locations
  Clone ID: PAT_MRT4530_93731C.1
aattgaacacgagcaatcacgcgtcaaaaccccagcacagccaaattaaagatgaagccactaagctgggatacgctgacaacaccaccacccgnngtgagggccttttgaaccccggnaaccccgnatttccgattcgtcccggcttcaacagagacatctcgcaatgtgcagttccgttctactgggcggcgcagttcaccggagcgatatgcgcgtc

SEQ ID NO: 95549 - DNA, 435 bp, Oryza sativa
  Clone ID: PAT_MRT4530_93732C.1
ttttgttttagcttaaggtgtcaactgtcaacaacccattgcataaagctgttctacaatatataactgctacattttagtcaacctatactacagaagtatcagagtgagacatcagctgctgattatgtacacgtttcaggcatccagtacaacagtagcctgatttccagtaccagtgcagtctagatataaaaggtttgtgtgcaaaagaactcctaggttatacagaacattatccaccattcatcctgcacttgatgtctggtagcgttctccaatactgattcaaagattggggcagtactgcagccaaagtaccccacgattcaggcagaatgctcaagatctcttcctcttttcgctctttcgcagacgtcctcttcttcctttacggggcgtatcatgtatttgcagcttagcagcagcagtcac

SEQ ID NO: 95550 - DNA, 359 bp, Oryza sativa
  Clone ID: PAT_MRT4530_93733C.1
gtggttctgatgaggggattggggtttgtagctattggacctcaagaggtaaacataatttggtggtttcggctgtcgcttcgtttattagacaggttgttatctctcaagtcttacggtgctgaaaatgtcagctcttagtttaggtgctcctagacacctacgctgttcacgacgaaactcagcttgaaaggaaaagctgagaaaaaaatttgttggcttcaatgcaccccctggatgtcatgtggttaagtgaccatgtcgaaatgtgtggtgctgttttaaggtacacctgttcttattactctttgtttagtgagggaatgctacatggttgcttatgcaaaaaaaaaaaaaaa

SEQ ID NO: 95551 - DNA, 162 bp, Oryza sativa
  Clone ID: PAT_MRT4530_93734C.1
tttttgtgtttcgcgacgcaaaggagatggcggggtaggagacgctgaacacgcagacagagggcgcaaagctgtggacgatacatgaggtgtgtgagctgaggagaaggacaggcagattttggattctttgtgaggagagagaacatcaggatggggggg

SEQ ID NO: 95552 - DNA, 163 bp, Oryza sativa
  Clone ID: PAT_MRT4530_93735C.1
gcgccatcgggtctctggtcctccatgactggggcttcgggagggaggaggtggaggacatgggggagcacctagcgaagctgtgtatgccacatgctgctgccgtgacattctgcggtgtttcaggccatgtacagatcaaccgggccctggcttctgtcaa

SEQ ID NO: 95553 - DNA, 1152 bp, Oryza sativa
  Clone ID: PAT_MRT4530_93736C.1
atgattttcacagccggggcaacggcccgcctgcaaaaatggaaagaacgaacaaaaaaaaatcgcgccgggagccactgccgccgttccacgccgtcgccggcgccgccgctggcctccccactccctcctccggccatatctgggagggagggggggaggggagccgtcgccgccggcctcccccctccctcctccggccagatttgggagggaaggggaggggagccgccaccgccgtcgccactgcacgccgttgccgccgccgccggcctccccccttcctcctccggccagatctgggagggaggggggaggggagccgccgccgccgctcggaccgcgccgccgccgctccacgctgttgccgccgctgccggcgttccccctccctcctccggccagatctgggagggagggcgaaggggagccgccgccgcccggcccgcgtcgccgccgcccggacttcggccgcgcctcctcgccgctgctgccctccaccgccaccgccgccaggagcacatgccgccgcgccgctgggagccgccaccgcctccggccggcggccggggagaggggaaaggaggagaggtgaggggaggggagaggccggtgaggatagctggagaggtgaggggaggggagaggaggagaggcggtcatttggctctaagggttatgtccgtctgcgaaaataagacccctacattcggaaaaatgcttaagtactctctgcccaagcagcccatccagtgccgcagtgggtgccactataggagcaatgctgatgtggaggagatgggaggtgggggacgatcttttgcaagacacagtgggtttgcaagaaaaagtcgcctgcccaaaaccccgcaacactccttgacctcgcctcctcaacaagatccagtggccaagaggagggctagaaacaacatacccagatctaaagcaacggttgccgcctcgatcgatctagctgtcaccacccagatcttgcttaaagataatgaccgcagcggcattaaggctcatattgtcagcagcggcgatacaaggtcaaatccacgtcggtggcacagccgcatagggacggtgcgagagctcatcgtcaatgcaaatctggatctgcggtggttcacgcatgctcgttga

SEQ ID NO: 95554 - DNA, 227 bp, Oryza sativa
  Clone ID: PAT_MRT4530_93737C.1
gtctcgtgtgctgtcttatcttgtctctccgatggtggcgggcgtggaattcgatctgaaccaagcaaaaatgacgggcggatacagaggtgggtccttggttggatcctttgccattgcttacctgtgtgacacatttgcttatgacacgaaggcatttgtaggtctcattccaaagactgtcttttacaaagagtgagggcaagacactgacaccaagatgcatg

SEQ ID NO: 95555 - DNA, 772 bp, Oryza sativa
  Clone ID: PAT_MRT4530_93738C.1
gaattttgcccccaatcgccgggaacgcccgcgccaagtgcggccaaataccatgggcgggggccgcctataccgccgccgttccgacctcccccgtggccggctccctctcctctcctataaaatggaaccccctcgccccgttctctcgttttagccccctcccgcgatctcccgtggtccctagccacctccccgccgtcgcccttctctttcccccgcgccgggcgcttccagccgcctctccctcctcgaccgtgcgccgcccggccgtcccgtcgccttccccggcgtcgcaacagcttcttctcccccggcctgccctccgtttcgcgcggtgaccgccggaggcgcgttcccgccgtcgtccagtggcgttgccgccactgtaccacctcaagccgcccttgccgcgccgctcagaccaccgtcgtgccgcgccggcctctccatcctcctcgccggaatttccccggtcgaccgcgtcgccgtcttctccggcatcgcagcggcaagcatccccgtcgtcgtcttcgtcctcggctccgcgtcgtcaagccttgtgccggccgcgtctcgccttcgtccaaggatcaccgccgaagtcgttccctcgccgttcgcctccatcgtccccgagctgtctccgccgcgcccgttcgtcgttgtcgttcccatgcctcgtcgcgtggtggtaaggatccctctccctcgctgccccgtcctcgtcctttcggtgccgcccatgcccgttgtgcggttgtcggccccg

SEQ ID NO: 95556 - DNA, 454 bp, Oryza sativa
  unsure (1)..(454): unsure at all n locations
  Clone ID: PAT_MRT4530_93739C.1
nagnacantnntntcctctnccccgtgntccccatttntncttctttacccacaaatnnntctntctanctcggaaaggattcgggagacttgaagagaggagctcaaagcgggacaggagagagagtctaatnatagaagtacacgaagaaaaatggtgcctggaccanagtgagaccatctcataatgctaatncttttgcgncaaatggangatcatcgagcccatactacgnccaactatgatttttnctctggagattatcagatgangcagttaggtcataagatgtatggtcaagattccccgtcaagcgatnctggtcagtcacaccaagaagaatctgccatgaatgttagcagtccaaatnagcgacatacctcaacacantctgacaatgatgatgggcatcagatgccagntcagggcaaacaaaggcagtatcatcggtng

SEQ ID NO: 95557 - DNA, 162 bp, Oryza sativa
  Clone ID: PAT_MRT4530_9373C.1
atgatccaactcaagaaaaagatcatgagatgctggggacctgatgccatggcaatcaaagacatgggggtgaacctgagcaccagcagggcgacgaccaacgggaaggacggcgcgatgggtgagattttgttggcgctgtctcctctccccatcccctga

SEQ ID NO: 95558 - DNA, 952 bp, Oryza sativa
  Clone ID: PAT_MRT4530_93740C.1
ctagccacctccccaccgtggcccttctctttcccccgcgccgggcgcctccagccgcctctccctcctcgaccgtgcgccggccggccgtgccgtcgccttccccggcctcgtagccgcctcctctcccatggcctgccctccgtttcgcgcggtgaccgccggaggcgcgttcccgccgtcgtccagtggcgttgccgccattataccacctccagccgcctgtgccgcctcgccggtgcagcggctgtcgtcgtcgccatcctccctcgacatcgccgcatcgccctccaccccggcctgccctcggtttcgccggaacgccgtcgtgccgcgccggcctttccatccgcctcgctggagttccttcggcaaccccttccgccgtgcccgtgtgccggccgacgtcgccgtctccacctccggcatcgcagcggcaagcggcgcgttccacgtcgtccccgtctccgtgcagctgccgccggctgccctcgtcgcctcctcgccggccccgggcgtcgtcgtcgtcgtcctctcgtcgttcccggtcgtcgtggcgttcgtccctccgtcgagccattctcgtccgtcgtccgcgttcgtcaagcgagccgctgcagccccgtcgtcgtcttcgtcctcggcttcgcatcgtcaagcgttgcgccggccgcgtctcgccttcgtccaaggatcgccgccgaagtcattccctcaccgtccgtctccgcctcgcccgttcgtcgttgtcgttcccacgcctcgtcgcgtggtggtaaggatccctctccctcgctgccccgtcctcgtcctttcggtgtcgcccatgcctattgtgcggttgtcggccccgcttctgtcgttccggaggttctcgaagcgtggtttgcggtcgtcgccgagggtttggaaggccgttctctctgagcaaggcaagtcacatcatccttga

SEQ ID NO: 95559 - DNA, 390 bp, Oryza sativa
  Clone ID: PAT_MRT4530_93741C.1
atggtggcatcgggactcgggcggaaccagctgaggcctaggctgggtgtcgagcgtgatcgacgacgtgctctccccgcactactcatccttggacctctccgagactccaaccgcctcctcgtcgcccgccatgagctccgcaacgccagatctaccgttgtttccatcgacgttggctccaccgccgacaccgtcgaagctcgctgcggccatggatggatggacgaccgccgttggcatcgccgccgctgctcccgcacgagatctcgcccacttggctccgggaagaaatgggagaaagaaggagccgctgccgcctgccatggttgggtcgctggcaagctccctctcctccgagctcgccggcatgactccgagaagaaatag

SEQ ID NO: 95560 - DNA, 1284 bp, Oryza sativa
  Clone ID: PAT_MRT4530_93742C.1
atggaagagaagaagcagcagcagcagcgtccacagagagggcgcgatggcatcctgcagtatccgcaccttttcttcgcggcgctggcgctggccctgctcctcaccgacccgttccacctcggcccgctcgccggggtggactaccggccggtgaggcacgagctggcgccgtaccgcgaggtgatggcgcggtggccgcgggacaacggcagccggctcaggcacggcaggctggagttcgtcggagaggtgttcgggccggagtccatcgagttcgaccgccacggccgcggcccctacgccggcctcgccgacggccgcgtcgtgcggtggatgggggaggacgccgggtgggagacgttcgccgtcatgagccctgactggtcggagaaagtttgtgccaatggggtggagtcgacgacgaagaagcagcacgagatggagcgacggtgcggccggcctctcgggctgaggtttcacggcgagaccggcgagctctacgtcgccgacgcgtactacgggctcatgtccgtcggtccgaacggcggggtggcgacctctctcgcgagagaagtcggcgggagcccggtcaacttcgcgaacgacctcgacatccaccgcaacggctccgtgttcttcaccgacacgagcacgagatacaacagaaaggatcatctgaacgttctgctagaaggtgaaggcacagggaggctgctcagatatgacccagaaaccaaagctgcccatgtcgtgctgagcgggctggtcttcccgaatggcgtgcagatttctgacgaccagcagttcctcctcttctccgaaacaacaaactgcaggataatgcggtactggctggaagggccaagagccgggcaggtggaggtgttcgccgacctgccggggttcccggacaacgtgcgactgagcagcggcggcggcggcggacggttctgggtggcgatcgactgctgcaggacggcggcgcaggaggtgttcgccaagcggccgtggctgcgaacgctctacttcaagctgcccctgacgatgcggacgctggggaagatggtcagcatgcggatgcacaccctcgtcgcgctcctcgacggcgaaggggacgtcgtcgaggtgctcgaggaccggggcggcgaggtgatgcggctggtgagcgaggtgagggaggtggggcgcaagctgtggatcggcaccgtggctcataaccacatcgccacgatcccttacccgttggaagagcagagtagcagcaacgtgcttggtgattga

SEQ ID NO: 95561 - DNA, 816 bp, Oryza sativa
  Clone ID: PAT_MRT4530_93743C.1
atggaggcggccaccccgacccgccctccccacgccgccccgtcctcctccccgtccccgtcgccggcgtcgctgcgccagtggcggccggcggcgcagcgcaacctgcggaaccagtggtcgcgcctgctcgccgccaaggcccggtacatgccgggcatggatttgggggtgctcaaggacatgcccgggatccgcgagaaggcgagcggtaagcttgcgcgcagggaggagcaatgccagagcatgcttctatcggcctatagggagatggtccttgctacggccgagttggttagagcttctcactctatgcgttgtttttccaaagtagccgcgaatagtccgttgatacggtttactgagcgccaagatgatatgaatgattcgggggacggaggaggatcccctgtattcaaatggttctccgtattagaattcgagaatcttgctcaagaacttgtcgatatgttcatttcagaactgcaattgaagagattgcttgtcttggaactcctctcggtaaccttcaaggaaggtgtacaacatgacgcatcattagaatggtccaatgagctatttgatggggagttcaatgagtttcagagtattggccttctgtcaggagatagctacgcactgcccaaaaattggagtgctggtgtctcaaaggcatggcaacctgatcaaaccccatcccatgaggttttacaggtttatttgacttcttggcttgctaatgtgaacatcaagacaagcagaattgatgaaatatttgagcttgtcggggaggagatgcagataaaattgtcttga

SEQ ID NO: 95562 - DNA, 303 bp, Oryza sativa
  Clone ID: PAT_MRT4530_93744C.1
atgaatcttttgggtctaattaagccatcattagcacattgcccatatcgccccacaagcaaggaggtagtcaatgacgaagtgactacgggtagcaatgatgagcaactggcgcgctctccgcgtcggccctgccgtgctaggagtagccgagccaccggcaacgcaccagctggtgagcatcaaggacgctacatacgacgagtcgctcgtgaagggtgcaccacccacccagcgacgtcatcatcgcgtacctacgtacccaggctaagcggcatcagctacgcaaggtgcttgacacag

SEQ ID NO: 95563 - DNA, 233 bp, Oryza sativa
  Clone ID: PAT_MRT4530_93745C.1
cctttgggctggaggtgtccatcactgtgaatgattgtattggtcaatccgctgtgggatttatgagggccattgtcttaaacaaaccagtatcaggaacagcactggtactggatgagatcatcaatcatgtccaatctcttcaaaggcaagttgagtacttgtcaatgaggctcgcagctgtaaatccgagggtcgactttggtgggctagacaacttcttgactacggag

SEQ ID NO: 95564 - DNA, 2523 bp, Oryza sativa
  Clone ID: PAT_MRT4530_93746C.1
tacgtacgtgcgtctcgttacacgttatggcggcgtcgctggcaatcgttgccgtggtcgtcgcgctgtgcgtggcggctgccgcgtcggccgagacggcgacgtacatcgtgcacatggacaagtcggcaatgccgagcggcggcggcggcgggaacgggtcgaccagcctggagagctggtacgcggctacgctccgggcggcggcgccgggcgccagaatgatctacgtgtaccgcaacgccatgagcgggttcgccgcgaggctgtccgccgagcagcacgcgaggctgagccggtccccgggtttcctctcgtcctacctcgacgcccccgtgacgcggcgcgacaccacgcacacgccggagttcctcggggtgagcggcgcggggggcctgtgggagacggccagctacggcgacggcgtcatcgtcggcgtggtggacaccggggtgtggcccgagagcgggagctaccgcgacgacgggctcccgccggtgcccgcgcggtggaagggctactgcgagtccggcacgcggttcgacggcgccaaggcgtgcaaccggaagctcatcggggcgcgcaagttcagcgcgggcctcgccgccgcgctggggaggcggaacatcacgatcgccgtgaactcgccgcgcgacacggacggccacggcacgcacacctcgtcgacggccgccggctcgcccgtcccgggggcgtcctacttcggctacgctcccggggtggcacggggcatggcgccacgcgccagggtggccgtgtacaaggtcctgttcgacgagggcgggtacacgacggacatcgtcgccgccatagaccaagccatcgcagacggcgtcgacgtgctctccatctcgctgggcctcaacaaccgcccgctccacaccgaccctgtggccatcggctcgttcgccgcaatgcagcacggcatcttcgtgtccacctcagccggcaacgacggcccgggcctctccgtcctccacaacggcgcgccgtgggcactgaccgtcgccgctggcaccgtggacagggagttctccggcatcgtcgagctcggcgatggcaccaccgtcatcggcgaatcgctgtacgccggctcgccgccgatcacccagagcactccactcgtgtacctcgactcctgcgacaacttcaccgccatcagacgaaaccgcgacaagatcgtgctgtgtgatgcacaagcttcctcctttgctctgcaggttgcagtgcagttcgtgcaagatgccaacgcggccggcgggctcttcttgaccaacgacccgttcaggctgctgttcgagcagttcacgttcccgggcgccctgctgagcccgcacgacgggccggcgatactgcggtacatccagaggagcggcgctccgacggccaagatcgcgttccgggcgacgctgctgaacacgaagccggcgccggaggcggcggcgtactcgtcgcgcgggccggcggtgagctgcccgacggtgctcaagccggacatcatggcgcctggctcgctcgtgctcgcgtcgtgggcggagagcgtggccgtggtcgggaacatgacgtcgccgttcaacatcatctccgggacgtcgatggcgacgccgcacgcggcgggcgtcgcggcgctgctcagggcggtgcacccggagtggagcccggcggccatccggtcggcgatgatgacgacggccgcgacgctggacaacaccggcaggtccatcaacgacatggcccgggcgggccacgccgcgacgccgctggcgatggggtccggccacatcgacccgaacagggcggcggacccgggcctcgtctacgacgccgtcccgggtgactacgtcgagctcatgtgcgccatggggtacaacctctcggacatcagggccgtgacgcagtggtcgacctacgccgtgaactgcagcggcgcgtcgtcgccggacctcaactacccgtcgttcatcgcctacttcgacaggcgcagcgccgccgccgccgccgcggagaccaagacgttcgtcagggtggtcaccaacgtcggcgccggcgcggcgagctacagggcgaaggtgaagggcaacctgggtgggctcgccgtcagcgtcacgccgagcaggctggtgttcgggaagaagggcgagacgcagaagtacacgctggtgttgcgcggcaagatcaagggcgcggacaaggtgctgcacgggtcgctgacgtgggtggatgacgccggcaagtacacggtgaggagtccgattgtggcaacgactttgagctcaacacggctgtagactcttcttttcactcttgtgtactgtagcgtgcaagttgattcacatatctgaagttctgaacatgttgttcgtctctagctgttgggcaaataatgcttttggtggttagttagtgcagtccgtgagttttggtatatgctgctcgaatgccccagtaattggcataagtatttatgttcttgcttttgttcaaaaaaaaaaaaaaaaaaaa

SEQ ID NO: 95565 - DNA, 2502 bp, Oryza sativa
  Clone ID: PAT_MRT4530_93747C.1
atgccaccatggtgggggaagtctttctcaaaagatgctaagaaaaccacaaaagaaaaccgcatcgatacatttcatcggttgatgagtccaaataataataagggaagcacgaagtcgaaacggagttgtagacgtggcaatgattcatctgttgaaaaaagctgccgatctaccacagtgtcacgtcctacttcaccgtcaaaagaagtttctcgctgccaaagcttttcagctgatagaccacatgaccatcacctccctattcctccagtacctcctccaagcacccggactatttcagatatcactaaatcaaagcctatatttaataatcgtggcaagcctcccctgcttctaccaccccctaaacccaaccggcctccgacaaggcatggaaatagtgaggttgtttccgatgtaatggttgcttctgcctctggtaactgttctaataatgatggtgaaggggattctcagcttgagagtactgttggattggatgccgaaaatgcaacacttgttgctttaaagatcaggtcaagtaatgcgcgcaaagaatgtcctggacctattacggcaaagaatatgaaggagatacacagaccagctaatcaagtacatggtagccatatattatccacatcaccaaggggtgtcgcagctgacagttaccaatccaatttacaaaatccccgcccattagttctggatagtgctcccaatagtttgatgtcaagtccttctagaagtccaagaagaatatgtcctgatcatattccaacttcggccttttgggcagtgaaacctcacacagatgtaacttttgttggatctggtcaatgttccagtccaggttcagggcaaacatctgggcataattctgtgggtggtgatatgctagcccagctcttttggcagcccagcagaagtagcccagagtgttcaccaattccaagtccaagaatgacaagtcctggccctagttcgagggtgcatagtggaagtgtttcaccattgcatccaaggtctggagggatggcccctgaatctccaacaaaccgtcatgatgatgggaagaagaagcaaactcacaaacttcccctaccaccactgagcatctctcacagttcatttcatccaaataactccactccaactagtcctatttcagtacctcgcagccctggtagaactgagaatccaccaagtcctgggtcacgatggaagaaggggaagctaattggccgtggaacatttggtcatgtatatgttggctttaacagtgatagtggtgaaatgtgtgcgatgaaagaagttaccctattcttggatgatcctaaatcaaaggaaagtgcaaagcagttggggcaggaaatatcactattgagccgcctacagcatccaaatatcgtacaatactatggatcagaaacggttgatgataagctttatatatacttggagtatgtatctggtggatctatccataaacttctacaagagtatggacagcttggtgaacaagcaatacgcagctacacacagcagatactttcagggttggcttatttgcatgcgaagaatacagtccatagggatattaaaggtgcaaatatactagtagatcctagtggtcgtgttaagcttgcagattttggaatggcaaaacatatcaatgggcagcagtgtcctttctcctttaagggtagtccatattggatggctccagaggttataaaaaactcaaatgggtgcaacctagctgttgacatatggagtttgggatgcactgtcctggagatggctacatcgaaaccgccatggagccagtatgaagggattgctgcaatgttcaagatcggaaatagcaaggaacttccaccaataccagatcacctttcagagccaggcaaggacttcatcagaaagtgcctgcaacgtgatccttctcaacgtcccactgcaatggagcttttgcagcacccatttgttcaaaaagcagtatcactagagaaatctgttctttctgaaccattggaacatttggctgttatatcttgtagatcgagcgccaagttttcagatggctgcgcatacaagaaatatttcctcattgggattggagggtcagacaatttaccagagaagaggtgcaaaattttcttcaaaacacagcaatcaacctacagcaacgagggatttgcaatcccatcaagaagcccggatgatctctttgccagccggcctacagatcctgatcttgggcaatttattcgagtgcatcaagtctctcaggggcttcaggagagggtggtatctgaagctgacattctaagccctcagtttggaaagagacttggaaatgtttttgatttgcgtgataagctgtcaccatctgaacgtttcacacatcatgcctttgtggatcatgtgaaactaaatccttcattagacttgacgtctggatctccacaccttggactcaagcatggtaactaa

SEQ ID NO: 95566 - DNA, 1056 bp, Oryza sativa
  Clone ID: PAT_MRT4530_93748C.1
atggctcccacaccagaaatttacccttccgccctcggcctctttgctgggaggaggtgggaggcccacggtggtagggaggagatggaggcggcaaggtggtggaggagtcgacggatctacgacggcgacgacctgggaacggcgaagggagaaggacgtgccacgcgcgccaacgagttggggaagaggcctactggatttgaatgcgggatgatggccgcaatgacggagctgtgtgcgtcggtggaggacgacgtctcggagtatacctccaacaccaacgtgttcctgccgccgccgtccctctgtgacgacgagctcagccacaacctgctccacttcctccccttctcctcattgccgccgccgtctctctgcgagcacgagctccgccacaacctgctccccttctaccaccgctggccctctcctccgtctctgccgtcagccaacgctttgaaagacggagggagggtgactagcgcgccgatggtcaccagcggcgacgggcggagggagagggttgacggagccgaaggcagcgcggtggggcggagtcaacgacggcgcattggggaaagagagggagagagatgcgggcaaatggagagaggcaagggagcgacaaaggaggagtgcgaagaagaccgatcgtctcgtcataggggtaggataggtaacacaacacccgtggctttgtgggttgggacttcccgtatatcaggcgctaactcttctccctcctccctctctcgtttgcactgccacaacgacgttcatgtcgaaggacagaaggactttgtcgacaatctgctcgacaccgccgttaagtgcatgaggacggcatctctaatctacactctttccactggcgaggagccagaagatgagcgtcccatcctggacatggcacagttcaggcaagaaatggaggtgctcgatgacggcacagccatgccgatggactcagcgccaaattcgtctcttgatgtggacaagatcttgaaagtgcttgatgtcaactgcttgaccgaggatggagtgccactatag

SEQ ID NO: 95567 - DNA, 486 bp, Oryza sativa
  Clone ID: PAT_MRT4530_93749C.1
cccacgcgtccgcccacgcgtccgaggacgcgtgggttggaacatttggctgttatatcttgtagatcgagcgccaagatggctgcgcatacaagaaatatttcctcattgggattggagggtcagacaatttaccagagaagaggtgcaaaattttcttcaaaacacagtgatatccgtatacgaagcaatatatcttgtccagtttctccatgtggaagtcctttgctaaaatcaaggtccccacaacattccaatggcagaatgtcaccttctcctatttcaagccccagaactacttcaggcacctccacgcctctgtctggtggtaatggtgctattccttttaaccatctgaagcaatcaacctacagcaacgagggatttgcaatcccatcaagaagcccggatgatctctttgccagccggcctacagatcctgatcttgggcaatttattcgagtgcatcaagtctctcaagggctt

SEQ ID NO: 95568 - DNA, 629 bp, Oryza sativa
  Clone ID: PAT_MRT4530_9374C.1
ctttgtttttttttttttttttttttttttttttttttttttttttttttttttttttttttttttttttttttttttttttttttttgttttttaattttcttttttttaaggaactaaaaaaccgaacaaacaacaaaaaccaaagaaacaaccaaaaggggggggggaaggaaaagaaaaaaaaaaggaaaaaaaaaaaaacccaaaaaaaaaaaaaaaaaaccggaaaacaaaaaaaaaaaaaaaaaaaaaaaaaaaaacaaaccaaacaagccaaaaaaaaaacaaaaaaaaaaaaagcaaaaccaaaaaaaaaaaaaaaaaaaaaaaaaaacacccaaaaaacccccgcaggaaaaaaaagggaaaaaaaataagcgacaagcgtaaccacaaaaaccaccaaaaaatttgggcccatgaaaaagcggaccaaaccaagccacgtggcccgccggcaaagacccccacgtggcccaaaaggggaacaccggagcgggcagatgccggagaacccggggaagcggggcacggtacaaccgggaggaggcggagggcgtcgtcgacgaccacaaccgcgagggctcggcggaacaaacaaaggcggcggggggggagacgccccc

SEQ ID NO: 95569 - DNA, 149 bp, Oryza sativa
  Clone ID: PAT_MRT4530_93750C.1
gatgcactgccacacttacgctagcttgcattctagttgggcggccttcctttttttttttctacgaaacggattaaaaggcttccaaaccatgtggaataacaaatagatgaacagagaacaaaaacctacccagtaccagaagacag

SEQ ID NO: 95570 - DNA, 455 bp, Oryza sativa
  Clone ID: PAT_MRT4530_93751C.1
cccccgcccaaaaaaaaaaaaaaataggggggaaaccaaaaaaacaaaaacaaaactaactcaaaataacaaccagttgaccaaagcgaaaaaaaaaataatataaggcgaccggaaaggaaaagtcccggggaaaacccaaatagcatcgaaaacccccacaaaaaaaaaacccaacttttggactgtttgccggaagggttggaagctgaaaaaaagccctaacaatgttgggcgaaggaacccccccccccccaatggaattgccccaagggaaatttaaagcggccccctggagttttttcggaaggccggaaaagaacttccccggggggaaggggggctcaagttcaatttccgggggccacctaaacccgtcgggggaaaaggggccggccccgaacggcctccccccctaaacttccccaatgaaaaacatttgggcaccaaggggg

SEQ ID NO: 95571 - DNA, 499 bp, Oryza sativa
  Clone ID: PAT_MRT4530_93752C.1
ggagaataccctatcaccatttgcaggtaagttttttatggagccgtttaatattgcaaattcactttttatgtttcgctgtgcatagatatataatgagaacagattccatattccgaatgcttatttttaccatgcttccagctttttagtataattctgtgtattagttatatatattttcctgctaattaaatgtgcttaaacactaggataccttatttaaggctcctaaacctgttacccgtaggccataccataataaaaaaaaaatgccatggcgctccaatgtacatttttaaacaatacaattttctttagttaactcctttggtgctgagaattgtgtattcttccaccaagcttctgatttatgccttgcatgctttccaggactagcattccatccactggatgggattttgcaagccataccgcatgtgtttgcgctctaccttatcccaacacactttaggacacacattgctctcttgttcat

SEQ ID NO: 95572 - DNA, 2315 bp, Oryza sativa
  Clone ID: PAT_MRT4530_93753C.1
atgcagaggcaggggcggcacctggagcggtcggggtcgaagcgggcgctcgacgcgggcggcggcggcggggatgacgacgaccgtgcgcccaagcggccgcgcgtcccggccctcgcgagtgtcattgtagaagccctcaaagtagacagtttacaaaagctttgttcatcacttgagccgattctgcgaagagttgttagtgaagaagtagagcgtgctttagccaaattgggtccagctgcaactcctgctagaattcaaggaaggagctctcccaaaagaattgaaggtcctagtggtatcaatctccagcttcagtttaggtctaggctatcactaccactatttacaggaggaaaagtggaaggtgagcagggagcagcgatacatgttgtgctgctggatgcaaacactggacgtgtagtcacttcaggacccgagtcgtttgcaaaactggatgtccttgtgcttgaaggtgattttaataaagagcaagatgaagattggactgaagaggaatttgagaaccatattgtgaaagaacgtgaagggaagagacctcttttaactggtgacctccaggtgactctcaaagaaggtgtagggacgattggagagcttatcttcactgacaattcaagctggataagaagcaggaaatttagacttggtttgcgagtctcttcaggattttgtgaaggtgtccgtgttaaggaggcgaaaacggaggcttttactgttaaagatcacagaggagaattgtacaagaaacactaccctcctgccctaaaggatgatgtttggagattggagaagattggaaaggatggtgcatttcacaagaagctaaactcaaatggaatatacacagttgaacattttcttcaacttcttgttagagatcaacagaagctaagaactattcttggcagtaacatgtcaaataagatgtgggaaagtcttgttgagcatgcgaagacatgtgttttgagtggcaaacactatatatattactcaagcgatgcaagaagtgttggagcaatattcaataacatatatgagttcactggtttgattgctgatgatcagtacatttcagctgaaaacctttctgaaaaccagaggttgtttgcggatacactagtgaaacaagcatatgatgactggatcaacgttgtcgaatatgatggcaaggaactgttgagattcaagcagaaaaagaaatctgtcacgacaagaagtgatacagcaaaggcttcaactagctacccttcttcatatggttcgacacactcacataaacaattgacaggcggacctgtgaatattgagcaatcatctatgagcagtatgagtgaagatggaactagaaacatgtccaacgggagccaagcagcaagatatgcagccaatcctcaggacatctcacaaagtatcaccatgccatatgacatgagttcattgagacccgaagaacagttcgctggttcttcaatccaaactcaagcttcaagaagctcaaacatgctagccttgggaccaacacagcagcaaaactttgaattctcagcacttggtcagtccatgcagccttctcccctcaatccttttgatgactggtcccggttgcaggagaaccgtggaggcgttgacgactacttgatggaggagatacgggtgaggagccacgagatactagagaacgaagaggacatgcaacaaatgctgcgcatcctgagcatgggtggatcatcagccaacatgaatcatggagatggattctcccccttcatgccgtctcctgcaccagccttcaactacgaggatgaccgggctcgcccgtctggtaaggctgttgttgggtggcttaagattaaggccgctatgcgatggggcatctttgtgaggaagaaagctgccgagagaagagctcagcttgtcgagctggaggactagcctagcggaggtcgtccggagtgttcatcttatggaccatgaggcctggccagtctggacagatggtaacacgcctctcttggctggtcttgtacaatagtactgttgatatttatgtttactgatgaaagaaatgggctcagcgatgcaccaggccaggatggtccacatgacgagcttattagtatgaaatggacacccgttgtttgtatagctgtttgatggacattatgtaagttttgctagtccgccctgttgtattacatgcaatccttgatccgaactgtgcaaatttatttgttggaggagttgggaacagcaaacgaaccgcgagcaagcgacgacaaagctcttct

SEQ ID NO: 95573 - DNA, 310 bp, Oryza sativa
  Clone ID: PAT_MRT4530_93754C.1
gcgcgagctcgccagctttgccccttccttctctggcacgagctcggcggcggggagcagcggtggcagcggatctagcgccggggggagcagcagtggcgccggcgatgtgctgtcgacgacgcgcgcctgctggcccatggggacgacggtggggacgaggaagacggcgaagcggcacgagtctggcctccgtaccggcggtgacggatctggcggcagccaggggcggagccaaacgaaaatgaagggggcggggagcagcgacaacgaccacagcggcagcggcggatctgacaaggcgacgtga

SEQ ID NO: 95574 - DNA, 1920 bp, Oryza sativa
  Clone ID: PAT_MRT4530_93755C.1
gtcgccccatcgggggcaagagagaggtacgcatccgatcgccggcgacgaccgaatctgtgccgggcggcaggaaggagagcggcgatggcagcgatggcatccctgtaccggcgtgtccttccttcgccgccggctgtggagttcgcgtcggaggaggggaagcggctgttctcggaggccctggagagcgggaccttgcaaggcttcttcaacctcatctccgtgttccagacgcagtcggagccggccttctgcggcctcgcctccctctccgtcgtcctcaacgccctcgccatcgacccgggccgccaatggaagggcccctggaggtggttcgacgagtccatgcttgactgctgcgagcccctcgacaaggtgaaggcggagggcatcaccttcgccaaactcgcctgcctcgcgcactgcgccggtgccaatgtccgctccttccgcgccgaccagtccaccatccacgacttccgccaccatctcgtccgctctgcctcctcccaggactgccatctcatcgcatcctaccacaggaagcctttcaaacagactggaaccggccatttctctccaatcggcggctaccatgccggccaagacatggcgcttatcctggatgtcgcccgcttcaaataccctcctcactgggttccactcccactgctttgggaagccatgaatacaactgatgacgcaactggtctactcagggggttcatgcttatctcaaggcacactgcagctccttcattgctctacacagtgagttgcagagatgaaagctggaaaagcatggcgaagtattgcatggaagatgtacccgatcttcttaaggatgagagtgtagacaatgttccagcacttctgtcccgcttagtgaaatcccttcctgccaatgctggaaatttgatcaaatgggttattgaagttaggagacaagaggaaggaggatcaggattaagcaaagaggaggaagaaaggcttattttgaaggaaatgatactacagcaagtccgtgatactgagctttttagattagtccgtgaactgcaattcactaagcagccatgttgtagttgctcatattcaagtgatgatgattcctttacccggattgcagcctctgtgtgctgtcaaggggccgcattgctaacagggaatctttcatcaaaagatgggttctgctgcagagaaacttgcttcaaatgtgtacaagtggatggtgatgggcctaagactgtcgttacaggcacagcggtttcaggagtcaatgaacaaagtgttgatatgcttctaccgatatccacattggaaacaagcgtgtgcaattcaaattcaagcaacgaggttgtcaaatatccatctagaacagatattttaactgttctattgctggctttacatcctagcacatgggtgggcattaaagacgagaggctgaaagctgaattccagagtcttatttcaacagacattcttcatgatgatcttaaacgagagatattgcatctaagacggcaactccattatgtgaggtcctgtaaagaggaggaatatggagatcctgtgccacaatcccattaacaatgatgcaaatcgcgcagttggttaccctggagatgcaaaaaaaaggggttagaggaggaactacatactccgtattacctttgtttcgagtgaggacttctcatttttgagacacctgacctgagacggatccgtgtagacatgttcatgttcatcacctgtggtcgtttctcttgttagtgacaactgacaactagcggggaggcacacgctaattgtgcggctggtgtccttgcaaaagtttctcataataacgcaatggcagatatattttcacactttattattaaataaaaatattgaaaagggcaattaaggagt

SEQ ID NO: 95575 - DNA, 1816 bp, Oryza sativa
  Clone ID: PAT_MRT4530_93756C.1
atgtcagcctcactcctctcttcttccctttcccctctctctctctctctctccttcccgggtagcggacggcgcgggtgggcggcagagcaggcgagctcctgcggcggcggcgggcgtggtccgcgccgccccccgaccggagtgccgccggtccgcgtgaaggcgaggagagggagagccgagaggggaaagggaatgacgaggaggaggacctccttgtcgggtccgcccggggcgccgccgccttcttctctggtgcagtgctcgctgctggggagccccccggaatccgacgccatcaacgccgccatccgtgtcgccgcggcggagagccgagagggggaagggaatgacaaggaggaggacttccttgtcgggtccgcccgggcggccgcgtggggtggtgacatgggcggcggcggcgacgaaaggggagagtgggaggcggcggtgagggaggaggtgggggtcggcgggtggtgggacgatcccgacggcgacgagctccgcgccaggttcaaggccttcacggggcagcgccgcgactggccccagcccaagctcctcttctggaagggcctcctcctccgcgtcgcgcgccgcctccgcctctgctccgcccccgcgcgcctcgtgctgggtgtttggttcgcgcgccctggtggcctcacgccgctgtgcttgccgcaggttctggaagagatgcgtgccgatggggagattctgctcaaatcggagctaatcgatccgactacagggagcttgtatcagctagtcaggaggatgagccagatggctgtcatctcaaagcagccgattgcgcaggacgacatcctcgtgtttaaatcgttgattgaggaacgggctgctgaaattgttgatcagctgaggaactctcattggacgtcaacgtgcattgttactattagtaaattcaatgccttcttccatgggcaggaggattctcatgttgcattatgttacttgacacaatgtgggaaagcacggtatattgttgataggaggcaagattctgttgagggtgtgaagttttcgctcatggctgcacaagttcctgctgtctcaaagcttgaccacaacacattgcacttaattttgacggaagaaaagttgcagcagcagcttgatgtacttgatcgccaatggcaaatttcaagaaggagggcattggtatccttcaaatctggggataaacagtcagcttatcgatatgtgcggcagtctaagttgttctcagaaagcaggaaaagattcacaccactgctggagagggttgaagaagttataagcctaattgctagtgctgaaacaactaagaaggttaatgaggcaatcaaagtcagtattcaggcgatgaatgagcatcatgtgagcgtagaggaggttaacgagcacctaaaggaggttgatgaccttgttgcaacacaaagagaaattgatgctgccttaggatcagtaatactccagtcaatggattctgaagaaaatatcgaggaagaattcatgaagctggaagcagaattgcaggatgagtttcctcacgttcaagaagatccagtttcacatgccaatgaagaatttcctaatgatgaagatgttgattcattgagcaataacctttcaaacattaaactcgaggccatctagattttcacttattaagtgctacttgtacatatcgtgatctagtcacatcttttgccccatcagtatgtgttgtatttcttatgacaatgttcctaccaaaacagaaattctctattgcagaaatattccttacagggttgccatg

SEQ ID NO: 95576 - DNA, 174 bp, Oryza sativa
  Clone ID: PAT_MRT4530_93757C.1
acgttcttacatgttctgctcgtcgtcgcggagcgcgagctagggtttctcgactcgccctagccaatccggtcagacatgtctaagcaaggcaggaaggccaagccccttaaggctcccaaggcacatgaagaggagtccgacaagagtgatctcgcgtatctgcagaagacg

SEQ ID NO: 95577 - DNA, 1223 bp, Oryza sativa
  Clone ID: PAT_MRT4530_93758C.1
atcttccgggtgacatcgtgacgcagcggttcaaggaagtcttgatcagtgctgcctcaacggccgtcgaaccaccggccccgctctgcgacaagtcggcatccgagaaggtggccgccatcaatgccttgccattgacagatgttgtcggtccccttgttgaccatcatgcctccgccttgcttaaggacaaggtcgccaacatttcctccgttcccgtcattgcaggaggcagcgggaccaagcgaaagccctgggcgaggtcaagcgctatcgccagttctcggcagaagtctgccagctttgaggacttaggcagcctcgctcctcctccgaagagaagggtgttaaagttgcccaccggcaagtcgcccctgttgtcgccgagtccgtggggcctaccgccgcccgaagtggccaattggtctaatatggtggtcgaatgccaccgccttcttgagagcatttctcgggcggtggaggcccagatggaccgcgtggtggcccgcgcgacggtagcggacgggagggtggctcagccagaggcgcgactcgaggttgcccatgaagaccttcagaagatgaaggaaatcatggccggcaatgagatgcaacgccagggcctagagaagaagatgaacgatacacaagacatcctcttttccctccgcgactccctccgcaagagcttaacaagcctgcaccaactagcgttgtcgtgcggcgtggagtcttctatcccgacgcaccccgacgagacatcgctgacatcggatggggaggtgggtatgagctctggtccgcctaacctgggtgtggtcgggctccctagcgagaactcggatctcgatgggatcattgctgaacaagataggcgtattgcatactggaagacgaagttcgaggtcgcggaactcgagcggtcgctcgtggtagtgaagcaggagcaggccgtagaggctctccgaggctgcgaggtttggctgaagtcgtatcttaagagctgctgcagtgccatggccgacgtttgtcgtcagctaaaggttgatcgcgcggagcccgaggagagtacggcgggctacttgtccttgatgaggggggcatgtgctcagcttgagggcataggacagcggatcgacatcaacctcaaggaggaatgtcgtcacgccagccattacgatggaagccacgtcctcgcttgcatccaagatcgccgctcgtag

SEQ ID NO: 95578 - DNA, 269 bp, Oryza sativa
  Clone ID: PAT_MRT4530_93759C.1
atgggtatagttgaagggaaccaaaaggaaaaagtacaccgaaggtccctcaacttgtcatcgggatacaaaaatgtcctcgaaatgcaaaaccagatattcgggcggccggcgaggcggcttgcgagcggaggcgcggaggaggaggcgggaaaggaggagggcggcgccgcgacggcggccgccagcggcggcgkcagtggggaggcggtcatgcgggcagcgccggaggaggcctcgggcttgaaggcgaagagcgcatggaggcc

SEQ ID NO: 95579 - DNA, 1277 bp, Oryza sativa
  Clone ID: PAT_MRT4530_9375C.1
ttttttttttttttttttttaaacaccttaaccaatatggattaaaatgatgaaggttaacttttttttttttttttttttttttttttttttttttttttttttttttttgggatggaagaactttgcttaggtgatagttaaattgggatagagagtacaaaatatactgatggacacaaccatcaatgtgtaagctgcctaaatcagatgaaaaccatcatgaaccaagttcgaagctcttggtatatgtcctcttgcctcttaccaggaaccagacagacaaccagtcacaaacaactaaacaagacaccagagccagctaaacactatctacaggaaactttcagccgattactgtttcgtttgactactcaggttctttgccactagtagctgagggcatggattccaaaacggacatctgtcgatcttcagttatatcttccaatcagtgattaaaagtgtatctagtcactacagaggctccaccatgttgtgtacatccaatatctcctcgaacacttgccaaagttctttcgtcatcataccactgtagaacaactcttccaacatgtcattcaactccaggtaatgtgaatacagcaaatctagctctgaaagcatctcaattgattcatcgtctagttgatacatttcatcttccaagacttcatcatcgctctcaagttgtgctggatccatcccgtgttcaatcacgtggcgagtgtaaataacaagatggttagctgaattatcatacttcgtcaactttggccatcttggtaaatctgcatcattggttttttcaccacctttctgatccttagaattctcaccatttccttcctttgtctttccaccaccatttccttccttatccttttttttgttgaataggtacacttttaccagaatgggatggctgtgcaatagaacaataaccctccagtctgatcttaatgataagctcctaagaatggcaagtagagtttttctaacttgtcgatttgcacatctccggagcctgtaaagatttgaaaggaacccaatcctaacgacaggacgcttcaaagcaaattgcgccattgcaaagcattgaaaatgcctgaattcatcgcagaaggatggagaaggagctggcatgaatcttaacaaggacttccgcatccaaggaaaaaaggcaggacatcctactccttttaattcaaatagggagatcacttcatcaaatatgctatataatcattgagcatagagtcctgctgatctcagcc

SEQ ID NO: 95580 - DNA, 423 bp, Oryza sativa
  Clone ID: PAT_MRT4530_93760C.1
ccggccaaaattaaaaacataagtcacgagtaaattactgttcatgttttatcatctcataacaacaaaaatactaattataaaaaaatttcaaataaaacggacgatcaaaattagacgcggaaacttatggctgcacttattttgggacgagggtagtactagtctactagatggttaatttttttaggggcaattgtgtttctgcccttgctttacgattcaattgtgattttacccttgttttttaaggtttgtgattttgcccctgcttttttgaaatgaaggagccgcctgcccctactctgttaattagtggtaacggtgttaaatgtgtggtgaatagacaaacatacccctggacatgttttggtatacacactggatatgtttcaagcgaaaaaaaaaaaaaaaaaagcggcc

SEQ ID NO: 95581 - DNA, 873 bp, Oryza sativa
  Clone ID: PAT_MRT4530_93761C.1
cttgtacaattcacttccaatgaaacatatcatgaaaaaccacacacatcattacatcaccacatctcaatcacttgcacatagaaatccatcacagataagctacatttgcacagcatacagttgcactgctgctacttgcatagttgcatgtgaggaatccatcacagatctgtcgagatgctgaatcgttgagttgagatggcaggtgtcggcgcgtggaggtggtgcggcggccggcgtcaccgtgtcggtgcgtggtggtggtgcggcggcaggcgtcgccgcgtggaggtggtgcggcggccagcgttgctgcgtggtcgtcgaggtggtgcggcgaccggcgtcgccgcgtcgccgcgtggaggtggtgtggcggccgagacagcgaggcgtcggcgccgccggcagagatggcgaggaggaagacgaggggaggtggagacgactggcgacggacgacggtggcaggggcggggcggcgctgcaggcgcgcaggacctggatgcgccgccgatgccgagggagttggggaatggggagtgccgcacgcccccacccacacagccactctctaggtctagggttaacctggctatggacttgggccgaaaaatatttgggctattaggctatggggagctgcggatatccggcaaaaagtcccggatagtttccgaccgattccgtgttccgacggataccatcgctactgtattcgaattcatatccgagaaaaactatccgaatccgtatccgattctgaaaatatccgaagaaaatccgactgaagctatccgtatccgaaaacaggttcggaactcggaaactatccgtaccactttcatccctactagtaagattaaataa

SEQ ID NO: 95582 - DNA, 251 bp, Oryza sativa
  unsure (1)..(251): unsure at all n locations
  Clone ID: PAT_MRT4530_93762C.1
ctttagagctcagcgacagctcctcctgccagtggacaggacccactgccgtcagatggacagttactattgtgaaatgcacttactcagccgttatgctgtgggctccgcacgaccggtttcaatgtggcaagtgggtgttncccggaaatccaaaagttgggaatggcagcgcttggtttctaggggacttaagaagatcggacaattggtgccccattgaaccatgctcacatgccctcaagcattag

SEQ ID NO: 95583 - DNA, 471 bp, Oryza sativa
  Clone ID: PAT_MRT4530_93763C.1
atgtcggctgaggaagaagagggtccaacgacgacgacgacgatggatccaaacgacgccgccgttcccacgctggcggctgccgccgtcgccgccggcgacgagaagaagcctcccgccggcaaggtgccgatgcccgacgactacatcgccaccatcctgtcgctgaagagggagccgccgccaaaacctgagtacctgagcctcctctcgccggaggagcgcgagaagcagctggagttcgacgccgtctgcgcgaaggaggacgacgcgctggaggagctgcaggccaagatcctcgccggactcaggaaggacggctactacctcgtcgacgagagtttcctcgagaagtcggcggcgatgcgggcttacgtgagtgaagaatgggccaagatggactgggcaggcagcggcatcatcttcggctactgggactacgacgatccgcaatgcgttcagtacctgtga

SEQ ID NO: 95584 - DNA, 210 bp, Oryza sativa
  Clone ID: PAT_MRT4530_93764C.1
cggacgcgttggcgacccctcgcctcgagctccagctttccccaaccccttcaacaatggcagatgtggaggtttatgcggatgtggccgcagccggagcgcctaataagaagacgttccgcaagtacagctaccggggtgtggacctcgacgcgctccttgacatgtccaccgacgacctcgttcagctatttcccgcgcgcgcccgca

SEQ ID NO: 95585 - DNA, 487 bp, Oryza sativa
  unsure (1)..(487): unsure at all n locations
  Clone ID: PAT_MRT4530_93765C.1
gtaggtggagtggcataggtacattatacatacaagttacaacaaagccctcctcagaaggaaaagacaaaaatagttacaacgtacaagcccactacttacataagttgttgacggaggtgattactatacaatatcaagctatcaaattgtaagataatatataccaacagcttaaagttgagataagttgactaattatctcaagggagatgtgggacaaggaggagcttctccttgaggtgaatagttatcccgaaagtctctgtcatatcgatgcctccatttgctgcttgatctattggtagcttccaattgaagcgatacacaaggcttgctagcatgacctcgatggcggcgatcgcgaagttcatacctgggcatatcctccgaccagttccgaatggcaagaaattgaaattatttccattgtacccagccattgtgttgctaaggaacctctctggcatgaactcctcngcatttt

SEQ ID NO: 95586 - DNA, 265 bp, Oryza sativa
  Clone ID: PAT_MRT4530_93766C.1
aaacagatgaacatatgagctcatcatctagtgggaagacctgatcattgagaactggtattataaaaaacttttacagcacatagcacacatggccagcgcttgactgagatctatcaaaaggtttggagacagtttccgggagtcggcaacagacaacgactacgccattggggatgtccacgttgcagaacgcccggaggatgcgcgtcgtgcgctcgatgttcaatctccgggagacggggaacacactagccatggggtg

SEQ ID NO: 95587 - DNA, 388 bp, Oryza sativa
  Clone ID: PAT_MRT4530_93767C.1
aaatacaagtgttttttggtttttgcgtgtttgtgttaaagttacatttgtcaggtttttgaattattactgggcagggctggttcaaagttatattaactttttctattcatgcaggcaaaaaaaaaggggcatatggtacaacaaaaaagattgcaggggggaaaaaagcttactaaagaatgccacagtgggggggcaggggttataaaaaacaaaaaacaggggggcaaaaaaaaaggggggggggtcctttttgggcaaaatgacccccaagatctcgcgggccagatatcgaaatttttgggggggaaaaaacaaaaaagaggcggccgagcgcgcgggcgaaaaaaaggggctggccggagaaatagaatccagggattgg

SEQ ID NO: 95588 - DNA, 251 bp, Oryza sativa
  Clone ID: PAT_MRT4530_93768C.1
ccaagctgtaccgcgtcaggtacggcgcggtggtgcagatcgtcttccaggacaccggcatcttcgccgccgaggagcatcccatgcacatccacggctaccacttctacgtgctcgccacggggttcggcaactacgacccggtgagggacgcccacaagttcaacctcgtcgacccgcccagccggaacaccatcggcgtgcccgtcggcgggtgggccgtcgtgcggttcgtggcggacaaccctttt

SEQ ID NO: 95589 - DNA, 3012 bp, Oryza sativa
  Clone ID: PAT_MRT4530_93769C.1
atggagcgcaacgacaatccactgcacgccggctctggccaggccacgacgctcgagggttccgaggggcgggaacccatcatccgtgccgggtttgctcgaaccgacactgataatggcggttctgatgtgctattctgtggtagtgaaatggaccacaacaatctgcagcccgcgggctctggccaggccatgacgacggaagcagacaataaccgtgcgtggcagctgcagaagtacctcatgctgctcactatcctagtggcgaccgtgacttacatagcggggctcaatccaccggggggcgtttggctagagaccaaggatgggcacctcaccggcaatcccatcctgccggacacccaacccacccgacactacgtgttctactacttcaatgcgacggctttcgtggtgtcgctcgtgctaatccccttcctcctccagccctgcgtgaaagcggcggcgcagctgaaggcggtgcgtgtggccatggtgtttgatctggtcctcctcatggtggcctacatcgccgggagctgcccggataggccaaccaccatcttcgcctcgctattgtcggtggttgtttttggatgcgtcgtggttcactggctggtggctccttcttccaagggccagctctggcttgacaaaccaaacaaggtcttgatgctactcgccatcttcgtggtgacggtcacgtatgtggcggggatgaggccgccgggagggacttgggaacatgcccaggaggcagggcgaagcgatgccggtgaacccatctggctagagcgccaccgagggcgcttcatggccttcctcgtctcgaacaccatcgctctcgtcgcatcgcttgccgtcgtcatgctggtcttgagcagcaggctgcggagaaacatgtcgtgccttgcacttcacgtgttcatcatcaccatggctcttctcgggctcttgggggcctacgtctcgggcagctgcacggagtggatcttcaccgtgcaagtcggctgcgtagctggtgctatagctgttatcctcccctgcatttcttgtcttcccattgttgagtgtcttttcggtggattcaagagccaacaccactcgttggcaggagcacccggtcgcagagtgacaatacaaccattggtgccaattgttccagtgggagaaggtgaaccagtaatggcaggaacaccaggtctcccccgaatgacacctacggaatcaacaatggttgtgcatagacagcatagtagtgaagcccatgcgaatccattaaacaatggccgctctatgatacttctactagccacactcacggcaacagtgacataccaggccggcctagagccgcctggtggagtttggcgggacaatgagggtggccacaatggcggtgacctgatactcctcgctactcatgctatccggtacaaggtcttcttctattgcaactcggctgcctttgtggcatccatcattgttgtgatcatattgcagagcaaggatctagtcaaccgatatgcgctccatgccgctataatactggaccttatgggactcatgggtgcctacgctgctggaagctggagagatattggtgcctccctatctatcttcgtcttggttgctgccatcattgtattgttagtagtgacctacattgtgagttgcaagtctctgactcgagggaacaatggaaatgtgtcgttagcggagcagaaaagaaaaagggaattgcagaagaggcaaaagctgttgctcaatcttgcagtactggccatcaccatcacctaccaagctgggctaactccaccgggcggcttctggatcgaacatgccgatgaagaacaccataatggagatccggtccttggtgacaaccaccgtggctggtacacggccttcttcttctgcaacacgacgagcttcatggcgtccgttgtcaccatcgtttccctggtgagccaaagcctctctgagattgatatggcgtactgcaaggcgctctactgctgcgtatttgttgtcttggctggattgacgggtgcctttgcctgcggcacctctcgaaggatgcaagaatccatgtacgtccttggctcggccagcctagggttaactcttgccatcctgtacattcaccgttcccatccaatggtcagaaatggggatggtagtaaccatgccgacgatgatactgagcttgttggcgatgtggtcactaatggccagcacatcacaacacacaagatgtgcaagtacctcatgctgatcagcatcctggcagccaccatcacctaccaggctggccttacaccaccgggcgacgtgtggcccgccgctgacgacggggaggggcacgccgcgggcgacccgatcctccgcgacagcgaccggtggcactaccttgcattcttatacagcaactccgtctccttcgcggcgtccgtccttgtcatcgtgctactactgagggtggtggtggtgcggaagctgagctctttcttgccactgatcacggtggtgcacgcggtggccgtggttgatttgctcgcccttctggcggcctacgcgacggggagcagcagggaccgggggacctccgtctacgtcgtcacggtggccgccacggtgctggtctacgttgcgatatatgctggtctgagttcacgccattgtggcagggaacaggatggcaatggagggcaacgcccccatgcgagtggttgcttgatttgggcaagggtggtgctcatgacacccatgttcgatggaatgccaagccagcctgaggtgttcaatgatgatgaaaggatatcagagactgttcccatcaaatccaccatgaagaaggagggaatatccatggacaaagctttagaccggcttcttgagaagtttgagttgatggaggccaaccgtaggcaagaggagaagttcaatcaaatactacataagttgcaagagatagaggcttgtaggagcaaggctgctgttggtatttga

SEQ ID NO: 95590 - DNA, 542 bp, Oryza sativa
  unsure (1)..(542): unsure at all n locations
  Clone ID: PAT_MRT4530_9376C.1
tcgngagtggnnnacaatctcaaggttgtcaaggacacaactncatcnacaaagngctcgccgactaataatcaaccgaaagtcaaaatcaacatcttcagggaaagcaaagccagtgcgatctgctaagccgagcaagantagcagccctagccccaaggttgcnaaganncgaccaaaaccngaaggtcagaaaggggatgctctgaacaagctgggtantaagctcactgtggttggatncanaggccncactcaagggaaatcngcacaancatcatagggaaggctccnagaattttggggtagtgaaattcaactttttgtaaatatctgttgacttgtttccggccgttttcccctgcaggcttgccaagcccctaattgaanacgccccttctaaaaagaaaaacataaaacattgaaatcttaccacaatacgtacatctatctgtttacattggttgaacaataatattcnanctgtatcactgttccatgaaataaaccccaaaattgcatctgtnaatngtcttttggaa

SEQ ID NO: 95591 - DNA, 492 bp, Oryza sativa
  Clone ID: PAT_MRT4530_93770C.1
atggctggcaaatctttgatcccattcattggctcttcctccaactccacacacaaccttgacggagagccgacaccggcgaatcaattgatccctgtagagcaatacaccatggaaggggtgaatgcactgtgggcgcagcccctcgcaacagtgtcgggctcccctgcgattctggagcccgtcggcgagctccctggttcggccgaacccttctcagccccgttcggctccccgttcagtagcaagatccctctcccctcgccatatgacgggaaggccgcgccgcctcccgccgagcgctatgtgggcaccctgttcaccaaggcagggaatgaggagaaggagggggcagcagaatcccgtagacctccacctatgaaggttaagcatcacttgacgccccctccaattgtgagggctcccggccaatatcaagaagatgaggtgaagtcgccggagccctcgatccatatgctcgcgcacaagtga

SEQ ID NO: 95592 - DNA, 390 bp, Oryza sativa
  Clone ID: PAT_MRT4530_93771C.1
atttaaaataggtgcataaagctgactgcatgcatggcaccgatgaataactacaggacatcaggagggtagcagcagccgtactagagatgtcccccgaggaagtggtggaatcacctacttcatagcaagaattggcgtgccacgccaatataaaccttagctgcgtctgcatattgccctaccacaggaatatgcctgtccggaggaccgtggcgaggacagaatgcctgaaccacatactgcgcaaggaggcgcataggcgcagcggccattgacacgctttctatagttcctggtctcatggcagctgttggcattggctacagcgtgtggtttgcataccggtacctgattgttaagcctgaacgggaagctctttttggaaaa

SEQ ID NO: 95593 - DNA, 452 bp, Oryza sativa
  Clone ID: PAT_MRT4530_93772C.1
ttatacaaaaaatacgcagatctcaactctaactattgcatgtgaatcttaattgtttcttgttattccatccgcagatgaccgaagttataatcctttgagagcaccttgttcccctgatcaccgtctgccacctccttgcaaccatctgccatgtccttaaaatagagtggtcacctttaaaaaacaaacatgtctagctttctaacctaagaatacagagtgttgcatgttactctctttgactgtttcatctacgacaaacatccatgatatctatgaactctgatggtgtgataagttatttgttttcgactcaatacataatatataaatatggtgtcttggacttctatggtcaagattatgttgttcaaaaaaaaaaaaaaaaaaaaaaaaaaacaaaaataaaaaaaaaaaaaaaaaaaaaaaaaaaaaaaaaaaaaaaagaa

SEQ ID NO: 95594 - DNA, 296 bp, Oryza sativa
  Clone ID: PAT_MRT4530_93773C.1
accctaatgaaactttttaaattttcagggaccaagccaaacaggccggggacaagaacaataacgcactgccaacaagcccggagcagcggaaggatcaaggggacgagcgccgacatcgtccatacggcaaacagcccacaccacccagcaccgggaccatcctaacgataacagggtgaaagcgaactccaccatcagaaagacgcccacagattcgacaacagggcgcaagacttaaaacgacggcaaagcactaagcaggaacgaacagcagaacgggctgaagaacgcag

SEQ ID NO: 95595 - DNA, 1430 bp, Oryza sativa
  Clone ID: PAT_MRT4530_93774C.1
tttgtgtggttggtgacccgacccccatctcctcctccgactccgatgcgctcctccgccgccgacgcgccgccccccgccaccgcgagtgagatcggagacctccccgtggagatcgtcagcgacgaggagatggcgctcatcgaggccgcgctctccgccgccgcggcagcatcccgcccggtcctctcctccgccgccgcccgccgagcggtccagctctcctcctgcgcggcctactcggccgcctccggcggcgacatcgaggactccccacctctcccgacgccgcggagggggtctctgctcgcgcggttccgcgaccgccgcgcgctcgccgtcaccgacatcaccgccacggaatggtgcgataagcagcaggagttcgtgctggagcacggcaagccggagatgacgcaggccatgaaggccgggtccgagcgccatgcccagctcgagcaagaggttatcgagagagtcgaagtcaccattagatccgcagaagaatcgtgggcagtgaaattcatgaactttatcgtcggagcaaaccagttaatgttggagggcatcactagggaaatccccgtaattggggtcgttgaaggttcatggatgataggtgttattgatgaactccgaatgcctccagatggtatttcagtccatcctatcctggtggatacaaagacacgttacaaaccaacagttcccttagaagcacaaaaaagaaatggaaggcttcaggtgatgtgttacaagtatctatgggacaatttgatcagtgagaaattcccagcagagaatttcttcagctattttgacctggaccccggttacttgttatcagacgatatcaagcaatacattagattgttggggctcaatgcaaagaccttagaagatgtattgaaatatttcaaggtcacctgccatacactaccacggtctcaggaacagctgctcttgagatatgagctacaagcggacaattccctgcttgaagaataccagttctcttatgatgctaggtggctcaaggatcaatttcaggaagtcctcagcttctggcaaggagcacgggagcctaaatttgtgagtgaagaagagaggtggaaatgcagtttctgcaaatttgcaaataattgcccaataaatgcttccacatcaagatgttgctgactaaaaaacaaatgtagcattgaagattgctataggtcaaagtttagtgagattcttttacgcctgactgaagaaccagtcgtagcgatgaatttgaacatttgaagcgccttatgttcgttctttcatttgttcttcttgttctttgatgatgatatgtagatcaatgtaagatttcagcattataacttagatgttgatcaggttgttataaagaggaatatttttgttgtacacaatgagataacttc

SEQ ID NO: 95596 - DNA, 564 bp, Oryza sativa
  Clone ID: PAT_MRT4530_93775C.1
atggaatacttgagatcttgctggggccccgcgtcgtcgccggccgggcgcccccccaaaggatcggatgcggcggggcggcaggatgggctgctgtggtacaaggacgccggccagctcgtcgccggcgagttctcgattggccgggtccaggccaacaacctgctcgaggaccacagccaggtggaatccgggccactgagcaccacggatcccaacctgcagggcactcttgtgggcgtctatgatgggcatggaggcccggagacggcgcgctacatcaatgaccatctcttcaaccatctgaggggatttgcttctgagcacaagtgcatgtcagcggatgtgattcggaaggcgtttcgagcaactgaggagggattcttttctgtaggaactggggaggttctggctatgcagttgtcagcagaacacaatgcatcctttgaagaggtcaggcgagagctgcaggcagcacatcctgatgatccccatattgtggttctaaagcacaatgtttggcgtgtgaagggtattatccagaatcttgacgtcttgttctaa

SEQ ID NO: 95597 - DNA, 1692 bp, Oryza sativa
  Clone ID: PAT_MRT4530_93776C.1
cccgggctgctggttttttttttttttttttttttttttttttggtcttcttgcattcttaaattcggtgctgtttttaaaaagagcttcttagctatgtaggaactgagaatggagcaagggaatttgcagggagagtaacaccaccccctcgaagagaaactgaaggtcggctccagttagcagtggttatggcattcgaatcaaagaacaccacaacaactgttatatcatcatggaagtgccgccttaccccacgatcaattttcttcagatctgaatacctcatctccctcttttttgctgcctgctgcattgcagcctttactagtcttctagcaatcccattgcggggattatgttggacaagatcaactgcttcctgattactaatatgctcccatagtccatcagatgcaaaaatgatgaactgatcagttgtctgtaattggtgtacaacaatagctggttcagaactaagaagaggcctcctgaaagtttcttgaagccgaaatttgctatgcaaaggttctctgttgaactccggtttcttcagatacacatctccaatggatcttgttatctggataatacccttcacacgccaaacattgtgctttagaaccacaatatggggatcatcaggatgtgctgcctgcagctctcgcctgacctcttcaaaggatgcattgtgttctgctgacaactgcatagccagaacctccccagttcccttcacaagtctaccgagaacagcacgggaatcgccaaggtttgcaatatatagatttccagcacagatcacaccaaccagacagcaagagcctactgccgctaattgaggcctcatcgaccattgactactaactacagaaaagaatccctcctcagttgctcgaaacgccttccgaatcacatccgctgacatgcacttgtgctcagaagcaaatcccctcagatggttgaagagatggtcattgatgtagcgcgccgtctccgggcctccatgcccatcatagacgcccacaagagtgccctgcaggttgggatccgtggtgctcagtggcccggattccacctggctgtggtcctcgagcaggttgttggcctggaccacggccatcgagaactcgccggcgacgagctggccggcgtccttgtaccacagcagcccatcctgccgccccgccgcatccgatcctttgcgggggcgcccggccggcgacgacgccgggccccagcaagatctcaagtattccatcgcagcagatagcatccttcatctccgacacctccccatcgcccacttcctcacaaagcccattcctttaccttccctctcctcctctcgtttcttcgcgaaaccttttttttctctctttctttctaggattagcttcgagattcctgcgcgatcgatctcgcagccgaaaggggtggccttagatctggaaggaaccaatcgatctcaagctcggaggaagcagcaaggattgggtttttggtggagaaacggtgggctcctcctctcctctccaggatccaaaagaagcaaccaggaaactgaaccaagacgactaaaaaaagatgcgctttttcgcttctccccccctgcctacctctcctgccaaatcttgcagacagcctcgatgaacagatagatcagggtatcttttttatctcctcctccac

SEQ ID NO: 95598 - DNA, 3929 bp, Oryza sativa
  Clone ID: PAT_MRT4530_93777C.1
accccctccggacctcccggcggaccaaaagggtattccggcccgacacggggaataggcccggccagtaggcacataaggggcgggacatatatggtcaccgccgggcaccgggtcccggacctccaaggtcctccggggcacacggcgcagtccccaccgccgcccgccctatatgtgtcgtggcacgtcagcgcgccgatctcgtcggcggacaggcccttccctcctcctcctcgggctccaccgccgttcccctccgccgcgcgcccgggcgccgcctcctcctcgccgcgcgacgcccccaaggtggatccatcgtgcaccattccctccatcaagctcattgtccccatcttacttacaaggccgtgtccctccaactataccactcccagattaacccttttacacaaagcgagaacctgagccattggttcgaccggccggcgaggagttccacgcgccgccgccgccgcttctcctccagccgccggcggggcctcccttcctacccaagcctccgccgccgttcccatctcctcgtcctccgtgccaccgccggcgcctcttccgctgaatccatctccacctcctcacctattcgctaacgccgcctcccatcctctcttctctccgggctccggctagatccaagtcggcgtcgagatccagggctcgaaaacccctcacctatccaaggatttcagcatcacgaccacatcctttcactgctgggcagtgctccccattaataccatccagttgacatagtccttcctgatcgtcttcagtgtcacaaccacatcacgcatcgccatcctttgctctgggtagtcagctgagcagtgcaaacccagctcgaaaacgtgcacaaggaagccatgcagatgcaggttagtagtagaagatgagccatcgtgcaaaagctggctgtccacaacatggacgagctctgcaggaaatgcctggctaacccacagcctgttgttcagttctcccacaaacattgcatctgttggtctctttccagtgaacacttcaagcagcatgattccatagctgaaaacatcgctcttccgtgatgcttttccaagagctccatactctggtgcaatgtacccaactgtacctggcatgcttgccgagatcatggagctgtcatcacctaacagcaaccttgcaatgccaaagtctgatacatgagccgtcatgtcatcgtcaaatagtacattgctaggcttcaagtcacaatgtaggatcacctcacagtgctcatggtgcaggtattcaattgccattgatacgtctagcataatatccaacctttggagaaaacctaattgcattcttccttcagagtgcaggagtgcctctaagcttccattgggcatgtagggaagaactagtgctctaaagtccagattggaacaagtgttcactatctttattaagttgcgatgtcgagccattcgaagcacacgacactcagtattgaaacttctcacggcatgttccagatgctgatgtataacttttatagcaaccaccaaaccactgctcagctggcccttaaaaacttttccaaagcttccagaccccagcatgttatcattactgaaattatcagtagctcgaactagttcatggtaggagagtaattgatggctgaccgtgtcaaccataccagtggaaatcttttgatgcttaactttctttctaatcattacatataggcaacaagctacagccccaactactatgattatagtagggagtaaaaattttagcatgtgaccatttcttttgggataggttgttttgcacggtgcaaatcctagacggacaacaccacataaccctgagttccccactaaagattgcaaagtgatgtttgagaagacacctcctcctggtatttgaccatgtaaattattgaaagataggttcaagctagcgagcatggtaaaacttgacaggtacttcgggatggtaccagaaatattgttatgcgatagatccaaagtttgcaagctagtcaggttaccaaaagaatttggaatcgaatcattgaatgaattaatggataggttcaagtaggttatcatctgaatttgcccaattgaatctggcaggctcccaagaaagtggttgctagagaggtccatcttgtaaatttgcttcagatgacctatatcaactggcaatgcaccactgaacaagtttcgagacagatctaactcaatgaggctatcaaggtgaaataaactcggtggtaccgttgatgataattgattattagataatcttaagtgctctaatttggtgaggttgccaatgtcttctattatggagccagagaattcgttattttgaaggaacaacattacgacattctttagcattgccgtgtttgatgggatggagcccgccaagttatttccactgagatcaagcatatggagattctccatctccatgattgattcacttaacttgattctggatgcaaggaatgattccagcgtacttgataggttccccaggtagtctgggagaattcccgtgaaacgattggagttgatacatagaacagaaagctttctacagtttgaaacagcagaaaggaaattgagatccccctgtaggccgttttcagaaataataagttctgttaatgagttcatgttgccaattgttgttggtagtaaaccatccaagtggttgtcatccaatagcaggacagataatgcagacaggttaccaagagaagcaggaataggtcctgttagttgatttgttgaaagacgcaagactgaaagatggcctatctgtccaagatccgctgggatggctcctgttaggttgcacattgcgaggtctaggaaattcagcatggtgaggttgcttagtgcatctcgaattggaccaacaacaaggagattctcacccaaggagatgacattgagtttggttaacttgcccagccatgagggcaaaggaccctcaatcaaattatcaagcagggaaaaaactttaaggtgccgacacgctgcaagccctagtggaatctgaccagtgaaataattgtagtcgagggagaaaaattgcagaatcgggaggatgaaacttttgttgcctgggatagggccagttaagccatttgaggcaagagcaataacatgtagtctagacatgttaaagattgaaggtggcactggcccggtgagattattgcactgaaggacaaggcgctcgagcaatggcaaggagccaatgcaacttggtatcggtccagacaggctgttgttgccgatgattagatgttttaatgaaggtgtattgttgaataggccatttggtatcaagccggtgaggtaattcatctggatatttatgctgcgaaggttgtgcgagagacgcaactctactgggattggaccagataggctgttaaactcgagatcaagaacatcaagcctcgtcaggttccctatggtggctgggacacctcctaacatgtcattgtgaccaagatcaaggatcttgaggcgatgcagccttcctatatcatccgggactgaacccatgaggccggtgttgctgaggttgagtacagataggaaagagaggttaccgatgtgagggctgagctctccttgcaggggaacatctggcagctccacagcagtaacacgctgccggtggcggcggcaggagaccccaacccaatggcaaaacggggtgccaacagtccagtttcttccaaggatgccgagagggtcggagagctgcgctttgaaagccatcagtgcagtgaggtcagtgttgctgctgttgctcatactcagacccgaagaagcagcaatcatagtggacaaagagatcaacacaacagcggatatgcattctggaaatccaagcgccat

SEQ ID NO: 95599 - DNA, 729 bp, Oryza sativa
  Clone ID: PAT_MRT4530_93778C.1
aagttaaattggtttttttataacttgtaaaagttaaaatttaatttacatttttataacgatataacacatgttaatacatcatctcaaatatttttaaattttttcataactgtttgactaacatacgaacaaccagaaaacgtcccctccagttgaaaatccactgtccacgcgcccacacgaaacctagctaataaccatctatctttcggcgacgatctcccccgtggcggggctactactcctccctgccacggtggtcttcacggccgccgccgccgccgccatcttccgctccccctccggcgcccggccaaccacgtcggcgcggcacacggggcaccaccggctcttcctcagccacgagtccacgcacggcgcgtggaagctgtgctcgcaccgcggcagccgccgggcaccggtccccggacctccagctcctccaggcacaccgcgcagtccccgccgccgcccgcccttgacgacgtcgtggcacggcagcgcgccgatctcgtcggcggacaggcccttccctcctcctcctcgggctccaccgccgttcccctccgccgcgcgcccgggcgccgcctcctcctcgccgcgcgacgccccgcgcccgcgccgcagcgcccagaagacgacgacgatgtggacgaccagcatcagcgcgacgccggccaccaggaggaagatggagatcaccgacgacgacgacggcgacgccat

SEQ ID NO: 95600 - DNA, 648 bp, Oryza sativa
  Clone ID: PAT_MRT4530_93779C.1
atgcacggggcccgctccagccggcgagtcgccgcggcggtagcggcaccggccgactgtaatctgaggggattttcggagcggagccattggcggccgacgaccgaagcaggcgacgggcgggttggagtgggggcggccggccggccggcaaagcaggtcggtggcaaaaacagcgccaggcaatggggcggggaggccgccggcggcaacggcttcatcaacgccgtcgagctcgcgcgctctatggccaacgcctccccccacacacgtggccatgtcgagaggatggggaggatgagggccgagcagcgagagcagcggcgcggcgcaggcggaggagcggcggccaggcgaaggggcgccgcggacggagagagtggcggcgtaggcggagacccgagcggctgggcgaaggggcggcgcgggcggagaccccgagcggcggggacggctacgacctcactgctagatccgctgcctctccgcctatactccggcgatctccacctccaaatccgggctcggtttggaggacctctaaaaatgacgtgtgtgatggagattctgctggagcacaatttttcacctccatacgccacacacatgatggatgcccggatagaggagctgctgcggatgctttaa

SEQ ID NO: 95601 - DNA, 208 bp, Oryza sativa
  Clone ID: PAT_MRT4530_9377C.1
atgacgatgattgatggtggtgtggtgtccggtaacaggctggcagtggcatgggaacgcgagaggccacatgagatgagagggacagctcacttgagcggctgcccccacgtgccctgcacagtgcagcggatcatggtctcatggacaccccgtgtgttggcctacggccacgccgtcgacgtctcgacgagcctacttcgaaatc

SEQ ID NO: 95602 - DNA, 402 bp, Oryza sativa
  Clone ID: PAT_MRT4530_93780C.1
acctcaccgtcacgcaccccttcggcgccacccaccaacaaccccccctgctgctgatgctgatgcttcccgtgcatctcgcaacaatccaagaaaccaagaaaccaagaaaccaaccgagtgatccgaagaagaacaagaacacgaagaagcttgtgatcttcttggaagaggaagaagcgtttgatggggttaaagggagaagggccaggggtcggagctggagatggcgaggcggaagacggtgagggaggagtcgcggagggaggtgggcacgttggacatggcgatctcttcttctcttgtgttacgttgccgaggggaggaggggtctcctcgttgcgacgcgggcgcgtccatcgtcatcggcaccgaaacatcgccgacgtcgcagtcacccat

SEQ ID NO: 95603 - DNA, 713 bp, Oryza sativa
  Clone ID: PAT_MRT4530_93781C.1
ccccccaacaaaccctcttattggaaaccaattttaaggggctccacccggggtgggctccccccgaaaacccaaggagggggacaacccctgggtttgggggctttacccccccccgggttttcccccatataacccgcccaccccttttcaaaagggggtaatgaaaacggaccctaaacccgggggggggggggggaaccacccggggcccccccccccgcgctctgggggggcccccccaaatatgttgggggctccccaacccaccccggttaagggggggggcttcccccccccccccggggttggggggggagaaccggatgcccccgggcaaagggggaacccccctggggggggggggcccaagggtgggtcccccaaaaacccccccagggggggccccgggggccccctgggggggggaacccccgggggggctctggagagagggggggggggctctaaaaaaccccgggggaaaacctcccagggccagaggggccccggaagggggaacaccccggggagaaaaagaaaacccccccgcgctctttgggggacactggggagaacccgggggggggcgccaccccccccccgggattttgaggggggggggtgttttttacacccccccgcggggggtacgggaaaaaaccctcccccccccgctccgggggggggaaataccttctccccggggggcc

SEQ ID NO: 95604 - DNA, 1764 bp, Oryza sativa
  Clone ID: PAT_MRT4530_93782C.1
atggagggttcaaacgtctacaccaaggacaccgtagatgatctcgatgacaaacaaggacagggtttcatgtcggctgatgactttgaggaaattgacataggtccaggggatagaccaaggccgacatttactagtaagaatttgtcttcagaattcagaaccaagctgatagagcttttaaaggaatatagagattgctttgcttgggagtattacgagatgccaggactcagccaattgattgttgaacatcggcttcctattaaatctggagttagaccatatcagcagccgcccaggagatgtaaggccaatatgcttgaagctgtcaaggctgaggttacacgtttatatgatgctggttttattcgtccatgtcgatatgctgagtgggtttctaatatagttccagtcatcaagaaaaatggcaaggtccgggtgtgtattgattttcgggatttaaacaaagctaccccaaaagatgagtacccaatgccggtagccgatcagttggttgatgctgcttcaagacacaaaatattaagttttatggatggcaatgcaggttacaatcaaaattttatggcagaagaaggtatccataagacggcttacagatgtcctggtgcaatcggcttgtttgaatgggttgtgatgaccttcggcttaaaaagtgctggagctacttatcagagagccatgaattacatatttcatgatctgatcggctggttggttgaagtttatattgatgacgtggctgtcaagtcgaaggaaatagagaaccacatagccgatttgagaaaggtttttgagagaaccaaaaagtatggcttgaagatgaacccgacaaagtgtgcctttggcgtatcggctggccaatttttgggattttttgttcatgagagagggattgaggtgactcagaggagtattaatgcaattcaaaagattcaacctccggaggacaagacgaagttgcaggagttgatcggcaagataaattttgttcgaagttttgagtttgcctatactattaagccctatgcaactaacaatcaggctgagtatgaagcggttctcaaagggttgcaattgcttaagaaagttgaagccgatgctatcgaaattatgggtgattctttgttggtgatcagtcaattggcaggagaatatgaatgcaagaatgatacattgatggtctacaatgaaaagtgccgggaattgaaggatggatttcagctagtaactttgaagcatgtgtctcgggagcaaaatgttgaagctaatgatttggctcaaggggcatcgggatataagccgatgttgaaagatgttgagatagaagttgctacgattacagccgatgattggagatattacaaaggatgtcaagattgtctgaagtttggagcaattcagagagcaccagcatcggctatgaatcctattatcaagccatggccatttagaggatggggtatggatatgatcggccagattaatccaccgtcaagtaaggggcacaaatttatattggttgcgaccgattatttcaccaagtgggtagaagctattcctttgaagaaggttgattcaggagatgcaatacaatttatccaagaacatatcatctatcgatttggtattccccaaaccattacgactgatcaaggttcgatatttgtgtccgatgagtttgttcagtttgccgatagcatgggcatcaagttgttgaattcttcaccgtactatgcataa

SEQ ID NO: 95605 - DNA, 567 bp, Oryza sativa
  Clone ID: PAT_MRT4530_93783C.1
atgacgtcggcaatgacgtcatcaccggcggcggctcgggcggcaagctcgccggcgaacaacggcgcgacgacgcgaacggagacaccaactcgtagagggcaacgtggcgaacttaccggtgaccaaaacaacggcggaagatcaacggacggcgacggcgtcgaggaagaagcggcggtaaccttcggcttgacaacgacggcgcgacgacgaccggagcgacggcggcgcacggctggagctgcggcggcgacggcggcgctaggctacacgatgctagggctctaccggcgacgagaggcgaaggcgagggtggcggcgggtagcgacgggcttgggggtccttttataggggctaggaggcagcgttggaggcccacggtgaccggcgacggcgaaggaagccgacgattccaaaagaggaaaggtagagatcccgaagatcatttcccctctattgatttcaccggaaacggaaaggcgtggccgaatttggaaggagatgacggcggcgcggcgatagggctcgggcggcggcagcggcgcgaggaagacgaagactga

SEQ ID NO: 95606 - DNA, 450 bp, Oryza sativa
  Clone ID: PAT_MRT4530_93784C.1
gtggtcgccgcgagccaacgagcgagaacgggcgacgcacaaacgctgtccacgccagcggcaagtcgactcgtgcacctggtctcgtgctgctccatggggtcctcgcccttcgcctgccgatggcgacgatcgccagggcggactcacgctacggaccgtcgtgccgccgaggctgtcttcgagcgacgtggcgcggaacggccgcctagcggcgtggcgcgctacacggcggcggatggtggagatggagccaacgaactgtgcccagtaccgggactaagacgcgtaccgaagcgggatacgatattattaaggacgctataactcaggctttggtagaagcaaatggcgtaacacggacattggttctgaaatcgccaaaacggatgaatgcactctactgtgcaatgaaacgtgttttttgaggtgcttcactgctaatgagga

SEQ ID NO: 95607 - DNA, 969 bp, Oryza sativa
  Clone ID: PAT_MRT4530_93785C.1
gcacgaggggaccggcttcaatccaagtgcatccttccacgactccgattatgctctggataatctcagcggacagtgtaagctgagcagacagacacatgcttgacgagtttataggacatgatcagtgatcgaaggtacaccatcacgatgttactcgaaatatattgtggcagatcaatcaacaaaccccacaactcggaaaaagcttcctgaggtactgctcctacctcaaggagggcctcctcctcatactcgacaacagctaccatagcttctcttacctgacctccgtcgctcgacagtgccttcaagctggacgcatacaagtctttgtgttacctgacacctgcgctacaaacgactaaatctagccgaacacaagccctaatggatgagactggaggcatgacaacttgctgaatgcatgtgattgactgggatctagcagccggttgtaatacaggctcgcttcttgcatgagctagaccaccgacgtgaaggtcgaggaatggccttggcttcgttgaagctcacggctttcatggtgaccgcttttcacaatccaatggaacctcaccttccccatgataagctatctagtttgcacgtaaggtgaaatttctttaggttccatgcccgaggcttgatcattcaatacttcaaaactatttcttcctttggggacgaagtgtaggtattcccccactctggttgccttcctgtccccacagggcaccttttttgggtggtaaacagttttttcaagctgtgagttgttttcaagaagtgagtctcctgcgttgacaggtttctgtatgggaacaccatgggctgagttgcttgcctttcactagccggtttccgttacaatcgtgtcatattagttgtcttcttgcgttattctgattactgtcactgcaagatggttaccgtatttggtacactatcttctcgcctgcgccccgt

SEQ ID NO: 95608 - DNA, 748 bp, Oryza sativa
  Clone ID: PAT_MRT4530_93786C.1
atggactctccagcgacccccgtgggcttatctccgccacttctcagtctggtgctctgcaatgaaccatgctatacaaaagcggctcacggaaacaaatggccgagattcatccatccaaaacggacggccaagatccaacggtccacggccagaccacgagagacgatgacgatgacgtcaccaccggcggtggctcgggcgcgcaaactcgccggcaaacgacggcgcgacgacgcgaacggaggacaccaacacgtagagggcgatgcggcgaactcaccggtgaccaaaacaacggcggaagatcaacggacggcaacggcgtcgaggaagaagcggcggcgaccttcggcttgacgacgacggcgatgctccggcgacctacggcgatggcggataggcggacgaggtcggcgatggcttggtgatcacgacagcagccttcccgagcgacgacgacgacgggagcggcggcggcgcacggctagacgaacggcgatgacggcggcgctagactacacggtgctagggctctaccggcgacgagaggcgaaagcgagggtggcggcgggtagcggcgggcttgggggtccttttataggggcaaggaggcggcggcaaaggcccacggcgaccagcaacgcgaaggaaagtgtagggttcggaggagagagatcgatccgaatcgaactcgaatccacggatttccaaacgattttagccgatgattccaaaagagaaaaag

SEQ ID NO: 95609 - DNA, 480 bp, Oryza sativa
  Clone ID: PAT_MRT4530_93787C.1
atgggtggggagaagggtgtcggtcggcggggaaaagttcgacggcggaggccgccagctaacgtggctcccaatgaccggaagcgctcacgtcatggacttgcgcacgtgcggggtgtggcgcgggtcccaactacaactgcaatgttgtcttcaccggcacgcgtgaaggctggggcttccgcctcatcacgctggccaagctcctatcccgggcttccgcctcgtcatgatggccagctcctatcccccaagctcatagtcgcccccatcgagcggctcaaaagccgatgtgttcaggtatactatcttgcaagaaaggagctcgcaacaaaacgagagctttttgatagcccgttcactcgactaccacgcttatcgctcgataggacttcccgtaacccgaaaagaaaggaactgaactggcttgcccggaaagaatggattgctacccttggagagctaatggtactggactga

SEQ ID NO: 95610 - DNA, 975 bp, Oryza sativa
  Clone ID: PAT_MRT4530_93788C.1
atgagcgatttactcagcgtacaaatagctattgtcgtcgattcgtatgccgtgttagatggcagccgttcctctaatacggagatgacgcagcagactattggaagggttccgcatgacctggtgaccactcgtctgcaggggaaggttgaaggactccatgcctcattgcctggaagaaaggatatttgtgggacccatttatcattcacacaaaaaagatataatgggcaagaggaacaagtccggggaaggggatattcgccggcgccggggatcggtgatgctgcgcgcgcaccgcgctggtctgggtgtgctgcggcggcgcaaccccgttctgggttgcatcctcgtcggcagcggggcgtagggatacggatcttgcgtctgcgtgcctacttgtcggcgtcgacgaggacttggaggaagccggaggaggggtggatgaagctcaacttcgacgggtcttccaagcactcgaccgggatcgcgagcatcagcaccgtgctcaggcgagggctcgagctggcggtgcagaacgggtggcgcctcatttgggcggagggcgactccaaggtgatggtcgacgtggtgcgcgaccgtgccgacatgcagtcggagaaggacctgagactgtgcagggagatcgccacgctgctcccgcaactcgacgacatggccgtgttccacgtgtgccgcggcgggaacaaggtggccgagctcggccacagggtccccacctgggtcgccggggcgtcgtacgttgccctggccgccgtctccatcgtcgttgtgccgctcccgtacccgcagctccagcattgccacgcgcgctgtgccgttgttcgccattggccgaaggggaagagaaagagagagataaggagagaggaaggggaagaagggttggagagagaggatgaccatgtggccccacatgtcagtgggtcccattgtatatttttgtgtgaatga

SEQ ID NO: 95611 - DNA, 723 bp, Oryza sativa
  Clone ID: PAT_MRT4530_93789C.1
atgctcagtgtgctcactctcgtcaaggacagttgtgccgagtgcgagcactacaaagtgacctggtacatggcggtacatataatatacttggagtggcctgatctgccagaaaagggccatcttggttttgaggcgaccggcttctgccgatgctccgcaagaagaagctcgtcggcgcggctagggttcgcggtgaaccgggtgcacggcggcggctcacggaaacgaacggccgagatcgattcatccaaaacggacggccaagatccatcggtccacgaccgggccacggggaatgacgacaatgacgtcagcggtgacgtcaccaccggcgacggctcgggcgtgcatgctcgccggcgaacgacagcacgacagcgcgaacggagggaaccaacacgtagagggcgacgcggcgaactcaccggtgaccaaaacaatggtggaagatcaacggacggcgacggcgtcgaggaagaagcggcggcgaccttcggcttgacgacggcgatggtgttacggttgtcgtcagcgacggcggaggggcagacgaggtcggcgacggcttggcgatcacgacggcggccttcccgagcgacgacgacgaccggagcggcggcggcgcacggctggacgaacggcggcgacggcggcgctaggctacacggtgctagggctctaccggcgacgagaggcgaaggcgagggtggcggcgggtag

SEQ ID NO: 95612 - DNA, 387 bp, Oryza sativa
  Clone ID: PAT_MRT4530_9378C.1
agggaaaagggttaaataaccaagggggccccccaaaaattccccttaaaagattgcctggaattaaaacccgtgttccaatttaccctaccccggatttggtttccggaatccccaaaaactccctcccgtgaccgggtttaatttttaaaaagccccgggtccaattattgcgacaaaagtttttgatccccccaaaaatggacccttgatagcccaaccccccttaaaacccttaatatgcctaccgggggtggcccatcggatctttagcccccccccgagggagaaccccccctgtaggccctgaccggaaggccctcaaagggacccttgccgagcacaggattaccctgggattgacccagggtagccccaaagttggcc

SEQ ID NO: 95613 - DNA, 324 bp, Oryza sativa
  Clone ID: PAT_MRT4530_93790C.1
atgatgtcagcggtgacgtcaccaccggcggcggctcgggcgcgcaagctcgccggcgaacgacggggcgtcgacgcgaacggaggacaccaacacgtagagggcgacgcggcgaattcaccggtgaccaaatcaacggcggaagatcaacggacggcgacggcgtcgaggaagaagcggcttccggctgcctacggcgacgaaggaggggcggacgaggtcggcgatgacttggcgatcacgacggcggccttcccgagcgacgacgacggccggagcggcggcggcgcacggctggacgaacggcggcgacggcggcgctag

SEQ ID NO: 95614 - DNA, 449 bp, Oryza sativa
  Clone ID: PAT_MRT4530_93791C.1
ctagtaaattttaaactggtaaattatacccctagaataaagaagataaattatacccctataaaataaagaagagtgggctaagggaatttgcgagaaaaataccaaccggtcatctactagttcaaacgggttttcaaagcacaaaaacacatccatgtccgttttcaaagtacaaaagagttcttcatgagatgcgttactacgaagaaaccattatgatactgaacctcatgccagatcttgtcccagagttggtttattcggcaacagcaaatactactcattatagggatttcgacaaagcaaatttattcatcaagccgaagtgataccaaaacagccccgatagccaaaccagtttacccagtattccagtgccatagcatttttggttccatgatgtttaagattacaattcaatccaatcattccttcagttttctaga

SEQ ID NO: 95615 - DNA, 273 bp, Oryza sativa
  Clone ID: PAT_MRT4530_93792C.1
atggattacgtctcagtaagaacgatcaagcatctcatggtccaattatgcgcagccgtgctaggaagatacaataagaggtttacgcccgaggacatcatcactacgcaaagaaggatgtgttacgttgaagactacaagggttacgtcgagcaggaatcagcccatgcccaaccagtagctgtctacgccagcaagaagattgtttacgctgcaaaaggctcaacttccaaggcttgtgcgacccaaccaatcatatttctccatgcttaa

SEQ ID NO: 95616 - DNA, 426 bp, Oryza sativa
  Clone ID: PAT_MRT4530_93793C.1
atggcgacgatagcagcagcccgtggaatctccaccaacgacatcgcccacatggcgttccgcttctccaagggtcctatggattcgggctggggtgagctccctgcttgcgcagtcgtgaggatcacagcagcaagtggacttgcggacaaggacgtcaaccacatggtgttcctgtgccatcactgggcgaacgttctcctcgaggagctcacgatggcatcgggatttggccgtgctgaggcttgtgtgcaagccatggtgggatgcattcccaggtccaccgtttctggtatgctccacacacttgctggaagaaccactggttggggaatcacaagttttgggattttttgtctgctctgtgagggagaggagagattaccaccattgccagattcacctaatggactcttcgtgttctag

SEQ ID NO: 95617 - DNA, 894 bp, Oryza sativa
  Clone ID: PAT_MRT4530_93794C.1
ttattttttaaaaggaaaagggaattattgcgtcagcggctagggttcgcggtgaaccgggtgcacggcggcggctcacgaaaacgaacggctgagatctttccatccaaaacgaacggccgagatcgaccggtccacagccggaccacggaagacgacgacgatgacgtcagcggtgacatcaccaccggcggcggctcgggtgcgcaaactcgtcggcgaacgacggcgcgacgacgcgaacggaggacaccaacacgtagagggcgacgcggcgaactcaccggtgaccaaaacaatggcggaagatcaacggacggcgacggcgtcgaggaagaagcggcggcaaccttcggcttgacgacgacggcggagaggtggacgagatcggcgacggcttggtgaccacgacggcgacctccccgagcagcgacgacgaccggagcgacggcggcgcacggctggagctgcggcggcgacagcggcgctaggctacacgatgctagggctctaccggcgacgagaggcgaatgcgagggtggcggcgggagcaaggaggcggcggcgaaggcccacggcgaccggcgacatgaaggaaagtctagggttcggaggagagagatcgatccgaatcgaactcgaatccacgatttccaaacgattttagccgacgattccaaaagagaaaggtagaggagatcccgaagatcatttcccctctattgatttcaccggagaaggaaaggccaggtgggccccacctgtcagcgggcggacgcgcgcgcgcgagcgggcggctcgactgcgggccggattgggccaggagagagagaaaaggttttgggccgactttcggcccaaagccaaaagaggatttttaaaaccttttacaat

SEQ ID NO: 95618 - DNA, 2718 bp, Oryza sativa
  Clone ID: PAT_MRT4530_93795C.1
agtggatccccgggctgcaggctcgctcagctcaaacagccacgaaatggcgccggccgtcgccgtcgtcgccgccgccgccgccttccccttccgcctcttctccgccgaggctcgccgaaacaccaagggctcccggagcaagcgaggctcagccaggcccctcaagccatcccctcctccccgcccatccgcgtcgtcgtccgccgctggcggcggcggcgccaccaccttcaccaggctgccgctccgcaacgcccccgcgtccgtggaggtgacgctggaccgcttccccaccgccaatcccgagcccagagcttccacttttactcgccggaatggcgagcggttgggcgacgacgaggaggatgaggaggaggaggaggatgaggtggagctcggactccgtggggccaccacgtttgctcggctccctctgcgggactcgccggacggcggtgacctcaccattgggcatttcgacgcgggggtggcccctcaggagggcctgaggagtcgcgccatttctcgtcaattggtcgaacaccttgacgacgtagaggaggaggaggaggagcaggttgtcagccgcttggacatcttcgagggagcaaagggcagggaagctcgggctttcttacccgacgaggacgacgaggacgacgacgtcgtggtgttcgacccagagtacgacggctacagcgacgacgaggagttcgtcgctactgctgtcgagcagagtccacgaggcgacgccatcgcagttgcggagcttgaaaagctcaaatacgacaatgacgacgacgacgacgacgacgacgaggttgtcgtgttccacccagacgacgacgaggaagtcgacgtgttcgaggactacgacgacgacgaggaggaggagacgaaggagaagggtgtccccgccgtgatgcggtgcttcgacacggcgaagatatacgccaaggccggcgacggcgggaacggcgtggtggcattccggcgagagaagtacgtgccgctgggagggccctcgggcggcgacggcggccgcggcgggaacgtgttcgtggaggtggacggcgacatgaactcgctgctgccgttccgcaagtcggtgcacttccgcgccggccgcggcgcgcacggccagggcaggcagcaggccggagccaagggcgacgacgtcgtcgtgaaggtgccgccggggacggtggtgcggtccgccgccggcgacgtggagctgctcgagctgatgaggcccgggcagcgcgcgctgcttctccccggcggccgcggcggccgcggcaatgccgcattcaagtccggcacaaataaggcgccaaggattgcagagaaaggggagaaaggtccagaaatgtggatagatttggagctgaagctggttgctgatgtggggattgtaggcgccccaaatgctggaaagagcacccttctgactgctattagtgcagcaaagccaactatagccaattacccttttacgacattattaccaaatcttggagtggtctcattggattttgatgctacaatggtagtcgcagaccttcctggattgctggaaggtgctcaccgtggatatggcttggggcatgagtttttaaggcatagtgagagatgttcagtgttggttcatgttgtcgacggctcaggagaacaacctgaatatgagtttgaggctgttcgtttagaactggagctatttagcccatcattggttgacaaaccttatatagtggtgtacaataagatggatcttccagaggcatcggaaagatggaataagtttcaggagaagctacaggctgaaggaattgagccctattgcatcagtgcaatgaataggcaaggaacagaggatgttgttcttgctgcatacaaggttctacagaaagataggcaaagaatgaaagatgacgaagaatggaatggccctgaaaatctgaatcatgtggctgatgcaataaaaagggaaaggagagctcccatgaacgaatttgagatttttcatgataagggcacgaatacatggaacgttgttggagctggaattgaacgttttgttcagatgactaattggcagtattcagaatccttgaaacgatttcagcatgctttagaggcatgtggtgtcaacaaaactctaatcaaacgtggagttaaagagggagacacggtagttgttggtgagatggaaatggtttggacagatgagcctagtaagaccaggtcatcaaagacaatgaactcaaaagatgactctgtcagatggcctgaatttggctagatcaaggctcaagcaatggttctgtgtcgcagcagaggcgattttcactgaaatgtttgcacatgcttacaataaaatgctgcactatgacaacaaaaaaactactagtcatcacaacagctagttacacccagcccaaataaaaggaatactattttgtgttaccttcagaatagtgatgtatcacacagcttcgcctacatgctttgaaagttggattatgcaggagtgctatgtactaccttttgtgatagtagatatttgtagatgagatttaggtattctaaaatgatgtacgaaatagtttcttcagcaagacttgtataaatgttcacacttgattattaatggcttatacgaccgaagaaagacaattgcccgtgactagttctctcctgcagcccggggaaaaa

SEQ ID NO: 95619 - DNA, 648 bp, Oryza sativa
  Clone ID: PAT_MRT4530_93796C.1
atggactccccagcgacccccgtgggcttatctccgccacttctcagtctggtgctctgcaatgaaccatgctatacaaaaggaaaaaggggtttattgcgtcaacggctagggtttgcggtggaccgggtgcacggcggcggctcatggaaacgaatggccgagattcatccatccaaaacggacggccaagatccaatggtccacggccagaccacgagagacgacgacgatgacgtcagcggtgacgtcaccaccggcggcggctcgggcgcgcaaactcgccggcgaacgacggcgcgacgacgcgaacagaggacaccaacacgtagagggcgacgcggcgaactcaccggtgaccaaaacaacggcggaagatcaacggacgacgacggcatcgaggaagaagcggcggcgaccttcggcttgacgacgacggcgatgctccggcgacctacggcgacggcggagaggcagacgaggtcggcgacggcttggcgatcacgacggcagccttcccgagcgacgacgacgacgggagtggcggcggcgcacggctggacgaacggcgacgacggcggcgctaggctacacggtgcaagggctctaccggcgacgagaggcgaaagcgagggtggcagcgggtag

SEQ ID NO: 95620 - DNA, 885 bp, Oryza sativa
  Clone ID: PAT_MRT4530_93797C.1
attgaaaaaggtttttaaaatcctcttttggctttgggccgaaagtcggcccaaaaccttctctctccctctccccggcccaagctggcccagtccgcccgcagccgcccgcgcgcgcgctcggccgctgacaggtgggtcccaccgtgcctttccttctccggtgaaatcaatagaggggaaaagatcttcgggatctcctctaccttttctcttttggaatcgtcggctaaatcgtttggaaatccgtggattcgagttcgattcggatcgatctctctcctccgaaccctagactttccttcgtgtcgccggtcgccgtgggtcttcgccgccgccttccaacccttgtcgccaccctcgccttcgcctctcgtcgccggtagagccctagcaccgtgtagcctagcgccgccgtcgtagccgttcgtccagccgtgcgccgccgccgatcctgtcgtcgtcgtcgctcgggaaggctgccgtcgtgatcgccaagccgtcgccgacctcgtccgcccctccgtcgtcgccgtaggttgccggaggaccgtcgccgccatcgccgtccgttgatcttccgccgttgttttggtcaccggtgagttcgccgcgtcgccctctacgtgttggtgtcctccgttcgcgtcgtcgtgccgtcgttcgccggcgagtttgcgcgcctgagccgccgccggtggtgacgtcaccgctgacgtcatcgtcgtcgtctctcgtggtctggccgtggaccgatggatcttggccgtccgttttggatgggtcaatatcggccgttcgtttccgtgagccgccgccgtgcacccggttcaccgtgaaccctagccgctgacgcaataattcccttttccttttcaaaaataa

SEQ ID NO: 95621 - DNA, 384 bp, Oryza sativa
  Clone ID: PAT_MRT4530_93798C.1
gtcgtctgagttaccacgcccgagccgccacggtggtcgagcaactgggggaggcgcttcaccagcactggtatggacttggtggtgatgatgaaggagactcaccagcgctggatccctgtggcggtgtggtcgacgtcgtcgtcaccctccccttcatcatcgccgccgagtcctccacttgctgaggctcaccaaagctgcctgctactgccagatcttgcggtcccgaggcctaccaccgtcaactctgatggaagaggagaggaaggagaggcccgccaacacgatgactggctgctgtcgttcgggaggagagtgctggggggagggggggtggtgtcggtgacggagatggggatggagggaggggaaaaggagaag

SEQ ID NO: 95622 - DNA, 411 bp, Oryza sativa
  Clone ID: PAT_MRT4530_93799C.1
atggcacggcgcgcgccgccgttcgtcctcctcgtagccgccgccgcggcggcgctcgtcgtcgtccctgcgacggccgccaccgccgaggcgctcgtcgcccactgggggatgcgggcggcgccgtgcctggagggcacggtggaggaggaatgcgtggccgacggggaggtcggcgtcgtcgggctgaggcggtggcagcggcggcggcggctgttccagctgatggacgactacggcggcggctgggccggggcggcggcggcggcgcagtacatcagctacgcggcgctgatgaggaactcggtgccgtgttccatccccggcgcgtcctactacaactgccggccgggcgccgacgccaacccctacacccgcggctgctccgccatcacccagtgccgcgactag

SEQ ID NO: 95623 - DNA, 665 bp, Oryza sativa
  Clone ID: PAT_MRT4530_9379C.1
ccccctcgagtttttttttttttttttttttttttttttttttttttttttttttttttttttttttgcgacaacccagaaaaccaccagaacacgcatattattatcatcatattcagtatttgaagcttacagatgacagatttatgacccaacaaataccgcatctaatgagacagatttatgacccaacaaataccgcatctaacgagacagagtaacaagagttaaggcacacggatacgcagatgcatgaggtacaaagcttataaggcattactaatcgtacagacgtgtcgccggtgccggttacttctttgcgccgccggccttattcttgttgtccgtggaggtcccgccgcccgcggcctgcgccgccttcttcgcggccttctcctccagcgccttcttatccctctcgcggcgctgctccggggtgagcccgtcctgggggcccttggcgttgggcttccgcgcctgcgcgcgctcgcggtcgcggtccctctggttgccgcgagtcatcttcctgattccgggctccccccgcctcgcctcgacctggctcccccaccccctgccggagacgacgacctcgccgacgccgacgacgacgacacggacggcggattgctcgagctccccgagtactttccctcgcctcgtgc

SEQ ID NO: 95624 - DNA, 666 bp, Oryza sativa
  Clone ID: PAT_MRT4530_937C.1
agcccacagcgaaacgcggtagcagaatcacgcttctggatactctccttaaagaggacgcgcctaaccacgtcctcaacatcattaatcagacgaagacaatgatcactgcgtctgttctagtcaactcggtaagcgtccgaacgtcaactagcagccgagttccgcctctctgatatcaagattatcactagccaagcctctctgcacggcaccagccaagcctcagcgttgccgcatcaggatctaatcgcaggagcagggatcatgctgaacgctctgttcattcgttagctgacaggcacagggagtaccacgtagagtagccttgctcgccacgtcaccggcaacccatcgatcttcacgatacaatcaaccgtcaccatgcagaaagaggcaatcgacgacatcattcaccagaccgctacgaagatgatcaagatggagttgcagcctttacaagtgacctgcgtcgagtggattggccggctgtttttaagccgactggcattgagaagtatgacgcaaaaacagatcccgagtcatggctcaccgtctatggtctcgcaatccgcgcagcaggaggagatagcaaagcaaggctaattatgtgccagtagctttggatgactccgcccgataaaagctacatggattaccacgggg

SEQ ID NO: 95625 - DNA, 651 bp, Oryza sativa
  Clone ID: PAT_MRT4530_93800C.1
atgaaggtgctaggtccgtttgaagtcagtgctgtctccgaaggccgaactggacttggacttggaattattattggaacgtgtgaagttacgagcgtatccaacgaacggctagggttcgcggtgaaccgggtgcacggcggcggctcacggaaacaaacggctgagattgatccatccaaaacggacggccaagatccatcggtccacggccagaccacgagagacgatgacgatgacgtcagcggtgacgtcaccaccggcggcggctcgggcgcgcaaactcgccggcgaacgacggcgcgacgacgcgaacggaggacaccaacatatagagggcgacgccgcgaactcaccggtgaccaaaacaacggcggaagatcaacggacggcgacggcgtcgaggaagaagcggcggcaaccttcggcttgacgacggtgacggtcctccggcaacctacggcgacgacggaggggcggacgaggtcggcgacggcttggcgatcacgacggcagccttcccgagcgacgacgacgacgggagcggcggcggcgcacggttggacgaacggcgatgacggcggcgctaggctacacggtgctagggctctaccggcgacgagaggcgaaggcgagggtggcggcaggtag

SEQ ID NO: 95626 - DNA, 858 bp, Oryza sativa
  Clone ID: PAT_MRT4530_93801C.1
atggacttggtggtgatgatgaaggagactcaccagcgctggatccctgtggcggtgtggtcgacgtcgtcgtcaccctccccttcatcatcgccgccgagtcctccacttgctgaggctcaccaaagctgcctgctactgccagatcttgcggtcccgaggcctaccaccgtcaactctgatggtaccgaggctagcccaccaccgtcgttaggatctttcgctggtagatccaccatcctgagctacggggagctgcagtcgttgccgcgcgcacggccaaaattcatgggcacgaacggcgcccagggctcaaaaggtgcgtcgtcgaccaccactaacccgacaaacgatgacaagaagaagaagccggctcaggcgcccggcgccgatgccgatgccgatggcggtggcaagaagaacaacagcgactacgtcgacaagacgctgtcgacgacggccaacctggtgaagctcctccccacgggcaccacgctggcgttccaggcgctggcgccgtccttcaccaaccacggcaggtgcctggccatcaaccgctacatctccggcggcctcatcgccttctgctgcgcgatctgcgcgctgctttccttcaccgacagcatcatcgacaggaagggccggccgtactacgggctagccttccccgccgacgaagacaccggcaagggcggcttcgtccccttcaactacgagaagccgcgccgtcccagcaacggcgccgccaccgccgccgccgacgacgacgatagctgggaagtttacttcgtggatttcgacccagaggacactggtggagaaaccctttgtagtcccggcccccaggtcgaagagtaa

SEQ ID NO: 95627 - DNA, 345 bp, Oryza sativa
  Clone ID: PAT_MRT4530_93802C.1
ctagctgtgcagggtggcgcgttgggtgtggaggacgctcggcccgctctcctttgccagctcaggaactgtcacgccccgagcggcttgctcctggaagaactcgtcatcagcaggatccgcttcatcttcttcagcaaaaggttggcactcggccaacagcttttcaacggccacccgggccaacaacttttcaaacggccacccgggcctagctgatcccgtcagccggatcgcccagcccgtggggatcagccacgtcgggagacctccaagtgtgccaggaagcccaagggggtcctctccgacaccaccccggcaaatccacatgtctctcggcatcat

SEQ ID NO: 95628 - DNA, 884 bp, Oryza sativa
  Clone ID: PAT_MRT4530_93803C.1
ttatttttgaaaaggaaaagggaattattgcgtcagcggctagggttcgcggtgaaccgggtgcacggcggcggctcacagaaacgaacggctgaaatctttccatccaaaacgaacggccgagatcgaccggtccacggccggaccacgggagacgacgacgacgacgtcagcggtgacgtcaccacaggcggcggctcgggcgcgcaagctcgccggcgaacgacggcgcgacgatgcgaacggaggacaccaacacgtagagggcgacgcggcgaactcaccggtgaccaaagaagaaacggcggtgaccttcagcttgacaacggcgacggtgttccggtggcctacggtgacgacggaggggcggacgaggtcggcgatgacttggcgatcacgacggtgactttcccgagcggcaacgacgaccagagcgacggcgacgcacggctggacgaacagcgacgacggcggcgctaggctacacggtgctagggctctaccggtgacgagaggcgaaggcgagggtggcggcaggggttggaaggcggcggcgaaggcccacggcgaccggcgacgagaaggaaagattagggttcgaaggagagagagacgaatccgattcgagatcgaatccgcgaatttccaaacgatttagccgacgattccaaaagagaaaaggtagaggagatcccgaagatcatttcccctctattgatttcaccggaaatggaaaggggcggtgggccccacctatcagcgggcgaacgcgcgcgcgcgagcggccggctcatcttcgggccggactgggccaggagagagagaaggttttgggccgactttaggcccaaagccaaaagagacttttaaaaccttttccaatt

SEQ ID NO: 95629 - DNA, 1143 bp, Oryza sativa
  Clone ID: PAT_MRT4530_93804C.1
cggcgtgcggctaaccgacaagcaagaagaaatttctctccttgtagaaacaagcctagagagtactatggagcagaggaaatttttgttgtgcctaattcttggcttacttgcgacttcaggacctgccaagaccgtcaatgctgactcgccctttgatttttattatctcatcctcatgtggcctggagcatactgcactgacagcgagtatggttgttgcgtgcccaagtatggttacccgtcagaagatttcttcgtcaagagcttcatgacctttgactcgtcagagaacacagctgttgtcaggtgcaactccgacaatcctttcgacattaacaagctagactcaatcgagaacaacctgaaccactactggagcaacatcaagtgtcctcgcaccgacggcgtgaactcatggaagagcgagtggaacagctatggcgtctgctccggcctcaaggagttggactacttcaaggccggtctccagctcagaaagaacgcagatgttctctctgctctcgctgaacaaggcatcaagccggactaccaactgtacaacacggcgttcatcaagtgggcagtgaaccagaagctgggtgtgacaccaggagtgcagtgcagggacgggccatttgggaagaagcagttgtacgagatctacctctgcgtcgacaaggacgccaagagcttcatcgactgccctgtcctgcccaacctcagctgccctgccgaggtgctcttccatccgttccacacctggatgctcaacaccacatcggctgccaacatcgtgatgcccactgaaactgtgctggcctaattaagagcctttaatttgctagctaagctgccatgatctacttgatcaacctgtcctaagagcatgtagcatatgcttagcttgttgctttgggtgaataatcgcgcaacttttatacattgttgtgccctctgaataatatgtgcagtactatatatgaagtattgtaccgcatatgttatgtattacatgtgcaggtcttgtgcacacctgtgaggtgaatggatatattatgaatatataacgtgttgtattatgaaaaaaaaaaaaaaaaaaaaaaaaaaaactcgagactagggcggcctctccctcggttc

SEQ ID NO: 95630 - DNA, 915 bp, Oryza sativa
  Clone ID: PAT_MRT4530_93805C.1
atgcctcctcattttccgagagattctgacagtgaccagaatgtcagaatgccatttcatgggcacaagtcgatccacaagcttcttggtggaggtcaagtagaatacaatataattccgctcctttgccagattgccattcttgccatgcttgtgatcttcatttggtcaaatgccgcaccactcttggacagggcccctccaaggatcccagaaatcatcatctctgaacatgccttcagagaaatggcattgaccgtccattacaaactaacgtacactgtatctgttctttacgacattgcatgtggaaaggatctgaagagatttctcctgttctggactaacaatcagattgtttatgatattaaggtggtttgatctctattggtattgtcggcgattggaagttcttgcagcttgacaagtctactatatattggattcttgtgcgcgcacactttgccagtgttgtaccaaagatataagacagaagttgaccatctagttgcaaagggtagcgacgacatcaagaagttctacaagaaggttgattccaatctgctcaacaaaataccaagaggccctgtgaagacaaaagttaaatgaaatgtacaccgcgaggctgtcagaacatataaataattcatttgaaagagaacggacatacactggaaaagatttcgagaacttaatagaagtagcaaagtgtcatggactgacagtccaccttgcctcatgacaggatttgcacaaacccagtctcagataagcaaatcagatgagactccagttaagagttcaaccctgaccactagtgtccaaatgtacctactaaaagaattgatggcaagaaatatgtatactttcatcaactaagaaatcaatatgaaaagaactgatacttgaattgac

SEQ ID NO: 95631 - DNA, 312 bp, Oryza sativa
  Clone ID: PAT_MRT4530_93806C.1
atgggcacgattcaaactttcctaaagataaaatactaacaagtcctcacagcggactcttaccaaatctctaactcaaaactgacataaatatcctaattaatagatacaattaccttaaacgagctctgtctctaaacggcaatgacagatatctaaatcaaggcccataccgagtctacgtcaggctatatcgactgcttgccatatcagctcaatcagcgcaatccgtatttggcaagattcaatattcttcgattcctctttgatatccaactctaaatccgagtctatcttgccaaatttcactgc

SEQ ID NO: 95632 - DNA, 406 bp, Oryza sativa
  Clone ID: PAT_MRT4530_93807C.1
gaatataaagaagcaaaattcacaagcaattttcagataagtaaaggccatattacgatgcacagatccatggaccatggggcatgtttaatgtaaaagtcagtcctaaaatacatgatctacaataccatattacaatgcaactcactaaatccacagatcacttgaaaatccataaaccacgttggctgaaacaaccaaatccacagaccacgtttcaataaaacaatgtaggctcaaatttgcaggtaaccgatggaaaacaaaaaaaaaacgggatttcaaccgggggtggaggccggcgaggtgctgcaacggcgaaggggagggcagagaccggtgaggcgcataggcgatggaaggaggcatgggagacggtcggcgaggaggagcgattccctccctg

SEQ ID NO: 95633 - DNA, 1032 bp, Oryza sativa
  Clone ID: PAT_MRT4530_93808C.1
atgggtgtaccccgctcagagggatacgtcattgagctacatcggttgatgaggcgcctacggtaccccagatttccgatctaccgagttcgacagtgtggacccgtttgggaggcctgggtcgaggttcatacacgagttccttcaaagtcagactacagctttccgacacgccatcgtcgcgacttaccggagaccgcgatgcagggtgcagcccgggaggccttcctccgacttagctctattcaccgagctgagttagtgagtaccgagtttgctcaccacccgtttcgagaggagagcaactccgtctgcacagttcaggacacaccttgctgctacaacccgatagtgactctactgtcccgatgggctgaggcagtagacgacttctacgaggaggctctgttagagatcgacgaccagcagaggcgtgtgggaaagttagagagtgaggtgactgacctcacagtacatcagcttcagctagaggaggagcaccaggctgggggcagtgagatagactcactgaaggcacagcttcaggtccacgtggggcgtgaccgctacttcttcctcacccggccgtacccaccagcgttccacgctcttctgggagaggttggtatgctggctactgagtcagcaccttacttggtggacccgacagtgacacagccacctgccccagagattgtgcacactccactgatccctactccgtcaccgcagctgggttccagtatgaagactccgatccaggtcgactccgagacagaggggactgacaccgagccagagatagagccggacatcactgatcctttagaggacgagactcctgtcccccgcatcacctttatcggaggccctcgcaccctcagcactgcccgcaagagcgcacgacccccgggcaagaagcccaagccaaatccagaggccactacttccgagccgtggggactcgggtttgcccgtgccagcgaccaccctctacctgccccaggatcctgcggatggttggatgactag

SEQ ID NO: 95634 - DNA, 170 bp, Oryza sativa
  Clone ID: PAT_MRT4530_93809C.1
attcggcacgaggcttctctctcacttttctggctccctcccctccccttccttccttcccctcgcagatctggcagaggggaggggcatcggtggctgcgcaggcggagggggtcgtgggcagcggcgcaagcggagggcgtcagccgcgcaacgacgacagcgcctac

SEQ ID NO: 95635 - DNA, 529 bp, Oryza sativa
  Clone ID: PAT_MRT4530_9380C.1
aagctttggtcagagtcaatagagctactttgaatatgcttaagaaagtcgagccctatgttactttcggttaccccaccagaaagcttatctctgacttggtctacaagagaggatacggaaagatcgataagcaaagaatccctctcacttccaacgatatcgtctccaagggtttgggcagattcggcatccactctgttgaggaattgatccaagaaatcttcaccgtcggccctcacttcaaggaagccaacaacttcctctggtccttcaagcttaactcccccaagggcggcttcaacaacaaaagacatcccttccaaaaaggtggtgactggggaaatagagaagaagaaatcaacgatttggttagaagaatgctttaagaagtctgtgtgtattcaagatttattgaagtaaaacctatagacagtagtactaggacctgacaatttagacttagtcgtcatgaaaaacatatgaaccttccctgatattcgccatttagtttaaaaaaaaaaagctt

SEQ ID NO: 95636 - DNA, 741 bp, Oryza sativa
  Clone ID: PAT_MRT4530_93810C.1
atggtgactcgactgtcccgatgggctgaggcagtagacgacttctacgaggaggcgctattagagatcgacgaccagcagaggcgtttgggagagttggagaccgagttccagcagctatctgatcagtacaatgatcgccgcgggatgatggatacactcgaggagcagctgagaaagagtcaggagcacgtcagccagcttgaggagcagcttcgagcagctatagtcagcaccacaggagcttctacttcctcagcaatagggcgtgaccgctacttcttccttactccgccatacccaccagcgctccacgctcttttgggagaggttgatatgctagttactgagtcagcaccttacctggtggacccgacagtgacacagccacctgccccagagattgtgcacactccactgatccctacttcgtcaccgcagctgggttccagtttggagactccgatccaggttgactccgagacagaggggaccgacactgagccagagatagagccggacatcactgatccttcagaggacgagactcctgtccaccgcatcacctttatcagaggccctcgcaccctcagcactgctcgcaagagcacacgacccccgggcaagaagcccaagccagatccagaggccactacttccgagccatggggactcaggtttgcacgagccagcaaccaccctctacctgccccaggatcctgcggatggttggatgactag

SEQ ID NO: 95637 - DNA, 485 bp, Oryza sativa
  Clone ID: PAT_MRT4530_93811C.1
gatgtgacaggcgtgaccgctacttcttccttaccccgccgtacccgccagcgttccacgctctgttgggagaggttgatatgctagctaccgagtcagcaccttacttggtggacccgacagtgacacagccacctgccccgaagattgtgcacactccactgatctccactctttcaccgcagctgggttccagtttggagactccgatccaggtcgactccaagacagaggggaccgacaccgagccagagatagagccggacatcaccgacccttcagaggacgagactcctgtccaccgcatcacctttgtcggaggccctcgtaccctcagcactgcctgcaagagcacacgaccctcgggcaagaagcccaagctagatccagagacccctacttccgagccgtggggactcaggtttgcacgagccagcgaccaccctcttcctgccccaggttcctgcggatggttggatgactag

SEQ ID NO: 95638 - DNA, 2493 bp, Oryza sativa
  Clone ID: PAT_MRT4530_93812C.1
atggtggccgccggcgaggcaggtcagcaccacgagtccggcggcgcggagtggagggtgacggtggcggaggcgccggaggcggaggtggagcatgagaacgcgaaaggcgcgcggcgggggtgctgctgcgccccggcggcggcggcgtgggtgctgtggtggctggccgcgccgtggaagtgggtggccaggttcgggaggacggcgtggaaggtcggcgccgacgacccgaggagggtggtgcacgggttcaaggtggcgctggcgcttaccttgtgctccgccttctactacgtccgcccgctctacgtcttcaccggccagaccgccatgtgggccgtcctcaccgtcgtcgtcgtcttcgagtacaccgtcggcggctgcatgtacaaggggctgaacagggcgatggcgacggtggccggcggcgcgctggcgctcggcgtgcactgggtcgccgacaagtctggcgacgacgcggagccgttcgtcctcaccgcctcgctcttcgtgctggccgcggcggcgtccttctcccgcttcatccccacgctcaaggcgcggttcgactacggcgtcaccatcttcatcctcacctacagcctcgtcgccgtgtcggggtaccgcgtcgacacgctggtcaccatggcgcagcagcgcctcatcaccatcgccatcggagcgttcatctgcttcgccgtctgcacgctcgtcttcccggtctgggccgggcaggagctgcacgtcctcgtcgcgcgcaacatggacaagctcgccgccgccatcgaggcctgcgtcgacgactacttctcctccgccgagcacgctggcggtggcggcgacgccgccacggcgctgtcggagaaggcgcgcgggtacagggctgtgcttaacgccaaggcgtcggaggactcgctggcgaacctggcgaggtgggagcccggccatggcaagttcggcttccgccacccgtacggccagtaccagaatgcgccggcgcacttcaagaggcacctcgccggcgcctgcgtcgccctgagccagcactgcgccgccgtgctccgcgaggcgtcgggctccgtcacgtccatgacgcggtccggccgcctcgccctcgtcgtcggggacatgaacgccgccgcccaagacctgaggaacgagctgagatgcctcgccgagatactggacgacgacgaagaagaagaagccgcgtcatcagaggcagagcagcacgagcacaacaccgcgccgccgccgccgccgccgctcatcgaggcgctgccgctcttcaccgccgcctctctcctgcttgagatatccactagagcggagggggtcgtcgccgccgtggacgccctgggcaccacggcgaagttcaagaaagccgaccacgccgaaccaccagcaaccacaacgctcgacgccgaggcggccatgcccgtacccaactccaacgccatcgccgcagacgaggcgcacggcaatgccaccgccggcgagcatgacaagaaggagacggcggagcagacgacgacgacgagcgcgagcaccgtggggcagcagcaagaggcgcgggaccaggtgggacagctggtgaagctgctgatgcggaggcggagcaccaagaagtgggcgcgcggcgagcccaaggtgggcccgtgcccgaggccgccgctggacttcccgccggtccacgcgcccagcccgaggagccggtccacggagctcgccggccacccgccggtggtgcccagcccgaggcaccggtccatggacctggcgagccacgggctcgcgctgccgagctcgagacaccggtccatggacctcgcaagccatgggcccgtgctgccgagcccaaggaacaggccgagcaggaaggggaagagcgggcacatgacgtcagcatccggtggcataacagccacgatggtggtgcctcgatgtgttcttgaacacgacacgatggagaaagtcgacaaccggcgtgggaagcaagagaagaattgggaacgccggtggcaagaacttggccacggccttgctgggccgtgtgagggcgagaaggccggaaaggcccagagagcaaggggatggaatcagcccaggagggagatgaccggttggagggacttcagctcaaaagaaacagaagagttttctgaatttttggaggggatgattttaatagaatcaaaaagagaagttgttaaaacaaagagatatgcaaccggccgtggaccgccgtccttctccacaccgatgagctacggggtggaagagggaaggggacctcggtccgacgggagtcactgctgccgggatcttggggctgatgctaaggacctcagtggtgcagtagctactgcgggggaagaaggagctcctgaagacgatcaagcggcgttggccgctgccgtcgagcccgtcgtcgtcgtcgcagttgccattggcggcgtgactggaggtggcgcagttcgggcgcaatag

SEQ ID NO: 95639 - DNA, 681 bp, Oryza sativa
  Clone ID: PAT_MRT4530_93813C.1
gccttcctcggacttagctctatccaccgagctgagttggtgagtactgagtttgctcaccacctgtttcgagaggagagcaactccgtctgcacagttcaggacacaccttgctgctacaacccgatagtgaccctactgtcacgatgggctgaggcagtagacgacttttacgaggaggctctgttagagatcgacgaccagcagaggcatatgggagagttagagaccgaggtgactgacctcacagtgcagcagcttcagctggaagaggagcaccaggcttggggcagtgagatagactcactaaaggcacagctccaggtccacggcgaccagttccagcagttatctgaccagtacaacgacagccgcgggatgatggatacacttgaggagcagctgagagagagacgtgaccgctactttttcctcaccctgccatacccaccagcgttgcacgctcttttgggagaggttggtatgctggctactgagtcagcaccttacttggtggacccgacagtgacacagccacctgccccggagattgtgcacactccactgatccctacaccttctccgcagctgggttccagtttggagactccgatccaagtcgactccgagacagaggggaccgacaccgagccagagatcgagccagacatcactaatcgg

SEQ ID NO: 95640 - DNA, 288 bp, Oryza sativa
  Clone ID: PAT_MRT4530_93814C.1
atggcggctcccccgtgcgcgcagccatggtaccggtccaaccggaccccggtggcgcgggagtgggggaacggcgtcggcgtcggcttggggtcggtagggctggtgaagcagcggttgatggtggcggcagcgactccatctccggggaaagatcgcatggctcgccgggcagagtcaccactgccgtccatccgtggtgggcgcagtactgcaccccttgcacacagatacggcgaggcactgcggctaccggagatggaggcggaggaggagcaaccggagtag

SEQ ID NO: 95641 - DNA, 2523 bp, Oryza sativa
  Clone ID: PAT_MRT4530_93815C.1
atggtggccgccggcgaggcaggtcagcaccacgagtccggcggcgcggagtggagggtgacggtggcggaggcgccggaggcggaggtggagcatgagaacgcgaaaggcgcgcggcgggggtgctgctgcgccccggcggcggcggcgtgggtgctgtggtggctggccgcgccgtggaagtgggtggccaggttcgggaggacggcgtggaaggtcggcgccgacgacccgaggagggtggtgcacgggttcaaggtggcgctggcgcttaccttgtgctccgccttctactacgtccgcccgctctacgtcttcaccggccagaccgccatgtgggccgtcctcaccgtcgtcgtcgtcttcgagtacaccgtcggcggctgcatgtacaaggggctgaacagggcgatggcgacggtggccggcggcgcgctggcgctcggcgtgcactgggtcgccgacaagtctggcgacgacgcggagccgttcgtcctcaccgcctcgctcttcgtgctggccgcggcggcgtccttctcccgcttcatccccacgctcaaggcgcggttcgactacggcgtcaccatcttcatcctcacctacagcctcgtcgccgtgtcggggtaccgcgtcgacacgctggtcaccatggcgcagcagcgcctcatcaccatcgccatcggagcgttcatctgcttcgccgtctgcacgctcgtcttcccggtctgggccgggcaggagctgcacgtcctcgtcgcgcgcaacatggacaagctcgccgccgccatcgaggcctgcgtcgacgactacttctcctccgccgagcacgctggcggtggcggcgacgccgccacggcgctgtcggagaaggcgcgcgggtacagggctgtgcttaacgccaaggcgtcggaggactcgctggcgaacctggcgaggtgggagcccggccatggcaagttcggcttccgccacccgtacggccagtaccagaatgtcggcgccgccatgcgctgctgcgcctactgcatcgacgccctcgcggcctgcgtcggcgcgggcgggcaggcgccggcgcacgtcaagaggcacctcgccggcgcctgcgtcgccctgagccagcactgcgccgccgtgctccgcgaggcgtcgggctccgtcacgtccatgacgcggtccggccgcctcgccctcgtcgtcggggacatgaacgccgccgcccaagacctgaggaacgagctgagatgcctcgccgagatactggacgacgacgaagaagaagaagccgcgtcatcagaggcagagcagcacgagcacaacaccgcgccgccgccgccgccgccgctcatcgaggcgctgccgctcttcaccgccgcctctctcctgcttgagatatccactagagcggagggggtcgtcgccgccgtggacgccctgggcaccacggcgaagttcaagaaagccgaccacgccgaaccaccagcaaccacaacgctcgacgccgaggcggccatgcccgtacccaactccaacgccatcgccgcagacgaggcgcacggcaatgccaccgccggcgagcatgacaagaaggagacggcggagcagacgacgacgacgagcgcgagcaccgtggggcagcagcaagaggcgcgggaccaggtgggacagctggtgaagctgctgatgcggaggcggagcaccaagaagtgggcgcgcggcgagcccaaggtgggcccgtgcccgaggccgccgctggacttcccgccggtccacgcgcccagcccgaggagccggttccacggagctcgccggccacccgccggtggtgcccagcccgaggcaccggtccatggacctggcgagccacgggctcgcgctgccgagctcgagacaccgggcttcaggccgagcaggaaggggaagagcgggcacatgacgtcagcatccggtggcataacagccacgatggtggtgcctcgatgtgttcttgaacacgacacgatggagaaagtcgacaaccggcgtgggaagcaagagaagaattgggaacgccggtggcaagaacttggccacggccttgctgggccgtgtgagggcgagaaggccggaaaggcccagagagcaaggggatggaatcagcccaggagggagatgaccggttggagggacttcagctcaaaagaaacagaagagttttctgaatttttggaggggatgattttaatagaatcaaaaagagaagttgttaaaacaaagagatatgcaaccggccgtggaccgccgtccttctccacaccgatgagctacggggtggaagagggaaggggacctcggtccgacgggagtcactgctgccgggatcttggggctgatgctaaggacctcagtggtgcagtagctactgcgggggaagaaggagctcctgaagacgatcaagcggcgttggccgctgccgtcgagcccgtcgtcgtcgtcgcagttgccattggcggcgtgactggaggtggcgcagttcgggcgcaatag

SEQ ID NO: 95642 - DNA, 351 bp, Oryza sativa
  Clone ID: PAT_MRT4530_93816C.1
ggagagagaactagtctcgagtttttttttttttttttttaagtaccacatgtaaatcaaaattagcatggccaattgccattatttttgtgttcaaatgttcaaagcctgagcttccccgtcatgttagaagtcaggcttctttggaaatgggggatgaatatgtgcatgtgcagccgtttaggatggacctatggactggtgaagtacactgaactcattaccatattgcaaatcttattttactgtccagatttacggatcctgacaaggacacgtcatgccacagtgccacttgtgcaacaggttggaaatgtatacacgaatcatttgccaacatggtacttgcat

SEQ ID NO: 95643 - DNA, 247 bp, Oryza sativa
  Clone ID: PAT_MRT4530_93817C.1
gcgtccggcgccgcggcggcgaccaaacggttgaccgccagccacctgtggccggccggctccaagaacgccgtccgcggcaagagcaagagcaaaagtcatcataggaccttcgccgacgtccacaacttccaggccgtcttccatcagctcgacgatgactccgacttctacgactcggatgaagaagactacagacacttactgtactcgtccaaatctcgtgttgtccccgggcactacaggc

SEQ ID NO: 95644 - DNA, 906 bp, Oryza sativa
  Clone ID: PAT_MRT4530_93818C.1
atggccgagctgatgcggcgcctcgtcgcgcaccacggctgtgccgccttgctcatcacgttctccggcctcgcctcgcctcgccaacatcagcgtcctccgtcgacgttgtcgtggacctcgacaaagcggcgcatgattgccaacgacgcagtattagaggggatgaagcaagtggcggacgagctcgaagatcaggacgccacgccgtcgtggacctcaacgaagctgacgcgcctcgccatcgttgttgttgccgccgccatggtgtcgacgtcgacgtgctgccccaggaagaactcgtggtcgttgaggatgtcgaacggcaccaactccaaggacggcacaccgccctgccacagcacgtcggccgtggtgccggtgctggagacgagcatcaccttctcgacggcgggcgtcgtgccgccccaccgcgtcacccttaaatccttcttgaagaacgagcgacgggcgaaacggcggtgggcaagcgcagcgccagatccaccggtccccttcccgctggttgttggcgccagaggcgtcggcgagctcggcgcgcggcggggggagggcgagctcgacttgagcaactgccacagccgcttgccgcgcgcgccagcggccagccagagcaggggcctttcccttccactcctccttctccttcccgtcaacgacggtgtgcggttcctctgggcgctgtgcaacgccggtgagcagttgccggaggggtacgaggcgcggcgtggtggagacgggtgggtgccgcagctgcgcgtgctgacacacgtcgccgtcggcgcgttcctgcgtgcgccacgcgaagaagggattggatcggacacgggaaagcaaaagggggggcaaaatgcaaatatgttgccacactggaccgccacgtaa

SEQ ID NO: 95645 - DNA, 2058 bp, Oryza sativa
  Clone ID: PAT_MRT4530_93819C.1
gtcttcatgacaaacctcaatggggaggtgggcccgacgccccatgctcccgggcaacgccgccccgggagtccactggatgcaccaagtgacaatatggatgaggaaatttccgtagatccttcccaaggcaacaactcggaggcagtgaacaccagtaacataaatcaggcagataaagcaccagatttacctgaaataatgcgtgaagcaccatttgagggccctgaacttaacttgccagatcttgatgagcaaaacaatgatcccatggatgtgaatgaggaatcttcaccatttgtgtccaagaatatcacccctccggcactggaacgaactatatcccctggtcaaggtggattatctgggacatccattcccaatgcacgaggaagtacaagcaccacatatgacaatatagaagatgttataccaatggatattggaatgcctgattttaggattgaaccatctccacctcgagtacaagatgagatgaatgcacaaccagtacaaggtgagatgaacgcacaaccagtacaagatgagatgaacgcacaaccagtacaagatgagatgaatgcacacccagcacaagataagaggagaattagatatgacaatgaaatagtgttctccaatgcttatatgaagagacaaattgatggcggtgaactacatcgtctggtcagcaagaggaggaaactgcctcaagcagcggtggatgtgtggaaattcaacaggattcgccaaaaggatggtttcttgcttgatcctttggtccatgggatgtgcgctaccctacgtcaaacctacgagagaaccttcccccatgtgattgaccctgaagctgagtcaggatctgtcgagcatactcctggggtagctaatgacagtattcaggatacacatgatcatcaactctccccgaagtctcctggaaacacagatgcacaacctgaacatcagttcaatcaacaagctccaagaaattcagatggacaacctgaacctgagcttaacccaaagtctcaggcgaagcaggcacggtcacactttgatgatatgcctgagatccctcgattctcgccacaaaatattccatctccaataagagacgacaattctcctttcaaaactcctggtgctggtggaactccgaaatcaagacttggagaaactcctgcctctgggacaccagcagatatgagttacatgtcacctggacaagactctgatcctcaagtttctccttttccatttaatgatgaacttgatggagatttgcccgagattcctagcctcatgagtactcctggagtaatatctaccgcaggtactggcaccacaggattgggaagcatgtctgctaggacaagggctgtggcacagtacttcaaagatcaaatggcttcggctacatcagatgaccaacctggtaaatttatcttgaacagaatcttggaagggagacacaggaaacaagctgcacgcatgttttttgaaacactggttctaaagagttatgattatattgatgttgaacaagaagcagcctatggtgatatagcagtttcagttaaaccctcactctcaggggcccaattccagtgcttagacccacatataatctcatttgatccgcgggaaggagctttggtgggatttgcagaaatggcctgaacaatggattcttatatgcgacatggctggctaatctactgcaatttgctggactccaattactagaacaagtaggcactccatgccatttaggtttatgttgcagaatactgtagttgtaaagctgtagcattagtagttgtcgaaagccaatacatcttgtccagttaggacttcagatggtagtccttgcctatgctttcttggcagaaagcaaagtgaacaacgaatcagatgaagataagaatttttcttacttttgcagtttaattacatggtagtgatatgttaaatacaagtcgaaaaatgttggatgactagcataagacaattttataaatgtcagtgtacatagtctgataaaaaaaaaaaaaa

SEQ ID NO: 95646 - DNA, 1336 bp, Oryza sativa
  unsure (1)..(1336): unsure at all n locations
  Clone ID: PAT_MRT4530_9381C.1
gcacgagcaaattagttaaggaaaatttggactacaataattgcctttggtagaatttaaatagtagggtggcggcgctcttttctcctgcctccccgggctgccggcgttccccccgcggctcaaggcgatgtggggcctgctgaggcggagcagctcctccgggttctcgtcgtcgtccaccgccgaggaggtcaccgccggcatcgacggctcgggcctcgtcgccctcatcaccggtgcctccagtgggattggggctgaaacatgccgagtcctggtgatgcggggtgtgcatgttgttatgggggttaggaatttatctgccggtgcacgcgtgagggatgagatattgaaacaagttccgtctgcaaagattgagattcttaatcttgaccttagctcgatgtcatccgtgaggagatttgcagagaatttcaaagctttgaaccttcctttgaacattctgataaataatgcaggggtttgttttgtgcccttcaagctttcagaggatgacattgagctgcattttgcaacgaatcacatcgggcattttctactgaccgatcttttacttgagaagatgaaagttacagctatagaaagtgggatagaaggaagggttgtgatagttgcttctaacagctacaagcacccttatcgagaggggattcgttttgataagatcaatgatgaatctgggtataacaaaatcttcgcttacggccaatccaagcttgccaacatactgcattccaatttactatctagcaatctgaaggagcaagatgcaaaagtaacagtcaactctctgcatcctggagctgttgtcaccaacattatgcgtcactggtatttcgtaaatggtatgggcatatctgttggtaaatttttcgttaaaggtgttgaacaaggtgcagccacagtgtgctatgtggcattgcatcctcaggttgctggagtcactggcaaatactttgttgactgcaatgtcactgaattaaaatctcatgcgctcgacatgggcctcgccaaaagattgtgggatttcagtctcaacctaatccattagtagaaactgttgcaagtggtgtgtaaagcctattttttggaaacgaactgaatcaagttagggcactgaagtgngtgaagaacatgataaaagtatttctacaaaaattgcgaatggaggacatgttgttaatagatgtgaaatttatccagttgttcggtaggtgtgatatcaaactgctggaagacagcccgaaccagccacatttgtaaagcttgcatnnattgattggatgtacttcttcaaaaaaaaaaaaaaaaa

SEQ ID NO: 95647 - DNA, 441 bp, Oryza sativa
  Clone ID: PAT_MRT4530_93820C.1
atgtcggtgatggaccgactcgccccgcgtctcctcagcaccgagtcctctaaccacaagatgaacccctcctcctcctcctcgccgcttctggacaacttcttccgctccgatcgcgctaagaggatggataccagtaaggttcaattctcaaaggacgaccttaaggaatttgataggtatttggatgagaggacgaagcaagctgagaggaacttgttgctgtctctggacaagttctgtgatgcctgtgaaagacgggcttctctgcttcgagacatcaaagcgatgttagaggctagaaataaacggtctgcccaaaagctttgctttggatttaatgtactccgtatactgaaaatctctatatctatagagatttgctccggtccaacaaaaaagtatctcgagataccagtacctcgagcttcatatgcatga

SEQ ID NO: 95648 - DNA, 687 bp, Oryza sativa
  Clone ID: PAT_MRT4530_93821C.1
atggtaactgtccacgatccgatcgaccaacaacgcccggcatatcctgttccatttttcaacagaacaccgcgcgcctcctgcatcgccaccgtcgccgctgccgccccaccgtgccgccacccggcctcgccagctggccgaaaagtgtcaacggcgtcggcgaggccccgccgactggccccctccccctctccttctttgcctcaagccggcggcggcgtgctgtccgtcatcttccccatcgccagcggcggggcgccaccaccggccgcctacaccgggccaccggccgctcccaaccccgcggcttcgacggagccgccgccgcctagccgcccgcccaatccgccgcccgccgccgggctactgcctcccatggccatccctttaaagccagcgaactccccctttttccccctccttccttccccccacccctaccccaccccaccccgggaccctaattcgtcggccctctgccagagtttgggttcgccggcgccggagaagaagaggtggttgccggagttggagaagaagagcacgaatcgtgaagcacatccagtggagtggagatggggcaacccgattcgccgggggacgttccaacgaacaggcccagcagagaagctctttggaaagggtgcactgcatattgcgcatatgctattgctctctcgctag

SEQ ID NO: 95649 - DNA, 314 bp, Oryza sativa
  Clone ID: PAT_MRT4530_93822C.1
atccatcctcgcgcggtgcgtagttgcgagaagagaaggcggggagggcaaagcgatggctcctatgaagctatacgggttgacgctgccgtagaacgtgacaagctgcttgtctgtgctctaggagcccgctcacgagtacgagatcgtgccactcgatttctccaaaggcctgcacaaagacccactccacctatgcatgaaccaatccgttcacttgccgactttataagatggcgacttgttcctataagaatcacgtgcaagtcgcaagtatgtatgccgcatgaacaaaccagatctgttgcaggatg

SEQ ID NO: 95650 - DNA, 755 bp, Oryza sativa
  Clone ID: PAT_MRT4530_93823C.1
acccccccccccccccccccccccccccttttttttttttttttgtattcttttgcagatgcgaggctttccttataaaatgatgattccacagagaagttacgtacagtccttggtaaaaaaaaagacccccaaatcaaatcagtgcatcatcctcattgttgagccttggcattggcattcctctttgagcttattgcacaattaaattgatcacctcagtgacagccttgttccaggatcccacctacaatggcaatggcaatgaatcgatcagggcttctgcagcagggcggtgaggtagacgtggtcatgcttggctccgggtggcgccgtgggcgtgggtgtggtcttgtcggcgacggcccacttgagggtcttgtagccgaggcggcgcagcatgggttggtagacggcggcgaggtcagggcggcggcaccagaagtggtcgcgccagagcaggccgcgggggcgcagcaccctgtccgcgtcgtaccacaggaactccagcgccgcctccgggatccagcggttcacggcgtgccccgcccgcaccaggtccatggtggcgtcccccaccgggaagcgctgctgcagcggcgcgtgcagcggcaccaccccgcgcgccgccgccgcctccgagtagggcgccccgaggttcatagtggtggtgagcacggtggcgttggccgcccgcttgaggcgcgccgccagcgtccccgtcccgccgccaacgtccagccccagcctcgtgc

SEQ ID NO: 95651 - DNA, 729 bp, Oryza sativa
  unsure (1)..(729): unsure at all n locations
  Clone ID: PAT_MRT4530_93824C.1
tagacttgacagcgagtgacatcattcntccatccaccaacagtatgtccccaacttcaacatcgttatgaagtcatcgtaattcacactgacggtgtctttggtgctcacccctcttttaatagtaaaattgaactcttgaccttcctcgagcatgattggttctggaacatccccacttctcacttctggacccttggtatccagcataatagcaatgacattgccatcagtattcttcgcattgtactccttcaccaaatcaatcaccttctggtgcgactggtggtcaccatgggacatattcatgcgtgcgacgttcattccagtctcagcaagtttccatatcatctcgcgtgtgttggttgaggggcctatggtgcaaacaatctttgtcttcctacgggaattcgcagagaccacttgcgaagtagcgtcagcggtattctcagcaatgttctgagcggagagggagccgttgctcccgagcgcgagatccgccgccaccctgtcggaggtggaggtcctgagggagcgcgccgccacggccctcctcggctgcgggggcgccgccgccgccgccgccgcgggcggagccggcctcactgccggcgccgccatgcgcgccgccgcggaccccacgatctcagccgccgccgccgccattggagggagagggcgcgtgtggaggcgagggtttctcgtctcttctcttctctctctaatctc

SEQ ID NO: 95652 - DNA, 105 bp, Oryza sativa
  Clone ID: PAT_MRT4530_93825C.1
atgtctaggaggccgccagccgaaaatgggctggattggaccagcccatctgctccattggatgtagggtttggcgtggacgtccaggatttctccccaatgacg

SEQ ID NO: 95653 - DNA, 2134 bp, Oryza sativa
  Clone ID: PAT_MRT4530_93826C.1
aaagaaatgtgatatattctactactatggatttggacaggctctatgcaggcattcggcacgcaggcccccccctttttttggtgcccgggttgttttttctgtttttctgacgttttgttcagtccttttggaaccatgtgaaaattaatatagattatcttattcaattccagagcctacaagtaaaatcaacataacatataataatccaaacttgttccccgtaaaagttactcgtaatttagcacatcaagtaacaaacaaaatttgaacaggtacatccctgtgacggtatgacggtcaggctcattagccctggactttcctcacttgaatgtggtgagtagactcctctctccagatcgacttcactccactctgaacaagggtcacgtagtccccttctttcacgaattgggcgttcagcaagctactaattgctctagagaaagtttcctctgcatcatcagaaaacttcatgtaaatgggaaccacaccctggtagagtgccagacgttgcttcactcgttcctcatttgtaaatgcaaaaattgtagacgagggccggtagtggctgagaaggactgccatggagccggttcgtgtaaacacaataattggggtgcaaagggtgttcgccatcattgtagcatgagatccaaacattttgcttagttggctttgcgaaaattcctcgttgagcagagcctgaggatgtgcaacaagactaggagatgtagttgggttatacaggctggattctgttctctgtgccactgtgtgcatcaccttgactgccttcagtgggaactttccatgggcagtttcaccagacagcatgatggcatcagaaccttcacgaactgcaattgctatatcagaaacttctgctcttgttggagtgggatggtctatcatgctctctaacatattcgtggcaacaataactggtttctgcatgcttcggcatgttctgacaatctcctcctgcagcaaaggaacttcctcaattggaagttcagcaccaagatcccctcttgccaccatcgccccatctgaagcagcaataatggactggaggtttggtattgaatctgcactttcaatctttggaatgacatgtatatctgcattagcacttttaaggtagtccttcagttcatgaataacttttgcatccttcacaaaggaaacggcatagaaatcaacaccattttcaacaccaaactttatgtcctcccaatctttctctgtaatagatggcaaagtcgcactctttccacggacatttaggtggcgccttgatttcagttccccaccatcaactacttcacacttaaccgtatcagctgttttagacttgacagcgagtgacatcattcctccatccaccaacagtatgtccccaacttcaacatcgtttatgaagtcatcgtaattcacactgacggtgtctttggtgctcacccctcttttaatagtaaaattgaactcttgaccttcctcgagcatgattggttctggaacatccccacttctcacttctggaccctgcatcactgaagttcgatcatcacagctcatttgcttggtatccagcataatagcaatgacattgccatcagtattcttcgcattgtactccttcaccaaatcaatcaccttctggtgcgactggtggtcaccatgggacatattcatgcgtgcgacgttcattccagtctcagcaagtttccatatcatctcgcgtgtgttggttgaggggcctatggtgcaaacaatctttgtcttcctacgggaattcgcagagaccacttgcgaagtagcgtcagcggtattctcagcaatgttctgagcggagagggagccgttgctcccgagcgcgagatccgccgccaccctgtcggaggtggaggtcctgagggagcgcgccgccacggccctcctcggctgcgggggcgccgccgccgccgccgccgcgggcggagccggcctcactgccggcgccgccatgcgcgccgccgcggaccccacgatctcagccgccgccgccgccattggagggagagggcgcgtgtggaggcgagggtttctcgtctcttctcttctctctcttctctcccttggtgtt

SEQ ID NO: 95654 - DNA, 348 bp, Oryza sativa
  Clone ID: PAT_MRT4530_93827C.1
aggggcagatgtatacgactcactatagggcgaattgggcccgacgtcgcatgctcccggcgccatggcggcgcgggaattcgattaatcttaatacttgcgaagatcgaagtacaaaaacccctacggatattatcagcccttcggctaacgtataagggtagaactcgtaggaaggaaggaaggaaggaaggaaggaaggaaagaagggaaggggaacagatgtttttgagcgcgagccaacatcgtaatctatgttccgcaacatcgtaattaaggaaaaatgaatgttccattttcctccgagttacgacgaccatcttctttctctttaaattaatcacggtt

SEQ ID NO: 95655 - DNA, 980 bp, Oryza sativa
  Clone ID: PAT_MRT4530_93828C.1
tccccacgccgccgccggccggtatccagctctcgtctcgaaatcaaaagcacacccaagagagagtagtggtagttccagagcggtctgcttgcgaagttgcgatgcctgccatggccaagcccgcctcccgcgctgccaagcccgcgtcggcgccgaagaagcagaaggcaaagccctccgccgccgccggtggctcctcccacccgccttatttcgagatgatcaaggaggcgatcacggtgcttaaggagaggaccggctcgagcgcgcacgccatcgccaagtacatggaggagaagcacggggcgtcgctgccggccaactacaagaagatgctctccatccagctgcgcgggttcgcttccaagggcaagctcgtcaaggttaaggcctcctacaagctctccgacgccgccaaggactcgcccaaggccaagcctgccgcccccgcccccaaggcagcagcgccgaagccagcgaaggacgccgccaaacccaagaaggacgccgccgctgccaaacccaagaaggcccccgccgctggcaccaagcgcaaggcgccggagaagaaggtggtcgccaagcccaagaagtctccggcggcgaaggcgaaggccaagcccaagaccgtccggtcgccggccgcgaagaagacccgcaaggcacctgcagcttgagttgggagtttggttgatagctatgtaggtcccctcttggttgaaatggttggtgtttaggatctgtacaaaggctgcctcggctatgtctccctatttagatagttctcttgagtaggcgaagttctatgtatcccttgatggtgtagtataagaaatggttaggtctctggagatgtgaggcgcttccatctaactcatgaaatgaactttgccgttttctttgttgtaaaaaaaaaaaaaaaaaaaaactcgtgccctctcccccccccccggcccaaaaaaaaaaaaaccaccaaa

SEQ ID NO: 95656 - DNA, 1158 bp, Oryza sativa
  Clone ID: PAT_MRT4530_93829C.1
atggcgagcgcagcctctgcaacggagagtcagaagtcggcgaaacctaaaggatccacggcaagccaagaagatgaggcaaaggatgatattgagatgcttttggagggtttggatctcaggaaggacgaggaagaggatgttgaattggaggaagatctcaaagagctggaagcggatgcccgatggttagccctagctagggttcatacagagaaatcctttagccatggtgctttgtttgccagcatgcgatctgcatggaattgtgcgaaggaagtagatttcaggtccatgaaagataatttgttttcaatccaattgaattgtcttgctgattgggagcgagttatggaggaaggaccatggattttccgtggttgtcctgtgctgcttgctgaatatgatggttggtcagagattgaatctgtggttcttgaaacctatcccacttgggtccagattcatgatctgaaagagaagatcagaacagggagtattgcaactcagttagtccgtaaagcaggaactgtcatcaaattagatgaggcgtcagtaaaagggagtggtgatggtgttcgaatgctggtcttctgtgggatttgtggtctggtgggtcatgtcacaaaggagcatggtgatggcgtgcatcttccagaagcgatacagtatcctgatactttggtagcacctgagtttagaagatcgggtaactggtttaatggtggcggaagaaaaggccgaggccaaggaagaggaaggggatggagtggtcgttcttatcgacctgactctgatatggctgcgtatgatgggggcgacgatgaggagatgatggatacagccactagcccttcaaaacaagtggctaaacactatgctccctctacatccgtaaaaaagagattggctctggaacaggtgacgtcaccaaatctgaagagcaagcaggccctactactggagaatacacctgtgcaagatgatggaaatataaatactgaagctctcccaaaggaagttgatgagtcaaacagtaaggaagaggacagttcaacatcactagacagtaagcgtcagaagaaggtggatgaaggcagcaatacagatgacttggcaacatcggcgggctccctcgaggagtaccgccgggcctaa

SEQ ID NO: 95657 - DNA, 2574 bp, Oryza sativa
  Clone ID: PAT_MRT4530_9382C.1
atgaatccttatttcatcggcttcgctatcccttttctggcatctctgctgttcaccaagaggaagggtgaaaagaaaaggggagtgccggttgatgtgggcggagagcccggctatgtgatccgtaaccacaagttcgagcggcccgttgaaacgcactgggaaggggtttccacgcttgcggagctgtttgagcagtcctgcgagcagtatgtctacatgccactccttggcaccagaaagctcatttcgagggaaatggaggcagcccgcgatgggaggtcctttgagaagcttcatttggggcagtatgagtggaaaagctatgctgatgcattcaagactgtctgcaacttctcatctggtttagtgcgaattgggcaccagagggatgagcgtgttgctattttcgccgatacacgggccgagtggcagattgcattgcaggcatgcttcagacaaagtattacggttgtcaccatttattcctccttgggcgagggagcgttatgtcactcactaaacgagactgaggtaactactgtgatatgtggaaggaaagaactgaaaaaacttcttgacataagtgggcaacttgatactgtgaaacatgtcatctacgtaaacgaggaaggcgtctctagtgaagtatccttagctcaaaaatgcaccagctggagggttgagtcatttgaggaggtagagaggttaggattggaaacacctgtagaagcaaagctgcctcttccgtcagatactgcggtgataatgtatacaagtggcagcactggaatgcccaagggagtcatgatgagccatcgcaatgtcctggctgttgtatcagctgttatgaccattgtgcctgcacttggcaagaaggatgtctacttggcatacctcccattagcacacattcttgaattagcagctgagacagttatgtctgctgttggggcttctatagggtatggatcaccactgaccctgactgatacatcaaataaaataaagaaggggactcagggcgatgcttcagctctgaagccaacacttatgactgcagtacctgctatacttgatcgtgttcgtgatggtgttagaaaaaatgttgatgcaaagggtggtgcagcaaagaaactatttgatattgcctatagccgtcggttagctgctatcaatggaagttggtttggtgcatggggattagagaagcatttgtgggatatgcttgtctttcagaaggtggagcacctctgtctggagatactcagagatttatcaatatatgccttgggttttgggttgtgctgttgcagggctccaatagggcaaggatatggtcttactgaaacatgtgctggcgggacattttccgagtatgatgacaattctgttggccgtgttggtgctccattgccttgctcatacattaagttgatagattgggctgaaggtggatatttaactaatgattcaccaatgcctcggggtgaaatagttattggaggtccaaacgtgacaaaaggctactttaagaatgaggcaaaaacaaatgaagtctacaaggatgatgaaagaggcatgcggtggttctattctggtgacattggacgtttgcatccagatggttgccttgaaattattgaccgtaagaaggacatagtcaagcttcaacatggtgaatatgtatctttaggaaaggtggaggctgctttgagtgtgtgcccatatgttgacaacatcatgatccatgctgaccccttccacaactactgcgttgcacttgttgtagttgcacacagtgaactgaaaagctgggcctcacaacaaggcatcacgtattcggatgtttcagatttgtgtgagaagcaagagactgtcaaagaagtccttcaatgtttagcaaaggctgccaagcaagcgcggctggagaagtttgagatcccagccaaagtcaagctggtgccggagccatggaccccagagtcaggactcgtcacggctgccctcaagctcaagagggaggccatcaagaaggcgtacgaggatgaccttgcggcgttatacagctaaagttgccgctgcattctgtttttctgatactgaagaaaaatcaacagcacgagttctgtctcgtggcaataacaaaattttctttcctagtttcgaaacatccaaaaaccactgtttttgcaatggcatcagtgggtagcgatgaaacagatgtaggtcaatgcatttggaagaagcattcctgaaatggggaacaggtagatttggaattctgtggtattggccttgtttcttgtaaattacctgagattttcttagctctttgagaggttatctgagattttccgtaggacagagctcttgtgaccaatctgaagatgctgataccggcaggaggtagcctgaaattttggacctgtggttgtttgatcttttggagctagcacaattatgtgtagcctcatttcacacttacttctgtgtctctgccatattctcttgtgaatttacattgttcaaaggaaaaaaaaaaggcattctacaaaaaaaaaaaaaaaaaaa

SEQ ID NO: 95658 - DNA, 213 bp, Oryza sativa
  Clone ID: PAT_MRT4530_93830C.1
ttttatgatcgcctcggagaaggcaacgtcgcgctcgtcgccgggtaggtagaatccagctgatggcgaactcaaaccggctgccgtactgcacatggtcatgtcggaggtggaggaggaggaggaggggggttgctcattcataggctcatacaatgatttggtgtacaggtcggttaagggcaaggtggtgcaagattggaggctgcattg

SEQ ID NO: 95659 - DNA, 873 bp, Oryza sativa
  Clone ID: PAT_MRT4530_93831C.1
cccgccgtcgtcgtcgccaatagaggtcaccgccgccgccgtgcatccagccggccgccgccgtcgcccatccagcctgccgtcgtcgtcgccatcgtcgccgtcgtgcatccagccggccaccggccgccgccgtcgcccatccagcccgtcgtcatcgtcgccaatcgaggcagccgccgccgtcgtgcatttagctggccgcctgccgccgccgtcacccatctagcccgccgtcgtcatcgccgtcccccatccagccggccgtcgtcgtcgccatcgtcgccgtcgtgcatccagccggccaccggccgccgccgtcgcccatccagcccgtcgtcatcgtcgccaatcgaggcagccgccgccgtcgtgcatttagctggccgcctgccgccgccgtcacccatccagcccgccgtcgtcatcgccgtcccccatccagccggccgtcgtcgtcgccaatcgaggctgccgccgccgtcgcccatccaacccgccaccgtcgtcgccgtccctcatccagctggccgtcgttgtcgccaatcgaggctgccgccgccgttgtgcatccagccggccgccggcgtcgcgcatccagccgcctgccgccgcgcgtccgtccgcccgccactgtccccctcgagcccgccgcgtccagccccttccagccgccgcgcgtcccgccaccgccgccgcgcgtccgtccgctcgccatcgtccccctcaagcccgccgcgtctagccgccgcgcgtccagccgccgtccagcccgccgccgccgtcacgcgtccaggcgcccgccgccgtccccctcgagccaaccgccatgccgctgctatgctctcccgacgttttttctttctctcgtga

SEQ ID NO: 95660 - DNA, 283 bp, Oryza sativa
  Clone ID: PAT_MRT4530_93832C.1
aagcttgcaccataatcaacaatgggtacatatggagtcttctctagaacatctagaggcacatcacaacagcagctataacatcaagttacacatttggcatcatcaacatcaaccatcaaagctaacaagaaatatatcaacaaataagcaaagaaatagcggattatgtccttttcggttctcagatgagatctcccaaaccacagatgcaaattgcactaaacttggcaaaaatgatggtctatgagtcccttccaagatatccaaaaaaaaaaagctt

SEQ ID NO: 95661 - DNA, 330 bp, Oryza sativa
  Clone ID: PAT_MRT4530_93833C.1
atgccaggtcgggcccatcatatatatcccgacgtagtggccgatgaggaggatgagggagaacaaattaccgaaagaggaaagagcggaaagctgcaggccgaaaaacaacaatacgtgcagggtgtgcagaccggcgacaagcggcggtcagaccggtggcttaagggcggtcagaccggcagcgactccaggcgcgacaggcatcttcaggcggtcggaccgatcgatctacaccggtcagaccgacgacatcagggcggtcagaccggtggatcatcttcggccgactgcgatggctgcggctgcgacggcagctacgcacagtga

SEQ ID NO: 95662 - DNA, 562 bp, Oryza sativa
  Clone ID: PAT_MRT4530_93834C.1
atgggtggaagggtctttctgtcctttactgtttcacgagagaaagaaaaaacgtcgggagagcatagcagcggcatggcggttggctcgagggggacggcggcgggcgcctggacgcgtgacggcggcggcgggctggacggcggctggagcggcggcggtggcgggacgcgcggcggctggaaggggctggacgcggcgggctcgagggggacagtggcgggcggacggacgcgcggcggcaggcggctggatgcgcgacgccggcggccggctggatgcacaacggcggcggctggatgagggacggcgacgacggtggcgggttggatgggcgacggcggcggcagcctcgattggcgacgacgacggccggctggatgggggacggcgatgacgacggcgacgacgacggcaggctggatgggcgacggcggcggccggctggatgcacggcggcggcggtgacctctattggcgacgacgacggcgggctggatgggcacggacgaagagatgttttttttgtccgatcatacccttgctaaatcaacggttagat

SEQ ID NO: 95663 - DNA, 1279 bp, Oryza sativa
  Clone ID: PAT_MRT4530_93835C.1
gagctgtggatttactggtatcaagggttccttagctttggaaagagacaggtttctttgggcaagtattaattatattgatgaagtaattgttttggaaaactttgatgaggaattctggggagtctctgaactgagggttgagtttcttgatgttgccgctgatgtggacatgaactcaaatgtgccaatcgtgtcttatttccatatgcacctgaaagaaagaatgttgcgtccatttaaacaagatcaaggcgactgcaaggatgatgaacctcaattctggggacaggagttccagcaccgaatcccagcaatccatcggaatacttggtcccctccacccaagggttggatcaagctcaacttccatggcactggctgctccaaaaatcgttctgctggcatgggtggtgtattccacaatgatgaaggtgcactctcctacttcatcggttccttaggtaacgtggatcagactgtggctagtattcaagcacttgaacatgggctagaaatcatgcttgagcatcatgaaccagttaaaaagctgatcgttgagggggacgatctcacggtgatacgttggtgcaacaaaatctcttgcccacctgcaagagctcatgattcattcttacatagctactggtacatggatttgatgccgtgtgagggggctggtgtgcttgctgggtcatccaaagagactaacaatgagagtgatagttcttcacaagacgcatcacctgttaagccactcaatgactgtagcagtgagaatgataaagatgagtatgacggttctttgcaggatgcatcacctagtgaaccaccgaatgacagtaactgcgagagtggtaaatatgagaacagtgactctctacaagatgcttcacccgctgagctatctgaagtctgttacaatggaaatggttctttacaggatgcttcgcctgctgagctatctgaagtcagtaacaatggaaatggttctttacaagatgcttcgtcttctgagctatctgaagtctgtaacaatgaaaatggtcaggatgaggacggatgttcttcatcttctgagtttgtgatccctcctggatgggctcaaagggagtacatagcttggcgggtcgaagaggaggcaaatcagaccgcaattggtttggcgcgtctaggcactgcgctacctgaccatgggataatggtacacctctcaaccaagtgtgactgtgaacatggaagagaaatgaagaaaggcagaccagacatcacatggtga

SEQ ID NO: 95664 - DNA, 822 bp, Oryza sativa
  Clone ID: PAT_MRT4530_93836C.1
tcactgttgtggttctttgttaggacagttgcgcgaatcgtgcagcacgacttgtttgcacttcttgcacctttgtggtactctctcttttttctttatcttcttgttttgctttttctccttgtcattgtgccctttaattctctttatccgacccctggaacgagtgtcatttggcgggtggatttcaatttgacttggaatgctacatccaagatatgattcaaattcctcaatttggctaagctctttttcaggaaccatctcatttaatttatcaccaagcacaactagttcatccctcaaaagttgcatagctgctgctgattgcttagcttgtaggataagcttctccatttggttgcatgcttctgaaagcattttttgcatcacaggatcattactgttgcttgtgttttcttccaacaagataccatctgcatcgaacacatgtgtcttcttgcagtccttcctaaacctttctaataaatagtatctcggcagttcacttagctgggcacttcttaggattgcatgcttctctatcacccattctgtcttcaaattgcggattgtgtggagcgtaatgttatcttcttctagttccttatgtctttgttcttctagtgcagcatcaaacctgagccaaaactccaccaaagcaagcttccgcccaattagacgagaaaagaatgaattggcactctctgaccttgaggtggtccttaacaatcctgacaaaggtatgtcactaaaataagctggcacccatgaacgccgttgatcgaactttgtactgaaccccagaccccagacccacat

SEQ ID NO: 95665 - DNA, 115 bp, Oryza sativa
  Clone ID: PAT_MRT4530_93837C.1
tatacccgctgcttcttcatgcgtgacgtggcgagacactatgcatacgcagagagcgctgagaacatatacgcactgcgcagtctcgaggtattgcggcgcacgagtatacgac

SEQ ID NO: 95666 - DNA, 108 bp, Oryza sativa
  Clone ID: PAT_MRT4530_93838C.1
atggtgatggcggctccagaggagggtattgtgcaggcggtgaggtcatccatggttccaagtgagatcccttctggtccatgccgctcagctgttgtcgaggagtga

SEQ ID NO: 95667 - DNA, 396 bp, Oryza sativa
  Clone ID: PAT_MRT4530_93839C.1
atgcggggagggagcggcgaggcacgccaccaagatgacgacgcggcgagggagaaggggctgtgcgggcggcgcgggagtagcggccgtgtggggcgcgtctggcggctgtgcgcagtcggctgcgggctcgcggcagctcgcggcgacgccatgctgggactcggtcggctgcggcttgcggcaacgccgtgtggggcgcggccggttgcaggcgccacgtcaactccatgtgaaacaaagatcgagtcaacaccgccacgtaggtgccacgtcagcgaaaccaccctccaaaaccgcccagggagtcaaattgtgccggttttaatagttagggggtcaaaatatccggttgaagaccatgtcaagagcccctacgaatcaaaggatttgtaa

SEQ ID NO: 95668 - DNA, 1107 bp, Oryza sativa
  Clone ID: PAT_MRT4530_9383C.1
atgggcctcattacctcaggcccactcgtgcctctttcagtgggggcccgctcctcaccccgctggcttagcgggtccgggtgcgacaccgcggcggcggcggcgccgggtccttcaggcgaggaacggacggggcggcggagcggggaagaagaagaagaagaagaacacgcgggaatggacgcgcccgtggcagtggcggtgccaccgcagccgcagccgcagcagcctccggctccggcggcggcgccgccttaccggtggtcgagggcggtggcgagatcgcccgcggcgtggatgaggctgggggttggaggtcttcttgtggggtcgatcatcttcgccttctacgagtgggggctccccttgttgtcagaaaaggtgctgttgccgataatgcgatgggaggcaagatcttttgggcgccatctgttggctattgtgctcattgcttctctggccatcttcccggttgtcctcctgccttctagcccctctatgtggttgactggaataatattcggctatggcttcggtttcttgatcatcatggttgggacagccattggaatgtcgataccgtatttcatcggttcattgttccgtgaacggttacatgaatggttagagaagaaatggcctagggagatagctctggttaagctggcaagcaaagggagttggttcaagcaattccgggtgattgtgttgttaagaatctcacccttcccatattcaatgcttaactacactgtgactgtcacccagataaagtacggcccttacatatgcggctcagttgttggaatggtacctgacgccttagtcaacatctacagtggtcggctgatactcacacttgcaggcctgaaataccacaaccatagattgacaactgtggagattgtgtacaatgttatctctattactgtcgcctttcttgtagcgattggatttacagtctacgcaaaaagagcattggatgaaatggaaagatcagagggcacatgccctgaacctgccggtattgctcatggctcaactgaactcagagctcaccatcaagaatgttcaaattccagctctgtaccaatagatgttgtatag

SEQ ID NO: 95669 - DNA, 1591 bp, Oryza sativa
  unsure (1)..(1591): unsure at all n locations
  Clone ID: PAT_MRT4530_93840C.1
atccagctcaagtatatttaggattttcctagaaaatcataggtccagattgtggccacaaacaattggcagagtcaacctagtccatcaatgtataccgacatggtctgatattcagatgtcttctgctgacacaatttagatcccacagagttttggcaggtaataacattcataagttacaacacttgtgcacaaatattagttatccccttcaaggtgttgtctaataaaaaatgcaaccttgctattaaatggctaaaatctattaatagatcacacacgtgtgcactggatgatggcagtggctctactttgaacaaaaaactactctaggcaaaagaattctcgccagctgctctcagcaaaaaaaactgcacccagcaaacttgcatcactgttgtggttctttgttaggacagttgcgcgaatcgtgcagcacgacttgtttgcacttcttgcacctttgtggtactctctcttttttctttatcttcttgttttgctttttctccttgtcattgtgccctttaattctctttatccgacccctggaacgagtgtcatttggcgggtggatttcaatttgacttggaatgctacatccaagatatgattcaaattcctcaatttggctaagctctttttcaggaaccatctcatttaatttatcaccaagcacaactagttcatccctcaaaagttgcatagctgctgctgattgcttagcttgtaggataagcttctccatttggttgcatgcttctgaaagcattttttgcatcacaggatcattactgttgcttgtgttttcttccaacaagataccatctgcatcgaacacatgtgtcttcttgcagtccttcctaaacctttctaataaatagtatctcggcagttcacttagctgggcacttcttaggaccnnggaacgagtgtcatttggcgggtggattncaatttgacttggaatgctacatccaagatatgattcaaattcctcaatttggctaagctctttttcaggaaccatctcatttaatttatcaccaagcacaactagttcatccctcaaaagttgcatagctgctgctgattgcttagcttgtaggataagcttctccatttggttgcatgcttctgaaagcattttttgcatcacaggatcattactgttgcttgtgttttcttccaacaagataccatctgcatcgaacacatgtgtcttcttgcagtccttcctaaacctttctaataaatagtatctcggcagttcacttagctgggcacttcttaggattgcatgcttctctatcacccattctgtcttcaaattgcggattgtgtggagcgtaatgttatcttcttctagttccttatgtctttgttcttctagtgcagcatcaaacctgagccaaaactccaccaaagcaagcttccgcccaattagacgagaaaagaatgaattggcactctctgaccttgaggtggtccttaacaatcctgacaaaggtatgtcactaaaataagctggcacccatgaacgccgttgatcgaactttgtactgaaccccagaccccagacccacat

SEQ ID NO: 95670 - DNA, 390 bp, Oryza sativa
  unsure (1)..(390): unsure at all n locations
  Clone ID: PAT_MRT4530_93841C.1
ctgtaatactgtctctttcaatatgaaggaaccatatggtgatactaggcaccaataaattcaatccaatcctcctaggtcctaagagtatacaattttaaaaaaaaaaaaaaaaaaaaaaaaaaaaaaaaaaaaaaaaaaaaaaaaaaaaaaaaaaaaaaaaaaaaaaaaaaaaaaaaaaaaaaaaaaaaaaaaaaaaaaaannnnggggggngngggtaaaaaaaaccaaaattaacgcaccctttcaatccaagggcatgggttttataaggtgaaaataaaaaaaaataaagggggccccaaattaaaaagttttaaaaaaaaaaaaccttgaaaaaaccaaattaaaccccctgaagccaaatccccttttccccgcgtaaccgt

SEQ ID NO: 95671 - DNA, 1252 bp, Oryza sativa
  Clone ID: PAT_MRT4530_93842C.1
ccgccatcactgcccctgggcgcctcccctcgcccccgggccgccgcgcgcccccgcgggcagcctgccgcatccaggcgccgggggcaccgatggcgacggcgaggacgctggcggctgcggcggcggcggcgagggcgttctcgttgacggcgacatccggcggcggcgtgtccatggtgcagggcgcgtcccgcggcatcgggctcgagttcgtgaggcagctgctgaagaggagcgacgagggccgcgtcgtcgcgacgtgtcgcgcgccggattcagccgtggagcttcagaagctgaggcaggagcacgagcagcgcctcgccgtgctcccgctcgacgtcaccgacgagagcaccatagaggcagctgcggcctcgataggagagacccatggatctctgaacctgctgatcaatgcaactgggatcctttcaattccgaatgtgatacatccagagactacatttagcaaagttcagaagtcatccctgctactggcatatgaagtgaacgctgttggccctattttagtgatcaagcatatgtggccattcctgaaggctggaggttgctctgagaccgggagaggattttcattggttgcaaacatgagtgccagagtcggttcaataggtgacaatggcctaggaggctggcattcatatagggcttctaaaacagcactgaatcaattgacaaagactgtatcagttgagctggggaaaaaggacaacattgcctgcatcctgctgcatccaggaaccgtggacactgacctctcacgcccttttcagaagaatgttcccaaggataagctcttcacaagggagttctctgttcagaagctactgtccatcatcgacaatgtcaagaagagcgacaacggcaagttcttcgcttgggatggacaagaaatcccatggtgatatcaatcagcacttcagcagagcaagtgagcaacagtgtccaaaatttgtgctcaatattttctcagcctttattgtgttgttggcaccaaatagatcgtgtcaatgctcgatttgaattctatttggatctacgatgatctgaacataacaaaccaaaatccattttcttttcgcttcctttttagatgcatacaaatgatcgatgtaactttcttttgccactggtggcacaacagttaacccagtgtaattagctgcaactgtattctgatggatgtatatgttgaaaaacttccagccaaaaaaaaaaaaaaaaa

SEQ ID NO: 95672 - DNA, 456 bp, Oryza sativa
  Clone ID: PAT_MRT4530_93843C.1
atgtcggtttgggagaggggaaccgacattggacggtcaagccgacgagctgagctagctaatgatgatgccgacgacaccgccggtgacttgcagcagcgggcgcgcgcctctccacactccagagagcgtggtggtgggcgcgcctgcaaccaccgccatcatctcgtccaacccctcaaccatactgaggtccgcattcccatcctccattccaatggctccgaagcagcggcagcaacggagggtgatgatcgaagagctcagtccgacgataacgacggctgcccagatgatcgggatttgagggaggtcatggtttatggaggggggcggtggcgcgatggagagagagaggagcgggcggagcgagggacggcacaatacggagggaggacaactggagaagaaggcgcgggttgggcgggatgggaaggcggcgcgtcggtggggtga

SEQ ID NO: 95673 - DNA, 396 bp, Oryza sativa
  Clone ID: PAT_MRT4530_93844C.1
atggcgatgcgacggcggcgcacggagctcggaacgacggcgacggagcggggcgcgaggcggcgaggggacgggcgcgcggcgatgggacgggcgacgcgacggtggaacggggctcgaggcgacgtgtgcgcggcgcgaggcggcgtgtgcgcggcgcgaggcgacgggacgggtgcgcgacgcgtcagcggcgacaggacgcgacggcgacaggacgcgacggcgacggggcgcgaggcggcgagcgcgcggcgctgcgacggaacgggcgcgcggcggcaggcggtgatggcgacagcgcgcggcggctcggggcgcgaggcgcgcgcggcaggggagggggcagggctagggaacctcgtcgagcacttactacacaatgaacagtgctag

SEQ ID NO: 95674 - DNA, 1083 bp, Oryza sativa
  Clone ID: PAT_MRT4530_93845C.1
ggtagttaattttccgatgattgctttgtaacccacagtaggtttcaggtgggtgtagaggcggtgacagtcctcaatcacactgaagtcctctctatccgggtatgcagtagagccatatcttggaatactcccgggtgaagtgctacatcggtatcttccatgccacttgcgcattctatctatgacgttaagtaataccaacaccagccactctagatggagaacctctctgatgaagccagctttgaggagcttgtggagctcttctcgtatggcttgttttcgattaggtttaaatctccgcagtttttgtttaactggcttggcatcaggtcgcaccatgagtttgtactcaatcacctccctgggaactttcggcatgtctgacgactgccaagaaaacacgtctctctgtgggttgttgatcttgctggtgtagatcaatcttattccaaacaaccccttaatcttgatttcttcttgttgatctatgatgtgagtaatggttatatccatagtagttatggtcacatcacaacataggtaggaggacacttgctcctgtgtagctgccaccgtcgcgtcacccatcaccggccatcggacctcctcctctcccgcatcgctccgccttcctccttgagacaaattccaggcctgatgatcgattatgaattgaccagcacatttggagatgatgccgacgacaccgccggtgactcgcagcagcgggcgcgcgcctctccacactccagcgagcgtgctggtggacgcgcctgcaaccaccgccatcatctcgtcctacccctcaaccatactgaggtccacattcctatccaccattccgatgggtccgatgcagcggcggcaacagagagtgatgatcgaagagctcggtccgacgataacgatggctacgcagatgatcgggatttgagggaggttatggtttatggagggggcggtggcgcgatggagagggagggggcggagcgagggacggcacaatacggagggaggacaaccggagaagaaggcgcgggttgggcgggatgggaaggcggcgcgtcggtggggtga

SEQ ID NO: 95675 - DNA, 177 bp, Oryza sativa
  Clone ID: PAT_MRT4530_93846C.1
atggagggccaagctggttgggtgctgccagggttcgaccgaatcagggcccaacaggcctccagcttcggtctgctcactgacagttatattgacggtcaaaatttatctgtaatgaccgtcaacacctacctagagtgttcgattccactgaccaagaatgatgattgcctctag

SEQ ID NO: 95676 - DNA, 540 bp, Oryza sativa
  Clone ID: PAT_MRT4530_93847C.1
atgacgttggcgccgtggtccaacatgatggcgccaatgaagttagcgtcgtcccctccgcccccagcgccgtccctccgccgcgtcgtcattgccgccggcctccgccgcaagcgtcgctcccgccagccgattgcctccctcgccgcaccggctgctcccgccggccaaccgcctccctcgtcgccgccttcccatctccgttgcgcgggctccacaacgcctccaccgtcgcatgggcgcggcggaggacatcgatgtggcggcctcagggtcctcagcgccgcccgctgcccacctcacactccccaccgcgtgccagccacggagaagaaggaagaagccgagggtgttcgagacgccaagcacgcctcgggcctcggggtcctcggtagtgactccgaccgacacgccttctgccgctcgccttgccctccccactgcgcgcgccggggaagggagcatcagcaacgccgccgcttccgtcgcctcgtcgctgttggcgcggagctcgagagggcgacggactcgtcggtgtag

SEQ ID NO: 95677 - DNA, 390 bp, Oryza sativa
  Clone ID: PAT_MRT4530_93848C.1
aaaccaaatcttcacttcaaattcatccaattcatttaaacaaaaaagtcccttcccaaaacccaacccaaaccaaaaattccccccgaatcccatcaaaaccctattttctacaccaccaccaccacccgcaccccaccaggaaggaaggaaggaaggaatcacccccccaacccctaaagggtcccccccttgcccttgaacccctaaaccacctccattgcggtgaccgttcttccgcgggcctgctctgtgtaagtaaccgcctcccgaataaccttctcaaaaaaaatctttacccccccccgggtctcctcgtaaatcaaccccgaaattcccttaacccccccccttcttgccagcctccggatcgcgggcttcttaatcccc

SEQ ID NO: 95678 - DNA, 2110 bp, Oryza sativa
  Clone ID: PAT_MRT4530_93849C.1
gtaagaaaacttttcaccgagcagaaaagcaagatggaccatttatctcagagcaactgtgttccgagggtgttagaccacaaaggttttccctggtaaggactatatctgcatatttagctggtaggaaggctgaaagaattggttgccagtaataagggggaccagatacatggagtaatagcttctaattcctatgtaaaaaaatgaccacgtgttaaaattgtgcatcattaccttctagaaccaaacttctcgtttgcctaattaatgagtatttcttcaagacctgaactagatagtgctgaatcatacttacaaattgcacttctactgagctgctggcacacaactttcagtgaaagaatctacgacggcaccgcattgaacccatctcttcatactctgattttgtaatgcacattgattcaaaatcaggcctgtgcgccaaaagagatccacctctccaggcaccaagaattgggtcctcctgagcaattatctttacttggtagtcatcaggcacaagaggacgaagttccttttccaatctttcggtgaatcgagggaatagcgtgcttcctcctgtcaggataattctctcaaaaagcacaggttgaagatgtgggtggcaagcttgtatagcacgaactatgcactcagcaagcccagcttgattcatacccagatcaattggatggaaaagcatctctggcactaggaacctctcattggtcaacacaaattcattttgactaagttcaggctttttcttatcctcaaacttgctcctatcgctgtcagaactatcctttctaaccgattctccattagcaggcagagagctgtatctgcatgcctcatccaagtccttcacaaaccctttcttgtatgttataccatcagggagaatgtaggagcatctaaaagggttgtcattagatgataacctggcaagacgaagatcaccagggacatcaagggatacaaagcatagtttttcctttgcatcatcaatgaggagtgtttcatccatgacattaagggagcgatatgaaatgagctctttgagatagtttgtgagggcctttccaccaaggtccatgcgccgcacagcataattcagtgtaaagttttgaagcacgggagatgcatgagtgaaagagaagccacagtcaacaacaaggctacattgagctcgaaacagcgatggctggcggctagcctcataaaggtgaacaagggaaggggcatctgcaacacaaagagatttgaaaccaagctcctcaaaaacaagctcatcggttgcatgctgcagtgctggagggttgaactgtggttccaccagtagcaacgatgagttgttaggatccacctgcagtaggttgcgtataacccgctcccacacctcccgttgcacttcttgattgatgagatagccacgatcaataggacgcctcaatgtcatgccagtaacatcaacatcttgtgcctgcagctggtcagcaactagccatttcttggaaccagggggcttggccatacagttggggacaacagcagtcggattcatgtccccaccaaatccagccttcagaagaccacccccattgtctagcaccacaacacctgatccacccgtcattatatgccactctccttgttcctcctattcttgcctatccttggtcaaatgaaaatcgaaatggtatgattggatttacaagcactcctttgcaaatcgggcctataagaacgcgatcctcggccaacgaatcgtcactgcatcggcatctggttcagcaaaaccccccctgtctcctcgcgcggaccagctggaggcgtgcgcaggcgccgctcacatacgtacggcggctgatggcggcgcctacgccgctgcccccatcggggaagggcggccggcggagctagctgctagccaacctggagggggggggcgctcccacggcgaggaaggaaaggggcggcggggttgtccgtggcagcggtggaatcggcgacggtgggaccgcgggatgcgcggcggcgagggtgagggcggcggcggcgcgggtgtgacgctcctcgtgccgaattcctgcagcccggg

SEQ ID NO: 95679 - DNA, 728 bp, Oryza sativa
  unsure (1)..(728): unsure at all n locations
  Clone ID: PAT_MRT4530_9384C.1
ctactggttaagttgtgcacaatgatctggtagcaatttcatcttaaaatttgagacggtgcaaaccaaagtggaggcggcgaacccagccaaggatggtggagatgccaccacacgtcgccaaggatcgatggtgcaatgcaacgtcccgctctcgaagtcccggacgccgaggtccagctgcgcttgaacagcgggtggatcagctggtcgctgtcgtcgtcggctcgtggtctcctcccacgccgccggcgagataacatgcatggccggacgtgaagcatccggagcgtgtgggctgcttgcagagaaaccagaagcagaagcagacacagacctcgtcgcctccagatcgacggcgactacggcggcggcggcgggtgccaccgccaacgccgaggcagagagcggcaatggcgatgagccgcgcccacccgtctgcatggggaaggaggcggtcaggcggcggaggagggggaggagatccgcatccgctccagcttgaccaggcaagctttcctcgacgccctcccctcccatcccctccgccgccatgcgtgtcggatcgaactgcttctccgtgagatttacagaggaacgccattttctggaggatgcatgtgagatgcttgcagtgcagatggatttgaccacaaggtacattnggcgataagattttntcgaggaagttgttcnaattcgaagccaaccaaccaanaccttcctaa

SEQ ID NO: 95680 - DNA, 481 bp, Oryza sativa
  unsure (1)..(481): unsure at all n locations
  Clone ID: PAT_MRT4530_93850C.1
ggtgcggatcggcacgagtgcatctaatatctctganataagaaattctggtgcactagacaatccaaccaaggtatgcatattatggtttagctggtgtgctgttgttcactgaagcataattcagttctgtcatgtantacgttttgcgggaaaattgaatttgtctcacctaggcttaatgatctattatgtantgtaatggaaagggtgaatggatgcttagacttgaangcgtgttttgtgcttctcgttatgggatttgctcactttattagcgaaatttccagttggcgtttaaatangttcccatttattactgtttccgcagttagtgttctttaacccnaaaaacataaagatgacaattactatatctctttatattttggttatggcctatggcagatccttattgaattccactcntttatttcttgacttgatggtgatggaatttcatatttttcntcntttttgt

SEQ ID NO: 95681 - DNA, 1152 bp, Oryza sativa
  Clone ID: PAT_MRT4530_93851C.1
atgagcttcggccggggccgtggccacgccgtgctccgcgccgccgccgccgacccgcggtgcgcgctcgcctcctccctcgccgcgcaccacgtcgccccgcgggaccccgcccgggccgccgccttcctcgccgccgccgccgacaacctcggtgcagcgacggagtacgagagggcggtgttccgcgcgctgtcggcgctgatcggggaggagagggacgagcaggtggcgatcgagcggcacttcgagttgctgaaggaattccccagggatctcatgtctctaaagagagctcagctcatctgcttctacatgggacgccctgatacatcgctcaaatttgttgaacaggttttgccagagaatcaagaccagaactacatttacggcatgcttgctttcccattactagaacttggaaggatggatgacgctgaaaaagctgctcggaaaggcttggccataaacaagaacgactgctggctaacccacaactggtggcatgttgctgtttgttacttggaaggtgaattccctacaagtaaagttctggagatatacgatcataacttcatgacagagcttgagaaaagtgattgtgaggcagcagaggtgtaccttaatgcactagggctgctactccgtttgcatattcgtggtcaggttgatctggccaaagatagattggcagcattgctagatgcacttacgaatgagaaaatatggcatgtggaatggctccttgatctacttgtattatgggcactgtcaagtatgggtgagattacaagagcagacaacttgttggaatcacttaggtcaagagttagttcgatggacacaaaaaaacagcaagtgatgcaaaaggcaatccagctagcagaggctgtgtatgaatatggaaaaggagagcacaagaaagtctttgacatcttgggtccagatttcgatgcactcagttgtaaagagctaatgcaatttggattgtacacagcaattgaggtgctcgagaaacaaattaggaaacgagagggtgcacccttcttgtggcgcttgctggagaaggcatactcattgcatggcagagctgcagatgcttcagtcgcatccgaaaaggcaaatgctctacaggctgcttattctcgttaa

SEQ ID NO: 95682 - DNA, 1442 bp, Oryza sativa
  Clone ID: PAT_MRT4530_93852C.1
gcccccccccttttgttttttggtttgctgctttttattatccttttaactcgtaagggtcccatcaaatcatatataaattggttcgcggccacttattatgtcaaacagcgaatgtgcactctatagggcatgtaagcatattggtatactgtatttcataactcgaaattaacgagaataagcagcctgtagagcatttgccttttcggatgcgactgaagcatctgcagctctgccatgcaatgagtatgccttctccagcaagcgccacaagaagggtgcaccctctcgtttcctaatttgtttctcgagcacctcaattgctgtgtacaatccaaattgcattagctctaccaaacttcattgaagacatccacttgctcatctgatgccccaatcattttacaactgagtgcatcgaaatctggacccaagatgtcaaagactttcttgtgctctccttttccatattcatacacagcctctgctagctggattgccttttgcatcacttgctgtttttttgtgtccatcgaactaactcttgacctaagtgattccaacaagttgtctgctcttgtaatctcacccatacttgacagtgcccataatacaagtagatcaaggagccattccacatgccatattttctcattcgtaagtgcatctagcaatgctgccaatctatctttggccagatcaacctgaccacgaatatgcaaacggagtagcagccctagtgcattaaggtacacctctgctgcctcacaatcacttttctcaagctctgtcatgaagttatgatcgtatatctccagaactttacttgtagggaattcaccttccaagtaacaaacagcaacatgccaccagttgtgggttagcataaacgatgagcatgctgcccagcagtcgttcttgtttatggccaagcctttccgagcagctttttcagcgtcatccatccttccaagttctagtaatgggaaagcaagcatgccgtaaatgtagttctggtcttgattctctggcaaaacctgttcaacaaatttgagcgatgtatcagggcgtcccatgtagaagcagatgagctgagctctctttagagacatgagatccctggggaattccttcagcaactcgaagtgccgctcgatcgccacctgctcgtccctctcctccccgatcagcgccgacagcgcgcggaacaccgccctctcgtactccgtcgctgcacccggtgaagcgttggtactattcaccttggttcgagaaggaaggaggaaactcgatgtgcccccactcgagctcgccgctaagctgccacccgtcccaagctcctcccaatggccccgcttgctcccggtgccgaagaagacggttctcgccagatctaggttgacaccctcctcgtcttcacaagttccactcgtcctcat

SEQ ID NO: 95683 - DNA, 1096 bp, Oryza sativa
  Clone ID: PAT_MRT4530_93853C.1
aactcgtaagggtcccatcaaatcatatataaattggttcgcggccacttattatgtcaaacagcgaatgtgcactctatagggcatgtaagcatattggtatactgtatttcataactcgaaattaacgagaataagcagcctgtagagcatttgccttttcggatgcgactgaagcatctgcagctctgccatgcaatgagtatgccttctccagcaagcgccacaagaagggtgcaccctctcgtttcctaatttgtttctcgagcacctcaattgctctggaactctctccggtatttattagcacagtgtaccaaacttcattgaagacatccacttgctcatctgatgccccaatcattttacaactgagtgcatcgaaatctggacccaagatgtcaaagactttcttgtgctctccttttccatattcatacacagcctctgctagctggattgccttttgcatcacttgctgtttttttgtgtccatcgaactaactcttgacctaagtgattccaacaagttgtctgctcttgtaatctcacccatacttgacagtgcccataatacaagtagatcaaggagccattccacatgccatattttctcattcgtaagtgcatctagcaatgctgccaatctatctttggccagatcaacctgaccacgaatatgcaaacggagtagcagccctagtgcattaaggtacacctctgctgcctcacaatcacttttctcaagctctgtcatgaagttatgatcgtatatctccagaactttacttgtagggaattcaccttccaagtaacaaacagcaacatgccaccagttgtgggttagcataaacgatgagcatgctgcccatgatggagaacacgatttcatgaactcagtagcttctttgaaatggcattcctgctggaaaacatggcacagattatgctgtgaccagcagtcgttcttgtttatggccaagcctttccgagcagctttttcagcgtcatccatccttccaagttctagtaatgggaaagcaagcatgccgtaaatgtagttctggtcttgcggacgcgtgggcggacgcgtggg

SEQ ID NO: 95684 - DNA, 129 bp, Oryza sativa
  Clone ID: PAT_MRT4530_93854C.1
atgagcgagacagtaagggcaccgcagatcaacgtaaaaggtttcgtctggagtgtgtgtgctgctgttccgacgcccaatccaccctacaacttgcatgctgtaataatctttggcgccaacctttaa

SEQ ID NO: 95685 - DNA, 367 bp, Oryza sativa
  Clone ID: PAT_MRT4530_93855C.1
acgcgtccgcagttacactatacgtgtacttctcatggcgatctggaaggctaggatactgatgttgctcgcgcttggcggggctgctggctgctgcccggcggcgagggcggaggaggcggcggctgcggaggaggggggcgatgcggcggctgaggccgtgctgactcttgacgcggccgggtgcgatcaggccgtgggcaagcacccgttcatgggcgccgagttctacgccccgtggtgtggacactgcaagaagacacattcagagtatgagaaagctgcacaagagctaaccaagcacgagccaccgattggtgtcgccaaggatgaagccaacaaggagaagaacaagcctcttgctacc

SEQ ID NO: 95686 - DNA, 284 bp, Oryza sativa
  Clone ID: PAT_MRT4530_93856C.1
gtcgtctggcaaattagtcgcaatctgcgtaattagtttttttttagcctatatttaatattttatacaggtgttcaaacgttcgatgtgacatgttaaaaaattttagggtgggattgcggaagggaggaaggaaatagttaggagtataagttacttgggttggagttggggctaccctggattcctggggcaggaaccacagggttcctcttgatcatgacggtcctttctaatggcaaaaatgtctttggctttcccaaattgcccaggaacgagtactt

SEQ ID NO: 95687 - DNA, 540 bp, Oryza sativa
  Clone ID: PAT_MRT4530_93857C.1
ctacggcggcggctccccgttccgcacttggccgccaccagctcgcgaccggctgaggcgttgagtctcctccgtgcgaggggcctgtgcggctccctcctccacccgcgccgcctctgctcctctgttgcgccggtagcagccgcaaagcccggggccgccggtaagcctccaggccccgctcctccttcccctcgcatgcatggtgctgaaccgctggcatattatgcatttgatatcaccatcttcatgacttgttgaagctgagggcacatagtggattctcttcagacaatttgacagttcatcctctggaaggccagtgctcacggtaccaattgtttcccctagagcaagcaattcctcataagacatgtcgtcgatgtccattctcattcctctatgcctatcactggaagcatcctcatcactttcatccacaccgaagcgccagtattcagtggagtcattcaaaatttgctccagaatttccaccactatcactacgcattctggcattgcttccatttgtgcctccat

SEQ ID NO: 95688 - DNA, 1678 bp, Oryza sativa
  Clone ID: PAT_MRT4530_93858C.1
gttgaacacaatcaatgttcattatcccgaccaaaatgccaatcataatatgtaccctggcacatggtctcttatgcctccaaacactggttttggtgtgaatcagcagaactacctaatgacgcctgacatcacactccctcaaaggtctcttaatgccaagtttggtgggaatggagcattcacttcgcttcgggcccatggcattgatcagcgctcctctggttggcttgggcatattgagccaagttctcacattgatgatgcctcatcgagtcttatcaagccacagcctttggttattgatcacaatgttcagaacgctaaagggggttcatgcatgctatttgggatttctcttgacagccctgcaaaacctgaactattgatatccccaccaagtgttgcatttgatgggaagctccaacaggatgcacttgaagaggatgaatgctctgatccttccaagactgtgaagccacttgatggagctcagcacgattctgctagagagaaacatcagtcatgtccagatggtaccaaaaacattcagagtaaacagcaaaatggttcctcccgaagttgcaagaaggtccacaagcaaggaatcgcactcgggaggtcaatagatcttacaaagttcacttgctatgatgagttgattgctgaactggaccagatgtttgacttcaatggtgagctgaacagttcaagcaagaactggatggtcgtttacactgataatgagggtgacatgatgttggttggtgatgatccttggaatgaattctgcaacatggttcataaaatcttcatctacacgagggaggaggtccagaagatgaatccgggtgccctaaactcaaggtcagaggatagccggtctacttccgtggaacgagggctagttggcgaagggctccaaggtggtctatccaccccatcactgaattctgagaactgctaattcgttcggtcactgaggtcttttgtggtttgcaagaacagaagacgacatatccatggtaggaaggaatcttttcgtggtgtagtagtagtagctggtgctttatatgtatcgggtaagccccgcagtaccccatttgtagatggtgcttgtcctggtatcagttgcccgctcttcgttttcgacaagttttgggtgtgctttgttgaggttttaagttattgtatgatatgccccgtagtagtgaaaggtgctgaggccaagctgccgcgcccggtgcgcttgcttgcttgcgctcttcctccctcctaagccttgtaaatagctttgcttccccccctttcttcagtcagttctaatatgttgcgaactgcggtaatcggtgtacccctcaagaaggcaaggcaatttgaccctaaaatgttgccattttaacatccaaaaaaaaaaaaaaaaaaaaaaaaaaaaaaaaaaaaaaaaaaaaaaaaaaaaaaaaaaaaaaaaaaaaaaaaaaaaaaaaaaaaaaaaaaaaaaaaaaaaaaaaaaaaaaaaaaaaaaaaaaaaaaaaaaaaaaaaaaaaaaggggggggccctttttagggacccaagtttctccccccgggggggggaggtaaaaatttttttaagggggacccaaaaaaaaaaacacggggcccggttttaacaccggggggcgggaaaaaccccggg

SEQ ID NO: 95689 - DNA, 537 bp, Oryza sativa
  Clone ID: PAT_MRT4530_93859C.1
tcagttcagatcagatcggctcagccagccgcctgcccgttctccatcccaggttctgagcttttttgcagcggcatcaacggcgtcagcccacaggatttgggccgacgacgagctacaggatttgggtcggtggtaggctgcgggatccgggtcaacggagtgcacgaagccgacggcggcggcgatgggctgcaggatgcgaagcggcagcgggctgcaggatccgttcgagggtgtgcgcgaggccggcgtcgatggcggatgggggaacctagctggcgtcgacgggctggcagggatctggccgccggcctctgtggtgcgcggcggccggcggggccggcgtcgagggcgacggcggcccgggatgacgaacagcaacgcctggccgacgcagcagggatggatcctgatccgcgacgacgccaccatgtttcggaagtcctgcacagcagatgtgcttgcgtgctcgctctccgacaagccgacgatccccggctgcatcgtgctcctcgtcgagcccgaagacaccat

SEQ ID NO: 95690 - DNA, 790 bp, Oryza sativa
  Clone ID: PAT_MRT4530_9385C.1
gccatcttcaatcaatatctggaattgcatttcaacttttaaatacagggtgtggcgttcatcagcactacccagtgatgagttccacaataaaacaatgcaatcataaaaatagagcttctaacctatggaactattatcaatgaacaacctcagaacgtgttaggttctgagtgctagatgcaagggcgaatgattttgcatcaggtacagaatgcaagtatgcattcaatctttgcacctgaaagcccaaaagttgcctcccacagagccttattcctaagcaacctcaatcgaagtgaagatgaacaatctccccgtcctcgatgtcgctgtcgtcatcgtcatccgacgaggacgaggaggaggaagggaaaggggagtacataggttcgacttcgacgaactcctgaggcgggaggaggaggaggcggcgcgggtggccttgcaggcgaggggagaggaggcggggcatggcttggacggggacgaaggggatgcagaggaacgcggcgaggcgggcgaggaggtggagcggcgcgcagcagagcagcccgaggacctggtcggcggggagcgtctccgggttgcacgccacgcgctgccacgccgccgccgacgcccgcgccaccgccaccgcccaccccggccgcaccgccattaacacgatgccccaaaatccaaaatccgaattcccctcctcctaggatgaacctaggggtgtcgtgacgaggaaggcacgagcgcgcgagcgcgcgtggggcctcgccggccgccgggccgccgcgag

SEQ ID NO: 95691 - DNA, 536 bp, Oryza sativa
  unsure (1)..(536): unsure at all n locations
  Clone ID: PAT_MRT4530_93860C.1
atctcaagcatagatatacatagcanaaacatgtaagatgaaagagatcgaattacaaataataattagatacacggccgaccggccaaataaaaatattgaacagcgaaagcttgactacccaatccacaggcacacaaattaggggtttaccccattaagttcacgtcctagaagaagcagtcgatacccgcatcactcaaaattagactaagtctataaccgaggggcctgacaatgctagcaaagcttggacggcagcagcagctcgcgggacggcttggaggcgatggagagcttggcgtcacggcgatggctcgatccacagcatgcatgccaaaatcatttcatgcaacatgtgaaacaccatcccaggttgctactactgcaagcaatcgaccaatggctcaccggtaaaggcggagtcggccatggcaacggcggtgggcgccgaggaagaaggggtttgatctccctctccggtgcaccattatccggggttcttgagggtaaatggagaggaggtcgtggtgatg

SEQ ID NO: 95692 - DNA, 1175 bp, Oryza sativa
  Clone ID: PAT_MRT4530_93861C.1
cggacgcgtgggcgagagggagcgagctccaccttccctttctccctcatctcccttaccagccgcgaataagatgatggacgcgttcgtcaacaagccacggtcgtctcaattcctttttcgttccctaatctacttcccatgccgaacattccctcttttgattccatcttgtttcatcccttgtatcagcggaaacgcggcgtcgcccctggaagctctggagcacgcacggagcgccgccgcacgacatcgccgtcgttccaaccactctggaccaagccaagccgagccaccgcgccatcttcatcaccacgacctcctctccatttaccctcaagaaccccggataatggtgcaccggagagggagatcaaaccccttcttcctcggcgcccaccgccgttgccatggccgactccgcctttaccggtgagccattggtcgattgcttgcagtagtagcaacctgggatggtgtttcacatgttgcatgaaatgattttggcatgcatgctgtggatcgagccatcgccgtgacgccaagctctccatcgcctccaagccgtcccgcgagctgctgctgccgtccaagctttgctagcattgtcaggcccctcgatgattgcataaacggtgaagaagtgaattaggtgctgatatttcccggtaacaaggttatagacttagtctaattttgagtgatgcgggtatcgactgcttcttctaggacgtgaacttaatggggtaaacccctaattggtgtgcctgtggattgggtagtcaagctttcgctgttcaatatttttatttggccggtcggccgtgtatctaattattatttgtaattcgatctctttcatcttacatgtatttgctatgtatatctatgcttgagataaaagtgtgaatctagtgcacatcctgggaactagattcacatgagtatgagttaagaatatttgagatgtgataaaaaaaaaaaaaaaaaaaaaaaccattaatagcgtaaaatcaaaaagtgcttgggcatacccgctgcaaacccaaaaaatatacttgccgagcgtgcgccatggaggtacttaaatctgcttccaagatttcggtggagaagctggagattctgctggcgccgagggaaaacgcggtgatcatcctaacttattagcagca

SEQ ID NO: 95693 - DNA, 1171 bp, Oryza sativa
  Clone ID: PAT_MRT4530_93862C.1
atgaataaatatatttttttccagaatttttatcctctgtttagacctcctaaaaattcaaactagtttctacatagcctcttttctctatttttctagcctctggagccagtttcacctctgtcgctccctttccaccgctcagcagccgagagagaacgagagagagaaagagagctgcgcctgcatgctcgacgcgtgctcccttgtgtgacaacgccgatcctcacctacaccttcctcagcagcatcgcccagctttcctcttcactccaatgccgtgaacaccgagagggagcgagctccaccttccctttctccctcatctcccttaccagccgcgaataagatgatggacgcgttcgtcaacaagccacggtcgtctcaattcctttttcgttccctaatctacttcccatgccgaacattccctcttttgattccatcttgtttcatcccttgtatcagcggaaacgcggcgtcgcccctggaagctctggagcacgcacggagcgccgccgcacgacatcgccgtcgttccaaccactctggaccaagccaagccgagccaccgcgccatcttcatcaccacgacctcctctccatttaccctcaagaaccccggataatggtgcaccggagagggagatcaaaccccttcttcctcggcgcccaccgccgttgccatggccgactccgcctttaccggtgagccattggatcgagccatcgccgtgacgccaagctctccatcgcctccaagccgtcccgcgagctgctgctgccgtccaagctttgctagcattgtcaggcccctcgatgattgcataaacggtgaagaagtgaattaggtgctgatatttcccggtaacaaggttatagacttagtctaattttgagtgatgcgggtatcgactgcttcttctaggacgtgaacttaatggggtaaacccctaattggtgtgcctgtggattgggtagtcaagctttcgctgttcaatatttttatttggccggtcggccgtgtatctaattattatttgtaattcgatctctttcatcttacatgtatttgctatgtatatctatgcttgagataaaagtgtgattctagtgcacatcctgggaactagattccacatgagtatgagttaagaatatttgagatgtg

SEQ ID NO: 95694 - DNA, 572 bp, Oryza sativa
  Clone ID: PAT_MRT4530_93863C.1
tgtggtcaaacaacaaagtttcaacggctattattggtgcatcttgcaaatttcttgccaacttgggaattaacaacccatcattattttgcgtttacatctttatatttgttacaaatatgtaagccatctagctcctcagtcttttttcttccctgggcaccgcataagtgcaaactacaccaggctggccatccaaaataaagtctagacctcagacaggttggcaacttgaggatagccaaatggctctatctgccccctacgttgacagacccaggagatggccctccacctccttgcagggtgcatatacacaagaacttaggcggctctagcggattggacaacatacggtcagctagaccctacccagtggcagcaagcatcgatagtgctagagtggtgagagaatacttcaagcataaaagaagcaccaaagaaaggcactacacacactaacactgctaattgcctgagagatatgaaacgaaaggaatcgtaggaccttcccacataaggagctcttggcgcccagtcttctggccaaaatcaaggaggagaccaaaacg

SEQ ID NO: 95695 - DNA, 3691 bp, Oryza sativa
  Clone ID: PAT_MRT4530_93864C.1
atgagtcctacccaccaatattacgggtgcacaggattgatacacagtccttctccctcggatctctcctcgctcgcgcgttcgcgccgccgccttcccccttcccccgttgattgattgggaggaggatcaatggagtgcgtccgctccggctccggggttcttgatcccaggtgttctccgcggttcctggggaaggggggtggttcgctcacgtcatgtggtaaagccacttctacaaatcttgatatttgtaccgaacacgagcaaaacttgcatgggagtgttaaaccctcacagttagaagcaaatgggatcctcttatcctgttcacagaattccagtgcttaagcagagacagaatctttttgctaggtctacctctagcagatgtatatactacttttgatgaaaatgtcagagctttatcttatcatgctcctgacataaaggttgtagtactcttataaaacctcagtaccgtgtatgaactggactgtatatgtcagatatgatggaatctgatttctgcttcgcaataacatgctttgggttacgtagttcatgttgcagcaatcaccttctgcaaatcaacaggctggtcatatggctccaactattgatgaaggccctggataacctggtgtggataaatattttgatgaagattcttcatctttatcaaatagaatagaaatgcatactcccagttggcagaatagctcaagatttcacaacagtagtgctgctactgatcttcacaggattgatataagacaagtttctgacctgagcagtgatacgccaaatccagaaatgcctgcacattcaagaattgatgttccaaatagtatgccaatggatttgttcgccttttcaaatacaatagatgttcaaatgttcctaagagacgtagaggccggacatcaccataataattacactggtggatcacatagctgggaactgccttttctccagggttggttgatggcacaaaaccgtacaggattgcgtgcaacacttcctaacaatgaggttataggagacttacctatcggtggcactgctgggactgataatgtgatgaatgaatcatcaaacatgtacagttttgaacgtgtagggccttcatcatcaattccaattactacggacagtttgagagggctaagtaaacatcgtcatatgctggcctctgtacctggtggagcagggacttcgcttcaaggtgctcaaaatggtgaagctcatgttaatgttgtctcattaggtgttgggtcagaatttgctacgtcactgtttgctggtgacggtactgaattaccctgtacagtgaaacttagaatatggcggcataacattgacaacccttgtgctgtgttagcaccctgaggcatgctgcttgacaatctctcatgctgttctttgcagtgaaatgggcacccatttttccccctgtgggcgttttttggtggcttgtgttgcatgcttactgcctcaaacagaagttggtgagcatttttcacctacatcagagcacatactactggcatatggtcgtcgtcataactcacttctgaggggcattttcatggatggcaagaccacaatccctgtgtacactgtcttggaggtgtatagagtttcagacatggagcttgtaagagttatccctagtgctgaagatgaagtcaatgtcgcatgttttcatccttcccctggtgcaggtcttgtttatgggactaagggaggaggatcaatggagtgcgtccgctccggctccggggttcttgatcccaggtgctctccgcggttcctggggaagaagggtggttcgctcacgtcatgtggtaaagccacttctacaaatcttgccatttgtaccaaacacgagcaaaacttgcatgggaatgttaaaccctcacagttagcagcaagtggatcctcttattctgttcacagaagtccagtgcttaagcagagacagaatctttctgctaggtctacctctgcagatgtatatactacttttgatgaaaatgtcagagctgtatcttcacatgctgctgaagaaaaggttggagtactcttattaaaccttggtggcccagagacactggatgatgttcagccatttctattcaacctgtttgctgacccagatatcatccgtttgccaaggctgttcaggtttcttcaaagaccattggccaagcttatctccacttttagagctccaaagagtaaggaggggtacgcttcaatcggtggaggatcacctttgcggaaaattactgatgagcaggcaaatgctttgaaggtggcactgaaaaagaagaatttgaatgctaatatatatgttggaatgcgatactggtacccttttacagaagaagccattgatcagattaagaaggataagattacaaagcttgtcgttcttccactgtaccctcaatactccatatcgacaagtggatcaagcatccgtgttctccaaaacattgtcaaggaggattcatattttgctggattgccaatttccattatcgaatcatggtaccaacgtgacggttatgtgaaatcaatggctgacttaattgaaaaggaactgtcaattttttccaatcctgaagagtctgttataggtacatgtcattttagaatgatacacgtaaacgttatgatattcttcagtgcacatggagtaccacttacctatgttacggatgctggagatccttacagagatcagatggaggactgcattgctttgatcatgggagagttaaaatccagaggaatcttaaacagccatactctggcttaccagagtcgagtggggccagttcagtggctgaaaccatatactgatgaagttctagttgaactaggtcaacagggtgtaaagagcctcctggctgttccagtaaggttcatctcattaaccattcaagaatggcttgttcagtttgcatttttcttccctacatcaccttgtgattaccttctagtcctaactaatttatcatcaatcagctttgtgagcgagcacatcgagaccttggaagaaatcgacatggagtacaaggagctggctctagaatcgggcatcgagaactggggaagggttccagctcttggatgcacctcatccttcatctccgaccttgctgatgcagtggtcgaagccctgccctccgcttccgctctcgtgacgaagaaggtggacgagagcgattccgacatggacctgatgcactacctgagcaagatgttcttcggctccatcttggcgttcgtcctcctattgtcgccaaggctgatttccgctttccggaacaccctgttgtaggtaatggtggcttcttttgtttggttttttgcactaggggtttggcttgagtaagtaaaaaggcaggctcgtgggatgatagtgaatagtgatggttaaagttccccttttttacagaagtaatatgcatgaagtcattgcaaggtagcttaagtggtggttttaagcaaggagcctctaggggtaaattgccagtctgtaccagttttcttgtgctggtacaaggcaagccaatccttttttttctttttttttctttttgttacatgagcacattgataaaacatcattgatatattactaatgcataaacaccataatttttcctcgttt

SEQ ID NO: 95696 - DNA, 504 bp, Oryza sativa
  Clone ID: PAT_MRT4530_93865C.1
catctcaagctctcccacgcgtccgcacatggctatgagcaagaggggtctgctagactgttgtgaattcccaaaacaaagctggatgcgctagacaccatctgaagttggtccatggcaactcaatttcttctagcaaatacagtattatgaacaacaacttttcatgattctaacctccaataatctgaagttcccagtttgattatataatctaggaaccaaatcatgaagctggcgacattggtaagaggtaatggtctatattaatctaattttgtattcggtttgtattttgttataggataaaatttttgcaatacatactggactaaagttttcattggcacagtgtaagatcacaacatacctaagcctgttattcaacacaaaaatctgacatatttatacatcaaattcattgctgagttttttacgtccgacgcaacgtcctacatgtattccccctttattcttctcataaattatcttatgatgagacat

SEQ ID NO: 95697 - DNA, 553 bp, Oryza sativa
  Clone ID: PAT_MRT4530_93866C.1
gcacgaggagcatagccatgatgaacttgtacaggaagatttttttttgcctggtgaaatttctgaggccaatctttctattcagtcaccttagtgattagtaaactcatggctgaggaattcgtatgtgaaattcagtcacacagatcttacaggctaggcttgtatttcgttaccacattgtttttttggcagtagttgatctaccttggtctccactgtaccatgatgaattgaaagatagcatcggagggtaagatgctgatatgtccattctggtaatcatgcggcattgcggcttatgttggcttgacgaattcattttgagtacctcgaacggacacacagtatcggatgagatttatattaacaaaagaatggctatgctacatgtgtaggtaaatcatgtgttttaaaggcacttccatttacggatcattcaacaagtgaaagtgatcagaagggaaaaatagtgacgatggagaaaaaaagtttgaaccgtaccatcccctattaataatagaaaacataaatgattttactattatttttc

SEQ ID NO: 95698 - DNA, 335 bp, Oryza sativa
  Clone ID: PAT_MRT4530_93867C.1
cgcagtcgctgacaatgataccatgggtgcccacgctgtgcaatacgcccacgggatcgatctacaatgaggacgcaagtcatgaaagcatgcaccaccgagatatgcacgaagctacaggcgatcacctgcagctcctttaagcgaatctacagaagatcactaatactgcccgacaaccgatcggagttcctgtacacagataactcttaacccgcctacatgcaatgcgcttgaaatgctaggagggctacatgagtttgtgtacgcgcttgcgtaatagagtctagactagctattatgatcgagtatgtgcttcgtaatcatagctgtac

SEQ ID NO: 95699 - DNA, 456 bp, Oryza sativa
  Clone ID: PAT_MRT4530_93868C.1
atggtggtcatcgttgtggcggcagtgctgcggtcatggcagcaacggatgtggtatcgtggcagcgcgacccctgtcactggtctcactgctctgatgtgggtggtggtgaagtgctccgccgtggaagccatcgtcgtcgaggtagacccagacgaggcagatcccccggatgaagcagggctctcaagaggcgcgaggaggcgattgacggggaggtggctgacaacgaggggaggtgcttcctgcaggatccgctccaccagcgcttgggccggaggagacgacgaggagcggtcaccggctgacggccttgaggaattgggagcgaatgaccgatgccgattttgctattttgctgatttgggccgagcgcgagccagtttggctgccacactccgcgctttcgttcgatgcggtgtccaagcgctacgtcagaggatctggattctataa

SEQ ID NO: 95700 - DNA, 519 bp, Oryza sativa
  Clone ID: PAT_MRT4530_93869C.1
atgggcggtcccctattgcgccgtggtgaatccggcagctggacaaccggacaccccggccgacccaactccatcacgccctccctcgccaccgggctgacgtcagcgaaggcggggggtggcgccggcaagcagggccctcatgtcagcggcacaaagggaggccggtctaccatggaccgggaccacgcgggcacggctcggcttggcacaaagccggccggccggccatggggagcgacggcgaccggcggagggaagcggcggcggacggtgcgaaaggcggcggcggacggccggagcggcggcgcggccaaagatgacgacgcatgcgcaaagggcggcggcgctcatgggagagaggaaagaaaggaggagaggggattcctcaccggcgagcacggcggccggcgcgaaggaagaaggcggcagcgacgactggcgagcggaggcgcggcgacggctctagcggcggcggcgtgtggggagagcggtacggtgatggggcacggcaagtga

SEQ ID NO: 95701 - DNA, 866 bp, Oryza sativa
  unsure (1)..(866): unsure at all n locations
  Clone ID: PAT_MRT4530_9386C.1
aaaaaaaatcctcttctcatctcctccctccgagtcatttcccgcaccgccgcctccacttcacccgcctcgccgccgccatcgccgacgtcgccgccgccgtcgctgcggcgagcttcccgtccggcaggccgatggacaccgtgggcgcccgcctgagccgctcgtcgacgcggtacggccccgtcgggaacaccgcctcctccttcagcgggcccgtcaggaagtggcgcaaggcctgggtccccatcgccgccggcggggcggggtacgccgggatgatgggccccatgggtgtctccagggggaacaaggtggtgctgttcaggtgggcgccggtgaacggcggcgcggccgggggtggcggtggcagcggcgacggcgacgagtcggcagcggtggcggccaccaggcggcgcttcgttccggcttcaggcgtggcacaaaattctaccaagaagagcggcagcaccgagctgaatttgaaccttgggttggaagatccagatgacgacagcgatgctgatctgagcgcagaagagcaacgtgacagtgggaagtaaccaacgctcagacaacagactgaagagaaaagccttttaaccgcccagtcctttgatgatgagaacgtacgtggtcatgcgaggccactcatgtaatcttattagcatctatctcctagctcttagcttgtgttaggcattagcaattgtgtattgtagtccagaacaatgcattagccagttgtagtcttattagcatcttatgccaatatgcccccttccatgagctgatgatgtagcaacatgttattacaccaagtgttaatgcatgaacttgtcagattgganaaaaaaaaaaaaaaa

SEQ ID NO: 95702 - DNA, 525 bp, Oryza sativa
  Clone ID: PAT_MRT4530_93870C.1
atggtttccgctactgctgtcaagattgcagccatcttcatggtggcgctgaccatcggccagctgatggctgaagcatcgtcgtcgtcgtccccacagcctcgtcggctgctcgaggtcgacgacgacgacgatggagaggtcgtcgaggcagagctcgacgaggccaccctgctggccgacgaattagccacaatcgttcagggctgccgtagcatctgccaccgccatcccaagtcgtggaggcatgatgggagagtcatcgggcgcccggggggtggggtgaattggcgccaccaccaccaggcgacggcgatcccggaggagagcacctaccgcacaccgccgcacatccctcctccaccggccgaccggcggcagctggggatactgtcggccaccggcggcgcacgcggcgacgtcccgtgctctcgtctcggcgccagcaactacaagtgccgccacggcgcctctaccaacccctaccactacggctgttctcgcatctcccgctgccgcggctga

SEQ ID NO: 95703 - DNA, 1505 bp, Oryza sativa
  Clone ID: PAT_MRT4530_93871C.1
ttttctcggacacggttgatctcacctgacgacgcctactatttccgcgtcgcgtcgtcggcccgtctccgtctccgtctccctccccccgcatccccgggcggaggaggccaccccaccgccacccgctccctttcccccccttcttccctccctccctcccttcccccaccttttccgctcccccaattaacctcaagctcacccgcggaggcggaggcggagccggaggaggaggagggaagggccggtggcataaggcagcagcgattctcgggatgggcagacaccgccgcccaactcccacgatggaccgcccgcccgcgccagcgccagcggtggcgctgctcctcgtcgtcgtcgtcgtcgcggcggcggtaatgctggcggcggtggagggagcgggggcggaagcaacaggggtgttccacgtgcgccgcagcctccccgccggtggtgcgggggcggcggcggaggcgtaccgagcgcacgacgggagccgcggggggaggctcctcgctgccgccgacatccccctcggcggcctcggcctccccaccgacaccgggctgtactacacggagatcgggatcgggacgccgaccaagcggtactacgtgcaggtggacaccggcagcgacatcctctgggtgaactgcatctcctgcgatcgatgcccacgcaagagcggcctcgggctagagctgacgctgtatgaccccaaggactcgtctactgggagcaaggtttcgtgcgatcaggggttctgcgccgccacctacgggggcttgctgcccgggtgcaccaccagcttgccctgtgagtacagcgtcacgtatggtgacggtagctccaccacagggtacttcgtgtccgacctcctgcagtttgatcaggtgtccggggatgggcagacacgacccgccaactccaccgtcacatttgggtgtggttctcagcaaggtggggatttaggcagttcaaaccaagcccttgatggaattatagggttcggtcaatcaaatacgtcaatgctatcacagttatctgctgcagggaaggtgaagaagatatttgctcattgtttggatactataaacggcggtggaattttcgctattggaaatgtggtgcaaccaaaagtcaaaacaacaccattggtgcccaatatgccacactacaatgtaaacctcaagtcaattgatgttggtggtactgcactaaagcttccgtcacatatgtttgatacaggcgaaaagaagggtaccataattgatagtggtacgaccttaacataccttccggagatagtttacaaggaaataatgcttgcggtatttgccaagcataaggatataaccttccataatgttcaagaattcctgtgtttccagtatgttgggagagtggatgatgactttccaaagatcactttccattttgagaatgatcttcctttgaatgtgtatccacacgattacttcttcgaaaatggggtaatgtaa

SEQ ID NO: 95704 - DNA, 603 bp, Oryza sativa
  Clone ID: PAT_MRT4530_93872C.1
aaaaccccccaatggcggttaaattgaacagatgattcaagggatcaagtccgctgggttttgaaaaatttttttccctcaaggccaaaaattttgggggaaaaaagaacccgcaaaacccttaaattttttggagggggctttttacagggggtccttttttttttttggacaaaacttttccgaagaaggcccttccggccctaacttgttttccccaccttttttgggggcctcatttccctgcttaaattggggggggcccccccaacaatttttccgcccttggggggatagggcctttttagtctgggggaaaaactggtcccccttataaaaagggttttttggaaaaactttgggtttccccctttttgaaaggggtttttttacatttttcccagtttaagaggctttccttgtttttcttaggggggaaataggggaatttaagggggcaaggtggggaaaattccctttttttgggttttattggaaaaaaaacccgggccccctaaattttttggattttccaggcccttcatgggccaattgtggggtatttaatcagggtcaaaacccctttttaataattggcctaaa

SEQ ID NO: 95705 - DNA, 315 bp, Oryza sativa
  Clone ID: PAT_MRT4530_93873C.1
atggcgatgggaggagaagagagggagggcgcctgggctttaagggcggcaatgggcgacgcggcagagggaggagggctctgcctccatcccttggcagcttgcgcgcggagtggcggggctgaggcgatgacgacggcgatgacggcggggcggtgtggagcggtgcggcgacacgggcgacaggcgcgggcaggcgctgacgacggcggcgaccaggcggcgcggcaggacagcggggccgggcggcgcagacgcgacgcgggcgacgaccacgcgggcgcgtgcgcgcgaacgacgcgcggggagcggtag

SEQ ID NO: 95706 - DNA, 1383 bp, Oryza sativa
  Clone ID: PAT_MRT4530_93874C.1
atgcacgcgtgcggctcacggtgggtgcggaagcggcgggcccacgcgcagcctcacggctcgcggtggatcgcgcgcgcgagcggggcagaggggaactggcgaacgggggtcagcttgacccagtcgcggccgaggtggcgcctacgtggctgccacgcgggtcggcgggaggaagacgacgacgtcggccggaacggacggcggacgacggcggcgagcagtggggcgatctacagtgatgcaggcaagggcgagcgcaccgggaggttgcgcgggacgaggggagacgagccaacggcttggattcgccggagggggcccgacggcggcggattgcggcggcggcaaccggcggcgagagaagggggaaacggcgacggcgcgacgggagatcgattcggcgttggattggacggagacactacgagagaggccggcgacgtgcgggtgctacggagcacgggcgctgacggcggcgagcacacagcgagcggcggcagcgggcggtcaaggagcgagctggcgctcggcggtcgcagccaaaacggcgacagggaggatgacgccggcggggagaaaaaggaagaaaagaaagagggaaaggagacttgcctcttgccactttgggaaaagaaggaaggagagagagagagagcgacgaggcagtgggaggaggagctctgcctccaatccttgggagcatgcgcggcagtggcggggccgggtcatgacgacggcgatgacggcgggggaggtttggaagggcgcgactacagggcggcaggcgctgacggcggcagcgactggtcggtcggccagcacggcgcgcgcgcgcgggaagcaacggcgcgggggattcaaaacttgggggcggggctcgccggggagagagagacggggagtgggagagcgagagaacgagagagcggagagagagagagatggcgctcggcttggcgtcggctcacgcgcacgctcccagcggcgccgtcccgtgcagggccaccccgcgcgcctgcgagcgccgcctctcctcgcctccacggcctgtctctcggcggcgccgaggactcagcaagaagaatgcacctcgtgctcaccattgccgacccggccatcgctggattcgctgccgtcatcgacggcgcccatggccaagagatagggaggtggagaggaacgcgcctcgtgatcacccttgctggcccggccgccgtcttcagtgagacgagggaggagattgtggatgagcgagccgatgcgagacaccgatcgatagccacggccggcgacgcacggcacgactctctcaatcggtcgcggccacgcgcggtcggcgaggccaccgtgtacgccggtaagaacacgccgccaagaggt

SEQ ID NO: 95707 - DNA, 250 bp, Oryza sativa
  Clone ID: PAT_MRT4530_93875C.1
aatataattaacgatcgatgtatgggactgatgtatatatgaacacacatattgacctaggaggtactcggtcatcgagcaagggcatataccaggccagtgcgacaacaaatggccgagatggtcgaaatcgcaaagacgggaaccgtgacacagaggacacacggcccaacatgttcctcctccagagacttatgatcagggacacatgcactaaccatgcatgaatgcctacatgaagctgggggag

SEQ ID NO: 95708 - DNA, 406 bp, Oryza sativa
  Clone ID: PAT_MRT4530_93876C.1
cttttttttttttttttgaagcaaagttcagtttttttgtgcctgttctgcttactacaagctgcttctccagtcactaccttctcggtaggtaaattctaaaactcgacaacatgtgtgtcgatcaaaggtagcaagcatcctatcacactgtatcgccatcttctactagctactagtagtagtatcatacaactctcctcttgactattgccatgcaaactactgtctgctagagtacagtagtacaatagaacaaacaaaacatagctgacagcacagctgatcgcagtttctgggtgcacggcaacactgcatttctcgacggtcagtaggtccaaacacacactgcttccgggccactactgattagtgcgcatgtcaccgccattgctgctgccttcct

SEQ ID NO: 95709 - DNA, 678 bp, Oryza sativa
  Clone ID: PAT_MRT4530_93877C.1
atgacgagaggccgactgcacgggagtgatctctccggcctcgggctggggaagaggaagaagacgagcgcccggagtccccttccgcgtcctagcacgcaccggctcctccggcacacgcgacggcggcggtcggcgatagagagacagaggggacggcaatggcgcgggcggtcaaggagcgagctggcgctcggcggtcgcggccaaaacggcgattgggaggatgacgccggcggggagaaaaaggaagaaaaggaagggggaaaggagacttgcctcttgccactttgggaaaagaaggaaggagagagagggcgacgaggcagtgggaagaggagctctgcctccaatccttgggagcatgcgcggtggtggcggggccgggtcgtgacgacggcgatgacggcgggggcggtttggaagggcgcggctacagggcggtaggctctgacggcggcggcgactggccggtcagccaccacggcgcgctccgcgcgggaagcaacggcgcgggggattcaaaactcgggggcggggctcgccggggagagagagacggggagtgggagagcgagagaacgagaaagcggagagagagagatggcgctcggcttggcgtcggctcacgcgcacgcgcgtgcgacgcacgtgcggggtgagggagaggagggctga

SEQ ID NO: 95710 - DNA, 237 bp, Oryza sativa
  Clone ID: PAT_MRT4530_93878C.1
cgatctgcacgcggaagcaagtgcaacccaagcgggcagtatatgcaattcctcacgtgctcatgtgcatgtctgtttcgagacttcctactgcttctagccatggggctactactcctccgacactgagggagctttgctggggccactgccctcgcagaacgaagcgtctagctcgcactctactgatgtgaaggctcgtcttgcggacccagggacctcacggtcgggtactac

SEQ ID NO: 95711 - DNA, 474 bp, Oryza sativa
  Clone ID: PAT_MRT4530_93879C.1
atggcggtgtcggcggcctccatccggcgggccagctgggcggtgcggtacacgttccaccgcggcgccgacgcggcgcgccgcgccagctccagcgcctccctcagctgcgccgccagctccgccagctcgccggcgctccgcccgtgcccccaccctcctcccccctgcgccgcctgcggctgcaccagcggcagcagcggctccacgttccggcgcagccgctccgccgtcgacctgcagaagaacgtccccctcaccgcccgcagcagctccttcaccgcctcccccgccagctcctcgaacagcctctccatgcctccacttcttcaaaatcaatccaacacaattctttccctgcctcttcttcttcttggatcttgggatgatgaaatcaattgcaatcgaacagaattctttctattctctgcctcgtcttcttggatcttggatgatgaaatcaattgcaattga

SEQ ID NO: 95712 - DNA, 769 bp, Oryza sativa
  Clone ID: PAT_MRT4530_9387C.1
tcaccaaagagtgtcgtggcaccctaaagtatcatcattgttggccttgaacaggctaggttttcgcatgatcgtgcgccgcctccacttcacccgcctcgccgccgccatcgccgacgtcgccgccgccgtcgctgcggcgagcttcccgtccggcaggccgatggacaccgtgggcgcccgcctgagccgctcgtcgacgcggtacggccccgtcgggaacaccgcctcctccttcagcgggcccgtcaggaagtggcgcaaggcctgggtccccatcgccgccggcggggcggggtacgccgggatgatgggccccatgggtgtctccagggggaacaaggtggtgctgttcaggtgggcgccggtgaacggcggcgcggccgggggtggcggtggcagcggcgacggcgacgagtcggcagcggtggcggccaccaggcggcgcttcgttccgatctcctaccaggtcaaaattttcccctctgccttcccatccaggaacagagtgagaagcaatcccagcaggagttgctgcggccttgagctcgtgaccatggacctaccagtattttatggaagatttggtttcctggcttcaggcgtggcacaaaattctaccaagaagagcggcagcaccgagctgaatttgaaccttgggttggaagatccagatgacgacagcgatgctgatctgagcgcagaagagcaacgtgacagtggaagtaaccaacgctcagacaacagactgaagagaaaagccttttaa

SEQ ID NO: 95713 - DNA, 217 bp, Oryza sativa
  Clone ID: PAT_MRT4530_93880C.1
tccgcccacgctgtcgctgacccatgggacgtcgcgtgggcgccgttcgctttgtaccttgataggataaacgaatggcgcgcccgccatcgacttcatattgtgccctccattgcggaatcccggtcctggggaaggcggaccccgaattcttccgggtccaaggccagggttcggcaacaatccatgcaattccgaggcaacctttttttctcct

SEQ ID NO: 95714 - DNA, 877 bp, Oryza sativa
  Clone ID: PAT_MRT4530_93881C.1
ttaaagcacaacaaggtaaggagaaccaggtcttgccttccgctttagcagaggcataaacaaaggtctgtattcccaagcaatgtatccctccgcccctcccgacgcgtataacaagtacagcgccggtgctccaccgacggcgccgccgccggcaacgtaccagctgccgacgatgaacaccccacgcaccggcggcgggctgacgcgatggtccaccggccttttccactgcatggacgatcccggaaactgtctcatcacatgcgtgtgcccctgcatcacctttgggcaggtcgctgacatcgtggacaagggcacctgcccatgcctcgcgagcgggacggcttacgcgctcctctgcgcgtcggggatggggtgcctgtactcgtgcttctaccggtccaagatgagggctcagttcgacctggacgaaggggattgccccgatttcctcgtccatttctgctgcgagtactgcgcgctgtgccaggagtaccgggagctcaagaaccgcggcttcgacttggggatcggttgggctgccaatgtggacaggcagaggcgaggcgtcaccggagcgtcggtgatgggagctcctggcgtcccggtcggcatgatgaggtagacgaagatggcgaacgcgaaatggtgcgcttttgtgttcttgtgttgcaatatgttctctgtggttttcatttggagatcactgcctatttcatgtatcgtatactcctatttagcttgatttgttgggtttcatgtaatatatgacgcattcagaagtgttgtgacttgtcaagacccagtaatgggatttggtgagagatcgaatgagcacattggaattaggctgttaaaaaaaaaaaaaaaaaaa

SEQ ID NO: 95715 - DNA, 177 bp, Oryza sativa
  Clone ID: PAT_MRT4530_93882C.1
aaaaagcgatagccttcattaccttagaagcgaaaaaaacgtttggttttattacagcggcgtggttgtacaccattcaaccaagaaacaattttgctgacatgaaacaggaaatcatcgggaagagaaagaatctttttcatgcgggtacggcagttactagcgcgaacacacgct

SEQ ID NO: 95716 - DNA, 443 bp, Oryza sativa
  Clone ID: PAT_MRT4530_93883C.1
tgggtttttttattttttggtgttttttttttttttttttttttttttttttttttttttttttttttttttttacaaggggaaaacaaattcaattaaaattatgccaaaaaaaaatttccaaggggcccgcccaaaacattggtaaaggggggaaccccctttggtttttggaaaactaaatttggccccaggacacaacaaacctaaccctaaacactttaggagggacaaaaccaaaccagactggacattttgaaacaagaactcctttcctttttaaccccccaaaggggagctggttcccccttcccggaaaaaatttttaagggatttagacggggccttagcccccccaaagggggtctttttgaaccggcaaaggggcaaaggctcccaattttttactatttaaaaactggaacccggtaggggggggcttg

SEQ ID NO: 95717 - DNA, 343 bp, Oryza sativa
  Clone ID: PAT_MRT4530_93884C.1
caatcaattgaatcttagttgatgaagaaagatgtttaataataataataataataataataataataataataataataataataataataataataataataataataataataataataataataataataataataataataataataatatcaaaaatcgtgctaacgagaatcaagataaaaaaaatattcacaataatactaatactaatatttatggttggaataatttattttctcgttccaattcgtattgcatgatcaaacgtttgttttcgaaaatgtgtacaatactaatgtttttaatcttcttaactagtactatttacaatgcaaat

SEQ ID NO: 95718 - DNA, 1085 bp, Oryza sativa
  unsure (1)..(1085): unsure at all n locations
  Clone ID: PAT_MRT4530_93885C.1
gccggntccntcctctaatcgaccgccatggcgatcgcccgcaccggcgtgtacgtcgacgactacctcgagtattcgagcacgctggccggcgacctgcacactaatctatccaccatgcgcgcgcccgcaccggcgtgtacgggcattactacctcgagtattcgagcacgctggccggcgacctgcagaggattctctccaccatgcgcgagctcgacgagagggctcatggcattatgggacagaccaaagaacagataaagtatctactcggagtgccatcccatgggttcgacaggtcaaacatggatgatgatgaatctgcctcagagagaatgaaaaaggacatcgaagctagtcaggacaatgcgttgagtctctgcaccgagaaagtgttgcttgcacgccaagcttatgacctggttctgcatgcacccttcatttttttctagtcccgtaactcaaggaacttgtacatttcatttcatgttaagtgccatcttagttgcccgcttttcttttagacgagatcttagataccctttaattgatacacctaaacaaacttgatcgttctatattaaagtccaaacttattttgacagtttgcgtttgtcaagttcaactccagattccataatgaatagttacgaacttagaagtatcacacaggaagactaatgtttgcagtctaaaaactctgttttgttacaattacaaaccactaatagtatctggcatcttgagattatctcatgagatttaatgaaaagcctgatgtctgtcatactgtgttatgtctcatactgcccatatactaaattgaatgttcggatgcctgacactaaattacatcaatgctagaatcatatactaaattgcatgtcctaattctagaatctcaattacattatcaactcactgtgtcccattcagggacccagactaacgaaacaaaatccatttttgatatttgttccaatttgtgtcatttatatcctataatattttgttaatacctaactgtaagtaccatggatggattattgtacagatagagagtcatatcaaacgtctggatg

SEQ ID NO: 95719 - DNA, 630 bp, Oryza sativa
  Clone ID: PAT_MRT4530_93886C.1
atggcggaagaggaaaaaaatggtatatgggtggccgaaatgatatgtgattactatgaatgggggcatatcgaggtgccgaaaaagctagatcagattggcaccatttttaggattggaaagaaaaagtcagagcccagagggatcaaggaggtaggagatgtggtcgctggaggattgggacctagaggtggtcgctgttggcagcgatgcggtggaggggacatagatgccaacggtggggttgatctgatggtgacgacagtgggtggtgggttccaagtagcaacaagacggaataattccaggagtggtgttcctcggttgaagaggacagtgatgaagcttgcagttgcaccgattgattttctgactttctgcgggaagatgaagccaatgtcagggcacatcgagctaccggcagctaaggttgccaagaattgccggacgggaaaattttgctcctcatgtaggaacaagctgagaagaccgagagcgcaagattgggagtggaagaggagcccttgcttggcctcatatgttgagagcgaagactataggataggaactccaaaagttaaggagcagagtagagaatctctcggagcagcttttaaattaaaatcctaa

SEQ ID NO: 95720 - DNA, 1038 bp, Oryza sativa
  Clone ID: PAT_MRT4530_93887C.1
atggcgcggtcggttggcggcgggtggtggcggtcccggaagaccctggtcgggctggggctgggccaactcgtctccctcctcgtcaccgccaccggcttcgcctcctccgagctctcccgccgaggtatcaatgtgccaacgtcacagtcgctgctcaactacgtgctgcttggggtcgtgtacgggagcatactgctatacagaaggaagtctttgcagatgaaatggtactactacttagtactagccttggtcgatgtagaggcaaattatctagttgtcaaggcttaccagtacacatctctgacaagcgttatgcttcttgattgctgggctattcctgctgtgatattccttacatggatgtttttgaagaccaactacagattcagaaaatatagtggtgtggcgatttgtgtctcaggacttgtgctagttgtattttctgatgtccatgcaggtgatagggcagggggtacaagcccagttaaaggtgatatacttgtaattgctggtgctactctttatgccatcagtaacgttagtgaggagttccttgtgaaagtcggtgatcgagttgagttgatggggatgctgggactatttggagctatcatcagtgcttgtcagataagcatatttgaacgcaatgagataaaatctatacaatggagtgttggtgctgtggtaccgtttattgggtttgcagtcgcaatgttcatgttttactctctagttccaattttactgaagatcagtggttcaacaatgctaaacctttcattgctaacctcagacatgtgggctattctcatccgtttgtttgcctaccatgaaaaggtcgactggatgtactatgtggcattcggtgcagttgcaattgggctggttatttactcaggcgattccaacagcgacgatggcagaagggggcaagttgctgaggccactgatgttgagggaaagctacctgatgaggaggaggctgctgttcatccaaaatgccagggtgcagcatcatctttttttagataa

SEQ ID NO: 95721 - DNA, 2490 bp, Oryza sativa
  Clone ID: PAT_MRT4530_93888C.1
ctagaagaagggaaattccactccagtccttgcagagaacaggttgtactcctttatgttggtctcctcccttgagcaaggctgagctttttgagcacttggagttggcgatctcgacgccaaacatcctccactcacctcgtcttcagatgatgcctgggcaggcgaggatatgggaaggttgaaatggaacaacgagaaaggcacagagccatcttgcggcttcttgttatcttctgaacagccgttctgaggatcaggatccacccgcttcggctcaggaggaagggtatggcgatgctgcctgtctggttttacaatgacagggtttatgacttctggcgctccatttctaaagagcgcagcagttggcaccatggcattaaagttcaccggagtcttatggactggctgtgcaggcacataaccaaattcaggacctgcataaggatgcacattactgtactgcattgggaagtcaacacattggtttccagccacaccatatccaacagcatttgggtagaaatgaccaggttgagggtatgctaggtatccatttgttggaactgacatgtgatgattatggaaacccatcaaggttgacgggtatggagctgcatgaatcttttgctgatgtaacagctgctcctggaaaggggtcacaccaaacccaaattgattgccatcagaagggtgaatattctgtggctggtattctctgaaaccatttcctgcgcacatttcaagtaatgaacgcgaaccgttcttggttggtggattgcctgggttgctattgttcctttctgaagatccttctgaatcagaagtagacgaggattccggattctgagcactcaatgaggtcatgctgctcatgctactatctctgtctccctcgcttagacatgaagagctatctgaactggtcatgtttgctgtctgaccaccatctttggtaaagcagctgtctggcttgttcaccacaggaggttcactattgcaagcagcttgattattttcactgctttcacatggctgatctgttatcgatttgcaagcttcttcagatctatcagaggaagcttcagctagttcttcatgctccgagccaagtatttggctacaattgacaatatcctttgaacaccccacttgattggatcgatcaacaccgctaactgtttcagaagaaccattcgaactccctaagctagctttctttctagcatccattggctcccatacttgttttggagctgcattcttgtttggcgtactaccaactcggcttccttttgacactatgaagctatccaatggatagcacctgcggtactgtaaccagggcttctcaaccattgttttcctggacatcttcatctctctacttgatctagctgttggagaaaaatacccataatcttcctgctggccacaactgcaggcattgtactcatacctttctcttgtccggttattcgcactgaacaaagagttgcagcctctacctgcattccttgccctctccctagattgccagtgaatatttccaacacccccagtgtcatcttggcaatcttcataccaaaaaccagtggtctgttcttgaagggaatcccttctaaatctgagtttcctccttgaggatgtagattgttcacacatgaaagaaccattgcaatctgatggaataaattccagtgttgtactgcaatgaaactcattgctttgtccatcactttcccttgttagagattgatcaacacaggtatcaggagagaacgattccgtcaccacaatactatctttatcttcatcatcgctagctgagtatttggagtgggcaatatctggtgactgatcattaattggtgttgctgagttgctcaggggtgatgacgaggtaccaatgtaaggtttcaattgaactggtatcttttctttctccttttccttttctttcaaacgttcttttcttctaagcttcttttctctctcctttgttctcctcctctccctgcgctcttcttcttcacgcttttctttctcttcttcctcaagaagcttggtctgtttttccaatgtaattatttctttgcaggcaacatgaacccgctcttccaacaattttaatgcaagggacacaaatacgctatgtgcattttgttgtgccgtggcttccctcaaagatttttcaaccttcacaggaaaaacaatgtttcctatgtcaacacgagatgatgctgcaggcttaagtacgactatctgttctttgaatatcactgcagcagcatccaaaagaaactctctggcaagttcaggactcttagcatgcttctgtggatgaacaccatcgacatcagtatcatttccatccctgtccatagcatcatcttcatcctcttcctcagcttcttcagcatgcaagcttgagtattctatagtgtcacctaaatagcttggcgtaatcatggtcataagctgttc

SEQ ID NO: 95722 - DNA, 4343 bp, Oryza sativa
  Clone ID: PAT_MRT4530_93889C.1
ttttttttttttttttttttgggttttcgtttttttttttttttattttatctcaaaatttagaaactataccactcactatctttgcaatttccttacacacaagggcaaccaaaacaaatggaagaagaaataaataaatattcgagggaacacggtaaaaacctcgaggtaacttattttgtttttgtttttttggagaatacaaatcactcgctatgtattgttctgtgccaaataataggcgcgtctgttgtctagaagaagggaaattccactccagtccttgcagagaacaggttgtactcctttatgttggtctcctcccttgagcaaggctgagctttttgagcacttggagttggcgatctcgacgccaaacatcctccactcacctcgtcttcagatgatgcctgggcaggcgaggatatgggaaggttgaaatggaacaacgagaaaggcacagagccatcttgcggcttcttgttatcttctgaacagccgttctgaggatcaggatccacccgcttcggctcaggaggaagggtatggcgatgctgcctgtctggttttacaatgacagggtttatgacttctggcgctccatttctaaagagcgcagcagttggcaccatggcattaaagttcaccggagtcttatggactggctgtgcaggcacataaccaaattcaggacctgcataaggatgcacattactgtactgcattgggaagtcaacacattggtttccagccacaccatatccaacagcatttgggtagaaatgaccaggttgagggtatgctaggtatccatttgttggaactgacatgtgatgattatggaaacccatcaaggttgacgggtatggagctgcatgaatcttttgctgatgtaacagctgctcctggaaaggggtcacaccaaacccaaattgattgccatcagaagggtgaatattctgtggctggtattctctgaaaccatttcctgcgcacatttcaagtaatgaacgcgaaccgttcttggttggtggattgcctgggttgctattgttcctttctgaagatccttctgaatcagaagtagacgaggattccggattctgagcactcaatgaggtcatgctgctcatgctactatctctgtctccctcgcttagacatgaagagctatctgaactggtcatgtttgctgtctgaccaccatctttggtaaagcagctgtctggcttgttcaccacaggaggttcactattgcaagcagcttgattattttcactgctttcacatggctgatctgttatcgatttgcaagcttcagctagttcttcatgctccgagccaagtatttggctacaattgacaatatcctttgaacaccccacttgattggatcgatcaacaccgctaactgtttcagaagaaccattcgaactccctaagttatttttttttttttttttttttccaaaacctactagttgtaaacttggtttattatactctcacagaagtagacaaactgcataccattctgctgtcccgtaacataattattacgttggtacaagaaaccaatgcttctaaacatagaagcgctacaaacacaaccgcgatctgctacgtgtatcgtatgctgatcgcggattgttatggaactggagatacagattacagaccggctacaataacacttaagatgcccccgtgcccacatcaactctgcaccttacgggaggaaacgacgcctggtgccgcagaagcgtgcctatctgccatggatattaccttcagcaatttgaccgggcacttatctatgcaaatatgcaccaggatttacccatgcatctatcgactacttaggctcatcttgatttattaatctccaaataaagtagtgagcagcaggtcttgcacaaatgttgctctgacactcgcttgcttccgtttctcttccctttcttcccttgtgagggatgagtcaatacttgatccacatgggtatccaggggtctcgtttccgtcacctgaatcatatctttatcttcatcatcgctagctgagtatttggagtgggcaatatctggtgactgatcattaattggtgttgctgagttgctcaggggtgatgacgaggtaccaatgtaaggtttccattgaactggtatcttttctttctctttttccttttctttcaaacgttcttttcttctaagcttcttttccctggactttgttctcctcccatccctgcgctattcttgaacaagtacccatgttgcacagtgatatgattaagcatatcttttgcaatcttatcagaacatatagggcaaggcgccgcatggggctcgaaggggtgctcctcctccaggtgcgcgcagagggagacgacgtcgtggtcctcgtagcagtaggggcacgcgaactccggcctcacctcctcgtccatgtccacctcctccatccccgctcgatcggcgtggccgagctgcgcggcgtagaaccgcttggcggcggccaggcgcgagatccagtgctccgagtccataggcttcggcggagcgggtaagataaggctcgctcccctcccctcccccactctcctctcctcgtagcgttggccgccgctcctctcctcggctccacgcgatcagcacggcggagatgtagctcggcggggtcgtcggcggggagaggaggaggagggggaggagatagtctcctcgtgccttatcgggaggtgaggtgaggtgagatgcgggggcggagtgagcaacggggttttctttctcttcttcctcaagaagcttggtctgtttttccaatgtaattatttctttgcaggcaacatgaacccgctcttccaacaattttaatgcaagggacacaaatacgctatgtgcattttgttgtgccgtggcttccctcaaagatttttcaaccttcacaggaaaaacaatgtttcctatgtcaacacgagatgatgctgcaggcttaagtacgactatctgttctttgaatatcactgcagcagcatccaaaagaaactctctggcaagttcaggactcttagcatgcttctgtggatgaacaccatcgacatcagtatcatttccatccctgtccatagcatcatcttcatcctcttcctcagcttcttcagcatgctcaaagaaactttgaatgctttctcccttagtaattgtcacaaacccatcccccacgatcagcctgcggtgaacacatgattggcccttcaaggcatgggccttcacatagaaatctgtgttcttgttatccgcataatgcgctctcagagtaacaaaataatcttcaaactggtcaagatcaaggcccttcctgtgcacttgcccattcatccccacagcttcaaatcctagtatatcagatttccctttttctgttccaacagcaaactcaaaacgattataggacttatcttgatccaagaaagattggcggcaatcaactaagacagcatcctcaaacacctcacaccggaaagctgtatcagtaatgcagaaccagctagtgcagtgatgttcccgtcgcagacgctttaattctttcagttccttaaattcacgaatgacattccttcggcaatctctgcaaaatcttttgctgtcgaacctatgcataagtctttcaatgaaatcttcttccctcatccgcagaagagatgatctagtttcttcacacaggtcaaaccagtaacccaccagagcatcacaagaaaggcgtgcagtgtgcaaagcacatgtgtctcgtgttccatgccccctgccataattagctattactgggctaatccaccctctttctcctccaccacatgcatcaggataaagcatttcccgttcacgctccctcgcccgtgcattgtcaaatatattctggagtacatgaagggaatttgtatttatgaagcagtcaagaagagtcaggaggccatcctttgttgtcgaaaggcctccccaagaatcatcttgtacaacacctggacctttttgttgcagtaacttcccatgcatgaccatttgtgtgaaactttctaaaagcagcccattgcaccttgaacagtacaaattcctgcgtgcatgctcaatgagagtctgcttatcgatcctgaggagctcatgccgtgcttgaggcgacaaggcactccagaacttgtcgaggcggtcgaaggtgatctcgtcgcggcggcgcgaccagatcgcggaggaggaggaggaagagctggagttggatgagcatgatgaggaggagcagggcgccgccgccgccgcatccgcgagcatgggcggcggcat

SEQ ID NO: 95723 - DNA, 735 bp, Oryza sativa
  Clone ID: PAT_MRT4530_9388C.1
atggagccacagctgccgaccgtgatatcgatggagtgggatagcaccaccgagccggccaaatcgtcgccgccgtcacagaggtacggctacctggagaggatccgtaacttgtccgtcgtctcggccgaggccggccggtggtggtggccatgctcgtcgtcgtcgacggcgagatccagctactacagcagcagcatgtcaagcagcgtgtccggtactggctctcagaatcaacgagacttcgaccgggagcccgaccatgcgctggagaggtggttctccgagctcgacgtcggttgggtactccggtcggcggcggagaaggagctagccgccaagctcggcttggatgatcttgtgcagcggtggacgcgaggatatgccgtgatggtcgaagcactcgtagctacgcagcaaaatatgaaatttcaggatcataccaatatggagctagaagacgacctccgacctctccaagtcactcggttcgtggaggcgaccgtatccaagatgcttgcctttgctgatgccctcgccgctgataacacttggcggccaattgacaagctctcgcggtcgcggctcatgtgcctgtgcacctcgatcaacgagtgcggcatacgaatcttgtcagaaataatagtatttgagtttgattgcatattcagcaaaatgaatggtgctttctcagccatatacaggatggccaaggatgctgaagccatcacttga

SEQ ID NO: 95724 - DNA, 1399 bp, Oryza sativa
  Clone ID: PAT_MRT4530_93890C.1
tcacagaagtagacaaactgcataccattctgctgtcccgtaacataattattacgttggtacaagaaaccaatgcttctaaacatagaagcgctacaaacacaaccgcgatctgctacgtgtatcgtatgctgatcgcggattgttatggaactggagatacagattacagaccggctacaataacacttaagatgcccccgtgcccacatcaactctgcaccttacgggaggaaacgacgcctggtgccgcagaagcgtgcctatctgccatggatattaccttcagcaatttgaccgggcacttatctatgcaaatatgcaccaggatttacccatgcatctatcgactacttaggctcatcttgatttattaatctccaaataaagtagtgagcagcaggtcttgcacaaatgttgctctgacactcgcttgcttccgtttctgttccctttcttcccttgtgagggatgagtcaatacttgaatcccatggctgagcaggtgtctcttttatcacagatgcatcatctggaatggaaataggtggttttgatgtttcctctgtgtctgatgttggaaagctaaggccaaacgatgacagaagagggtcagctgaaatatttgttgtgttgctgctgttgtttgacctatgtcccccacctcccagaagcacctgcaaatgggcttcacgtagatctcgactcagcaaagatagggcttgactgcctggaataacgaatctgcgcaacctgcgacgattcttgaacaagtacccatgttgcacagtgatatgattaagcatatcttttgcaatcttatcagaacatatagggcaaggcgccgcatggggctcgaaggggtgctcctcctccaggtgcgcgcagagggagacgacgtcgtggtcctcgtagcagtaggggcacgcgaactccggcctcacctcctcgtccatgtccacctcctccatccccgctcgatcggcgtggccgagctgcgcggcgtagaaccgcttggcggcggccaggcgcgagatccagtgctccgagtccataggcttcggcggagcgggtaagataaggctcgctcccctcccctcccccactctcctctcctcgtagcgttggccgccgctcctctcctcggctccacgcgatcagcacggcggagatgtagctcggcggggtcgtcggcggggagaggaggaggagggggaggagatagtctcctcgtgccttatcgggaggtgaggtgaggtgagatgcgggggaggagtgaggaatggagctaggtataccgcgggtttttttttttattctttgggcaccgggtcgcgactcgcgaggtcgccgtcccccgccgcgtcatcgactcctcaccagccaagcccacgcgtccg

SEQ ID NO: 95725 - DNA, 477 bp, Oryza sativa
  Clone ID: PAT_MRT4530_93891C.1
atggcgttgagtttgggggaggtggctatgctcgtggttgacgtggcgttcgtcctgtgccttatcgtggcgatcatgtgctgctgcgaggacgaccgccgacgacctcggtcatcatctcaacgggacgcccaagtcggaggacgggtggtgatgctgcgggtggtggaggcgcccccgggccagcagcgagtggcgccggcggcagcgaaggcggcgctgccctacttcccgtacgcgcaggcccagggcaggacgtcgtcgtcggagacgcagacgctggtgtgcgccgtctgcctggaggagctcaggcacggcgagctgtgcagcgaggtgccggcgtgccgccacattttccacagggggtgcgtcgggtcgtggatgaagaagagcgatagctgcccgctgtgcagggtgaagatctcgtcgtggattgcagggccgaccgaatcgccgacggctgctgacgcagtgtag

SEQ ID NO: 95726 - DNA, 641 bp, Oryza sativa
  Clone ID: PAT_MRT4530_93892C.1
acgaattgcggttggaaaaacttcttagcggcaaagaacagagcagagcagggacggcactgctcggcttggtgcgacgagggtggcagagggctgtgagagggcaggcaagatcaatttgagtggcaggaggccacgttcgaatacttactagcgaaggattgatttaaccgcgggtggaatcggctagcgatgtgttggcgccaatccaagcacgacgcgcggcggcggcgatggttaaaacggccggcatagtggtgattgcaagtcttggcacgattcacctagggtagaagcgaattcgaactcggcggcaagtttggattggtgtgcacggcgtcgagcggcgatttcttgcggcagaggtcgtcccagcttcgtcttcgtcacgattggtgcggcggcggtggtctgaggacgtcgaatggctgacggcgcgccaaggcagctagggacgcgcgaacggccccgaagccaacgcgcggtggctcggcgcgcggtaaagtcggacgccaggcaacgcgtgcaaaggggaggagaaggcaaagaaaaccacggctttgagtgggttgtggtccccaaggaccaaacctaaactcgccgccaccgccgttgctttacgagagagagaaagagagcac

SEQ ID NO: 95727 - DNA, 1773 bp, Oryza sativa
  Clone ID: PAT_MRT4530_93893C.1
atgaactccgcggcggcggcggcggcgtgcgcctcggccccggcgtgggtggtcggcggcggcgccggcgggggagccagatccgcgcgggggccatgcgggatcagggtgtgcgggctcgggggcgaggcggtggcgctccgctcgctgcggatctcgcagggggcggcggtgaggcgggcggcggtggcggcgagggcggccgcggagaacggcgtggcggggagcggcgggttcgactacgacctcgtcatcatcggcgccggcgttggtgggcacggcgcggcgctccacgctgtcgaggagggtttgaaaactgcaattattgagggagatgttgtaggtgggacttgtgtaaacagaggttgtgtcccatcaaaagcacttcttgctgtcagcggtcgcatgagggagcttcatgatgaacatcacatgaagtcattgggtctacaggtttcatcccctggatatgacagacaagctgttgctgatcatgcaaacaatctcgcctctaaaatccgaagcaacttgactaattcaatgaaagctctgggagtggatatattgagtggttttggtgcaattgttggaaaacaaaaggtacggtatggaaaagttggttttccagacaaagaaatcactgcaaggaatatcatcattgctactggatcagttccttttgttcccaagggcatagaggttgatgggaaaactgtttttaccagtgatcatgcactaaaacttgagtctgtcccggactggatagcaatcgttggaagtggatacattgggcttgaattcagtgatgtatatacagctcttggaagtgaggttacttttgttgaagctcttgaccagctaatgcctggttttgatcctgaaattgcaaaattagcccagagagtccttatcaaccctcggaatatagactatcacactggtgtttttgcaagcaagattactccagcaaaggatggaaaacctgtgcagattgagctcattgatgcaaaaacaaaggaacacaaagaaaccctcgaggtggatgcagcccttatagccacaggacgggcaccattcacaaaaggacttggcttggaaaatatcaatgttgttacacagcgtggttttattcctgttgatgagcgaatgcgagtcatggatgcagatggcaatgtggttccgaacttatattgcattggagatgccaatggtaaactcatgcttgctcatgctgccagtgcacagggaatctctgttgtcgaacaaatctctgggagggaccacatcctaaatcatttaagcatccccgctgcttgcttcactcatccagagattagtatggttgggcttacagagccacaagccagagaaaaagctgataaagaaggatttgagataagtgttgttaagaccagctttaaggctaatacaaaagcattggcagaaaatgaaggagatggacttgctaagttgatttaccggcctgacactggagaaattcttggtgtgcacattttgggtttgcacgctgctgacctcatccacgaggcatcaaatgccattgccctaggaactcggttgcaagacatcaagtttgctgttcatgcacacccaacattgtccgaggtgctggacgaactctttaaagcagccaagttgcagcctagagaagggccggagcgcaagccaaagcatccaccacaaccactcctgaaggtccttagtttcgtcacgcgcctgctcacttcccagaaacgaaatcggcaaccatag

SEQ ID NO: 95728 - DNA, 627 bp, Oryza sativa
  Clone ID: PAT_MRT4530_93894C.1
atggcgactgttgctgtcgtggttggcatgctgatcctagtgtcgtcggcggcggccaacggcggcgctgttggtgttcggcgactcgccgcctgggccagcaggtgctcaacctggagagcaacctggacacgatcaggacacagatggaaggtggcttggaagcaacgattacatcaacaacaacctcctcacatcactgtacgattcaggctacaactatacagcgcggaggactactccgatctgctcatcaaccactactccaggcagacactggctctgtacagtgttgggctgaggaagtttctcctggatggggtgggcccactgggctgcctccccagcctgagggcctccggattgggcccacaaggtcagtgcgtcgatcaggtgaaccagatggtgggtttcttcaaccaagggctgagatctctcgttgataagctgaacgctgaccatcctgatgccatgttcatctacggcaacacctacgatgctgtctacaacatgatcaataatcctcacaaatacgggttcagggtgatggacagtgggtgctgtgtgctgggtgaggatggcacgtgcgagccgtacgcggagccgtgcgagatctgcagcagctag

SEQ ID NO: 95729 - DNA, 475 bp, Oryza sativa
  Clone ID: PAT_MRT4530_93895C.1
ctgggcgtcgtcacgtcctcactccttgtccgtctgcctgtcgccttgtctcgccttgcaggtcgtagacgacagacgagcagtagcagcagcacgaggcggccgggcccgggccacgccatgccggagaaggaggcgcaggccgccgcgttctgcggcgaggcggtgatcgccgagttcgagtccctcacgcgggacgccgccgccgtgcagcgcgacacgctgcgccggatcctggcagacaacgcctgcgccgagtacctccgctgccggggcctcgcgggccgcaccgacgccgccagcttccgcgcctgcgtgccgctcgccacgcacgccgacatcgagccctacattgcgcgcatcgccgacggcgacacgtcccccgtgctcaccgccaagcccatcacctccatctccctcagctccggcacgacgcaggggaagcgcaagtacctgcccttcaaccaggagctcg

SEQ ID NO: 95730 - DNA, 720 bp, Oryza sativa
  Clone ID: PAT_MRT4530_93896C.1
atggaggtcgaggggatagtgaagctccgaccgctgtacgcatcaaggcgtgggaggagagggagagagtgggcgccggctctccggtggacgaaaggcggcgacgtcggcggccacacatgttcccgagcacgacgcacccggggagggcggtggctggcggagagagtgagggagatggccggaacggcgagtagaagagcttatcttcggcggcaaagagaggtggcggtggtggttgctatggggtgggggagaagggggaaacaggaaaaatggaatcacctcgtcgaggcgaactcgatggcgcgatggtttggcttgcgaagctccgggagagaaggcggtggggagaggcggttctggaggaggagggaaagaggaacacgacgacgacagtggcgtgaggaggaggatgtcggcgccgatttatgtttcttagcggcgacgtttgcggcggcgtgcgccgtgcacggcacgcgcaccaggaggcggcggcggctcggctgggcgtccatggagagctttgctgtcgacaagaacaaagatatagctgacatcatcgatgagattgcagttgctaagctgataatgattgatcggtcgaaccgccgagaaagcctgccgacgactcctgtcgccgccggtctgaccgccgtgtgttcgccggtcggactgccgcgatgccaccggtctgaccgccggtgcgccgccggttag

SEQ ID NO: 95731 - DNA, 185 bp, Oryza sativa
  Clone ID: PAT_MRT4530_93897C.1
tcttatgaccaggtctacaacgaggatctgctatagcttgattcgcttgaggtccgggaagtgctgtcctcccactagtaccaccgaaagcaagagcccatgatcactaggtgagggctcaaggtgctcgggaacctaatggacatccctgacatgcagtgaagggattataagtcaatggacga

SEQ ID NO: 95732 - DNA, 441 bp, Oryza sativa
  Clone ID: PAT_MRT4530_93898C.1
atgaggtcagggaacggagaaacagcttcgcactcccgccggtctatccatgtggtagcatgcgacgtctgcccagctcgttggtttgactctgccgactcgtcctcctggcgacgtgtctctgtgcatttagatcaggcactcgtgtacagctcggacagagggcatgtgtatatggtatttgatcttaaactgaggtcttccatggaggagcatgttgaagtggtcggcgaaaaaactcccgaagcgaagatgaagccggtgactcatgaagttgattccatcgcacttgtcgacagtcggatagctatgccgtgtggatatgaggtacccataatctccacactcgctgaccaggacatctacgatccaacaacgtacagcgcctgcgccgtgagccacaaaaggaagaccttacatttcgcaggcagcaggccatga

SEQ ID NO: 95733 - DNA, 929 bp, Oryza sativa
  Clone ID: PAT_MRT4530_93899C.1
ctagcactccgctggcttcagccgagtaacccgcatgccgctccacgacctccactctcgcctctcgcgatggccaacgccgtttcgccttagcttgagctccggctcgccgcaagcgccgtggagggaccacctccgcgcgggccacggcgtcacctccgcgtcggcaagcctccgcgtccgcgcgcggctccgtcgcctccgcggccacgcgcgactctgccaacgccgaggggctccggccatcgtggttgtccgtctcggcgttgagccacggctccgtcacctccgcggccacgcccaactcctatgctgtcgacgttgcgacctcgcgcggctcgccgccgccgccgccgccgccacaggaggaagcgcacttcgcgcgcagcacccgtggaaagctgggaggaaaatgtggtatagattgctttggtgcgaagaaaatgatggaaagtgggccggttgtggcagcagacagggtgtggagagatgcgtacggtgtgagcaccgaaaaatggacgacaaaagttgaaatcaaagtgaagaatgtttctgaacatgcaaaccatccatcaaagatggagactttggtgtcatctttctgcgatccacaggcctataggtttgacgcggcgaaaaatgaacattatgtttgtggttttgcaaaaagcgttgaatcaatcccaaggtctatatatctgaaactaaagtatgaaacagtcgatgtagtttgcatgaaatcgtttctggtaaacctggaggctcgcttgtacacagaggcagagggtgatattggtgctgaagaaccagatcctgagatgtatgaggatccagatgtggtaagggaagcatttgaaatgcaagctaggcttcaacgtatcgcagcggtcgttgaagaggggaagcatgctggtggcaagaaggtgtaa

SEQ ID NO: 95734 - DNA, 693 bp, Oryza sativa
  Clone ID: PAT_MRT4530_9389C.1
atgtcggcgcagcacagcggcgcgggagaggcggcggtggggatggaaagggaggcgcggcgaccggggcgacgtcggcgcagcgcaacggcgcggccgaggcgatggttgcgcggcggcgcacacgcgggtcgaagcggggcgctgcgttacacggccccgtcggatccgcctcaagcaccgactagccgcctccgtgtgacccctgctgccgaagccccttctacgcatatcccactgctagtgtggctccggccgaagcaaccctgcgcgtgcccccgggcagcccccgcgtccccgacacctccgccgctgcactatgcggagccgtgcggggccgcatgcgtgcgtttggatggcattgccacattatgcatggcactgttcccggcggaggctgcctcgtgcaccgccctcaagcagctgcacggccggcaggacgggcctcggatggcctccggtctccgtgccgcaccagcctccgtgcagcaggcgacgccgcactcgcctcggacgaggccgcgccctccgcgcggagctccgccgcgaccccgctgcctccgccgtctcaacacaccagcgcatgcctccgtctactccgccggtcgcacagggctcggccgcggcgccgcctccgtcggctccgcggtggagaatggcggggtggtggcgagttttcttgagggggggtga

SEQ ID NO: 95735 - DNA, 310 bp, Oryza sativa
  Clone ID: PAT_MRT4530_938C.1
gaagggtaggtggcgtaaagtgcggtagtcgcagtcgtcaagggagcacaaagcacacgaagcccgtcaagaaccaaccaggggagaagagcaccgggtcacgctcccccgtcacgtagagtggtcaacgacaaagtacgtacaccaggagttagtcgaaggaggtccgaaagcgagaccgttcaagagtaatgtaattgagaactagtatcggcgtagagtaaataacaccacaagtatgacacttgtggtgattctattcgataccccccctaagtacggctacaaatttcttaaaaaaaaaaaaaaa

SEQ ID NO: 95736 - DNA, 464 bp, Oryza sativa
  Clone ID: PAT_MRT4530_93900C.1
gcccgggctggctcggcagggggtaacggcgccggcgcccaggcggtcgggccactcggcacgcgcgcgcgggaaacaacgggagggcgcggcggatggagcggcgcggctcgggcacacgcgctggctgcggggccgagcggctgcaggcgcggcagggccgcggggccgggcggcaaccacgcggcgcgggcgaggaccacgcgggcgcgcgcgcgaacaacggcgcgcgggggccggcttgccagggatggggagaaggagagcgagggagaggggggcgctcgacgcggcggcacacgcgcacgcgcgcacggcgcgcgggcggggcgaagcggagcggaggggagcggagggggagcgcaccggggaggggcgagggccgggggagaggagaggatgggccgagcgaaattcggcccatcgaccccgggggaggcaaaatagacttttgcggaggaatt

SEQ ID NO: 95737 - DNA, 411 bp, Oryza sativa
  Clone ID: PAT_MRT4530_93901C.1
cccacgcgtccggttctagatcgcgagcgccgcccttttttttttttttttttttttttttttttttttttttttgggtttttttttttttttttttttttttttttttttttttttttttaaaaaaaaaccattcttttttttttaaaaacccaacaggttcaaaaaacaccccggcttaaaactccccattaccaaaattggaccaagtttgggggtacatatcccctcatacaggggaggatttatttttcgattttaccacctttttaactaaagttcccccgggaagtcaattcccgataaaaatgagcttccttttttcaccataaaatttagaagggccccacgggtcaaatcaagactggagcaccctgccgatcaaagccccttgccaattttaaatcgcga

SEQ ID NO: 95738 - DNA, 544 bp, Oryza sativa
  unsure (1)..(544): unsure at all n locations
  Clone ID: PAT_MRT4530_93902C.1
gcaggattcggacgagctcgtgccgaattcggcacganatnaggccgaccgccnaccttgatgaaccaaggggtcgggnatatgcctccngactcttggnatccatcnagcccnaggtcngcaccncntcngtttaataactttggatntnanaatccnatggctccnaaangganttctgttncntcnacnacanatacgggcacttttcnacctcnnatnttcatcggaaatggntctttgtccaaccaaacanctgtnccaagttcgtcccatatgggcatgaacctcctcccntggnacaaaggcatcatctgggagncancaaatnccncctttgcaaaanctacanggttgcctcaaaatttccctgttcnattgcagaataatcancangganaacccttgcagggggctgctcnacaaattggtccgcttcnanttccncaatctatgggtcctggttcttttgggcanaatatgttntctggtccgcttcctgtntnccaacccttgatcaacaaaattcttccntccgngcttt

SEQ ID NO: 95739 - DNA, 635 bp, Oryza sativa
  Clone ID: PAT_MRT4530_93903C.1
cacgagggggagagctcggttagtgagttatctaaagctgactgctctgctttctggaagttcgtcgccacaaactgggggcagaacatgaataaacttctctctggttgtatcaaggtccctgtttgtacagttcggcacgtcattttatcaagcaagaaggatgtgttcattcctgatgatctactgctcagagatttgttcagcaagctttctcagcaagcagttttcatctggtatccttcatcaagcctaccttccatgtctcgtgcaaggctcaacaacatatacagtagcattggtgttgggactatatcaaaagctgttcgaaagaatgattctttcaccctgggaagtggcagtttgaaaactgttggcctgaatatggtgatcaaggctggtctgctccaattagtcctcgctttcctcgctgatccagctcttgatatttccaccaaagagaggcacaagatggtttcttggcttttgaatgtgactgtcctagagactgacgagcccatcacggttgcttacagtgtaagcctgtcgtcaggaagggctctagatatgaaggccagccgaatgctcaggtgggagagggataactttaagttgtacatgcagagaagccatga

SEQ ID NO: 95740 - DNA, 152 bp, Oryza sativa
  Clone ID: PAT_MRT4530_93904C.1
gacattggaactcaatgattgttgttgctcattgagttaccggaaagcacgaagaatttgatgaagctgcgacaccttgatgttcaaaagtgaaccacgaaatattcatgttgtgcatgccttctgggctcgggcagctgggtgatctacaa

SEQ ID NO: 95741 - DNA, 3311 bp, Oryza sativa
  unsure (1)..(3311): unsure at all n locations
  Clone ID: PAT_MRT4530_93905C.1
tttatactgaacccaacccaacaaaccaccaccacgctgaccgccctcaccggcgagccagcgagcgacggaaggaggccgcatgcttccacaactacaacctcctcctcctcctcctcccgtctccaatgccctccgcctccactagatggccgccctcttcctcctcctcctcctccacgtatcagacgccgccatcaacccgggcgacctgtccgtgctccacgacctgcgccgctcgctgaccaacgccgacgccgtcctcggctggggcgaccccaacgccgccgacccgtgcgccgcatggccgcacatctcctgcgaccgcgccggccgcgtcaacaacatcgacctcaagaacgccggcctcgccgggacgctcccctccaccttcgccgcgctcgacgcgctccaggacctcagcctccagaacaacaacctctccggcgacctcccgtccttccgcggcatggcctccctccgccacgccttcctcaacaacaactccttccgctccatccccgccgacttcttcagcggcctcacctccctcctcgtcatctccctcgaccagaacccgctcaacgtctcctccggggggtggacgatccccgccgacgtcgccgccgcgcagcagctgcagagcctcagcctcaacggatgcaacctcaccggcgccatcccggacttcctcggcgccatgaacagcctccaggagctcaagctcgcctacaacgccctctccggacccatcccctccaccttcaacgcctccgggttgcagacgctctggctcaacaaccagcacggcgtccccaagctctccggcacgctcgacctcatcgccaccatgcccaacctcgaacaggcatggctccacggcaacgacttctccggccccatcccggactccatcgccgactgcaagcgcctctccgacctctgcctcaacagcaaccagctcgtcggcctcgtcccaccggcgctcgagtccatggccggcctcaagtccgttcagctcgacaacaacaatctcttgggccccgtcccggcgatcaaggcgcccaagtacacctactcacagaacgggttctgcgccgacaagccgggggtcgcctgctcgcctcaggtgatggcattgcttcacttcctcgccgaggtcgattaccccaagaggctggtagctagttggtccgggaacaattcctgcgtggattggctgggaattagctgcgttgcagggaatgtgacgatgctcaatttgccggagtatggactcaatggcacaatcagcgacagtcttgggaatctgagtgaactctcggacatcaacctcatcggaaataaccttactgggcatgtgccggatagcctcacaagcctcaggttgctgcagaagctggacctgtccgggaacgacctgaccgggccgctgcccaccttcagcccgagtgtgaaggtgaatgtgaccggcaatctcaacttcaatgggacggcaccaggatcagcgccatccaaggatactcctgggtcttcgtcgtccagggcgccaaccttgcctggccagggcgtccttccggaaaataagaagaaaagatcagctgttgtgttggccaccaccatcccggttgcagtcagtgtggtggctctggcttcagtgtgtgccgtgctcatcttccgtaagaaaaggggatcagttccaccaaatgcagcttccgtcgtcgtccacccccgcgagaattctgacccagacaacttggtcaagattgtcatggtgaacaatgatggcaacagtagttcgacccaaggcaatacacttagcgggagcagcagccgcgctagtgatgttcacatgatcgatacgggcaatttcgtgattgctgtgcaggtcctccgtggcgcaaccaagaactttacccaggacaatgtgcttggccgtgggggctttggtgtcgtctacaagggtgagctgcatgacggcacgatgattgctgtgaagaggatggaggctgcagtgatcagcaacaaggccttggatgagttccaagccgagattaccattctaaccaaggtacggcaccgcaacctggtctcgatactgggttactcaattgaagggaatgagaggctgctggtctatgagtacatgtccaacggggctttgagcaagcatctgttccagtggaagcagtttgaattagaacccctctcatggaagaagaggctcaatattgcactggatgttgctcgtgggatggaatatctgcacaacctggcacatcagtgctacatccatagggatctcaagtcagcaaacattctcctcggcgacgatttccgagcaaaggtatcagactttgggctagttaaacatgcaccagatggaaacttctctgtggcaaccagactcgctggaacttttgggtacttggctcctgaatatgctgtgactgggaaaatcacgacaaaagcagatgtcttcagctttggggtagtgctgatggagctgataactggaatgactgccattgatgagagccgtctggaggaggaaacccgttatctggcctcatggttctgtcagataaggaaggatgaagataggctcagagcagccattgatcctactctggatcaatctgatgagacttttgagagcatctccgtgatcgcagagcttgctggccactgcacatcccgggaacccacccagcgaccggacatgggccacgccgtgaacgtgctcgtcccgatggtagagaaatggaagcctgtgaacgacgagaccgaggactacatgggcattgatctgcaccagccgttgctccagatggtgaagggctggcaggacgcagaggccagcatgacagatggaagcatcctgagccttgaggacagcaagggcagcatcccagctcggcctgccgggtttgcagaatcgttcacctcggctgatggccggtgaagcatcatatatctacaatacaaataagtacatgtctcctctggacctctcctgtttccctatagtgttcttgtaggtaaaagagtgcattgtccatgtgcttatgcttctgtagatagacatccatttttctttcttttcttttttggtaggattgctttcctattattccaatcttgagactgaagtttctgcctttttctagtcatcggggtcatataatgcttctttagtttactgtacttgaaaatttttgcaatggcatctggtggcatcaatgatccatatcatgagtcttgtnctgtttagggagcaattagtaccaatccaggcttgcatttggcaa

SEQ ID NO: 95742 - DNA, 2541 bp, Oryza sativa
  Clone ID: PAT_MRT4530_93906C.1
atgtcgacttccgccaatccatccgccgcgccatcggccgaatacgtagagcatctgtccaacctggttgcgattccgagtttgtcgcatgagaaccattactttctcggcccaatcggcaaccttaaccctactgattttatcactggtgaaaccaacagaatcccctttagattagccaaccctaatctgaatcattggaagaataccttcaaatcttggccatcccttgagaaaacttcacccgagaaaagttggattacatggttcaagcgcatgtcggctagcaaaagagttcactgggacgaaatcggaatcagccaagcacttgacctaaccatagcaaactcagccaaagatgaacctctaatggcagctgcttcttacttttggtccaacactatcaatgccttcttattcaaccaagggccgatgaccccaactctcatagatatcattatgaccacgggtctagatgtcacctcatcggctaaccctatgagcctaaacacgaagaaccaatacgatttcaagaccaagagtataggcggttggtcaggctatgtagcagcatacatgggtaaagggcccgtcactcctcgagagcatgtagcctttctgctgatgtggctggaaaaattcctcttttgtggatcaagctgtggccctacaaccaactggcagttcgtagccgaggccttggaagcaaaaaaacaatttcctttaggcaaaatcctcctcggctacttgtatcaaatgctgaataatgcttcagctaagttagccggcggctcagtagtcggagcaagtggaccatggtggctgctgcagacttggttgaatctaatagtcatgaaagttgttaatcggccatccatcacagaagctgaatttccaatattagagccaattatagaagatgacgaagaacgcactcatcgccgatgtatgtcatatggagaatacgcatccacaccggccgatgctggagcaaagttatcagccgaactgctcaaagattggttctgtagtttctatgaaggctttcaaaaagacgctcgagtttggtttccctatgaaaattcagcagaccttgaactcccatcagatttcagatttgaagacattaatcacgaaagatttcaaacatccagagaaatcttcacagctgcaatcaacccatgcattcttccagtcggcatccatcaaggaagaaacatccaagcctcttacgaattctatcacccaatgagttcagctagacagcttggaatgggccaactcccaatcggcttattctttgctgacaagatccaatgccgaggtgaaatttcatcaaccttgatgatggatcggctgctcaaccttccaggaccccctctgggcagcattgaaaacctagagctagcaatgttcaggagcaaaaactttgatagatggtggggtgaatggaagttgcatctattccaccaaccagcttcaatcaacagtggcagggatatcacctacgccccaggattaattcctaatggacgtgggccatctcctcctgtcatcggctatgatgcccccaagacttcagctcttcttcaagggcttatcagagaaccagtcgatgctggtaggaaaaggaaaaccagatcattggctgtagatacttcagctctagctccaaagaagaaaataaaaaagaaagctaaaccagctgatgatctgcttgtcctagatccatccattgaacaagctctggatgaagaagaaatcggagaagatgttgatcaagccgtagccgaaaaaaggaaggctgctgtgaagaagaaatcgactccaatgacatctaaaccagctccaccggtcttagccgatcttttctcttttgatattagagattatctttatgaggagacagaggttgacactactagcaaggctctagctcctttgtctgatgatgtgaagaaaactcttgaagatatctctcatcggctagagacatcatcactagacagcttggtagttgactgtggatcaattaggactcggcttcatgaggtccaggctcaaatccccgatgagttagccgatatccttactccagcggtttatcttgagcaacaccaatttaagctggaaaaggccaagctcagattagccgatcgtcaagagcgcaaatacatcgaagcaacaatccaggccaatcggcaacttgttcatgaagaaaaatccaagcttgatcaattatctgaaggcccgatcaaatccaatattgaccggcttgaagctcgcaagatcgaactcttagcacaacttcaagaatccaatgctgaaccggatttagagaacaagaaattagccgatctcccatggtctatcgaagaacaaaaagcgaagttaaaatcggctatcaagaatgttgctgatatgaccaaatctctgaaggtcattcctagaaccgatgctcaagatgcccaagccatagaagaagtagaacaaattaggcagagagctatatcagctatcctgcgatacttatctcgataa

SEQ ID NO: 95743 - DNA, 335 bp, Oryza sativa
  unsure (1)..(335): unsure at all n locations
  Clone ID: PAT_MRT4530_93907C.1
ctcatgggcgccgaccccaacaccnagatgagggacatctccgtcgtgggcggcaccggtgacttcttcatgtcccgcggcgtcgccacntccgcaccgacnccttcgagggattcacctacttccggctgcagatggacatcaaactctatgaatgctacgtctgataactaattaatcgatgatgtggtgtttatttaaaaggaatttgtttctcgatattagtatttacttgatgacgagtacctgcagtatctgtatgcaccgatgagtgtgcaaataaatgtaacccaaacccatttatntttaaaaaaaaaaaaaaaaaaaaaaaaaaa

SEQ ID NO: 95744 - DNA, 203 bp, Oryza sativa
  Clone ID: PAT_MRT4530_93908C.1
ttcccctctccacgccacatatctcttccctcttcatctcccacttaccctcagggatggcggatgactccccctgcgccttcaccatctaggggagccagtacgcgtcggccgcctatggaggcttccccgtcgtctcagatttcgacgtaccagtcgcaaaggtcttggatgcgcttgttcagtcttttactattgactcc

SEQ ID NO: 95745 - DNA, 1849 bp, Oryza sativa
  Clone ID: PAT_MRT4530_93909C.1
gagaatcctttccctttttcccttttcttttcctccctatttcctttgttgggccgtcggcccaaccttccttcctcccgcgtcctctctccctccttgactagtccggcccatcaccccactctcctctctgggacgctgacaggtggggcccacctgtcaggtcgtcccctacctccagtcgcccacgccccggcgccaaccgccaccgaaaccaccgctcctcatgccgcccaccttccccgcctctcgctcccgcaccttgcgcccacgccacccacctcctccaccttccccgcatctcccccgcgcgcgtgcccgcaagtggtgggggacttgaaatcccccaacaccctctctctccccacctcccccacgtcgtcgccggcgccaaccacgacctcccggccatgttctcccctccctcgcctataaaatccctccccggagtcccctcttcctttttccgcgctcgccgctctctcccgtgcctcctatcgcgcccgcgccactcgccgctagcgccgccgcctaccaccgcctccggccgtgcgccgtcgccgctagagccgccgccgcgccaagccgccgccgcctcgcgtcgccggaaccccatcggaaccccatctccctcgcgagccggtgagctatccattccccgccgccgctcgtccgcccctcctctcaccgggtggtcgtcgccgccttcgtcttccactccggccgccgtgtcgccggtgaggcctctcccccccccctttcctccccatcccgcgagcgccgagccacgctgctactccggccatgcgccgctgcctttcggccgtcaccgccgtcggtggccgtgcctcgccaccgcctcgccttggtcggccggtcggccttgaggccaagccgagcccggccggcgcctccactccctccactttgagccaccgcccgtggggcccacatgccggtgccctttcctctctcttgagtcgctgacgtgcggggcccacctgtcggcgccccccttgctgacgtcagccctgggcacaagagggagtgggtaactgcttgatctgaagtatagctcgacactttcctaggcaccggtggcgatggtgggcgtgatggagttgggtcggccggggtgtccggttgtccccccccccctctctctctctctctatttgccgcaatcgacgcgcctcctccgcatcggcgcgaccgcgcatcctctcccgcatctccctctcttccgcattcgccgtgcctcctccgcatccctcccctccgcgtcaggatcgagcgccgcctcgcgcaggggttcaccggcctgctgcaggcgcagccgccgcagttcccgtggccggcggcgtcgcacaagcggattcccttcgagatcgacctccccgtggtccccttcggcgcctcccggggtgcccgggccgggaaggagttcttcctcgccgcggccgtcgcctccatcatcgacatcggcaggaggccaccggcgccagggaggtgattctgccactccgcgcctcaccggtctccactctccatctcgccgccgccaccacgtccgccctctgccgcagatagagtgacatgtttatttggacacatgtataattggagtacatgcatttgtgataagtttccttggtaaatgcaatgtgttcttcatcattgtcaattattctaggaggccttgatatgtcagttaccggattcatggccattgttccacaccctaggaattatttgaagggcaatatttttatgaagcttaaagattgaatttgaatccatctggcctggcttgaagtacaatccaaatattatggtatatcaacagcag

SEQ ID NO: 95746 - DNA, 561 bp, Oryza sativa
  Clone ID: PAT_MRT4530_9390C.1
ggaccgccccagctcctgccgtttctagcctgcaggtgtgcggtggggggtccatctctcctcgcctgccggtgccgtaggcagcccctgatgggtctgggcgggaatctgctgttcctctgcggtctggatcccctggaaccggccgcggggtgccggatgcgtactcgctgtgggggtttagtcgcgctgtggaccagttccagcacaagtattctgcttttctcgtgagccctcacgctactggtcttttctattacgttggtggtccgtcgcccatccgacgtccgcgccctgcgcggtttctgagtgctctgtgctcgacggttgcgctgctttgggggtgttaatcaatggaactggccactgggtaagggatttgtactggaattgtagaattagccccaatttgtacacacaatccattacaattattgttatatttttgagaacacacaggctacaggagtataatataactatatatggcctgacgcccaccccactacgtacacgtgctgcttgaatttcgagttcaaaataaatcaacgtattcacaca

SEQ ID NO: 95747 - DNA, 330 bp, Oryza sativa
  Clone ID: PAT_MRT4530_93910C.1
ggccaaaagtaggattttactcggggatttttgattaaccatttgtcttgcttccatatgttgctatgctgcataaaaaccttatgctaaacacaggctccagaaatggggatctagcagcaactttttttaggtatcgttttagtatgagcatttaaacctaaaggcatttacatataataggggggtatcagctcatacagcagctaagctataaagtattcaaagggtagcaaatgccacattttggggggccttaggcactcgatgggtaaacaggggaacaggattggggatccattgcgccgcagattgttgtcggagagatcc

SEQ ID NO: 95748 - DNA, 464 bp, Oryza sativa
  Clone ID: PAT_MRT4530_93911C.1
atcctcatgttgaactcatatctcacaggcgacacacaatacagacattcaaaacaatcttgtgagagcatagcgaggccatatagcatgctaacaaaccaaaaatatgaaaaatctcctcgtgagctaacaaaaagacagagacagatcactgggatagctctcaccgtctggtgcggcagctttggtggaattgggcagcccgaaggcgttgtcccctttccccttcccggcttcatcgtcggaatccgagctcagggagtcgtcggaggagacttccagcggctcctcccacggcgccgccctcttcatacctggatcacggagacgtcaccggcggcacggcgcgccgagggagaagcggcgcggcgccccgagggagaaggtcgctggctcgctcgccgtcgcttgtcgccggcggcggggacgacgaggccctgcagcccggggatccactagttcta

SEQ ID NO: 95749 - DNA, 912 bp, Oryza sativa
  Clone ID: PAT_MRT4530_93912C.1
atggctcaaagggtaggacactctgctgatggggtttttgtcatgatcgttgatgaagataagtcacatgccaacttcgcaagaggcatgctctccagcctcaattttcatgtgatagtgtactcaagtcctgtgaatgcactcgtttttctggagaataacgcacaagacgtcgctgtagtcttggcagcagtggacatgaaacaattgagtggttttcagttcctcgaagctgcaagagtgaaacgccaggaccttcaagttatcatgatgtcagctgagacaacaatgtccacaatgatgaggtgtgttaaactcggtgcacgttttctagtgaagaagcctcttaacgaagaaactgtaggtaatctgtggcagcatgttgacctgaaagttttgaagatggagaagatcagggaattactgcaagatgaaaataatgaagaggaggaagtgaattcctttgaagctaagaaggctgattcagttaaagttcaatcagatgagaagggacatgacaatgctaaaatctctaacactgctgctgctgaagggtctgatgaaaaagtctctagtggtgatggtcatgtagtgcctaaagcgtataataatgtgaatgttgaagagagcataggtagtaacaatacttcaggtgaacaagtctccgacaagatcaagagtgatgcaagagttggggtgatccttgtggactacccagattttgaggatgatgagaccaagaaacccacaagcacttagatataatccggtctcgactcgactctgtgtagagatcgagtgagctgagaatgtggggggaacaagtgactgaaagaatgcactaccatatatgtttatggtagtgtttgtatcttactttctgcaaaataagaaatgcaccatgtgctgaat

SEQ ID NO: 95750 - DNA, 316 bp, Oryza sativa
  Clone ID: PAT_MRT4530_93913C.1
aattcggcacgagccgcgaactccccaactccaatgagaacgacatggatgccggcagcgaggaggcgaagcaggagcagcaccgggtgctagcccacaagctcttcctcctctcccaccccgacctcaacgacctcgccaaggttgccctccgctccgacgccctcgacgccgtcaagtccgatggcatggcgctgctatttgagtcgttggccgtcaacggcgtgctggagccggatgacgcgctgctcgtcgagatgcgcgtgcgaatcgatgaggaggtcccccaagccatcgtcgtccgcgcctagctcct

SEQ ID NO: 95751 - DNA, 962 bp, Oryza sativa
  unsure (1)..(962): unsure at all n locations
  Clone ID: PAT_MRT4530_93914C.1
aacaccaaaaaatagaaccatagcaagtagaatccatagctttgagaaactcatggctcaaagggtaggacactctgctgatggggtttttgtcatgatcgttgatgaagataagtcacatgccaacttcgcaagaggcatgctctccagcctcaattttcatgtgatagtgtactcaagtcctgtgaatgcactcgtttttctggagaataacgcacaagacgtcgctgtagtcttggcagcagtggacatgaaacaattgagtggttttcagttcctcgaagctgcaagagtgaaacgccaggaccttcaagttatcatgatgtcagctgagacaacaatgtccacaatgatgaggtgtgttaaactcggtgcacgttttctagtgaagaagcctcttaacgaagaaactgtaggtaatctgtggcagcatgttgacctgaaagttttgaagatggagaagatcagggaattactgcaagatcctggacaagagacggtgataactattagttatgaagagcaattctctggagaaactgaagcagatgaaaataatgaagaggaggaagtgaattcctttgaagctaagaaggctgattcagttaaagttcaatcagatgagaagggacatgacaatgctaaaatctctaacactgctgctgctgaagggtctgatgaaaaagtctctagtggtgatggtcatgtagtgcctaaagcgtataataatgtgaatgttgaagagagcataggtagtaacaatacttcaggtgaacaagtctccgacaagatcaagagtgatgcaagagttgnggtgatccttgtggactacccagattttgaggatgatgagaccaagaaacccacaagcacttagatataatccggtctcgactcgactctgtgtagagatcgagtgagctgagaatgtggggggaacaagtgactgaaagaatgcacta

SEQ ID NO: 95752 - DNA, 252 bp, Oryza sativa
  Clone ID: PAT_MRT4530_93915C.1
tcgaatgaccgatgggacccagaatgtcaggcgcaccatcgcgagtgtcaggcgacgtgcagcccgacatatcccatcaaataatgatggtgagaggttctcatcctcttatcccagccggagtcggtcctcccgctctggtcaaagcaaggctcctgtagggggcgcgttcgtgatttttgaggttgtttcgagcgccggcatgatgagtgtcgcggcgccaatgcgggggaaggcgcagcctcctcagga

SEQ ID NO: 95753 - DNA, 132 bp, Oryza sativa
  Clone ID: PAT_MRT4530_93916C.1
atggcattggctggtcagctcgatggtgcactaggagcgacgccgggtacagcagccacgccaacgacagttgtggaggtcgacatggtggcggtggctcttgagaagatggccggccgttgtgctttgtag

SEQ ID NO: 95754 - DNA, 978 bp, Oryza sativa
  Clone ID: PAT_MRT4530_93917C.1
tgaacaacatatcaagactgctctgagctcaatcccaacataccatctcacagttctacgtacaaaaatggttgatcaagaaaattgacagaattaggagagcctttttgtggaaagggtaagacccagaaaatatcacccctggacacagtttggtaaattgggcgactatggaggttccttgtgatacaatcaacaaagaaccttttgcggcggcagctaccatcacgttgggtgacgggagtaaagctaccttctggaacgataattggatgagtaatgggagaaaaaaggatctggtgccaggtctgttcaaactagcaaagagaacaaacaactctattctagttgaaatatctgacaacagatttcctgctaaggcccctaacaacaattgaagaaatcaatgaactagtttggattgcagatctattagctggggttaaactgcagccagggataaaaaatgacatcatatatggcaaaaagcgcgtatcttgcacaattcactggaagtgtgtcatactcaaattttaccagcctctggaaagcaaacaacgaaccaaagcaccaattatttggttggctattgttacaccacaaggtactagcaaccaaaaatttgcttaaaagacattggccatgtaatgagatttgtactctctgcactaaagctttttcgaggacaccaatcatcttgctaaggaatattccttcacgaccaaagtgtaggaaatgattcgctaaaaactacagatcacagcaatgaactcaacctacacttgtctatcagattggtggaacaagtcaagtgcaatgacaccatgtgaaaacagaaagggagtattgggagctttgcttgttacgtggtggaatatccggcttgaaagaaacatgagggtcttccaggaccaacccaagaacaaggtggttttcttggtgatacaagacgtaaacgagctacccttagcgtttagt

SEQ ID NO: 95755 - DNA, 505 bp, Oryza sativa
  Clone ID: PAT_MRT4530_93918C.1
atcgtatggagcacgctcgtgatcgtgaacccacccaccgaggacccggaaaggagaggatacgatgaactcgaccgcgcgcgagcgagctagcgcacgggcgtgcggctccaggctgcgggctggggcgccctgcctgtggatgagaaggatggacgcggcggctcccgctggcggctgtgggggaggcggtggcggtggtgtcgggggcggatgatgctgaaggcgtacaaggactcgttcaaggtgctacaagctgacatacatcacgccaacaccctggcctgaggatgttgcccgggagtaccatggaccgtgcctgcaaatgcaggtctcgtatagcacccgcggcagcatatatttctcttgctggggcaaaggactgactgacaacctcgccggggctcttggtttgctgacgatacttgattacaaggtttatgtctacgggacgacaacactgtctacccatgaaaggaaagacactgtcagataattgtacgcg

SEQ ID NO: 95756 - DNA, 1668 bp, Oryza sativa
  Clone ID: PAT_MRT4530_93919C.1
atggcaatggccaccgccaccgcctcctcctgcgtcgacgccacgtggtgggcgtacgccctcccggcgctcctcggcgccgacaccctctgcgcccacccggcgctgctcgccggcgccgtcctcctggccttcgccaccgccgcggtgctcgcctgggccgcgtcccccggcgggccggcgtgggcgcacggccgcggccgcctcggcgcgacgcccatcgaggggccccgggggctccccgtgttcggcagcatcttcgcgctctcccggggcctcccgcaccgcgcgctcgacgcgatgtcgcgcgacgcggcggcgccacgggcgagggagctcatggcgttctccgtcggggagacgccggcggtggtgtcgtcgtgcccggcgacggcgagggaggtgctcgcgcacccgtcgttcgccgaccgcccgctgaagcgctcggcgcgggagctgctgttcgcgcgcgccatcgggttcgcccccagcggcgagtactggcgcctcctccgccgcatcgcctccacccacctcttctcccctcgccgcgtcgccgcgcacgagccggggcgccaggccgacgccacggcgatgctgtccgccatggccgccgagcagtccgccaccggcgccgtcgtgctccgcccccacctccaggccgccgcgctcaacaacatcatgggcagcgtgttcggccggcgctacgacgtctcctcctcctccggcgccgccgccgacgaggccgagcagctcaagagcatggtgcgcgaggggttcgagctcctcggcgcgttcaactggtccgaccacctcccatggctcgcccacctctacgaccccaaccacgtcgcccgccgctgcgccgcgctcgtcccccgcgtccaggcgttcgtccgcggcgtcatccgcgaccaccgcctccgccgcgactcctcctccaccgccgccgacaatgccgacttcgtcgacgtcctcctctccctcgaggcccacgagaacctcgccgaggacgacatggtcgccgtcctctgggagatgatatttcgtgggacggacacgacggcgttggtgacggagtggtgcatggcggaggtggtgaggaacccggcggtgcaggcgaggctgagggcggaggtggacgcggcggtgggcggcgacgggtgtcccagcgacggcgacgtggcgcggatgccgtacctgcaggcggtggtgaaggagacgctgagggcgcacccgccggggccgctgctgagctgggcgcggctggccaccgccgacgtggggctcgccaacggcatggtggtgccggcgggcacgacggcgatggtgaacatgtgggccatcacccacgacggcgaggtgtgggccgacccggaggcgttcgcgccggagcggttcatcccgtcggagggcggcgccgacgtcgacgtccgcggcggcgacctccgcctggcgccgttcggcgccgggcgccgcgtctgccccggcaagaacctcggcctcgccaccgtcaccctctgggtcgcccgcctcgtccacgccttcgactggttcctccccgacggctcgccgccggtgtccctcgacgaggtcctcaagctctccctcgagatgaagacccctctcgccgccgccgccaccccccgccgccgccgcgccgcctga

SEQ ID NO: 95757 - DNA, 720 bp, Oryza sativa
  Clone ID: PAT_MRT4530_9391C.1
atgtcggcgcagcacagcggcgcgggagaggcggtggtggggatggaaagggaggcacggcgacccggcgacgacggcgcggccgaggcgatggttgcgcggcagcgcacacgcggcccccgcgtccccgacacctccgccgctgcactatgcggagccgtgcggggccgtgcggggtcgtgccgggcagcctcgccgtgcaggatcgcctccgctcgcaccacgccagccacgtgcggcaccgtcgccaccgcgcgcccgtcttggctgccgcctcctgcgggccagcaggcatgcatgcgtttgcatgaacccacgcccacgctggcatgcatgcgtctagccagcaggcatgcctgcgtttggatggcactgccacattatgcatggcactgttcccggcggaggctgcctcgtgcaccgccctcaagcagccgcacggccggcaggactggcctcggatggcctccggtctccgtgccgcaggcgacggcgcactcgcctcggacgaggccgcgccctccgcgcggagctccgccgcgaccccgctgcctccgccgtctcaacacaccagcgcatgcctccgtctactccgccggtcgcacagggctcggctgcggcgccgcctccgtcggctccgcggaggagaatggcggggtggtggcgagttttcttgaggggggtgaagtcgtgaagaagaggtggcggcgtcagagttga

SEQ ID NO: 95758 - DNA, 475 bp, Oryza sativa
  unsure (1)..(475): unsure at all n locations
  Clone ID: PAT_MRT4530_93920C.1
atggtttctgcccgacaactcccaaatcttctcttcctcttccttctcaatccgattgttttctgaaactaggttggttatctttcttcttttgtcccttttgatttgatcaccgtattcaactcgatgtgctttattatgtgatcaggttgcgaatgcggatcaaactttttgtatttttgttcacccatttcccactaaattttcaactaggaaaaaaatgaaaaaaaaaaacgcgccctgtttcttctgtacaaacagaattgccgggggagggaagggtccgggtgggtgggtggacactttgggcggagatcttgctggcatcggtgggtgccctgccacctttttctgtccgctgttgagcttgtgctacacgtggcatggtcctcccttcgntttgcagacagcattttcaacgcaaaagttcacccttttttctgcttcctttttctgtttgcgaattcgatgtagg

SEQ ID NO: 95759 - DNA, 558 bp, Oryza sativa
  Clone ID: PAT_MRT4530_93921C.1
atggcgcgtagcatcgtttttccgagggttgaagccgccgccgtcgccgtcgtcgacccctccggctgcgagctccgggaccgcaccgtgccccacgccacctcctccgcgccgtccaccgcaccgagcacacgaagggaagcctgcaacgccaccagaaatgggaaaaaaaaccaacaaaggcgaaggatcagcggtgacgcgactggtagattcctcgaggcgttagcgcttgtgaggcagttacaccccgagacggacgaggaggtgctcttctaccgccgatacgggatagctatgctattctgtccagatgatttcctgtcgtgtttgatctgcatggaggcctcgcagtgcgatgacccacgctacattccaaagcacaagttcgggagacacatgtctagacatcattctaaggccaccgtcaagtgcaaagattgcctgcttgcgttcgatacggcagcagccgctggcaagcatcaccactacgctcattcacttccaagcggtttcgtcggaaaagtgaagttgataagcaacgttcttacttcttaa

SEQ ID NO: 95760 - DNA, 416 bp, Oryza sativa
  Clone ID: PAT_MRT4530_93922C.1
ttgtccgataaggactagtatctccctatgggtataaatatgtacacccggagtcattgtaatctatcaatctatcgatcaataatactctcggcgcatcgccaccctcttccctgaggtttttacttatcttccggcggaacttgggcacctgacacagggctgcatcggctttcgatctccagcgaaggggtaagtcctacgtttcgttggcccaggcaattgtctcatctacatcagcgtcgttcaaggctgcatcagtacatccgacctcttggatcgctctggtttggttgatatatttgcctacctatctacattggacatatagccgattgcttaaaccctatcgctattggctggtatcggcatcggctattatcgactatcggctggaactactccatcggcttgtc

SEQ ID NO: 95761 - DNA, 192 bp, Oryza sativa
  Clone ID: PAT_MRT4530_93923C.1
atggcatacccacgcgcacgcggatatttcctttatgatctaaggaaacctttcacgaaatcaatagacgggaaaaagtccttctcggacaagaactggggaccccccgagaagggcatagatcatcgaatctcagaatccacacagtctaagaagccggagcctgcgaggagccaagtcgccgagagctag

SEQ ID NO: 95762 - DNA, 514 bp, Oryza sativa
  Clone ID: PAT_MRT4530_93924C.1
cggccggcgagcggagccgtcgcagtcgtgacgcggagagggaggaaggggaggcggcggggtgccgttaggttcagggcgtttctttcttgtccgacaaagactagtatctccctataggtataaatatgtacacccggggtcattgtaatctatcaatctatcgatcaataatactctcggcgcatcgccaccctcttccctgaggtttttacttatcttccggcagaacttgggcacctgacgcagggctgcatcggctttcaatctccagcgaaggggtaagtcctacgttctgtcgggccctggtgaatctgtcggctacgttggtgttgttcaaggctgcatcgattcgatctcttggatcgctctggtttggttgatatatttgcctacctgatatctcaattctatctctaattgcattgtgtttagagacgcatcggtttagttgggactgtttcagttaggtctgatctcgaggcaccggcggcggcgacaacacgagctcgac

SEQ ID NO: 95763 - DNA, 1370 bp, Oryza sativa
  Clone ID: PAT_MRT4530_93925C.1
ctagctcgcacaggaaagagaagggagaaaaaaaagttggggggatcggacccaaaccctcccaaaccccattcctctcaaccatggcttccctcctccgccgccaccgccacccccacccgctccccgccgcccacctcctccgccgcttctccgcgctccccgacgtcgatcacccgccgccgcccgcctcgacccccaccacccccgcctccacgcgctcccccatcctcgacctccagctcgccgtccgcggcgaggccgacccggcccgcatccactccctcgtcgccaccgcgctctcccgccccgacgactacccgcgcctccacggctcccgcccgctcttctccctcgccgcctcccgcctcgcgcgcctccgccgcccggacctcgccgcctcgctcctccgcgccctcctcgactccgccccggcgtccccgggcctcctcgcccgcgccatctccctcttcccgggccccgacgacgccctccgcgcgttctccgactccgcgcccgccgcccgctccgacgtctccctctcggcgctcctctccgcgctcttccgcgccggccgcgtcgacgacgtcaagtccaccctcgcctccgcggagacctccttcggcgtcgcccccggacgcgcctcccacaacgtgctcctccacgctctggtgaagaactccgagctcgccgccgcccgcaagctgctcggcgaaatggccaagaagctaaagcaccgcccggcccctgacatcgtgtcgtacaacaccgtgctcgctggctattctgcgcagggcgatgaggaggggtttgagaagctactgaaggagatcagcgcaaagaagctggagccgaatgttgtgacttacaactgccggatacagtggtttgccaagaagggtgaaaccttcaagggggaggagctgcttgatgccatggagtcaaaggatgtggcgccgaattaccttacgtacaatgcgcttgtgcaggggtactgcaaggaggggaatgttgggtcagccatgcgtgtgttcaagaggatgaaagtgatgaagaggagggagggtaggagtgacttgggtgtgtcagcgcattcgcaaacatatgtggtgctgttcaggagcttggtggagaaagagaggcttgatgatgctctatggatttgtaagagctgctttgcgatgaaggcagcaccaccctttgaggcagtcaagggtttggttgagggattggtgaagggtgggaaatctgcagaggcaaaggatgttgtcgccaagatgaaccttcttgtgaaaggtgatgctaaagtggcttgggagaagattgctggtgaattgtcccttgaaggaacacctagttcaaatccatga

SEQ ID NO: 95764 - DNA, 564 bp, Oryza sativa
  Clone ID: PAT_MRT4530_93926C.1
atgacgaaccaacggcgagccgaagaaaccggaaccaccctacctcaggcgaccgccacggcgggcgtcaccggcctcgccgccgccggctcagcagctgcatcgatcaccaccaccaccaccaccacaagcccctcctccttctctctcctccgccgccgtcacaactcctcctcctcctcctcccgaagctacaacaacagcaaagggatctcgctgccactaacactgcaaaccaaaccaaaccaagcgagatggatggatgtggggggctcggttcgctgctcgctcgcggctgctgctacctggatgcttccgctgctgctgctgctgcgcggccgcgagggggaagaggagagaggagagagaggtgggggtcgctctctcgcggcgagcgccggggagaaatctcagccactatcttttcttgtggatttctcggcctcccacgacggattcttgcctccaccccctccaccaattctggaattcgcttttcatcctcgtttttacacccccccccccaacacccaatcagatgggatcgtactatcatttgtttaa

SEQ ID NO: 95765 - DNA, 393 bp, Oryza sativa
  Clone ID: PAT_MRT4530_93927C.1
tagtggatccccgggctgcaggacggaggcagtggcggcaacggcgcgcgggatctggcgggcggcggccatccccgcacggatccggtgaccggccgccctctcccctaagtgatcccactcccctcccctctccttccttccatccccaaatccggcgaaggggaagggcatcggcggcgctacggctagaggggagcacggaagctggcgggagcacggatccggctccgctctcctccccttccttccctcctcagatccggcggaggggaggggcgtcggcagtggtgcggccggaggggagcgcagatgctggcggcaggcgccacggagatcggcgggagggcagacggctgcgtggaggctgccatcgacgacgatgagggtggg

SEQ ID NO: 95766 - DNA, 426 bp, Oryza sativa
  Clone ID: PAT_MRT4530_93928C.1
atgcaatccgcgcccaaacccaacccgcgccgcgcacctgtccccgcctgccgctttcgcccacgtcttctcttccccccctccatatttcatatcgtctcattcccctcgcgcgcgcggacgggcagcgcggcgcatacacagacacaatacagggcgcgaggccgagtcgcgcggcgacgtgacgtgcctttcgttgcgtggctttgcgcaccgttatctgcgcggcacgtgtgcgcggcgtcggattcacggcttctggagtacgatcttttttctttttcctacccgcaggcgcaggcggcgacgggggcgcagcggggcaaatttgcggcacgggtggatgactggatggtgaacaagaatactaaaaggcacgcgaggagatgggccgtggaatgcgttatgcgtagcgcgttgaggtga

SEQ ID NO: 95767 - DNA, 642 bp, Oryza sativa
  unsure (1)..(642): unsure at all n locations
  Clone ID: PAT_MRT4530_93929C.1
ttgtaatacgactcactatagggcgaattgggtaccgggccccccctcgagttttttttttttttttttgcaaatctgaaaatcantgantttctagtccngngtncnaantccnagtntatggtnantatgctatnnantgtctcagaactagnctgtctattccacacntgngancgcctccancatcaggacgacantgggaagttgnnaggggccaanttncaatgtatgtcnncngcancgacanctacaacaactanngcagagccagtccnacanacncanntnnntgntcngtctgccngngcngnnngttggngccacacnggccnngaagcnacncnccctgtaccngcgannncnantagngtcgcacgaccganngcggctgccactgtaccatggatgttgtanncnccccgcaaaacttgtgttncgatttttgattangcgcatcccnggtgacaaagaccccgtggnttggaccgcngcccgggatcnatccntctcgccttccnaaaatancattggngcatncggcaaaanttgacgnggatgtgcatgttcacccccngggggataaaccatccggnacnntccgggggaccaaatttaccccccccnggcaanccctttttt

SEQ ID NO: 95768 - DNA, 274 bp, Oryza sativa
  unsure (1)..(274): unsure at all n locations
  Clone ID: PAT_MRT4530_9392C.1
cgttgaggcgccgcgggcggacgcgaggaacggccgaagagacgttaaagcaagacaaacgcgcacccggcgccccccgagangcgggcgccaggcggtaggcaagactaatgacaagacgccggggcgtgaggacgcaagcaggacgtcgtgcggaatacgcggacggggcgggagcggtcacaaggccgacgagggaagagacgcacgcgggacggaatacgaggaccgagggggcggcgagaaaggccgcgtaacaaaagtagatgattga

SEQ ID NO: 95769 - DNA, 300 bp, Oryza sativa
  Clone ID: PAT_MRT4530_93930C.1
ctactcagtacttggtgcaatacggagcatcacctttctttcaatggggcaggtagccctcatgaaccaggacatggtcctcacggagagctcatcctaccttaaggactcagtcctggacggccgcatcccgttcaacaaggcgtacggaatgacggcgttggagaaccacggtacgaacgcccgctttacccgcggcttcaacgagggccagaataaccactccgctaacaccaacaaggagttgctggacctctacaccggatgcgacaccgcctgcaccggcgtccaggtcggggg

SEQ ID NO: 95770 - DNA, 1222 bp, Oryza sativa
  Clone ID: PAT_MRT4530_93931C.1
actagtggatccccgggctgcaggcgcagcctcgcctctgaatcgctcgccgactcgcgttttgtttgtcacttgtcactagtcacctagcagcttcggcatgggctgctgcggcggcatgtcgtcgacgtcgagggcgccgagggggatccgggaggagacgctgctccgcgtcccgggcgcgtcggtgcacctgctcgacggcgccgagggccccgtcgagctcgcccggggggacctcgccgtcgtgcggatcgccaaggacggggtggccgtggccaccgtggcgcgcgtcggccgcggcctcgggtggccgatcacgagggacgagcccgtggtgaggctcgaccggctgcactacctgttcacgctcccggacagcacgggcggcggcggcggcggcggcggcggcgcgttgttcctcaactacggcgtctccttcgccgcgcccgacgacgcgctgctggcttcgctcgacgcgttcctcaaggccaacgcctgcttctccacgccttcttcgcccgcgccgtcgaggagctccgccaccaccaccaccaggccggcgccgacgacgacggcgacggcggacgggtactggaacgacttcgcgccgaggatggacagctacaacaacgtgctcgccaaggcgatcgccgccggcaccggccagctcgtgcggggcatcttcatgtgcagcgaggcgtacgccacccagattttgattcagcctcgcgtgcaggttcaacgcggagccgacctgattcgtcctcaagctaccggcagcgtgaccaaacgatccggcggcgcaggggtcaggaagctgtcggagatgacggagaagatgagccagtcgttgctcgacacggtcatcgcggtgacggggtccatggccgcgccgctgcttcgttcgaagcaagggaaggccttcctcgccaccgtcccaggggaggtcatcctggcctcgcttgatgctatcaataaagttatggacgcggtggaggctgctgagaggaggtcactcgctgccacatccaatgttgtctctggtgcagtgtcaagaaggtatggagagagcgcaggggaggcgacggaggatgcgttcgcgacggccggccacgccgtggggacggcctggaacctcttcaagatacggaaggccgtcacgccgtcgtcctccctcccagggaacatggtgaagagcgccgtcaggaacagaaaatga

SEQ ID NO: 95771 - DNA, 588 bp, Oryza sativa
  Clone ID: PAT_MRT4530_93932C.1
atgcttccggaggacaggatactgactcaacagtatcacgctaacaatttccagaaacattctctgcttatacatacattgactcaggcagaaagacacaatgagctttctttaaagaatgcccaacagcgccccccgggctctgctccactgcctgaggtgcacttcaatgtacagaataatgctgagaataagaaaggatttaagggaaattcttcgaataatcctaagaatctgactggaaagcaaacgcaacaacaacaggcgcaaattcaagggtcgaaagaaaggaaaagggaagggtgtggatctaacactcatgtcgctaaagaccgccgcatcccgaaacatcttgttctcttgtaccaaaaatccctcaaggacaaaaaatcttctgagaacccaagatttgaagcccacttcaatcttacaaataaagagcgccctgaggttgcaagttctcaccaggctcctattgaaacagagagcaacctcaatgttctcccagaagatgtcgctccactctctgtgatggacgatatgttcatcgaatactgctcaatggacccacttgaagatttgcaataa

SEQ ID NO: 95772 - DNA, 1412 bp, Oryza sativa
  Clone ID: PAT_MRT4530_93933C.1
atggcaacaaaagagttcaacgaactcgtcctcgatgggactaactattccatctgggcttccgatatcaaaatcaattttgcctctcgagggattttaagtacaattgaggaacctaatgatggggacctgccaattgagcacaggaagctcaatacagccctttttgttttgaggctctacattcacaaggatctcaaacatgaatacatgttagagacgagccctcacaccctttggaaagctctaaaagagcgttatgatcagcaaaaggaactcatttggcctgaggctaattatgagtggattcatttacgcctacaggactttaaaactgtggcagaatacaaccatgctgttcataacatttgctccaggttgaagttttgcgaacaagagccaacagaggcagagaagatagagaaaactctatcaactatgcttccagaggacaagatactgactcaacagtatcgcgctaacaatttccaaaaacattctctgcttatacatacattgactcaggcagaaagacaccatgagctttctttaaagaatgcccaacagcaccccccgggctctgctccactgcctgaagtgcacttcaatgtacagaataatgctgagaataagaaaggattcaagggaaattcttccaataatcctaagaatctgactggaaagcgcaaacgcaacaacaacaggcgcaaattcaagggtcgaaagaaaggaaaagggaaggataaggcaccacaacctcgtagcaatgttaacaagcattgcaacaggtgtggatctgacactcatgtcgctaaagactgccgcatcccgaaatatcttgttctattgtaccaaaaatcccttaaggacaaaaaaatcttctgaaacccaagatttgaagcctacttcaatcttacacatgaagagcgccctaaggttgcaagttctcaccaggctcctgttgaaccagagagcaacctcaatgttctcccataactcatatggtactttggttagaaacctaattcaagattttactaaatgctgctacatttaaaacatcaggctttctatttctatattctctgccttctgcaagtaatcgtaaccttactcaaatattacccttttcatacattcattattgaatataatagcttgctgagtacattgtactcacccttgcttcaaacccctttttccagagttaaattgaagttcttgccgaagccaggagtttaatcatataagttagtcttatttcaacctagttctcaaatctagattagttagatggtttaagtctatagcaaaaccttagagttgagtcactctatagcttctgctgtaatagttagccacaatcttgtaaattcccctattattttatgtaagaacaactccttttgatg

SEQ ID NO: 95773 - DNA, 168 bp, Oryza sativa
  Clone ID: PAT_MRT4530_93934C.1
atggccgccggccactcgctgtcgctagtcgtctcccttgaacgggtaacagggcagcaaaaccgcgtgggcgaggacctgggagcaagggatggagaggagggcggcggaagaaggggcttcctcagggatttgcttgacctgtaccctcgtagtgggaggcgatga

SEQ ID NO: 95774 - DNA, 2335 bp, Oryza sativa
  Clone ID: PAT_MRT4530_93935C.1
gcacgaggacataaacgattggaatgcatttgggcaagactgtgaggcagaacagaaatcagagaactgaggacagaaggcaagtaggaagaatctgagctgtctgaatggaagggaaaaacaactagggggagaaaaggaaaggattatccaagctttcgtgtatcatccgagtgtcccttgtatgcaatgggtttgatcaatagaggggtcttcttcaagatcttggccttcctctgcttcatcagatcatctcaaggaagaaatcattttaccacattggatctccctcccctactgaaggcaagcagtttctccagaatacagcatgaggcatatgactacatcattgttggaggtggcacagctggatgcccattggcagcaacgttgtcccagaagtacaaggtgctcttgctggaaagaggagggtctccttacggcaaccggaacatctcacatcttgagaacttccacatttgcttggcagatgactcgccaaattcaccatctcagggatttatctccactgatggtgtcatcaatgcccgggcaaaggttctaggtggtggaactagtgtcaatgctggtttctacagccgagctgacccaagtaagaatgtaattgttaaggtaattgctgaaatcccaactataagctttgttcaagacgcaggctgggatgcagagttggtaaaccaatcatacccttggatcgaagagaggattgtttattggcccaatattacaccgtggcaagctgcactgcgggacgggctgcttgaagcaggggtctcaccttacaatggatacagctatgatcatctctttggaacaaaggtcgggggaacaatctttgatgaggctgggtacaggcacactgctgctgacctccttgctgctggaaatcataacaacctcagggttctccttcatgctagtgtgaccagaataattttcaacacagaacaagagcacaggaagccaaggaccattggtgttgaattcaaggatgagaatggggggcagcagcatgccttccttacccgaaacagagacagcgagattatcatctctgctggtgcaattggcagtccccagctattgttgcttagtggaattggacccagaaaggaacttaaaaagcataacatttctgtagtccttcgcaacgaacatgtgggtaaagggatgtcagataatccaatgaattccatctttatacctaccaaggatgcccctaagcaatcactgattcagactgttggaataaccgacggcggggcgttcatagaagccagcagtggtttcagccagtcaccagatagtatccagtgccaccatggaatcatgtccgctgagattgggcagctgtcaacgattcccccaaagcaaagaaatctagatgcagtcaagaagtatgtacataaaaaatataacctacccaaagaagtattcagtgggggttttatactttcgaagattgatggtccattgtctactggtaatctagttcttgtggatactgacatcaatagcaaccccacggttaccttcaactacttccagcacccaaaggatctcagtcggtgtgtctatgggatcaagaccatagagagaatactgaagacaaaccatttcactaattttaccctcaatggtggtggatatccaatggaagtggtgctcaacatgagtgtaacagcaaacataaacttgatacccaagcacacaaatgacagcacatccatggagcagttttgcagagacacagtggtcaccatctggcattaccatggcggatgccatgtgggcaaggtggttgaccaacaataccgtgtgattggtgtctcaggccttcgtgtgatcgatgggtcgaccttatttaggtcaccaggaaccaacccgcaagccacagtcatgatgatgggcaggtaatgtcccagagaaaagctgccacagaatgaaacgagatcatcacaaggccatcaaaagcagcacgacctggctatgatcgaagacggaagggtcaagataatagctgcctacagcgcagctatccgttcctgcttgctccgcgtcggtacgccttcgccaccgaaccctcccgcggtgcagcagcggaggagccacggcggcgggatgatcgatccagtcggtgaggtgtggtcggggcattacagcaaacacctggtgggcgcggcgcaccggtgctatgcgaaatcgccaaccagagatatcatctattgacaccattgtttctgcattatgaacaagtaaattatattacattgtaattacatgaactgcaaagttctactacctccgtttcacc

SEQ ID NO: 95775 - DNA, 2017 bp, Oryza sativa
  Clone ID: PAT_MRT4530_93936C.1
atggccgccgtggatcgcatctctgaactctccgacgacctactcctgcacatcctctcctccctgcacaccaaggacgccgccgccaccaccgtcctctcacgcaggtggcgtcccctgtggcgccggacctgcgtcctcaacctctactccgaacccttcctccccacacacaatgccttcttccgcttcgccgacggcgccctcgccgccgtcctccgccgtggcgacgacccagccctcaagaagctctcgctcgccgtggactcggctgcggcacgccctgttctctccaacttcgacagcaggatcggcgcaatcctctcccaccgcgccgcggccgggctgcaggacctccgcgtcgattgtctaccggtcgccggcgccggcgacgccggcgacaccatcggcatgtacaagctgcggctagcgtcgctgccgtgcgccgccacgctgcgggtgctgcacctcgcgtgctgctgctgctactcgtcgccgccgtccgtcgtggcggcgttcccgtccctgacggatctagcgatgaccagatgcatgctgtcgctgtccaagggtggtcacctcctccagaccatcgtcgacgccgcgccgaggctcgccatgctcagactggaccgtgtccatctcctgatctcggcggcgaagacgaaggaggagaccgccgtcctccgcctccgctgcccgacggtgacgacgctcgtgctcgtcgccgtgacgtcaaggatcgaagcactccagctcgacgcgccgagcctggtctccttctcgtacggcgggcacccgatggcgatctcgctggcaccaccgccggcgaacctcgcgctcgtcgacgtggacatcagccgaccttccttcttcacctggaagtacgagccggtgtgccgcgtcctccgcagcctcggcggcggcgacaccacgacgatgagggccatgacgctgcgcgtgtactgcgtcgacgacattctcgacgacggcggcggcggcgccctccccgtcttccccaacctcgcgttcctccacctggaagcacagtacctgcacagccgctatcagacgcccatatcgttgtcagcaatggcgaagctgctccaatcctgcccagctgtttctgaactccggctcaggctaacaacgaaggatgacagccacagccaccccgtgtccgaagaacagcgcttcaaccgaaggatatccgggaactccattgggaggaggatcgagtcaagctcaagttcttcttccaaggacgaaggtgatcttgagcttaagcgtcagcgcgtaagcgagccggcaatcgaatgtttggagaaaaccgtcaggaaggtgaccatggaattcacggccaaggagatggacagttttccggtccatctcaccaagttcctggtggagaacgccatggttctcgaggagttgcacgttgatgacacagcacagttcttcctggaccagaaggttgaaaagtggagagctgattcatttcagcggaggaacttaccaatcgttggccgcttcgaggtcaagcctatggcggcggctacttgccctaccgcgagctgcaacggctatggcggcgactacctccctaccgcgattcccatcttcctcagcggcagccggagatctcgcgaccgacgtggggcggcggctacctcccccatcacgagcagcggcggcgacggcgacgctctcccccatcgtgcgcgccgcggcggtgcccgctcccaccccggggttgagtccagcgctttccatgatggtggaccaattgaggaagctccatgcatttcttccagacggccttcttgcaagcagtcaggacgtgttcagggaaataaaggcctatgcttcagagttctgcaggaaggagcaccaagctcttgaaatttcccttatatacgtcaaggaaaataaaggggctgcaactgtagctagcaccgaggcctggtcggataccaaaattgaaggggaaagacttatatcagtagtacatttctaa

SEQ ID NO: 95776 - DNA, 252 bp, Oryza sativa
  Clone ID: PAT_MRT4530_93937C.1
atgagcgcgtggcgggagatgaacggttgcggctacggcgtgaggagcccggcggcgggaggagcacaacggctgctgtggcgggaagagcccagtggcagaaggagcaaggcagcggcagcacccggcggcagtgtgtatcagccctccctccagaaccgcgcagcccagccctaccaacgggtggcagcagcgggaggcggattgcggcggcagttgcgggaggaccccggcggcggacgacagcggtag

SEQ ID NO: 95777 - DNA, 1813 bp, Oryza sativa
  Clone ID: PAT_MRT4530_93938C.1
cctatcttattccaccaccaccacccatggcggccaccacccacgccgcctccctctccttcctcctctctcacccccaccccacctcccccaaccctaaccctaaccctaacctccccctccgccgcgccccccaccgcgtccgctgcgccaccgacgccgccgccaccaggcaccggcgcgcggccgacgagaacatccgggaggaggcggcgaggcaccgcgccccgaaccacaacttctccgcgtggtacgcgcccttcccgcccgcccccaacggcgaccccgacgagcgctactccctggacgagatcgtctaccgctccagctcgggcggcctcctcgacgtgcgccacgacatggacgcgctcgcccgcttcccgggctcctactggcgcgacctcttcgactcccgcgtcggccgcaccacctggcccttcggctccggcgtctggtccaagaaggagttcgtcctccccgagatcgaccccgaccacatcgtctccctcttcgagggcaactccaacctcttctgggcggagcgcctcggccgcgaccacctcgccgggatgaacgacctctgggtcaagcactgcggcatctcccacaccggatcgttcaaggatctcggcatgacggtgctcgtcagccaggtgaaccgcctccgccgcgcgccgctctcccgccccatcgccggagtcgggtgcgcctccacgggggacacctccgccgcgctctcggcctactgcgccgccgcggggatcccggccattgtgttcctccccgccaaccgcatctcgctcgagcagctcatccagcccattgccaatggcgccaccgtgctctcgctcgacacggacttcgacggctgcatgcggctcatcagggaggtgactgccgagctgccgatttaccttgcgaattcattgaattcccttcggctcgaggggcagaagactgctgctattgagattcttcagcagttcgattgggaggtgccggattgggtcattgttcccggaggcaatcttgggaacatatatgccttctacaagggattcgagatgtgccgcgtccttgggctcgtcgatcgtgtgccgcggcttgtctgcgcgcaggctgccaatgcgaacccgctgtaccggtactacaagtcggggtggactgagttcacgccgcaggtggctgagccgacatttgcatcggcaattcagattggtgacccggtatctgtcgatcgcgcggtggttgcgctcaaggcaactgatggcatcgtcgaggaggccacggaggaggaactcatgaacgcaatgtcgctcgctgatcgcactggcatgtttgcttgcccgcatactggggttgccctcgcagcactgttcaagctccgtgaccagcgcatcatcgggccaaatgaccgcacggtggtcgtcagcacagcgcatgggctgaagttctcacagtccaagatcgactaccatgacagcaacatcgaggacatgccctgccagtacgcgaatcccccggtcagcgtgaaggctgacttcgctgccgtcatggatgtcctccagaacaggctcaaggttgatgaacttggtgtgtcacaccatgtagttggcacatgaatactgcctcaatttgcagtgaatgccgtccctgtctatctgttgtcctgaactttttggtgacttttcacccatacctcgtgaaggctgggaaactgatcatcgtggagtgcaaaatgcatggctcatggctgcatttgcatcagtgtccggtggcaaaagaaattgctgattacaccatttcggcctga

SEQ ID NO: 95778 - DNA, 407 bp, Oryza sativa
  Clone ID: PAT_MRT4530_93939C.1
ctcggccttggtaatccgaatcaacgggaggagacattcgcggacagcatcgagctcttcgagaaggcagccttctggatggacaacctttccggcttccctatctctaccgtatgctgcctaggaatgaactgaaaatatgtgtaataataagttggcatcaggcccgattatcagctacttcctccgtttcataatgtaagtctttctagcttgtccatattaatatagatgttaataaatctaggcatatatgtgtctagattcattaacatctatacgaatatgatgctagaaagtcttatattatgaaacggagggactaattaatacatcctctgtttcacttattttttttattttgaataaattaatatatagattcacgtaaaaaaaaaaaaaaaaaa

SEQ ID NO: 95779 - DNA, 926 bp, Oryza sativa
  Clone ID: PAT_MRT4530_9393C.1
atggccaacattgtcgaggcggcggtgggagttctgactcgagctctgtgcggggaggggcgccgccgccacggtggggcggggtggggagagggcatgatgcagagccgacgagtgcatatgcttccaaatataaggacatgccaccaaagcattatcttgcttgtctccactatgccatcgtcgggaggcatcagaagatcggcagagacacaatgggtgatgtgtaggggagaagcttgtcggcgccgcttgcacccctcgctccacactccaccacctgagccctctcctctcccaacgacactgccttcgtcctgtgtgctgtcacctttacctaccgtctgcgagctggccattggctcccacatgagtcaaacattgtgtgctgtcacctttacctaccgtctgcgagctggccattggctcccacatgagtcaaacacctgccgctgccctaacgatgttggccgctgtcactgcccaacgcgtacgagagagaacgagaaagatttgagaggggagagagagtgcctcctcgccgtgacgccgtcgaaaaccctgtcgccgagatgccaagtcgccggatcgaagaggggaggcacaacgaggactggaggggcgtcgggggctcggggcaggaggggcgtcggggcgtcgcagggtgcaggatcgcagccgctcgcaaccaggaggggtgccggagccacggctgctgccaccgcctgcaagatgagcggcgccgccaccggctgcaggacgagcggcgtcgcaggctatcagccaggaagggcgccggagccgccggagcagcctgctggatgagcgccgtcgtgaactggaggtagcggcgcagggggatttggcgccgaaggacgaaaaaatcgcctctcagcggcgcggtggggggaaaatgggttagggtt

SEQ ID NO: 95780 - DNA, 258 bp, Oryza sativa
  Clone ID: PAT_MRT4530_93940C.1
atggaggagacagtaggtgagggccatggcttcatgaggttccttgtgtcatgcaggaagcacaaccgcgttgccttgcaaaacgtctggcgtagggaccacttgagtgaggagacgagttgggagaagctgtcgctccaccctgcattgctgccggccccctcccaaaccattcatcgtcgaggtcaattgccaatgcttagaacgagggtgttcaagaccactagcgaggaggagagcttgaccgatggcgactag

SEQ ID NO: 95781 - DNA, 401 bp, Oryza sativa
  Clone ID: PAT_MRT4530_93941C.1
cggacgcgtgggcagctggccagggactcggccatggcgcccgcttcatgagcaagcagggccgtgcgatgtacgagaagccgccagagctggagccgaagccgaagccaaagccaaagcctcatcctaagcatgaatcaaaaccggagccaaagccagaacctaagccggagccaaagccatacccagagccgaagccagagacgaaaccggagctaaagccagaaccaaaacctaatccagaacctaaacctgagcctaagcctgaaccaaaaccagaaccaaagccatacccagagccgaagccaaagcccaataccgagccaaagtcagaaccaaaacctgagcataaacctgaaccaaaaccagtaccagaacccaagccatacccaaagccaaag

SEQ ID NO: 95782 - DNA, 425 bp, Oryza sativa
  Clone ID: PAT_MRT4530_93942C.1
ctcagccgcaggcgacatcgacgtccgatgccttggaccgttgacccgtcgcgcgcgccttcagaccgcgcgccacgtggccctcaccctatgcgacttgtccgttgcggacgtggacgcgcaggatgatctcgacactcccaagatcgaaaagctcgtgctagtcacggctccaatgcgcgtgtaccacgtaatgaatgctcccgacctgtacattaaaggaatggaggagcgtagaaagcagtacaggggcagtgtggaaggggaagcgcatcactgcatatatccctttcaaggaggaattacattttataggactaggacaggacaagcgggacaggatattcgaacagatatgcaaggactagtattagttcattgtcggttgagatcgatcagtaaccgtgaccaagtaagcctagcgc

SEQ ID NO: 95783 - DNA, 363 bp, Oryza sativa
  Clone ID: PAT_MRT4530_93943C.1
atggggaggggagaggagaacgatggcgaacaccgcgacttcgtggttttagctgtaggacaccgcacgaagtcacttttgagggagcgcactatcggatgcccacttagcagcggcagcgtgtgtggcctactcggcggcggctgcggcggcctgctcgacggtggtggcaaagcccggagcacatgcagcctactcagcggcggcgacgcacgcggcggtgccaagagcgcggcctactcagtagcggcggccggcggtggccgtggaccacgccagctgcaacgtgcaggtggcctagtgccggacgagcacccgctgctccagcgtgtgcttctccttcctcaacgcgacgacctctga

SEQ ID NO: 95784 - DNA, 441 bp, Oryza sativa
  Clone ID: PAT_MRT4530_93944C.1
atgttgtccgagtttacaccacctttaactagcaaaaggcggttaaaatacaacgatattggaaggcggttgacatacgtacatacgaacgtgggtggtagaggacgtcggccgacggccgtggaatattggaacggtggaagcatcatatacgatcgatggcttccaggttggttggttggtgaggtcgcatcgcaacgcaacgcaacgatcgcctgggccagcgctggcgtgatcatcgaacaccggcctcgtcgtcgggtcgatcggttggaacgtacggtccttgaagaagcagacgatcgatgggggatggcgtacggagaccgtcgtcttcctcctcgctccgttcgcagcgccgaggacgggacagcctgtgtcctttgcggcggcggcggcgagtcggcgatggcgtccagtccagcttgcgcccctgagggc

SEQ ID NO: 95785 - DNA, 414 bp, Oryza sativa
  Clone ID: PAT_MRT4530_93945C.1
atggacagaagggggaaggcgttggagatggagaaaaggacggtgcaggatcggcaagtgtggagtcacgttgctgggttgtctgatactcacacacatggccacctagctatccagctgcttcacgcctactggtacacacaggccatggatcgattgactgaatggatggattgttcctttgatatgacccttcaaacagccaaaatttgcagtactggagttatgactgacaacctaggagttccacacggaaagcagtcgagagtagagcgtggcatggtttcaacgaaggagaatttcggaccgtttgattggcttgaagatttgtgcgtcaggctcctcgatccagctctagcgactcgtatagtggcaacccttctaccacgagaatatagggcctgttcactttga

SEQ ID NO: 95786 - DNA, 430 bp, Oryza sativa
  unsure (1)..(430): unsure at all n locations
  Clone ID: PAT_MRT4530_93946C.1
ccaaaggctcaagtccaccgccgggctccccgtcagccgnctctccacaactcgggcttcggcaacgtcagcaatggcggaaagatcaagtgcatgcatagtgtggccaattgagggcatcaagaaattcganaccctatcttactgccacactcaccgtggaagatcttttgaaacatatcnagtacctgcttccatccnagtgggtnccttgcctcgagttcagcaaggttgggattcntctaccgngannaacacaggtctcccgggtactacnatagcnggtattgggaccatgtttnaaaactncccntgttcggctgcacctattcctncccangttctcaacgaactccaagggggggcccggtacccaattccaccctatantgagtcgtattacaattccactgggccgtcccttttacaa

SEQ ID NO: 95787 - DNA, 186 bp, Oryza sativa
  Clone ID: PAT_MRT4530_93947C.1
atggaggccgccatcgcgacgctgcatggcaagaagcaacgcctccgcgaggcctgcgacagcctcgtcctccactcgcccatcctcctccccttccgctggccctccaggcttcccgccccgcggcccccgccgccgccgggagccatggcgaggacgtccaggaacagggagaggacgaagtga

SEQ ID NO: 95788 - DNA, 1956 bp, Oryza sativa
  Clone ID: PAT_MRT4530_93948C.1
tcagagggctctctgcctcgccggagaccgtcttctaatgggaattccccatgctcctacaattgcaatggcaaatccaaggccaaatcctattccagaaaagaggaacagcataacatctacagatttcttctcggaaggtatcacattcggcaatgtcatgttgctgcagcctttagatagaggagggccacataaagcatcattcccaagaaatgaactattggcgaataacgaaaaatgaagcgattctggtattttcccctccagcctgttgtaggatagatttagcattccgaggaagtccaaggatggtaattcctgtggaatgacacctgaaagctcatttgaagataggtccaaagcctccatctgctttagacggccgagttgagatggaattggtcctgtcagtgagttgtgtgacatgttgagcgtatgtagcagaactagctctcccatagatttagggatgcttccgtggaatgcgttatccgagacatcaaggaatacaaaggttcttagtattttctccatcatgatggtagaccctttgtttgtgagcacagtggtcacttggtagatttgcttttgatcaccttcatattccatcactgatgtttcattaccaaaatcagttatcatagactttagtcttgtaaaccattcttctttcagtgtgcctgagaggttgtttcttgatgccttgaaataggtagtacctctgagttgagtagaaatatttggtagtatggacgagaaatgattgtttgagtaatcaagaacggtcccagaatctctgggtagaggtattggcccctcaaacatgttaaaactaagatctattgatgatggcaggtctccaaaaaacccacttgcatcaaggcccagctctttaaaagatttgaggttgctaatggaacttggtattgtaccagagaagttggtgtgaccaacaagcaaactctccaagctactgagctggagaacagtcaaagaggagaagttgttaaaggactctggaactggaccagtcaaaaagttgtattgtaggtcaatcacattagcaaggggcaatttcgtccagaagtaaaagcccatatccgtatccacatcccttctcatggattgattcgcggccagcgcgcggcagttctcacgacgcattccggtgaacagcgccgcacgcccgcaccctttccttcgccgagaagcgtcctctacccccggccgcacgaagaatcgatggcgatggagattatgcaacagctcgccgccgccgccacggcaacggccctgtgccctgaaccatctctgatggcgatgacgacggccggcgcaggtggaggccgccatcgcgacgctgcatggcaagaagcaacgcctccgcgaggcctgcgacagcctcgtcctccactcgcccatcctcctccccttccgctggtccgacctcgactcccacctctcctccctccagtcctccatccacgcccgcttcagctagctgcaggccctccaggcttcccgccccgcggcccccgccgccgccgggagccatggcgaggacgtccaggaacagggagaggacgaagtgatggcagcggcggcggcgaagatggtgcctccgtttacggtgctgcaggtcaaggagaggagcccgcggaggcgccggcatgcgcgagcatggacgccacaaggctgtcgtcgaatgccgccggcaagcgtgccggcgtcgggcaagatgggttcgttcgacccggtgggatggcggtgccggcggcggcggcgaagatggcgcctccgtcaaaggtgcaagtcaaggaggaaccagtcgattctgatatgcggacagggtgggctagatatggtcagctttttcttaggacaaaattacccctcgttaaaggggattactctgttaatcaacttttaatcctcaccgttgatgtgctttaa

SEQ ID NO: 95789 - DNA, 402 bp, Oryza sativa
  unsure (1)..(402): unsure at all n locations
  Clone ID: PAT_MRT4530_93949C.1
cgcccttcctttttttttttttttttttnnanaaaagaaagaataaactcgaggcgcgtgctgctctactagccaggttcttagctacaaaagcaaactgcttgaaagatcattacaacatgtaaattcacttataacgcaagacccccctaagaggactatctgccgcattataaaccgtcttggtagcttcttgtattgtattggagtatcgtgccagtacaattcaccctctcatatatctgaccaccgacgcctctcttttttaaatactataagcctttgctagaacatcatttgcgaccagcacggaatatggaactctttcctgcaatgtggcttaccatacagttaggattggtcttgaatgcaatgtaagcacatccttctctttgtgccttc

SEQ ID NO: 95790 - DNA, 412 bp, Oryza sativa
  Clone ID: PAT_MRT4530_9394C.1
tttgtttggtatcaaattatggtaggttttgattgacagcaataaatattttcactttcgctgggacttttgggttacttatacataataaagatttagtatgagccagtacaaacctatctctctaagagtaatatacacaaaaaaaaatgacatatgggcccacccgcatatgaagccttagcggtttcacaacaaacatcacgtgctagcggtggcggatctaccataggggctatgggatctcgagccttcactactgacgttgaaaccatgagagccctcgtaaagcccccactaaaattttctgtcatacatccattagaagagggggctatagctttggataggttggtttatctctcctattagttatttctggatcccgccctgcgtgctagtacaccatcac

SEQ ID NO: 95791 - DNA, 1031 bp, Oryza sativa
  Clone ID: PAT_MRT4530_93950C.1
atgacgggggtggtcagcaagcccctccgagctcacctcaagtccaccatgtcgtctcctgcgagcccctctgcgacgggggaagcggcggtggcacttggggagggggaagctcgaggaggcggcaacgcttggggaagggacagcttgaggaggcggaggcagagcttgacgaggcagcgacacctcgacccccacgacatggaggccatcgacagtgtgagctcagagaggctcaccagggacgacaatggaagagctcgaagggagggaggtgggatggctcttcgtcctctcgccgagcttgttgctgtcttgcaaggagccgtcatgctgaggaacggaaggcaagcgccgccaccgccagccaaagcgtctgggtcgcgtcgcccctacgggacgggaccgagacggaaaccgccacccaacccaacccaacacaccggcgtccgcacccgactcggcgatcccccaacccagccaccaccctttatagccgcgcggtgcggcgcgtccccgggcacgcacgcccacccggcaaaagctcccgcaccaaaaagagaaaaaaaaacacgcaaaagcgcatcgcctttctcgtgctccgccgccggcgagatgtgctgctgcccgagcaaggcgtgctgcatctgcacgctcatcgtgctggtgctggtcgccgtcggcatcgtcttcggcttcggcgtctacacccgcggcttccacaagctcaccagcagcatccacgacgcctcctccaccgccgccggctccctccgcgcccaccaattcttcgcgccgccgccgccgtactagctagctagcccctcctcctcttctcttctctccctcccgagatctatccatgggggatagtaggggagaccgggagtagtagtagtactaatcgtttgtaaagaagaattcgccggatttgattttattttatttccacctgcattttggttgcaatccatggattgattgattaatggttggtctcttgttcctcccaaaaaaaaaaaaaaaaaaaa

SEQ ID NO: 95792 - DNA, 1199 bp, Oryza sativa
  Clone ID: PAT_MRT4530_93951C.1
gttggacggagtacttcgctgcggcggtgagcgacggcagcaagcagatgaggtgcatggaggtgaagtgcacggcgatctgcgacgaggcggtggtgcggctgctgctgcacgggaagcaccccggcgcggcggcgcggctggaccgccgcctcctggaggcgtgcgtggaggccagcgacgcggtgcggtggtgccccagcgcgccgcactgcgggcgcgccatccgggtggacggcgggggcggcggcgaggagcggtacgccgaggtgtcgtgcccctgcggcgccgtcttctgcttccgctgcggcggcggcgcgcactcgccgtgcccgtgccccatgtgggacaagtggggcgccatgcgcggcggcggcgaggtcgacaacctcaagtggatcgtcgccaacaccaagagctgccccaagtgctccaagcccatcgagaagaacggcggctgcaaccatgtcacttgcacctgcggccagcatctctgctacgcgtgcggcgcggcgacggggacgttgtacatgcacatctgcaaccgctacaaggaggagggcggcggcggcggcgtgaaggtggagatgaccgccggtgggcggcagcggctgcggttcatgcactactacgagcggttcgagatccacaccgagtcgtacaaggaggagcaggggaagctgggtccggccatcgacgctctggcgcggcggctggaggcggacgccacgctgccgtggtcgggcaccagggacgcccggtggccgtcggcggcgcaccggcggctgctgcggtgccggcaggtgctcccgcggtcgtacgtgctcgcctactacatgttcggcggcggcgcggcgacgcggcgcgagcgggaggaggcggcggcgcagaaccggttcgaggatttgcaggggcagctggagcaccacgtggaggtgctgtccaggacgctggcggcggcggcgcggccggccgacgcggcggaggtcgtgaaggcgaagcgcgacgccgacaacctcgcccgcgtcgtcgaggggctgtgcgccgggatgtaccggtgcgtccaggacgagctgctgccgctgctcgtcgagcccatgaacatcgccgcgtaccatccggacggcccggccatggccaaggagttcccgccggcgaccagcgtgaccggcggagcaccgccggcgacacgccactaa

SEQ ID NO: 95793 - DNA, 402 bp, Oryza sativa
  Clone ID: PAT_MRT4530_93952C.1
cgaatccaagaatggacaaacacctcagagctaaccaaaaagaggaagaacaaggcctcaagttcgttcacagcgagtaaatgaactcgaggcatttctgtgcctgcctactctagtaccataagatagaagacgataacagacagaggacggttgtaagttaaaccctgttacccacctgctattctacaagaactctagaactgtatacactttatacagttgacctaccaagcaccaacacaagacaacttctcagaatctcatgttagtagccttttcgaatcaaggatccgatctgaactcttgaagttgtacaccgattcaaacgcttccatgcaaacgctggcgaatcccggcatcgcctgaaaaacgttagggaaacctgtctgaaggttgttc

SEQ ID NO: 95794 - DNA, 418 bp, Oryza sativa
  Clone ID: PAT_MRT4530_93953C.1
aaatcaagctgatcatcaccatgaaatggaccgtgtgcttcacgagaggggcgctgtacatgctgctggtgatggcgatggggctcgcgtgcgcctactcctactgctaccgctccaggctgcgccagcaatacgggctccaagagaagccctgcggcgaccgctgtcgtgctgcgtccactggtgctacgagccttgcgccctctgccaccaacatccagctttggctcaccgagctctcgatctggatttgggttaccgagatcccgatgaactccaaggcaacacagtcggatcctccccaccacggccgccattcgttgtcgcctccgtgccgtcgtcgcatccaaggcgccgctctgccgctgtctcatccaccccaccgcggccgtcatcacatccacccagctgtcgctgc

SEQ ID NO: 95795 - DNA, 3995 bp, Oryza sativa
  Clone ID: PAT_MRT4530_93954C.1
atggaggcggcgttcgacgcttacttccgcgccgcggatctggaccgcgacggccggatcagcgggcaggaggccgtcgccttcttcaaggcctccgctctcccccaacccgtcctagcccagatctggacgtatgctgataaaaatcgaactggttttcttggccgtgaagatttctacaatgctcttagacttgtcacggtagcgcagagtggccgagaactgacaccggatattgttaggtcagcgttatatggtccagctgctgcaaaaattcccgctcctaggataaatgtttcaactccacttcctaatgcaactagtgtcactagccccttgcaacccactcaagcacctcgccctgctcagcagagtcttgctatacaaggatcccagggcccccttagcacatcactaaatccacaggtccttcaacctggtaatgttgtcaggccaccacaagcgtcaattgcaaacactcctgctcaggcaattgctccaagggcgcccgcaggtggtgttccaaaccatactgttccagcaacaacaggtctatcaactgattggtttaatggcaagaaaagcgcaagtccattgggtgtaacttcacaaactccaaccagaggtgtttctccacaggtcaaccttgctaccgcgggaataccaacacagagttcaactcctatagcaggctatggctctcacactccagccagtacaacatctgtaaaggcgaattcagcagatttaaaccttctgtcttcaccgccagctgctaatgactccaaggcattggtgcctttggggaatggattatcatcggcctcaacatttggtgtcgacccttttgctgcaactccacaagcaaagcaagattcatcttccccccctgtggtttcaaatagtttgcctagtgctaatgctcttggaccatccgctggacctcatcacccccctaaaccattgcagactggtcccatgcagggtgtagcatcactcccttcacagccagctccaaagcaaaaccagtttaattccatgccaagcgctccagcacctatgggtagttttcctggtggacaaattccttcaaacacgaaccagtctcaagctccatggccgaaaatcactcaagcagatgtaaggaaatatatgattgtatttattaaggtagacagggaccgagatggaaaaattactggtgaagaggctaggaatctgttcttaagttggaggcttccaagagagctcttaaggaaggtgtgggatttgtccgaccaggataaagatgggatgctatctttccgggaattttgtactgctgtgtacttaatggagaggcacagagagcagcgtcctcttcctgatgtactaccagatggtatctgggcagaaggaatttcactaccttctacggggcaatttgcagaaaaccctactggcccagctccccatccaagtgctggatttacaagtagagcaatgccaggacaacatcatgggatgcctccgtcatccatgaaaccaccacctcaaaggccgctttctttggatgctgatgatgcagtgcgaacagaaaaacagaagccaaagatcccagtcttggaggaacatcttactggccagctaagcaaggaggagcgaagtgcattagatgcaaagtttaaagaagcttcagatgctgataaaaaagttcaagaattggaaaaggaaatcctggattcgagagagaagactgagttctatcgcacaaagatgcaggagcttattctttacaaaagtaggtgcgataacaggtttaatgaagtttcagaaaggatgtctgctgataaacgtgaggttcaatcccttgcagcgaaatatgatgagagatgtaagaaggttggagatgtagcatcaaagttatcgatggatgaggccactttccgtgagattcaggagaagaaattggagatttataatgcgatagttaaactgcagaaaggggatggaaatgatgaaaagcttcaggagcgagctaaccagatacaatctgatcttgaggagcttgttaaatctttgaatgaacagtgcaagagatatgggttgagagctaagccaactactcttgtggagcttccttttggttggcaacctggaatacaagagacagcagctgtatgggatgaagaatgggacaaatttggtgatgatggcttctccacaataaaggaactcacagttgaaatggagccacctgttgtacaaaaggatcagcctaccgttgaagacagtaaagtgtctaccaatgggccatcagcacctacatcaacagagaaagaagatagcaggggtgataaatctgccgctgcctctgagcaaactgtagaacctgatgcaactccttccgatagcaaaacggttgcagcaaaaagtcctccagttagtcctgttaagaacacaaaggatggccatagtgatgaacgtgataaaaaacaatctgggacaaacgacacctcgtcacgtgcaattgagagtgtcagtaacaatggaggagcagattcccctgttcatggagaaaagagagacgattcacattattggggcccatcgtttgataatggtgatgataatgactccctatggaacttcaatcgcaaggatggtgagaatggtgattcagacctattctttgggccacaaggtcttcctccaataaggaccggaggctcttcgacggctggtagtgtttatggcaaggaacagaaaccattctttgattctgtcccaggtactccagtggagaagcctttctttgattctgtcccaggcacacccttgcagaaatcagtctttgattactctgttcctagtacaccgatgcagaaatcagtgtttgattattctgtcccaagtacgccattgcagaagtcactctttgattctgtccccagtactccaatgcagaaatcagtatttgattctgtaccaagtactcctatgcagaactctttgtttgactcttttccaagcaccccgatgcagagatcactgtttgattctggcccaagcagagcagaatctcctactgccagcagcatatatggcaaagagcaaaggggtttctttgattcttctgttcccagcacaccaatgtacaactctagcttctcaccaagatatagcgaagctggagacgacagttcattcgacaccttctcgcagatggactcatttggcatgaattacagcaattcatttgggcagcgtgacagcttttcaagatttgattccttccggagcaacgctgatcaaggcagcaatgacacctttggtagatttgattctttccgcagcaatgctgatcaaggtggtggcaacagcttcacgaggtatgattccatgaatagcagcagcgaccatgacagaacagatgcttttgcgagatttgattcaatgaagagcacggactacaacagccgaggttattcgttcgatgaggatgatccttttggtactggaccgttcaagtcatcagacacctctagcccgacgaagcatggaaccgacagatggagtgcattttgacaggtattgattgtactatagaggtcatcatcatgtgtttgtgcaccttactgcagataaatatatatacacgtacaagggcaagacagtttttgcttgggcctcagcttgcaatggggcttgcttgtgtgtttgctttgtgtttcttatttttgtacctaggatctgatgttctaccgcgcatatgtgttggtgggatggtgattataaacattctttataccttgtattattgtacaagatgtgagtcaatccggcggattgaaaaattacgagctgtccatgtttttagcgttttcatattcttgtgccttacattttcctcctgtaaataccttcacccagaatctggggatggattgtactgcggacgtatttctgttcagtgacagatttttcttgtaatccagtgggttagacgatttatg

SEQ ID NO: 95796 - DNA, 120 bp, Oryza sativa
  Clone ID: PAT_MRT4530_93955C.1
gaagagggaaccatacgtatgaggttggggctgcaatttgaacatggtgggagcatcgccggtgacatatggaccaacatataaacaccgaagcgcctgatggtcataatggccatggct

SEQ ID NO: 95797 - DNA, 2760 bp, Oryza sativa
  Clone ID: PAT_MRT4530_93956C.1
atggccgccggtggccacgctgccgcggagcaccgcatacagataccagctgccccggcgtcgcagtcgggaccagctgatcataaggcggtcgccgcggcgccggagaagtggctgaattactttcttcgcttgctcgcggtgatcgaaagcgtgggcaacgccttcggcacgctggccttcacctgggccaccgtcgtcctgctgggtggctacccaaccgttctcaagcgcgattttggtattgcgactgcgataattttcctagaagccacgaggatgttcacccgcaacaataggctggattatcaattgttcttccggacgagaggtgcctttagaccactgggctggaacgggctgatgtttctatgtgctggagttctaggactgcgcctacgtatcaacagtcggttacgccgtcagatgtcgctgtggagccccatggttgcaatcttattgctggcttcctgtatttgcagaagctcgctactggccatatggatagtatatggtgtgctccttgtggttgtgctcctagtgactattagcaggttgcaattcccaattataatcaaccgagtacatggtgctttgggccgcaaatacgtattttggcgcccatttatcctatactcgtgcatgctcgctgcaattgtgttgccgatgttcatgattgataaattatatcgatatgcgatcatcgtcctcgacatatctgccttggtcattgtgtccttcggcaacctacagattccagcagcactcgtgcgtgttgtgctcgcggcgttgggctttgatcaagaggactacgatggtcacggtgacacgacaaatcttccccaatctctaactatcttctatgggatggtgcttggacaaggactactttacatcattgccgcagtattggaggtcttctcgttcatccctcggatacacctcgtccgccgtggtggatttacaggtcgatggggagcagaatctgttgatatgtactacgcatacgcctatgacaaatacatggaaggaggtctgtttgctccaaagaggatcagcctcagcaactttgccatggattctctgaattcggacctgtccaagaatcagctatacggtgtccagatgatgcatatatttctgcaaaatggtctgaccaaggcacggttgctggagaaactcaccacttcaacgcagacgatggccaggttaatcagcatgttggactggagtagtagacatcatcgtgcaactatcaggttatatgccgccaaggtcactgccgagcttgcaaagaacctccgagttgaaactgtccctgggacactgcagcttgtatctacgcttctggatgctgatggaaagccaaaaagaggacacccactcctggatgcagatgatgatcaagatcattttgttgatatagcagatagacaagataaaagacatgatatagctggtaaccaagggcagagacgagagccgattggggacaccaataacctgctggaaacaccaacccgatcaacacacatcaacgaccaaagatacatacctagaatttggcagaggatactggagtactggtcgattcccaaggagcagccattgacagacgatgatctcctccctgcactaggcatgtcaatcatttatagccttgctggctgtgatcaaaataattgtgtggaaatagacagagtaactgatctgatccccaatataattggattcacaagcttcagaagtgcaatggtaaattccgaagcacaacagaaggttctcttaaagtcatcgttgaaggtactgcagaggctcacaagcattgaaggggaaattggcataacactgcggtacaagatatcaaaacatcccttcttactgcgaaaccttgcagagatcttgcgagacaatagcagcaacaaacaagaactaaggaagctcgtggtaggaatcctcagaaaccttgccattgacagacacacaaggcaagagatgggacaaatgcaaatgctcattaccacgctgatcaaggcattcctcgattttaaaggattatttagttcagatgttgattgcttgctgccaaaggtcgccgggcaagcattggtaatgctgtcatcagaaaattcgcataactgctttgttatgttgaaggaaccagatttcattcataaactaaaaaatatgatcctaatccatggtgataaatacatatatgtggcagcgagtctattgcgtaatatgtgcctgtatgctcaacatgagctcacagaatcagaccaaaaggaactatctcacacattgcgagaggtgttggaaagaataatggacactgaaggggcagaactagaaatcctcattggccttagttcacagatatgcaaactcattcctgaagaattttcccaagagctagagcatggacagattaagcggagattcattaagaggctagtggacaccctgaatgcaaacatgaacccaagttctcattgccctgggatccggagggtggtacttgagcaatccatacacatgatggagtacaattctcgctatgccaattatttcaatgaataccagatgatggatgcactgtcgtttgtagaattgacaccctcaagggctgagaattacatggttttcttgggtgacgcaggtttcatggaatgtaacacacctctctctgccctagtggacagggcaaaagaactgatgggtcgtcagtggctgcaaggtatcagcagtgccaactga

SEQ ID NO: 95798 - DNA, 658 bp, Oryza sativa
  Clone ID: PAT_MRT4530_93957C.1
tttaaccaaagaacatcaacttgattttattgttttatctgagacggttaagaaggaattttctacatctgctctgaataatctttgtgttagtaaagattttttgtggcactgtaaatctcctagaggcagatctggtggtcttcttttaggaattaatcttctaaattttgacattggtttgattgatgagggggatttttatatcaaatttcatttacgaaataaggctgataattttaaatgggctttagttttggtgtatgggcctgcacagaatgagcttaaagatcaattccttgaagaattagttaacatgtgcagtcatgagactataccaattcttattggtggtgattttaatattcttcgtagtcctaatgataagagtaataacaattatgatgatagatggccctttttgtttaatgctgttattgatgggttgtgccttagggagatacagttgtctggtaggaactttacttgggcaaataatctagcaaacccaacctatgagaaattggatagagtgttagtatcaacggaatgggagcaaaagtatcctttatcttctgttgttgctctaaacagagatttatcagatcacgttcctttgcttctaaagacaaaatcttcatattttagtgacgctcaa

SEQ ID NO: 95799 - DNA, 798 bp, Oryza sativa
  Clone ID: PAT_MRT4530_93958C.1
atgaattctgaatcacaacagaaggttctcttaaagtcatcactgaaggtgctgcagagactcacaagaattgaaggggaaattggcataacgctgcggtacaagatatcaaaacatcccttcttattcagaaaccttgcggagatcttgggagacagcagcagcaatcaggaattaaggaagctcgtggcaggaatcctcagaaaccttgccattgacagagacacaaggcaggagattggacaaatgcaaatgctcattaccatgctgatgaaggcattcctcgattctagcagatcatttagttcaaatgttgattgcttgttgccaaaggtcgccgggcaagcactggtgttggaacgaataatggacgctgaaggggcagaactagaaatcctcattggccttagttcacagatatgcaaactcattcctgaagaattttcccaagagctagagcatggacagattaagcggagattcattaagaggctagtggacacactgaatgcaaacatgaacccaagttctcattgccctgggatccggagggtggtacttgagcaatccatatacatgatggagtacaattctcactatgccaattgtttcaatgaataccagatgatggacgcactgtcaattgtagaattgacgccctcaagggctgagaattacatggttttcttgggtgacacaggtttcatggaatgtaacacacctctctctgccctagcggacagggcaaaagaactgatgggtcgtcagtggctgcaaggcatcaacagtgccaactga

SEQ ID NO: 95800 - DNA, 3470 bp, Oryza sativa
  Clone ID: PAT_MRT4530_93959C.1
aatctctcctctaggcgtcttttggtatataggagtatctcggcttgtttgggttgctctgtacaaatgtgctgaggcttgggttctaggctggcttacctatagctagttagcttacatgatggccgccggtggccacgctgccgcggagcaccgcatacagataccagctgccccggcgtcgcagtcgggaccagctgatcataaggcggtcgccgcggcgccggagaagtggctgaattactttcttcgcttgctcgcggtgatcgaaagcgtgggcaacgccttcggcacgctggccttcacctgggccaccgtcgtcctgctgggtggctacccaaccgttctcaagcgcgattttggtattgcgactgcgataattttcctagaagccacgaggatgctcacccgcaacaataggctggattatcaattgttcttccggacgagaggtgcctttagaccactgggctggaacgggctgatggtaatcgtattcttctccgtttctatggtgtccacggttgtttgggacgcacgccggccacgtatagtatttccaattatggtagtattgtttgcggttggccagtttctatgtgctggagttctaggactgcgcctacgtatcaacagtcggttacgccgtcagatgtcgctgtggagccccatggttgcaatcttattgctggcttcctgtatttgcagaagctcgctactggccatatggatagtatatggtgtgctccttgtggttgtgctcctagtgactattagcaggttgcaattcccaattataatcaaccgagtacatggtgctttgggccgcaaatacgtattttggcgcccatttatcctatactcgtgcatgctcgctgcaattgtgttgccgatgttcatgattgataaattatatcgatatgcgatcatcgtcctcgacatatctgccttggtcattgtgtccttcggtaacctacagattccagcagcactcgtgcgtgttgtgctcgcggcgttgggctttgatcaagaggactacgatggtcacggtgacacgacaaatcttccccaatctctaactatcttctatgggatggtgcttggacaaggactactttacatcattgccgcagtattggaggtcttctcgttcatccctcggatacacctcgtccgccgtggtggatttacaggtcgatggggagcagaatctgttgatatgtactacgcatacgcctatgacaaatacatggaaggaggtctgtttgctccaaagaggatcagcctcagcaactttgccatggattctctgaattcggacctgtccaagaatcagctatacggtgtccagatgatgcatatatttctgcaaaatggtctgaccaaggcacggttgctggagaaactcaccacttcaacgcagacgatggccaggttaatcagcatgttggactggagtagtagacatcatcgtgcaactatcaggttatatgccgccaaggtcactgccgagcttgcaaagaacctccgagttgaaactgtccctgggacactgcagcttgtatctacgcttctggatgctgatggaaagccaaaaagaggacacccactcctggatgcagatgatgatcaagatcattttgttgatatagcagatagacaagataaaagacatgatatagctggtaaccaagggcagagacgagagccgattggggacaccaataacctgctggaaacaccaacccgatcaacacacatcaacgaccaaagatacatacctagaatttggcagaggatactggagtactggtcgattcccaaggagcagccattgacagacgatgatctcctccctgcactaggcatgtcaatcatttatagccttgctggctgtgatcaaaataattgtgtggaaatagacagagtaactgatctgatccccaatataattggattcacaagcttcagaagtgcaatggtaaattccgaagcacaacagaaggttctcttaaagtcatcgttgaaggtactgcagaggctcacaagcattgaaggggaaattggcataacactgcggtacaagatatcaaaacatcccttcttactgcgaaaccttgcagagatcttgcgagacaatagcagcaacaaacaagaactaaggaagctcgtggtaggaatcctcagaaaccttgccattgacagacacacaaggcaagagatgggacaaatgcaaatgctcattaccacgctgatcaaggcattcctcgattttaaaggattatttagttcagatgttgattgcttgctgccaaaggtcgccgggcaagcattggtaatgctgtcatcagaaaattcgcataactgctttgttatgttgaaggaaccagatttcattcattaactaaaaaatatgatcctaatccatggtgataaatacatatatgtggcagcgagtctattgcgtaatatgtgcctgtatgctcaacatgagctcacagaatcagaccaaaaggaactatctcacacattgcgagaggtgttggaaagaataatggacactgaaggggcagaactagaaatcctcattggccttagttcacagatatgcaaactcattcctgaagaattttcccaagagctagagcatggacagattaagcggagattcattaagaggctagtggacaccctgaatgcaaacatgaacccaagttctcattgccctgggatccggagggtggtacttgagcaatccatacacatgatggagtacaattctcgctatgccaattatttcaatgaataccagatgatggatgcactgtcgtttgtagaattgacaccctcaagggctgagaattacatggttttcttgggtgacgcaggtttcatggaatgtaacacacctctctctgccctagtggacagggcaaaagaactgatgggtcgtcagtggctgcaaggtatcagcagtgccaactgaaaaaaaataaaatgtttttgcatatacagtcagaagaccttgcatattgttagtgcagggcaaacaaagtgattctgcatttacagtcagaagacaacgcatgttgctagaaagaacatatatttacctttaagatgagcaaagggtattgtatctgtacatcatgaatcttgcactgtaatctgtgtgctattgatgatttatccaattatcatttgttgagtggccatataaaaaaaaaaaaaaaaaaaaaaaaattgttccagttttggcatcgcttatttccataaaatctgtggtttattcgacaccagaaaattgggttttctgcccttgtgattaaccccattcaacacaagttactatggctgagaaattcagaccatgacaatgcgcaacttatggagtacaatgttccactttcttgttgtctggacagagcaacaatcttgattaatgtgaactcgactcctatataagacat

SEQ ID NO: 95801 - DNA, 264 bp, Oryza sativa
  Clone ID: PAT_MRT4530_9395C.1
atggagttccatctaaagggaactatacttagaagcaaaggaggcatatgtcaaaccatcaagattgcacagataaatgtttggttcaatgagtttgattcaagtgacaattctattaggatggaacatggaatacatctgttgacaaaaaaatcgaacacactagcctgggagatcttcttagctcctgtgcaggtccaaatcttggtgaggtgcgggcgtgccagtcagtttgatcctacaactgacaagatatgcaaataa

SEQ ID NO: 95802 - DNA, 919 bp, Oryza sativa
  Clone ID: PAT_MRT4530_93960C.1
cacgcgatcgcttcgatttctcctctaacttcccgcgacaaagctctagtttctttctcgatcagaccacgtacgacaatggaaaaggacaaggggctcgtctccaacctcatgcacggcgtcgccggcggcggccatgcctatccgtaccctcctcagcagggctactaccctccgccgcccaccgcatatcctcctccggctggctatgctgcgccataccagggttatggaggtagccatggtggaggagggcacatggctccgatgcttggagcgggtgcagccgtcgccgccgcggcgtacggtgcacacaagctttcttcccatggcggccatggaggctacggttacggttacggcggtcaccatggcggtggcggcttctttggcggcgatcaccatggccacggcggccatcacggcgaatactatggaggccatcacggacacgacgaccaccatggcggcttctatggcggtcatcacggacacgacggccaccacggcggcttctatggcggtcaccacggcggtcaccatggtggccaccattaatactgctctcagcttctcaccatgcctgctcaataatgatactcaaggcagtcctgccgttggcatgtctggaagcttaccagcggagaggcatcggtcaggtgtggcggaggccatgtgccgcctggcctctggtgttcggatggtggttttggattgggagatataccacggcggtagggttgtgagggttccaagcgaaagcttagcccaatgtttcattgggccaacagtggctactgtttcgggcgtgtggaagaagctgcttcgctctgatgaggagagcacgctgatggtgctgactcaaaggatgaaagagatggtggcaagactaaaaccgacgagaacaggagttggttga

SEQ ID NO: 95803 - DNA, 127 bp, Oryza sativa
  Clone ID: PAT_MRT4530_93961C.1
atggcaatattcatggtgacgacgacggcaagagtacagcggcggcatgttggcataaggagccacattttcacatgtggttcagctggccgcctggaaaattactctctttcgcagactcctactg

SEQ ID NO: 95804 - DNA, 667 bp, Oryza sativa
  Clone ID: PAT_MRT4530_93962C.1
cccacgcgtccgcttcgatttctcctctaacttcccgcgacaaagctctagtttctttctcgatcagaccacgtacgacaatggaaaaggacaaggggctcgtctccaacctcatgcacggcgtcgccggcggcggccatgcctatccgtaccctcctcagcagggctactaccctccgccgcccaccgcatatcctcctccggctggctatgctgcgccataccagggtatgtactcgatcgtcaactgattctagctttctgttcgattctgtgctgcagatcttgttctgttcttacgattcatctttcaaaagagattctgttcgatcgtcgtgacgaattcatcgccaagatttcatggtggttgttgttttttttttcaggttatggaggtagccatggtggaggagggcacatggctccgatgcttggagcgggtgcagccgtcgccgccgcggcgtacggtgcacacaagctttcttcccatggcggccatggaggctacggttacggttacggcggtcaccatggcggtggcggcttctttggcggcgatcaccatggccacggcggccatcacggcgaatactatggaggccatcacggacacgacgaccaccatggcggcttctatggcggtcatcacggacacgacggccaccac

SEQ ID NO: 95805 - DNA, 429 bp, Oryza sativa
  Clone ID: PAT_MRT4530_93963C.1
atggcaaacacaagtattgtttatcaacaggctgcaacttcagtgatggtttctcatggagagcagctatgccggaaacccaacgacgcccagcggaatctggagcgcggcatcctggtgaccatcttcagctccgccgttctaatggactacttcgtcgacgggcctccatggacggaagggtccaacggcggcctggtcttcaccgccacgctgctgctcgcgttcgcgaccttcatctgcggcagcgccctcatgctggtcggcctcgccgggcgcctcttctccggcggccgccgcgtcgccgtcgtctccatgtgcctcgtcgtagctctatccgcgcaaaccttgcttggtctgctcatcagcgcgttcccgtacgtgcaagacctcaccagtctttgccggttgtgcatacctgagcgttga

SEQ ID NO: 95806 - DNA, 1440 bp, Oryza sativa
  Clone ID: PAT_MRT4530_93964C.1
ttagagtgtttcgaatgaaaacctgttattgaagcaattgttgtgttcaccagaagcaattcctatattcagctttgcaacaaacttagtgttatctctgggccttcgtatttcagcctggacagtcactttatcctgcgtgggcattgcagccgccattttatcaagaaatatcgaagtaagctgagacagagagtagagaacaatgtcatcaacactacagatgatatcaccagcctcaatgctgctacaattttctggtaacacttctgatatcttctctaccacaattccagaaccagaagacagctcaggatacatgtagcatattttttccaaattgcatatttccaacttgtgaatagcttgtccccttatgcaaagagatggttgtttgagtgtcctgaaattcttgaagtgttccaagcatctcaccgcaatctcaataggcaagaatggaacagtatccttgtcgtaaaaagtgatgccgagaatcctcctttccaaatccatgacaaggcccccaatgaaaaccttactaacaggacaagtgcagaccaaaagctcatcgcagtccaattcgctacgttcacgggtcatctccccacatctcactagtaaagtctttgacttaaagttacgagctacagctatcacaggccgacacagcatggaataacagacaggaacgtcatgaagtttcaccaaaggaagatcaaattgtggctcaatggtgacaacagctatattgtactgcagactgcacattgctaagaacccctcagtgattgttttgttgtgcagaagtacttcaatcttaacatcaccctcttgataagcatcatagtcattgtcacatttcctaaccagagtagcagaggtgagtatccaagttgcagaacccacatgatcaaccattgtccctgagcaagtaaatagaacctttccatcaacagaagagataagggacacgatggatttggatatgcttaaggccacctcttttgcactcaggccttcctctgtgaaatcctcttcatcactagagccatccttgtttattgcccccttcaaatcgctagcatcatatttgtcgacatccgcttcagaatcactaggatcatcaccgaacaataaactctccacatacaaagcagcatcttctgcacttctcttcttcttgttcggcataatatctgcaatctcacgtgtcattagggctgtcgacgagttgagctcgagcgagctcgtctgcctaggctcgagctcaatacaagctcgagccgagcctataaaatgttcaagcttttcaacaggcttggctcgagctcgactaccgagcttgatttttaagtaaaacaatatatatttcaaagataatcggccaatggctatggctcgagaaacgcacttcctcctcttcctccccttactcctcat

SEQ ID NO: 95807 - DNA, 652 bp, Oryza sativa
  Clone ID: PAT_MRT4530_93965C.1
cgtggacgtgctcgtgcagagcatatatcccctcagccccaagtgaaaggtcgagaaggttccacggcgaaaacgaagggtacgtttcgtttcgtagggtgacgtaatcgcaacagtagcgagtagtaggaatgtaggggtagcactgcacttgtctttctttccatttttttatagtttcggacatcttgtcgccgccctgcaagttgccaaaaaaagcagccaagccccactgccacaggcgacggaaggttcaagaagtcgagaagcttctcccgcgggggaagcttctagaggtgtccagtaagacagcacagtagctgcgggtgttcaagaagctgggaagcttctagatgtcctctaggacggtggcttcgaatgttcttcttctggaatttgcacctagtatcagctaattatgtgcgctgtattttgcccatgctactgccatatgcaactggtgcctcttatcccccaacagctactgctgcccttttaaaatttgaaagttacggagtaatttcagctgatttttaagtttcttcattagtagtttactttctgtattggttgtcaaatcttaaataaagttctacttataaaaaaaaaaaaaaaaaaaaaaaaaaaaaaaaaaaaaaaaaaaaaaaaaaaa

SEQ ID NO: 95808 - DNA, 1230 bp, Oryza sativa
  Clone ID: PAT_MRT4530_93966C.1
atgtcgcggtaccaggacgacccggacgccgcggcggagccgccgccggaggacccgggctccggtttcctcgtggtggaggacgaggtggccgtcgcgcgggcgacgcggtggtggggcttatgggcggacaggcaggtgtacggcctcccgttcccgcagagccggcagctcgaggtggagtacaccgccagcatcggcgccggcaggaaccgtctcacctacacgcaccgcgacgacgtcgtgttcgtgcccgtcgtcggccagccgctgtcgtccggccgctactacgccgcccgggccacggggaggcacgccgggaaggtgtcggcgtgctcgagggaggaggacatggtgacgtgctgcggcctctggtccttggtgaacgacgtgccgccgcggccgttcgaccgcggcgacgtctaccagcaggtggaggtgctgcggctgccgccgcgcgggaggggtttcacggcggtggcggtcgcgccggacggcatcccgccgggctacctgaggagggaggcgtggaaggtccacacctcggcgtccacgagctacgacctcgccgacgcggcgcacgggacggactggccgctccgccgccggatgcctgacctcgacagcttcgacgtcggcgtaggtggctcgccgcccgtcgtcgtcggcaggtggtactgcccgttcatgttcatcaacgacggcggcgagcagcggctcaaggatcaggtcaagcggtgcatgttctacgagatgacgctggagcagaggtgggaggagatatacacccgagacaacgcccatcgaggcaggaggagtaccagcagcaaggacaatgaggttgaggtgagcgcgacggtgcgccggtcgacggcgctgctgggcggcaccgacgcggtgcgaggaggcgggcctcagatggtcgacggggtgatgtggttccgaccggcggcgccgccgacgaactctggcacggcaggtggagttgggctggacatggtggtgtgggagaagatgaagtgggagctggagagaggagggtgggttgccggtaatggcgacgtggagagtatcgagaggggggagaggcgtgaggcgaggccgggtcagtgggacaagtttgggtgctacctgctgcttgagagcttcgtgctgaggaggatggacggcagcgttgcgctcacctgtggtttcaggcacaccggcaagattagaaccaaatgggtatga

SEQ ID NO: 95809 - DNA, 492 bp, Oryza sativa
  Clone ID: PAT_MRT4530_93967C.1
ttttggtttttttttttttttttttttttttttttttttttttttttgtttttttttttttttttttttttttttttaaggggccctttggaaagcaaaaaaaaggcccaaattcaaactaattcggccctccggaccccaaaaatggggggggatttcgaaaaagaaacaaaccgtctaagttaacccaagtccgggggaggacccggacccctaccaggggggggcccccccggagcgcttttccccctcggcggggacccgggcccccccgccaaggccccctggcccgggggggggccccgggggggccccccaaccaaggggaacggggggctcggggggcccctctccatgttggggcgggaaaaagcccccccggggcacattcttgggccgggccggaagggcaagaaccacaggagccccccccgggacatccccgggcccccgggaaacctctccggccaggacccccgggggggggggccc

SEQ ID NO: 95810 - DNA, 406 bp, Oryza sativa
  Clone ID: PAT_MRT4530_93968C.1
atattgggtttgtggttaaatttattatttttatttttattatttattattttaatatttttcttttttttttattggggggaaaaaatttgggttgagaaaaaaaaaaaataaaaatattgtttttgacgtttggcccaaaaattttattaccatgggtatttgaatataataagccggggggtattattaaaaataccattcttttaaactaattatgttacattcttttgtccaaacatacccccctgttgttgacacaaacaaggtgaaaaaaaaaaacttggtcaacaaactgggaaaggggaaaccaattcaggggggcccgattttaattttaaaagtttcaaaaacagaaataaataaaggggtttttttttaaaccctttgggggacccctttgttt

SEQ ID NO: 95811 - DNA, 246 bp, Oryza sativa
  Clone ID: PAT_MRT4530_93969C.1
ctgccccgccgtcgccgtcgcgccgccctcgcgccgccgccccgccgccttcgtgccgccgcgccatgcgtcgtgcgccgtcccgagggagccgcggatccgggtgaaggccaagacccgcaagaccttgagcaaggcaagtcatcactattccttgaacatgttgatcccaattgcgaaattattttgtttataaataaaattgcatgcaatgatgaacatcctacttgtgattatgccatgcct

SEQ ID NO: 95812 - DNA, 2051 bp, Oryza sativa
  Clone ID: PAT_MRT4530_9396C.1
gtggagtatctatcttcccaccttggcgtaaacgaaaagaaaatctgcagtctgtgtcgtctcctccggtccttgcgcgcaagaccgagtcgcggctgccgatctccatctgccgatcgagcagagcatagcaggggatcctgggaaatggctgacggtgaggacatccagcctcttgtctgtgacaatggcactggaatggtcaaggctggtttcgctggggatgatgcaccaagggccgtgttccctagtattgttggccgtcctcgccacaccggtgttatggtaggaatggggcagaaggatgcctatgttggtgatgaggcacagtccaagagaggtatcctcacgctcaagtaccccatcgagcacggtatcgtgagcaactgggatgacatggagaaaatctggcatcacactttctacaatgagcttcgtgtggcgcccgaggagcaccctgtgttgctcactgaagctcctctgaaccctaaagccaacagagagaagatgacccagattatgtttgagactttcaatgtccctgcaatgtacgtcgctatccaggccgtgctttccctctatgccagtggccgtactactggtattgttcttgattctggtgatggtgtcagccacacagtgcccatttatgaaggatatgcgcttcctcatgccattctccgtttggatctggctggtcgtgacctcacagactcccttatgaagattctgactgagaggggttactccttcacaacctccgctgagcgggaaattgtaagggacatcaaggagaaacttgcgtatgttgcccttgattatgagcaagagttggaaaccgccaagaacagctcctcagttgaaaagagttatgagctacctgatggtcaagtaatcacaattggtgcagagaggttcaggtgccccgaggtcctcttccagccatccatgatcggtatggaggctgctggtattcacgagaccacctacaactccatcatgaagtgcgacgtggatatcaggaaggacctttatggcaacattgtgctcagtggtggtacaaccatgttcccaggcattgctgatcgtatgagcaaggagatcactgcccttgccccgagcagcatgaagattaaggtcgttgctccacctgagcgcaagtacagcgtctggatcggagggtcgatcctagcctcactcagcactttccaacagatgtggatatcaaaggacgagtacgacgaatctggcccagcaattgtccacaggaaatgcttctgattttctcaagtgctctgctcttgtcatctgtagtatcgagttatgtttgattcgtttttctagcgatgtattggagatttgcaggctatgtttgttttctttttggagacgacttctctatgtgttcgatcagtgtaagaatgtcctatgtttgtgtcatctcagattgtttgtttgagttcacttgtcaaacttggttcgtttgattggtcagaactgtctgtatgagcttattgttctatacattgctccaagggtataattatgttaaattttggatcttgggacgcaggtgttcgggccggtgttggcgtccgggccaacggcctcttctccataccgtacgcgctgctcgcgaggtacgacgtcacgccgcccatctgcatcaggttcctcggccgggtgcagaacgacaagctggacgctttcttggcgagtaaggctaaagctggatgatcctgaattcttgatcgaggaagaagtgggcacaattgtttattccgttctttttcttccaacacctgtagattatttagtgatagaactgatcttttcatgtagagcgaaatggactttttgtgcttttcaaacagttgagatttcaatccaacgtcatgctaagtttgtggttagtggtaggaccaaaaaaaaaatgggagatgtacccactacctaggatcgtctattgtaatcgtacttgtgcgagtcatgttatcatttatcttgtacattcatctccaagataagtgatctggttctttgatcgtttg

SEQ ID NO: 95813 - DNA, 1036 bp, Oryza sativa
  Clone ID: PAT_MRT4530_93970C.1
atggagcaggtctgccgctgttacaatgagtccatcaaggagcaggagcaacagcaggagcagaagcagaagcagaagcgggagcaagagcaagagcaagagcaagagcaggagtcgcagcaggagcaggagccgaagccgaagccctcggcgagaaaggctgcgtattgttctgccaatcccccagacttgacccacctcaacccccaagggatcttatatgcaagaattgcaggaggcctggtcactttgctagggattgccaatctactgctacatgcaacagatgcaatcttccaggacacttcgcagcagaatgcacttctgaaactgtttgttggaactgcaagcagtctggccacattgctaccgaatgcaagaatgacgccctgtgtcacacctgcagcaagacaggtcatctggcacgtgattgcccaagttcaggatctacctgggcacatagctcgggagtgcacgaacgagcctgtttgcaacctgtgcaatgtctctgggcatcttgctcggaactgtcaaaaaacgaccatttcttcagagatacagggcggccctttccgtgacattacctgccgcttgtgtggcaagccagggcacatcagccgcaactgcatgacaaccatgatctgtggcacctgcggtgggaggggtcatatgtcatatgagtgcccatctgcaaggatgtttgatcgtgggctccgcaggttctgatgacagccatccatacgcactgctggttctgatgctcggaatttcgcattgttccattgattctgcttagatagcttgcttgactataccgaaacggttcttttataccttttgctctctgggagttgaggaatgattctgtaggatgtatttgggtgaaacttttgcttgtgttaatcagggtgttgtagcctttcgtgggggaacaaatgatgtatcttcccaagagagacatccagaaaaactgctttggtagaccaggccatatcaagtattgtgcatgactgtttgagctaaaaaaaaaaaaaaa

SEQ ID NO: 95814 - DNA, 484 bp, Oryza sativa
  Clone ID: PAT_MRT4530_93971C.1
aaacaccaaaaaggaaccccccccccccattttattttttttttttaccattaccccaaacatggggaagccgcccccaaacatgaaccgggtagctagacccaccaaacctggaaaattaataaaccaagggcccaattaataaataaacccccaaggaaaaaataaatttaaccccgcccccccccaaacatggggggggcaaaggaccccccccggtcctgaaggttcccccccccgaaacccctaagccccccccccaccccgggaatcggcggggggtccccccccggggcccgggggggggaaaacatcccggaaaccggggccccctcctccgggacccccccggcccccaaaaccctaaggggggtgccccggccctgttttggcccggggggaagcccccgggaaaacggttccaaaaacccccgggggggttgtttgggggaatccatgcggcccccggggggggccccccccc

SEQ ID NO: 95815 - DNA, 266 bp, Oryza sativa
  Clone ID: PAT_MRT4530_93972C.1
acttacggactagttgtggcactggcgcttctatttgcgaacccgtttgtttaatgctaaataagaaaacgtgtccttgagattagatactttcggctgtgtttagtaaattggtattagcttccgcaatcccaattatatcaatactttactcctaatgtattactccttgagttttctatgtatgggtgcggacaagtcccctcccctggatttgctgcatagaggatgatcaatttagagggtttgtccgccgttcttgcttt

SEQ ID NO: 95816 - DNA, 531 bp, Oryza sativa
  Clone ID: PAT_MRT4530_93973C.1
gggaacaaaacagggggagcattttattaggggtttataaacttaaaacaaaaccgccccaaaggttcacaaacttgggggattatttttttgatacccctatactatttctttaggacatcactttaagggctcgttctccgactcatttgaaaaccccggggagggctggtgttgatatctaggagggaggggcccgggcttttttcccctattatttttaagggttggggcttgccccctcgataggggggaagctttaaggatcacatcccctgggggggggcggaataattgggtttttccctgcagggggggtaccaccggagattgcattggccttgaaggaaaaggatgggcacccttcatgctcgggttttttaaaaaacgagagggtgtggaaagaaacacatttgacccgggcgtaaaacgcccttgaatacacgcctttctcgggtgattaacgacctgaactcgagcaggcccttgaacgaaaaacaccaggcttggggcgttgaaggttccaaaacg

SEQ ID NO: 95817 - DNA, 573 bp, Oryza sativa
  Clone ID: PAT_MRT4530_93974C.1
atggcggcggcggcgaccgtgttcgtcggagccgcgtccggcgccagctacaccgtcggcgagcccggcggcgggtgggacacgcagaccaacctcaccgcctgggcttccaccgtcgacctccgccgtggcgaccagctcgtgttcaggtacgacgcgtcggcgtacgacgtcgtggaggtgacccgcgccgggtacctctcctgctcggcggcgagccccgtctccgccgcgctccggaccggcaacgacgtcgtccggctcgacagcgccgccgggtggcgctacttcatctacggcgtggaggggcgctgcgccgccgggatgaagctgcaggtcagggtcacggacgccggcgccgggtgcaacaacacgttgccgtcgccgtctctggcgccagcgccgcccggagcgccgtcgccgggcatcaccatctgctccggcggcccgccgacggtcatcatgacacccggcgttatctcgtacggcgcagcgtcgaggtcttcagcaaatctcagctcctctctacttgtcgccatggtgtcgctgctgcttggcatcatcgttgtctag

SEQ ID NO: 95818 - DNA, 2477 bp, Oryza sativa
  Clone ID: PAT_MRT4530_93975C.1
ttacaaggattctcgaattgatccgaaaaaactagatgaggtacatgttggatttgagcttccagctacaattgcttcaagtagcctcggcatcgggggtatgtcaatttcaactagaccctcgagaatatgaaccacttcatccattgttggtcgattaaactcattatcctgaatgcaccaacacgcaaccttgcaagctgtttcggcctcttttatgttgatgtcaccatgtaatctataatcaaccaaaccacatatatctccatcaagaagcttacggaccacaagcactggaaaataatcatcatggtcaccaacacaaggagatgaggtatatgagttccttcttcctgatattatttctagcaagaccatcccatagctataaacatcgacttttggtgttataggaacaccactaatccattcaggtgcaaggtaacctgcagttcctctcaccgttgtcaaaactcggctaaaatcccttcccaaaagctttgccataccaaaatcagcaatttttggaatgaataaatcatctagaaggatgttttctggtttaatatcacaatgtatgatacaatcttgacagctttcgtgtaagtaagacaatcctctagcaattccaatggctatttgatacctagtattccaggatattgtagtattgctctgaaataattggagatcgagagaacgatttgacatgtgctcataaacaagcaatcttctgccaccctcacaacagaagccgatcaatttaactaaattgatgtgttgaatggttccaattgagctcacttcagccctaaactgcttatctccttgtggaatttggcatgcatggtcaagccttttcactgctattgttgtggaatcacttagagaccccctaaatacagaaccaaagctacctcctccaagtctctccatgaaatttgtagttgcacgttgcaaatcaatgtattcaaatgaaataattccattgcaaaactgggaatctttcaatctgtcacctgagaacttagttttactccgtctcaccagtagtaggattagtggtagcaaacataataaagcaaaacttgcaaaaatagcaagtccaataaccattcctctactatcaacgcctgcactataaaattcttttgtagctagccgtaggtaaagagcttctccatccgtattgctattttcactacattgatcttttcttatgttaagcaattcattgtgccaaatagagcatccaccattgatgaatgaataagcagtgcaagagcaattagttaagcaaacttgcatgcactcacttgaactttttacactttccacattatgggcatttgggggcaatctaacgcatggcatagaatagaacatatcagttgaatgtgttgtggttttgttgttaatgcagtctattggagtatttcttgagcatccatctgttcgatcttccagttcccaatcctcgagtgatgttacggtgaagccctttatacagttgcaatgtggaagctcattatcgatgcagactgtgaaaggcccacaaattgcatagacatcacacggagctttaggttgggcatagatcagtgtccaatcttttgagtcctgaagccaaaggaacatcttttcctgacctccgatgtctaatatctgacgactaacagtcctttcatctagcaaatcatatctaaagtacttctcttgatcattatcaacaaatgatgaattaaaaatagtatggcttttcatctccaggattgaggagaagtaatcgccgttccatgcaccggtagaccaatacggtgtggaggaattcaatggcaaaagcaagtactgatcaacaccagaagggtctaactctttgcaataggaaccggtagctgggtcaattgagtttttccaagaaataatctgacggttaaggcctgtgaccttgtcccatccaagctttgccccaggaaaaaatgtatctgtggggtagtcaaagctctgccagaaaacttctaatgagtttgacaagtttgttaggatgagatttccactattcaatagcgtagcaacggtgttgttggcagtgatattagcttgtgtagaccaaacgatggactttgttgactggtttaagatggcaagatttccatcatggaagattgttagttccactgatgtgggatcatcaattggcttatccctatttgcaacccatgcaggatttagcttgggaacctggttgaaccaaattcctaagtaccacttgctagttttctgagatgcttttctttgtgtctcaaagaagccaagtgcgtacctgcgattttctgagacaagcttatcgtttttggccaacgccgtgccaattgagatggtgtcgatcgtggcagaacttgctgggatgcttaaggcgaatagtagtactacaaaaatgagaagagccatagcctgcagcccggggatccactagt

SEQ ID NO: 95819 - DNA, 858 bp, Oryza sativa
  Clone ID: PAT_MRT4530_93976C.1
atggcgacggggaggaggttcctgcagttccagtcgctcctcgcgcagcaagccctacgcctccgcgccgccccgagacctaaaccccaaccaaaccccccccaccgattcctccacgccccatccagtcccgcggccgcctcgccctcccgcctccccctatggcgcagcactggctcgctcctgccggtgagcgcggcggcggccgcggcggcggcggcagccgcccgggccgccgcggcgcggtggctgatggccgcgcgcgaggcgggctcgctcgagctcttctcgctgcagcggcgcaggacgaagtggttgccgtccgccgatggggcagtgttgatgctcgtgggcgccaatgtgggcgtgttcatgctatggcacctggctgatcctagcttcatgaggaggcattttatgatttctcttgataacttcaaaagcgggaggttacacacgttgctcacgaatgccttcagccacgcagagagtggtcacctcatcagcaatatgatcggtctctacttcttcggatcaagtatttccaacatgtttggtcctgcttttctactgaagttgtacgtagcaggagcacttgctggatctgcattcttcttgctagagaaagccttcctagctccacgaagacagttttatggcggatgggacaattcaagaactcctgcgcttggtgcaagtgctgctgctaatgcaattatccttcttgacatctttttgtatccaaagaaactagtctatctttacttcttcattcctattccagctgcaattatgggggctattttgatcggtgctgatttgctgagggtgaagaatgtactagcctttcctggctag

SEQ ID NO: 95820 - DNA, 378 bp, Oryza sativa
  Clone ID: PAT_MRT4530_93977C.1
gggggaaaagggaaaaagcaattatgcttacctccaaaccattttgggcccttttttaaaaggggacccccggggggggggagcccacccagtaggggtggaacccaaataaaaatatgggggccaaagccttggggcaaaaaaaaaaggggggggggccccggaaaaaacccgggaaaagggtgggggtgttgaaaggggcaaaccccgggggggagcaaagggggcctgtacccccgggaggggtctgattgacccccccagggttgggccggacaaaatacaaaaaggcccccaggggtttggaatttcccccgtattcgaaaaaggcccacagggtcaggtattcccctttttccttttaggggaaaataaggg

SEQ ID NO: 95821 - DNA, 291 bp, Oryza sativa
  Clone ID: PAT_MRT4530_93978C.1
atgggggaggtggcgcgggtgtgggagatcggcttggggtgggggggggggggcgacgacgactcaggcgactccggatcggtggcggcgaagccgtcggcacacgcggaggcggtcgacaagtcggagattgggggcggcgcggaggacaccggcgaggcagttcttagatcagctttgcattccacttggttaatctgcaagactacaagagggtttaatctgcagtgtaaatgtttctcatctgaaaatcgggtgattgtttacaacaaccgtgatgagttttcgtag

SEQ ID NO: 95822 - DNA, 329 bp, Oryza sativa
  Clone ID: PAT_MRT4530_93979C.1
gttttataatacacaccctattaagccagccatggaggagcatggcggctagcgcggcggatagcaccgctgatgatggacgtagcttctggcgcggccgtcgcggcgaccggggatggcgcccatgctggcgccgtggccctcgttagaaggaggagaagtggttgcccgtaacaaaactaccgacgactcgctaaggaagggagggtctccaggatcgaggagatctaccttcactccctaccagcaaaggagcaccagatcgccgataccttcgcaccgacgctcaaggacgaggcgattacgatcacacctgctcagaaggagac

SEQ ID NO: 95823 - DNA, 275 bp, Oryza sativa
  Clone ID: PAT_MRT4530_9397C.1
cgcccagcgtccgggacacctgggcaaccggaactggtgcacgctgcagagcatcctgctcatctgggcgtgccaggtcgtgctcatgggcttcgtccagagctaccgccttggcgctgggcgcctgggcctaggcgctcaccaggctgatcaccgccgaccaggactactggcatggctggacgatgttggagatcctgcgatatatgccggagcacaactggtcctgatacgaggaggccctcaaagtctacctggttctagccaagatgatg

SEQ ID NO: 95824 - DNA, 782 bp, Oryza sativa
  Clone ID: PAT_MRT4530_93980C.1
ccaacatcagaacaccacaatgttcaaggtccagaattatattgacggaaagttccaagacgcgttgagcggaaagtggctcgataattatgagcccgcgactggcaaggtctattcacacgttgcggattctgatgagacagatctgcaactcgcttatcaagcggctaagaaggcctttgctacttggtcgaaattaaccaaggaaacacgagcatcttatttaaacaaaatcgcagacgggatcgagaagagatttgacgaatttgctgccgccgaagccaaggatacaggaaagccgttgacattggctaaaaatatggacatttcaagagcgatcgcgaactttagattctttgctggtgccgtgttgcaccacgaagaaatgtcaactgaaatggacggcgtggctatcaattacaccgtcagacagccagttggcgtagttggtctcatctcgccgtggaatcttcctctttatttgttgtcttggaaggtcgctcctgctatttcagtcggcaacaccgtcatatgcaagcctagcgagatgacatctgtcacggcctggttgatgtgccaagtcatgcaagaagtcggtctgccgcaaggtgtcgttaacgtagtcaacggctacggtcacaaagctggtcaggctatggtcgtgcacgaagacattcgtttgatgtcattcactggtggcacccaagacggccgagtcgatcatcaagagcagagctcctttcttacaaaagttgtcggtcgaattggggggcaagaacccg

SEQ ID NO: 95825 - DNA, 399 bp, Oryza sativa
  Clone ID: PAT_MRT4530_93981C.1
atggaggaggaggaagaggaagaggaagcagaaggatggcaagagaaggaggttgtagtcgtgatgaaggacatatctggagctcatcgagaaatcagactgtgtcttcttgatgagtacgagtcggaggagctaggcacctctcattgtgccaaccccgtcgagaatctagaggccctttgtctagtcaccctaccagcatcgatgaccaaatcggcgataaaagctatggcggaggatgatctgcgggagaagatggggagctcatcgtggaccaccggagccccttgtcaccaacctccaattgtcactgcctcatcccgcggaaaggctcaccggtcgctgctccttatcccatcggcattctttgaagcccgtcaaggggctgcctgcaactaa

SEQ ID NO: 95826 - DNA, 748 bp, Oryza sativa
  unsure (1)..(748): unsure at all n locations
  Clone ID: PAT_MRT4530_93982C.1
gccaaaagatgccagcccgagaggcagaaatcactatagacacttctntagtcccaccaattctgtcccaaattgggaatatcctgtgggaattgacagggaccctcactctggatggcaaaagaggacgcctgattaggacttcgacaggaaaattaaattcgggaggaaatgtcgaccacatattggaatctttggccacacactcaccttttcttgggttattcggccggaatctaaaggcttacccgacccaacccaacccttcgaggttaacggagtcgatcctctgatgacccccaaaaaagggaaacccattctgccaaattttattggtttttctttccccgtttgcttccgggcatcctctgcntgtctctcttttcgtcattnaaagcgtttgccttctctttcccngggggnnngtctctgcccaattggcnggtttggggntnccccttcccccttttgcttccaaaggaannggccgggtaggnccccccggtttcccttttccntnaaaaanttttgcacacctcccccgtccccanttttttcgggccccattttntttttncccctncccngcccccnnntntaagggaaantttttttntcccaagggttaaccccggtttaaagcccnccctttcgaaangaaataccngntnccggcccccggnccggtctnncccnttgttcctacgaaacccggggggcccntntgggggnttccgnancccggatn

SEQ ID NO: 95827 - DNA, 403 bp, Oryza sativa
  Clone ID: PAT_MRT4530_93983C.1
ggtggacaggttgacgatggtggcgcagctttcgggcaagatattccacagaaaaaactatactgcagatccttagtctcaatccacacaagcataaggcttgttccgctatatttgcctgctgatctctttttctttgccatctgacattagcgatcaaaccgcatgtggttgcagcgggaccgttttgtcgtcaatatcaccataaccagcatagcacagcacacttcgtggtgttacaactcctgcaaactttgctcaagaacctctaggccatttgatttcacctacagatacacccattgttcctacataggcatcgcagtaccaaggtacaaggttgttctaaccgctgctgacagcactggcgaggctacatttattctctttggaaaaacagcgc

SEQ ID NO: 95828 - DNA, 154 bp, Oryza sativa
  Clone ID: PAT_MRT4530_93984C.1
cggacgcgtgggtttgtttgcgtaagcaaaagcggaggatcctgcctactgattggccgatgggatttgtggtggatcgggggatgcactgaactccggggcgtagtgtgtatcgtgtaggatgcggatccggtccttatcgctttgcggtgat

SEQ ID NO: 95829 - DNA, 144 bp, Oryza sativa
  Clone ID: PAT_MRT4530_93985C.1
atgggtgacgcgattcgtcgaccagcaacggcgacgacgcagacctcccaagtcccgaacccctacgaagagagaccaccaggcgttggattgaaccgtcgaagaagacgagaagatctgcaggattggggagaagctaactag

SEQ ID NO: 95830 - DNA, 411 bp, Oryza sativa
  Clone ID: PAT_MRT4530_93986C.1
atggtggaggcagtcgaagaagtccatggcagcggcagatactggtcccccacggcgccgacaacggagcgtggtaggacagagaagcccagggccacatctgcttatccctgctcgtgctacggatggaggaactggaacggcgttggcggtgtcctggggaggtggtggtggagatgttgtgcagcctcctcaccgttgcctccgctcgagcttcatctccgcgtgagctatgcagagccggagtatgcgaggtggatgctttcccgctctccaagctccgtcgtccatcgtccaccaggggcagccacagctggcgagcacctcgcctccgcgggcatagctctctcctccaagatgttagccatgccttgcctcgctggggaaaagaggaagagggacggtggctga

SEQ ID NO: 95831 - DNA, 1941 bp, Oryza sativa
  Clone ID: PAT_MRT4530_93987C.1
atggagatgatgaggcagaccatcctgaacttgaaccgggccatctcgctgccagccggtgctgctcttcatgtccaagtgagccacatcatctacccagtgaccaatgaggtattgcaccaggtttatgacatctatggagcggaggaattgcatatactggtggccgacgcatggcgagtggaggctcttgtttggttccgggcgagaggtggtgcggagaaggctcggggggccacccatggccaccacatctatgatggagggtgcctactcgaggctcagcatgtgcagccttgttccaaggatggtgcagtgctgacacccaccaagtgttcgatgctggtaccaagctgtgccatcaccaagtccgatgccgagagcactcctaccacattggaacatgtgttcccggccaccatgagtcaatctatgccctcagccgcattagcagcagcggcgccaccggtttccctcaccgcgactaaggaggatgaggccgacatggacaaatctgagatgaaaccagaggagacattccaagagttgtgtgccaagatgattgccatgctcaacaacatgctcgtgacatgctgcgacatcaaggttgagtcaaccgcaagcgttgatatcaccagagtggtggcagttacgagcaccaacactgaattagttcccaacacatggagttgccttgaccggagctcagaatacacagctagctcaccaccagtaccaccttggagagcagtaattccatggaaccaagctgagatgaccttcggttctcggcccttaccatggcctgatccacagctaagtcaaggcagtgaaggcgtggagcaggggcaattgctacggaaacaaggcaagaagaatcctcggtcagcactttttgaagcaggagataaaactgatgttggagcatttttctcactcggtaggacatcgagtaaggttcaatggctgtttttgtttggaccttgggatagtttgcaaaatgttcaatggttgacttatatgggaaaattgattgccaagagcaactttgatgtgaggggatgctcagtaaatcttcgggagcttcacatgcaatcttatttggctgaaacacttcatctgcaatatattctgttggtgggaataatttgggatccaggagaatttggtttgcaaggacttagtgttcagaggaaatcaaatgcagttcttgatttatttgtcattatggagtattggttcatgcagcagcttatgttgaccatgcatactgaaaagcactggcaatttatttttcatccgcatcacttggatggtttacatgttaggaaggacatgcagcaaccacaactacgaccactgcaaattgtcttcccagttagtttgagggctgacctggaaccattgctgcagatcatggcttcaatgacaaagctaattaaactacgctcttggcctgctcttggaagatggggagatcaagaactaaatcaagttcatgatttgtgcaagtgctgtcaagatcagagcctattccagttcactttctccatagctactgcttttcatgaggcccaagttcaagaatatgctatgtcaaggccatgggatcctgggggaattgcatcagttgggaaactgaactgcatcagctcagaaggctcaatgacatcagcaaatatggataagcaaatgtgcattgttaaaatggttatgcatctcaattttattggggttatgcttcaagttaccatgggatccagctacatctcaatgctgatttctggagcaagagattggacagtgaaggggctcagcaagtacgtaaactcatggttgtatttcagctcaagcacaagagcacagtggtatggagcttcatatttcaccaaaatctggacaaattgctacttaaactacatgaaggcaagaatattctga

SEQ ID NO: 95832 - DNA, 6641 bp, Oryza sativa
  Clone ID: PAT_MRT4530_93988C.1
ggtgttttttttttttttttaaataaattgccatttctttcttctgcaaagtaaatgactaaataaattgccatttctttcttttgcaatgtaaatgattgttcgttacacttaactctgtgtgatgttggcatgtaatataggtaacctaaaacataagaaaaataactatatgtacatgacaaacaaaaatggaacttccgaataagggtagaaaaacaatgaagaaaacgaaacttgttttccttccctatatatatacggttgtctcgaacactgcacctatcctgttgtatcaagtttggtctgtctcggtcaatcaaagaacctgtcaaactcctgctgtcaccatgatccaaagcggctagattagttcgttgagatggtaagtcttcgcgttgaaaatctgatatcccctctaactgcattagctatcaaactcttgctgttctcatgatccgaagtggcttgattagtgcatcaagattatcagtctgcacacttaaatcccccgagtccaattccatcagcggtatatcatctgacgcatctaaagctgtaacatcttcatccgcatcatcatccaagctgataaagcccaaatccccatcagtgaaaacacgttgaggtttctctctctcgtcttcgtctaaagaaactttccttgtctcatcttgatggtcaatgctggcatcaaaataccggccccaactactgttttgcaagaaatctggtcttctgctcttggatttgactttgctcttagggtgatgaagtttgcatctagatccttgtgggcactctccagttgcctcgaagacaggacatacatagctgtgctttttatgacactcgtcaccatatgcacaatatccttttaagaagtcttcacaaacaggagcattcaagttcactttcacatgcctataggggcaggctatgttggtacagagtcctctcagaaaataagaacaatctggcattctttctggaaggaccttgtgagtcagtttgcaactagtattagaacacaatcctttaagaaatttagtacatatagtcactttagctcggtcatgaatataagggcatttgcccctgggttttttgcactcgccaaaccgagtgaagaattggcagtactgttgtttctttgctaggcgtgatctcacagtgtgcaaactccatcgaactttgtcacttgctagcatgcggattacattcttcggatttctaaccagttggttacctttgctaacgcgcacatattcattgcaagtcgatggctttctcaaatcggaagacgattggcggctgtttcttaattgattgccagtgacagattcaaattgatgatctcccttatcatggagagactgccgcttccgtttctcccttttccttctttcaacttcagcgagtgccaatgtagcttccttgttgaccttttgagaacgcttctcaagggatcttgaccatttcaaacttgatccaccaacacttaacacaccagatttccgtagagagaacccatcagttgagacagtataaatcatatctctcttccttgtttgcagcaattttctgacaattcgtatggagctcacattcgacatgtgactgcttctaaaattcttgcagaatatttttcttttccatggaagtatacgtgggaaggcattcatatgactactgcccataaaacctttcctctgtggctgttgcccattgagtgtccacacatgagagaaacgccccacattatttgttgtctgaagagctttttgtggtctgtcctttaccccagggataccactgatagagcatgcaatcattagatctttcttctcttctgaatttgaattctcagcaggtaacgtttctttggtactcagaccatcagaaggggagcaggaactcaaaacaatttgatttttccttttctttaaatagagatcatatgctatgggtgcctgcagagacagaatcttatctgtgggactgttgactaaatcaatagggtgttgcctctgtgcagcaaccagttggtttgatttgggcctaacataaaccactttactaggatccgagggttcagatttttgtgcacttttgatgcttgagttatcaacgcctgactttggctgcccagtgagatcctccttttcagcttcatgaccatgctgtttctgcaaagtttgagacaatggctccaaaagggttgtagggcagctggattttgtgtgaagtggtaaaggaggggtcttgggtctttcaactgagatgttagaatttgctaagtctttcgtatcagctttccttacaaagttcatgcttctccttaccacaggtttattcaacttattttgagtatcgtgacctgtagaagaatgaggatgattaccatttgatggatttctaataagagcattacctttccgtatataagagttttgagctttgtcattcttcttgggtggtaattttgggggtaatcctaaaggctgtgaagcatgcaaagatgaactagaagatgctatgttgccacgatgccaagtcctgtgccttgcattttgatttgctcgagtgggttctcgggatgaactaggcaatgttacttgtttaggagctaccttttggagtgttgagcttgcaaaatttatctgaggagattttactgcagaaggcaccactgtttccagtaatgttttcctgtcgctgtcctttggttctaataacttatctggcaagccaacagtgagcggagtggacttgcatggtgggtgttcctttttagcctctgatacaatggcttcaatccaagaagacaacagatcctgctttgcatttgactcaaccccagcattctcagtattactgtcattggtgtgatctggattaacgcatacctgagaagaaacttgatctgcatccatagcatcagaagattctaaagctgagggaagcttattcaggttatccacaggaatatcatctgtttggtaaccatagtgacctaaaacatttactgaactactagggtgcaaacctgtgagaacaatgccactctgatcctcaccattcatgctgctctctttgggtgccaacaaatgtgaatgaggcaaattgctaccacataacctaatgctgtgatcctgactaaagaaagcatcctcacttccacgctggtccatatcttgtgcaatatcatgatcctgactcactgaagtagcatcatccatactctggtctaaacctagcctacccttactaacagtaaaaccattattcagaaattgcccagacatctccatgctgttgattgatggaggtaaactcagccaattttgaatacctgtactgatgaagcccgcaccattcaggacttctattttgccagggctatcaagtttgcttgttgtctcaacagttaatccttgctgaccttccactactagctcatgtctttcctcaggccgatcatcagtttccgcactactaaaatagatattgctaccaagtgtcaaagctgtagggacagactgctcacggttaccagatacagatgaagtgccccgggaatgtatcaaagaatcattctcagaagaaatatggtctctatgaagatccaaaagttctgctgccttagatgtagtgttccttcccaaaccaatattcaaaataccatcactggtagaatcctccataggatcatataatggcgatgcatatgtactttctacatttctggaagatggaggaacaaacacaggggaatcctcagcatcaagaggatcatctgtttcatttaaagcagttctattgttgagcaaatcttccatctgattatcctcagttgcacaagctaaaccaaactttaaagtagttgcagaattacctctagcacctgaacatctttcatttgacctcgttgggccttcggccacctttctcccaagtgacacacctgtaataacctcttctgtactaggagcttcttcatggtgcataatttcaaaagtagtattttcacatgattctatgggcctgtggctctctttcttctgggtgtcctcactcaagctgaaatccttttcattagaagcattcacatgattcacggaagatgtatttgtttcacttgaacccatgggtattctacactctttaccttggctatccccgcttccactaaaagcattagcttcacttaactccatgggttttctgccctcattcacttgtatgtcctcatttccactagaagtacaagctacaattgattccatgggtactctgtcctctttctcctggatatcctccttttcactaacttctgtgtaattaagacctccacaagagttcaatgacataaaatccttttcactaggatggcttggcatgtcatctccttcgttgggggcatccttactggcaccaaattctgttgtcctatgagttcccacagaatcacctaaaaagccgatgctcttttcacttgaaccagtgagaattataccctcttttttctgagcaccctctacagcagtcatgcaagtatcagatgtactagaacttctggcagaattgtttaaaaggaaagctttctcgtcatttatgccaatcaatttttttccacattccctccttgcatcttcatttccacagacttctgttgtatcacaattagaagcaactccatccatgcaaacagcaatgtttgcatccacatccttaggtactttgctctcttccatgctggaatcatcacacctaggaacttcccgtgcatcagaaactctcacagaattgattgcaactgcgacattcatttcaccaacctccttctgagtatgattgttcgcatctgcaaaagcatcatttacacctgaaccaatagagctcatatcatgctccttcctaggatgctcagtcccacttttctcaagcacttctataggttcaacgactaaagaagcattgctattatcaactggattctttgggcttagaacctcttcctttccaggatgtgcactcccactaccatttggtggatcgggaatttccatagatccattggctgaagcagcattccttccacttggatttgtgaagtcggtgtttttttgcttctgatcatttacagcattaccaaaaccagctgtgtcactaacggcgatcggatcatgtgcagaaataacatccttctcaaaagatgatgtagtgatctcaccctcttctttctcacaagcattagcatcaataccatctctcttttctgagacaaccggggtactgttttgattacctttcccattgatcttcctaacaatcttttttataactatcttcttcactttcttcgcaccagcaccagggcagggagttgagaccaaacttctaatattggaatgcactgcattcttctgaaccttatcaggtttcttgagcatcttcttagcagccacttccttttccttgggctccattggaggcttcacaagcactgaagccaacaccttttcattcttcttgacaggattcttctttgttcctgtattactatcaccatcattaccatcagcactcttccctctacaatccacagaaatcacactggccaactccttcgaagcaggagcaacattgttcgacttgcacggcgagacgtgcacctccttaggcatatgcggcggcggagaagacggttcatacattgcagggttctcctcgattcggtgccacacagacactctagaaggggcaaccttctgtggggctcgcctcgcatacccagcactcgtgccatggggagagccaggcagtgccatctgcgtaggcatctggatcttcctgctaaccttgctatcactgtggattgagaagccctcatggaccatgtaaccaggatgggcattgttcctatctacaaaactatcatccagagcatagtccgggtggggttgctgcctctggcggcggggaggcgggccagaactggaggtgctctcaacgtcggcgtcgtgcacagcgcagcgctgccttttccgaggaccagacggcgatagtcggagctgctgggtggcgccgccgtagcggcgcctctcttcctcagcctcctcccacgggagaagctgttgcagctgcggatggtgatggtggtggtggtgaccaccaccgacgcggcggatctcgtcggcggggaggaagtcgtcgcccccgtggcgatggtagtggtggtgcggggacgggtcgtggtacggcggcggcgagtaggcgtcgggatggccgcggggagggaagccgtagtgaggaggagggggctcgaggcggtgctgcggcaggggaggcggcggcggcgggggcggcgttggcgcgggcagctgctggtggtggtggtggtgatggtgctggacgcgcggtggggggtggtggtggtggtggtggtggtggtggtcagggaggtggtactggtggtgagagtgggactcgtagccgccgccgccgtactcgtacctggagcgcgcagccgcagaagcagcgccgccgctgcctccgcttccgccgggggggaagtggtggtggtcggagtagtggcggcggtggagcgggtggtcgaacgggggaggcggatccat

SEQ ID NO: 95833 - DNA, 1881 bp, Oryza sativa
  Clone ID: PAT_MRT4530_93989C.1
atggaggtcaagagggatcgtaacaatatggtatcggagctgtcggttcatgggattccatgccaggagacaaggtggttgacacacggttgcagttacgacttccagatactgaatccaagcattggaggtagttgcactggaggcgcccgccaggtgtttgatgcaatgccaagctggctgggagctggtgcaggtgctgctcttcatgtccaagtgagccacatcatctacccagtgaccaataaggtattgtaccaggtttatgacatctatggagcggaggaattgcatatactggtggtcgacgcatggcgagtggaggttcttgtttggttccgggcgagaggtgatgcgaagaaggctcggggggccacccatggccgcaacatctatgatggagggtgcctactcgaggctcagcatgcgcagccttgttccaaggatggtgcagtgccgacgcccaccaagtgttcgacgccggtaccaagctgtgccatcaccaagtccgatgccgagagcactcctaccacattggaacatgtgttcccagccaccatgagtcaatctatgccctcagccgcatcagcagcagcggcgccaccggtttccctcaccgcgactaaggaggatgaggccgacatggacaaatctgagattaaaccagaggagacattccaagagttgtgtgccaagatgattgccatgctcaacaacatgctcgtgacatgcgagtcaaccgcgagcgttgatatcaccagagtggtggcagttacaagcaccaacactgaatcagttcccaacacattggaggtcagaaaggaggccaattcaattagcttggttgatactaatgagtcgtgtatggcgacacctaccaagtgtttgacgaaaggcaatgaacaaatgatcaatgatgatgacgatgacatggccaccgaggatttagttgagcacactgaagtgaattccaagttcacattacggcaaacatccttcaacaatccatggtttggccatcaagctatttctgttgtttacttgacttgctatagttgccttgaccggagctcagaatacacagctaggtcaccactagtaccacgttggagagcagtaattccatggaaccaagctgagatgaccttcggttctcggcccttaccacggcctgatccacagctaagtcaaggcagcgaagcgcgtggtggtgaagtttctatggaattggccacctctcaagccaattgcaaaggtgatcgagtggagcaccagccacaaccatggcctaacccacaattgaatgaaagtagcggagacgtggtgtatctcctacaacgatggtcactacctgatctttctcttcgcattggtgtggctattgttcaggagcaggggcagctactacggaaacaagacaagaagaatcctcggtcagcactttttgaagcaggagataaaactgatgttggagcatttctctcactcggtaggacattgagtaaggttcaatggctgtttttgtttcgaccttgggatagtttgcaaactgttgaatggttgacttatatgggaaaattgattgccaagagcaactttgttgtgaggggatgctcagtaaatctttgggaggttcacaagcaatcttatttggctgaaacacttaatctgcaatacattctattggtgggaataatttgggatccaggagaatttggtttgcaaggacttagtgttcagaggaaatcaaatgcagttcttgattcatttgtcattatggagtattggttcatgcagcagcttatgttgaccatgcatactgaaaggcactgggaatttctttttcaccagcatcacttggatggtttacatgttaggtag

SEQ ID NO: 95834 - DNA, 147 bp, Oryza sativa
  Clone ID: PAT_MRT4530_9398C.1
atggagaagagtggccgcctggggcacaggcgtgacgtcgccaggggcgcttcaaggcggaacggcggagcaggagttgtagttagagtcctcgtcgtcgacctcgagttcgtcactaggagttgtagttggaatcatcgtcactag

SEQ ID NO: 95835 - DNA, 474 bp, Oryza sativa
  Clone ID: PAT_MRT4530_93990C.1
atggccgagtggctcatccaacagagtttcttgaacgaattaacccccttgtcctgggatcacctggatgctgctgctagagggacattcttctcaagtacagtcagatgccaaccgattgagaagatgctctcaaatatggggtggagcgaggaacgactccaaactcgtcaatgcggcatgtacactatcaagtggatggaaatgctagcagctcagttggatctccttatgaatagagtggacaacaacgagaaggaatccaagcagggtaccgttaatgctctgggctctcacacgacatctgaggtttatggcaatgccggtcactctgggacggatggtccgaaaacccgtaaagacgtcatgctcatgaacaacagcaacgggaaccgtccacaaggagaccaaggatggagcattgctccatggggtagatcaagaacggaccgaagcacaaggaggtcaaagtaa

SEQ ID NO: 95836 - DNA, 3209 bp, Oryza sativa
  Clone ID: PAT_MRT4530_93991C.1
acaacgaccgggctgtagggtggggtgacggggccacgagtccaggcgcttctcccccccgaagctcgcgcgcacgcacgcacgctgggcgcttcttcttcccccgcgcatcgtccgaaatcctccggattttctgaggaatccccccgaatttccttgcgtcccatcatggcctcctcagatgtctccgttgatgttcggccagagtttaactcttttgatcatttgagaagcatgcgatatattgcaacagatagaccatggctgacgttatatggaataagagttcaacctgtaacaccattcagcagtttgagcagtagacctgatctggcactcattcatcaatgcctacctgatgagctgctttttgagatctttgcaaggatgagtccatattctttagggagggctgcttgtgtgtgtcgcaagtggaaatatactgtacgcaatccgactttgtggcggaatgcttgcctcaaaacttggcagaggactggaatggaggctaactaccagatggtgcagtcgctatatgattcttcttggaggaaaatgtggatgctgagaccaagaatccaatttgacggtctttatgttagtaggaacacatatatccatacggggactgcggagtggcagttcacaaaaactgtcaatgtggtttgctactatcgttacttgagattttttccaagtggaaaattcctctacaagatttccccacagaagattaaggatgttgtcaagtgcatgcatttccgggcatccaaaggtgattgtgtatttaaaggcgactacgtattgtcagaggatggccagatagaactggcactcctgtatccagggcgtcgctacacactagttaggatgcgcctcaggcttagaggcacaactctgggcgcaaacaacaggttggatgtattgaagatcttaaccaccggggtgaatgcaaccgaactgagaaactggaaaggcagcgtgcttgaacttgtggagacctgggatgaggatgagacgcatgatccagaagttcctgctgttacccacagcaggggtttgaccccatttgtgtttgttccatttgaggaggctgatacttcagtgatgaatctgccagtggagaagatggactactttgtccctgggtgatcttgcgcacaaataatagtttttccaagatatatgatgaagacgcaatttcgctgatgttagggcaataatgtgcatacaccatcagacgtcagtctttgttcaatttcatgctcatgttgcttgtatactgttgtatgaataatgctatgttttgttggtgcttgaaagcaaacattttgttggaccatcctcccgcagcaataatggtccaatacttactagtacatggtgttgccttgtaaatagatcatggtgcaactgatgaaacaatacatttgtggttcagtacatttctcaccaaacactggccttgtgatatgtagtacagatgagaaccacatgtaatataatgtaatgtaatgactgctctttctacattgccaggactgcagattaggagaatttggtcctcatttggatacattctgaaatatacttgtactgaagatgaacattcccagcggtatcatccgcgttgtatatggcttgaaaggggcattatgacattatgagaagatacacttccatgagctgtatatatagctgattatttagggtggctaatttgtagcagagttgcatgaatatttcttctacatgctgctgggtttgggttctttctccgtgatcacgagctcgttccactccgggttgcgagggaggtaagtctcggagatgtaggagcaggtggggaggacgcgcatgccgcgctcccgcgcgtgggcgaaggcggcgtcgcagagccgcgccgcgagcccacgcccgcgcttgctccccggcacgtacgtgtgcgccatctccatcaccgctgccggcgtcgtcgcgccgccgccgccgccgccgtcgccggaggaggaggagcgcggctgggcggcggcgaggaggcggtactggaggtaggcctcgccgtcgggcgtctcgaacctcctcgcgtcctccctccacaacacgacctcctcctccgccgccgcctcccgaccgccggccttcgccagcgtcgcagaccctggtgtgttcggccccaagggagattgcgcctccatctccccgatgctcagatatttgacgccgggagaagcgacggtggcgagcggcttcggacgaaccggcgtccggcaggggagcacgaggagggagatggaatcgatggtatctacatcatcatcacaaccatgcatggagaacgtgaagcgaagacgacgagacgaccacaagcagcttaatggaggttctcttacaggcctaaacctgcggaggtaattaactgggagcttatcgaggccccaggaaccaggagaccacatcgcacaagttagatccctcaaactatcgcggtcgtccgaattacccccgcagtgcacacggcgaggacgggcagtgggcgtggtcagttggcgaggacggcgcagggacgggcagtcggcatggacggtaagcaaggacagcgcagatggcggcgcggacggtgcggacattagtgcggagacggaggcggcggtggagctagctaggtggaggactccgactccggcaactcgttgatgcgattggcgaggtaaggacggcggcgcgcggggggcggtgggggcccgaggacgacggcggccggcgatggaggcggaggccgaccgggtgcgaggggacacgcggtgggcggcgggctcctcatcctcgtcgtgggcacacgggaacgcgcggtgggcggcgggctcctcctcggcagtggcgcgcggggatgcgtggagggacaccgccgccatcgcgggctcctcctcctcatcgtgggcgcgcggggactgcggtgggcggcgggctcctcctcgtcgttgtgggcgcgcggggacgcacggtgggcggcgggctccttctcgacggtggcgcgtggggacgcgcggtgggacaccgccaccagcgcgactcctcctccgagccggcacgccgcaccccgtcccagctccccgcgcctcgctccctgtccgtcgcatgctctcctcgtccgctggtgatgcgccgccgctcgctccgccgccacgctcctcccctgccgccgccat

SEQ ID NO: 95837 - DNA, 450 bp, Oryza sativa
  Clone ID: PAT_MRT4530_93992C.1
atggaaggtggaggcgacgacggccatggacttccacgcactctctcccaccgcgagctgcaggcgatgtgcaagcgcaacgacggccatgccaacatgaccaacgccaccatgaccgatgccctccagttgctcccctcggtggatgggatccacaagatcgacacgacggcgctgtgcctcccgacgccgagcaggttgacgatgaagtcggctttgaaggccgcctcggcggtcggcgaggaagagcagcagcagcacgggagcccactcccccgtggccgccgcgtgtcggtgaagtcgctggaggccatccagatggacttcgaggagggtgaggacgagatgaagcgggatcgtgaggaacggaacctgggcgtggcgctgcgtagtaccagccgccgcgcgagggccacgccaacgccaatcccaaccccctgcgaccactag

SEQ ID NO: 95838 - DNA, 192 bp, Oryza sativa
  Clone ID: PAT_MRT4530_93993C.1
atgatgccaagagacatgtggattcaacggggtggtgccggggagaacccccgggtttcctggcacaacgtggccgttctgcacgggctgggtgatccggttgctaaagaagatgatgtggatactgctgatgaggagttcttccaggagcaagtcggctacgatgagttaatttggagcgtcacgggctag

SEQ ID NO: 95839 - DNA, 311 bp, Oryza sativa
  unsure (1)..(311): unsure at all n locations
  Clone ID: PAT_MRT4530_93994C.1
tttttttttttttttttttttttttttttttttttcaatccatcaggngntcattataacacgnccagtaacaataatgtacatcggaagttcaatgaantttgnaagcacgttantccaaacaacaaantttggaacaatnttnttttgntcgntgtaagnaataanttaactaaactctgtacaatgaaacagtagngtgtatanttttcttgaaatcccantntcaggaaagantnttgcaaaaagtntttgtgagcaatgttgggtttctaaaactctgcagagcctgggacccgggggaaatggaa

SEQ ID NO: 95840 - DNA, 713 bp, Oryza sativa
  unsure (1)..(713): unsure at all n locations
  Clone ID: PAT_MRT4530_93995C.1
tcagtcagcagcagcagcagcagcagcagcagcagcagcagccagcagcagcagcagcagcagcagcagccagccagcagcagcagcagcagcagcaccagcagcagcagcagcagcagcaccagcagcacgcaccccgcacggcgcacgctcccgtcgcaaacacaccgcaaaaccaccgagccaccccccaccgcgcactcccccgctccctcaaccaacgcgcgcaattatccactcgtcccatcgggctcccatcttccccccanccaaaaagggtcncacccccaccagccaaccatcacccacgcgaagtccatatccccaatcgcctcccaccaacaagcacgccatgttcttttttcacggaacgataccggaggtggcgcaaatatgtccttngatncagggatccaacattcaatgattgatatgatggccaaactgcccgccaaaaccatnccgcccggtcccccccaaatgaaccaacaacccaccattcaaaaaactcggtcatacccaaaaaaatttgccggttcgccaagcccccaaactattgaaaaacccggaaaacccaaccccgggccccaaaattaaccccaaaaattcttcccgggtgccacctgggtcaacacctgggcccgaaccaaaaagggccccaaaaccccccttaaaaaaaaaaaaatttcgggtcccaaaatatatcgggtaac

SEQ ID NO: 95841 - DNA, 1502 bp, Oryza sativa
  Clone ID: PAT_MRT4530_93996C.1
gacaagcgtgcgcgcaaaggtctcctgatccatgtcaggcagcagagcggcgaggcgttgccgctcctcctcggacagcagggtgttccacgcgtcgagcgagagcacgtcgcccaatccggcaaggtcgtagagctcgagcggcacggcaacactctggtccccaacctggcacatctcggaccctgcctccccgagctccgtgatctccagctcgtcggaccccatcccagagtcctcctcgtcttcctcctcctcctcaacctcgtcatcctcctcctcctcctcctccatcccaacatcgccgccgttctcctccccgcccgagaagtcgcccgcatcggactcctgcgacggcgtcgcaggtgactcctcctcctcctcctcctcctccgtggcatccggcgaggcctccccatcaagcctggggaccctgccgccgccactgctcctcacgatcgccatggcctcacctcgcacctgcgccaccaccacaaacaaataatcaaaaccgcaagaaaccaacagagatccagagaccagtcaaaaccctagcccacacaacccccccaacccaaatccaactccaccgccgcccccaaccaatcctccccctccgcttggaccaactcatcctcctggcccaacaatgctaacctctggcccatctaaacccttcgggaaaaatctgagccgtccattctccatcgcttccatcgcacggtctccaccaccctgccctccactgcggaaattgcggagcattccaacccaacccgacccgatccatggccgccgccgccgccggcgactggaccgtcgtccgccgccgcggccgccgccgaggtgacgcggcgggggacgccgcctcgcaaccggacgctccaccgcctctccccgtcaccccgatcccctggtccccctccgacccctccctggaccccgcgcacgtctcccgcctcgtcgaccgcgcccgcgccgccatctcccgcgtcgtcgcctcccgcctctacgggcgcctcctcctcccgggatccccgctgcggcgccgcctcgccctcctcgcccccacgcggctgtcgcttctcggtgtcggcagcttcgagaactccccctcatcccgcctccagctcgcgctcgccgcgctcctccgccgcgacctcctcctcctcccggaatcctccgcccacgccgacctcttcgaccccgtcctctccgcggccgagtgcgccgcggcggcggcgctgggcttcaccgtgccaggcgtcaacgacgggtgccgccgccgcgccgacgagcccaccctcttctacatgccacactgcgaggcgtcgctctacgatgccctcctcgccgccaactgggagccaccctcgcagctccgccatgtctgccgccgccgacttggctgccgccgtcgcctccaccgacctgacctagcccgccgtcggccgctgccccgccccgctctgccggccagtcgctccgccccgcctgccacc

SEQ ID NO: 95842 - DNA, 541 bp, Oryza sativa
  Clone ID: PAT_MRT4530_93997C.1
aatgaaactcccttttggggggaccttttttgatttccatttctgttgtgcggttggccagtgattcaggccgccccccaaaatcacacaggggggggggaaaacacaaaaaaacccccccaatggaaaaaagcaccccaatgggccaacaaatcaaagaaaaaaaacaaaaaaccaaaaagagggaaaaaacaaacaaaacggaacaggggaaaaggggggccccaaggggaaaagggcaaaggaaaggagaaaggccctctcctggggggtgccccggcccaaaaagggggccccccagggggggaacagggcacgcatgggcaaccccctcaaagaaaacccgggcaaatcccaccaccccaaagggcacccccgcgcgggggggtttcttaccgggccgtgggggaacacggaaatggggaacaaaaaccttgcgcggaacccctgccgtggaaaaaaaaaaccccttggcggggggggattcactgcgcggacccggagcctttttcagaaccaaatgcgggagcggaatccctag

SEQ ID NO: 95843 - DNA, 1559 bp, Oryza sativa
  Clone ID: PAT_MRT4530_93998C.1
gccacgcgtcctccttcttcccctctccggcctccgcggaggctcgcctccgcgattcccttcccatttcgccgccgatgaagggcggcgggggcgcggcggcggcgtcggcggcgccgggggactacgtctacttcaagtccgtcgtcccgctccacaagatctcgattggaccgaaattatggaggtactatgattttggaccaaagactgttccacctcttgtctgcatcccaggaattgcaggaacggctgatgtgtactacaaacagatcatgtctctctctatgaagggttatcgagtgatgtcaattgatgttcctcaagtttggaatcaccaggaatggattcattcatttgaaaaatttttggactccatgaatatccatcatgttcatatttatggtacatctcttggtggatttcttgcacaaatatttgctcaacaccgtccaaggagagtaaagtccttggtcctatcaaatacttttcttgagacacataagtttgctgctgctacgccatggtctcctgttgttaattggaccccttcttttttgctgaagcggtacctattgacaggaatccgagatggcccccatgaaccgtttattgcagactcagtggattttgttgtgagtcaggttgagacgctgtcaagagatgatctctcatcaaggttgatgttaaatgttaatgttgcatcagttggatcattaatgctacctgattcactcatcactataatggatacaaacgactattccgctgttcctcagcagttaaaggaccaagtgaatgaaaggtacccaggtgcaaggcgtgcagtactaaagacgggtggtgatttccccttcctgtcacgtcctgatgaggttaatttgtaccttcagctacatttgagacgagttggagtagaacctagaccagatctggtccaaggtttcacacgtaatggcagtgctgggagctcaaaggaccaaaaagatggtggaaacaattttgacaatcatcctggagataatggtggccctggttcagggggtcatgatcatgagacacagaattctggatcagaatcacatgattctgatgaatcaataccaacgagcacaatgcttgccaataccattctaggtacggttagctcaaccctgcaagcttcactatgtgtgctcttgatacatcattactatgagtctgctttgtatatttcgtcgagacagccattggatgtatgaagtagggaatcaccccttttgcccccatgtagagctcgctttgtagaatatcatcgtggtacgagtgtcatagcttctttggagtgggttcttacttcgttgctgccaacgggaaaggcacatcaacaaccaggaaaacaacttctgtatgtttgtatattagctcttgtttctttatcaatccttctttttgtgtttctaggcctgtaaattgaatttgatctgcctgagacatgaatatgattgcttaattttcttgtagttgccccataaaaagttgcgtacagtttcatgatttcatccaacttatttttcacc

SEQ ID NO: 95844 - DNA, 316 bp, Oryza sativa
  Clone ID: PAT_MRT4530_93999C.1
atgggcatccacatccccaccgaccggcctgcctccgtcgccactgactggtgtctctgcctacacggctggcctattatgccgcctttgttgggcgtctacgacttcaccgccggcttgccttcgctgccgccgactggtgtcctcacctacacggttggttggtcgcaccaccgttcatgggtgtccacgtcttcaccgattggcttgcctttgccgccgccgactagtgtgttcgcctccacggttggtggtcacaccaccattgatgggcatttatttatcaacaccgccggtcgcctcagctgcttacacg

SEQ ID NO: 95845 - DNA, 114 bp, Oryza sativa
  Clone ID: PAT_MRT4530_9399C.1
atggtcttcatcaccatcctgggtgttacagtaagatttgcgccacttggtgaacttgtcgatggcgacgtacaggtgctgatatacgcctcgggccgctttgaagggtcctag

SEQ ID NO: 95846 - DNA, 1494 bp, Oryza sativa
  Clone ID: PAT_MRT4530_939C.1
atgtactactgcctcgccgcgccgccggccgctgcggcaccggcagcgccagcggcgaggcgcgcgtcctctttcctcttcgtggtgtcggtccctcctccgactttatgggggagggtgacgggaggcgccgtgtccgcccagcggctggtgcggcggcggtgctcctccgccggcgagcccagggcggccggcgacggtggcctatccaggttagacgattgcgggtgcagcagcgaatcagaacttctgaaagcagaggtgcaagcagtgaagaaaggttttatcgccgccgccgccgcttctccactctcccctgcccccgtcgccgtcgccaccgccgccgccatgtccgggaggaagaagacacgggagcccaaggaggagaacgtcaccctcggcccgaccgtgcgcgagggcgagtacgtcttcggcgtcgcccacatcttcgcctccttcaacgacaccttcatccatgtcaccgatctgtccgggagggagacgctcgtccgcatcactggtggcatgaaggttaaagctgatcgcgacgaatcttccccttatgctgctatgcttgcttcacaggatgttgctcaaagatgcaaggagcttggaataactgctttgcatatcaagctccgtgctactggtggtaacaagacaaaaacccctggtcctggtgctcagtccgcacttagagcacttgctcgatctggcatgaagattggtcgtattgccaccgccatccttacgttgagtggcgccgcacacgcggacgtgcaaggaacatgcaaggccgcggccggcatcgacagccgcatcagctacaagttctgtgtgtccaagctgagcaaccaccacctcagcccagacgcggacacacggggcctagccttgatcgcggctagtttgggcatctccaacgcggaagacacggtcttcgacatcaagggacttgtagccaagccaggcaccggtgccaaggcgaagccgttgcttgcgcggtgccaggagctgtacaacgagatgtcctttgtgttcgccgaaggatacgactgtatcaacgcgcaaagctacgctgcggggaaggagaaggtgggagaggccatccccctcgcgcgccagtgcgacgatgccttcgccaaggccgccgtcccgtcgccgctggtgcagcgtagctggtgctccgtgcagatgtcgatcatctgcacggccataaccaacctcatcaagtgaggcagaagaggaaggaggctgtaattccgtgtagtgcctgttatggggggaaagcaaagctatctatccttgtccttgcaacttgttctgtactctattatgatcttagcatcggatgtggatttataaattttgagctatgttatgttctttagaagatgaatgacctccccctataaagccgattatctaaattttggttgctgttatcacaactaatgtttatcagattgtgttttgtgttgctgttgccgtgat

SEQ ID NO: 95847 - DNA, 816 bp, Oryza sativa
  Clone ID: PAT_MRT4530_93C.1
gggacagaaattcagtctctatatccacaaattcataagtggacacaaccaaaggttacacgagtgttgaatcttgttttcggttcctttctatatatattggggctgaaaacaacaaaaatggactgaatttgcagccagcactagggtagggggattacagagccagatggaacaacatatttgatgtgctcaagccatccagaaatatattagccaacataatagaaacgcagccatccaaatcaagcaaggtcttcaaacaccggttatgagcaacggagcaagtccacttgccatgagcagagccaacacctgaaccatttgtaaggcttcagtctttcctgttcgtcagtagaagatggcaaaggtacctttactaggagaacacagattggttattatatcctattggtaaacttatcattcaatcctgagttctccagtctcagttttcttctgtgctttctctaaccgagaggcaggcaggatagatctcagctggttattctccatgtttgacaagagctgtgtaacagtcttaatttgagaagcactttgcaaactagcgtccatataagcatccaaggaagaaattacactaggtagttgatgcaggacctgccctgtgttctttgcaagagatgcttttgccaagagtttcttgggaagttttgccaggtgagcctgggccggggaggactcctccatgagctggaggaggttggacgtggactgcaccgcctgcgctatctgctccgccaccgcggcctgcgccccgccgcccctcccgccgccggccgccgccgccgccat

SEQ ID NO: 95848 - DNA, 174 bp, Oryza sativa
  unsure (1)..(174): unsure at all n locations
  Clone ID: PAT_MRT4530_94000C.1
atgtgagcaaaggccagcaaagggccagacccaatcgacgttcaagtanaggtgcgaacccgccagactataagatacaagcgtttccctggagctncttggggctntctgttcggacttgcggatttcaatccggggaggggtgctctcagtgggttgtggaccaaacccccg

SEQ ID NO: 95849 - DNA, 906 bp, Oryza sativa
  Clone ID: PAT_MRT4530_94001C.1
cgccgcctcattccccgctgcttgcctcctccgccgccgccgcgctcgcctcctccgccgcacctcgccgccgctcgcctcctctgccgcgccggcggcggtagaggacgagcggcggcgggtgaagcacttcatggtggcagcccgccccgtcaaggacttctgccccgcgcggagacgacgggtggggcaacgcactgctcacctacccagcgatccgcaacacgacggtgctcgccgtcgaggccaacccgtggaagggcatcaacttcagcgtgcctttcccatcccacttgcacccgacctccaacgcccatgtgctccggtggcaggaccggatgcggcgacgcgaccgccgctggctttgggcattcaccggttcgccgcggctcaggagcaccaagaccgtgcgcgcccggatcattgagtagttcaccgtgtcgccatcctgcacccacttcggtagctcgccatggcagtacaacttgccagggcggatcatggttcatggagctgctcgagtccgcagagttctgtatccagcaacgtggcgactcctacacccgcaagtcaacatttgacctcattctcgtcggttgcatcccggtgttccttcacccagcatcgacgtacacccaatacacgtggcacctccctcgctgcggggcccgtggaggcgttctccgtcgccacgtccacagcagcggagggcgtcgtcgtcttcgaactcgaggaggcacaccgcgcactccagcgggtcgccccgcgcgtccccgatccggtgccgcctggcgtcgcggtacgacaccagcggcagcgccgcgatctccgcggcgtcgagccccgccctgttgccgccccctcccccccggcgggaccactccgacgacgacgtgtccgccagcg

SEQ ID NO: 95850 - DNA, 2704 bp, Oryza sativa
  Clone ID: PAT_MRT4530_94002C.1
tctctctttcccccccacctcacctgcgtcctcgccgccatcgccgccgccgccgtcgcagcatcgggatatcctcccgccgcgagtttgctgagcacagttgctgaattttagggttatctgcttcaagcataagtgggccattgcttctggcttttactgaacgtaactcacttggccaaatgaaatccatggtagttggttattctgaagcatagaattgttactgctttgtgaacgaataacatctatctatctagagcactggaagatggatcgtagagatacttctgggtttgtcagtggaggttgcaaagaatcaacgaactgcatcaccctaggatttctaactttttagctttgttaaccattatttaatctggaagtgaggttatctggtacttggcaaaaaaattggctgtgttttgtctcctgagaaattctctagcaatggaccccagacttgggcggtcagcgtttataaatttctcaaatccaaatgcctatgtgggcaagttccctgtcatctccacagtcagccatcctacagcttctagtcaaattgatgtgctagctcattgcagttcatacaacctgcctagagggaccaagagaaagtttgatggcttgtcactagggctgggcaactcatcaagctcagaatctagcaagcaaagcatgggtactggctgcaccatatcttctgctaagggtagtgatgatggttcttctattgatttggatttgaatcattttactctgggcaatgaaggtacttccaggcttgataagcgggcctgtgattctaggagggctttggataagcctgaattgaatcttgagctgtctttgtcatcccagtctgctattactggtgcagacttcactgcagcgactgaatataatagcccaagtctgcagccatactatatggacttagtgccaacagttgatgaaggatctacatctgctcgccgaccatctggttgtcaggtactgtctttccttaataagactgcaaagatgagtgaattttctccaagggaggttttcccaggtagctctaaccagagtcaaggtccggctccaatgccaacattgcttcaactgccaaaaagtccagtagcctgtacttccggtttatctcgtccacaacagcgcagcagtagcacaaaaaactgtacatacccaggatgtatgaaaggagccagaggttcttcagggcgttgcattgctcatggtgggggtagaaggtgccaaaaagatggttgtgacaagggggctgagggcaagacaatattttgtaaggcccatggtgggggaaggcgctgcgaacaccttggatgcaccaagagtgctgaaggtcgtactgacttctgcatagctcacggtggtggccgtcgttgtagccatgaaggatgcaaaagagcagcaagagggaaatctggtcgctgtattaaacatggtggtggcaaaaggtgtcaacatgcaggctgtacaaagagtgcagaagggcgctcaggcttgtgcattgctcatggaggtgggcgccgctgtcagcaagatggttgcggaaaaggagctcagggaagtaccaacttttgcaaggcgcatggtggtgggaagagatgcacacaccctgattgtaaaaagggtgccgagggaagtacagcgttttgcaagggacatggaggaggcaaacgttgttcagctgaaggttgtactaagagtgtgcatggcggaaccctttgctgtgttgcccatggaggtgggaagaggtgtgtggtagaaggatgcacaaagagtgcaagaggccgtactgaccgctgtgttggccatggcgggggcaagagatgccaatcttctggatgtgataagagtgcacagggaagcactaacttttgcaaggcacatggaggcggcaagcgttgcttgtggggtcacgaaggatctgaccatggagctggtgacactccttgtgagcgccttgcaagaggcaagaatggcctgtgtgtttatcacaatccgcaggtggatgaaaatcgtgtccatgggggtttcagcgttgtcagcgatgcactttctcagggagatcgaccttcaaacactgaaacaagcaggtgcagcattttctcgcatcctatggaggctcctcgtcgtgtggcagctccagctgacgagggtcgggtgcatggtggcaacatcctgtcaatgtttgcaaatggcatgagtttggggaagcatcccgccaaccaagcagaggctagcacctctgcacctcgcaactcgaaatccaccaatggcatggtgaccggtaactctgcggtgcggggcagctggctgtagagccttgaaccgccttctgctctctccatttcagtaagcatatgcttcgaaccatctgacaagtgccttctcttcttaatccttcgggtgtgaaaactatggtgtgattgtgtgaactgttgtgtcctgatttgtttagcagtgttgtgaacttgtgatatattattaatcgtttgtgctttgtaaaatgtaataatcacctgtgtgagataaataaaagggggaaggttacacattagatgctgaatttcaggtcttgtactgaaggtctgctgtcacctccaaaatttgtcctgtgatagtcatgttctaataaatctatgtgactgacatgtttgaaattgaaaaaaaaaaaaaa

SEQ ID NO: 95851 - DNA, 400 bp, Oryza sativa
  Clone ID: PAT_MRT4530_94003C.1
aggggtaaaaccacccgtaacaaggggccttttggaaaatttgcctaattacatttacccccccctccccattaattaattgccctttagcaaccccccacccccatgttaaataccgggaaaacctataaaaacgggggggttttttaaaaaccccctttttaacacacatattttgggcagtttcctttcttccaagattttctaataagggggcccttcccttagcgaaagaaagcaacgagcctagcgatcgatcagcaaagtctttaatttctcccccaattttgaaatcaactacccccccctgcccatgggaatagttatgtacaaaacgccggggtagtggcaccaatccccccccaagatgaacttgggggggggggccatggcctccggg

SEQ ID NO: 95852 - DNA, 558 bp, Oryza sativa
  Clone ID: PAT_MRT4530_94004C.1
atgtggaagccagcatggttagaggccctgaacacacagaagttcttcatagcatgctctttccatgagcatgcgaagaagaatgagaagaacatctgttgccttgactgctgcaccagcatctgcccacactgtgtggcagcacaccgtgtgcacaggctactgcaggtgcggcgctacgtctaccatgatgttgtccggctggaggaccttgagaagctgatcgattgctccagtgttcaggtggaatatatattacggcaaaagaaagacctgtcagcatacttgcgtccatgcaagaccttgcagcttggtccagatttcttcattcctcatgatgctgatgatgagacaacgcactcaacccttgttgatgttgacgagcccatgggatcatcagactcagagaatttgagtgcaccatgcccaaattttgtccgaaagaagcggagtggaccatatatctgtgcacgatctgcaaaccgagtttctgatgatgatatggcaacaaacatgagcagaagaaaaggtgttcctcatagatcacctttgtgctga

SEQ ID NO: 95853 - DNA, 2001 bp, Oryza sativa
  Clone ID: PAT_MRT4530_94005C.1
atggggacggaggccggcgacgtcgacggccgcaaccaccggcccggccgcgggtcgtccgcgtcgtcgcgccacctgcacggcgtgggaggcgcctcggcggcggaggtgaacctgtccgggcgccgcccgttcgcggagaagctgtggtcggacctcgcggagacgttcttccccgacgacccgttccgcgggttcggcgcgctgcccccggccaggcgcgcgtggtgcgcggtcaagtacttcgtcccggcgctggactgggtcccgcgctacggcctcgacaagttcaagttcgacctcctcgccggcatcaccatcgccagcctcgccatcccgcagggcatcagctacgcccgcctcgccaacctccctccaatcatcggcctctattcgagcttcgtgccgccgttgatgtacgcggtgttcgggagctccaacaacctggcggtggggacggtggcggcggcgtcgctgctgctggcgtccatcatcgagacggaggtggcggcggacgagaacccgcagctgtacctgcagctcttctacaccgccgccttcttcaccggcctcttccagaccgcgctaggcgtctttaggttagggctaatagtggatttcctctcgcggtcgacgatcaccgggttcatgggcggcacggcgatgatcatcatactgcagcagttcaagggcctcctggggatgaagcacttcaccaccaagacagacatcatctccgtcctgcactccacctaccattaccggcacgagtggaaatggcagagtgcagttctcggcatatgcttcctcttgttcttgatgtcgagtaagcacctgagaaagaaactgccaaagttgttctgggtgtcggccattgcgccattcatggttgtcgtcatcggaggcatcttcgctttccttgtcaagggtgacgagcatggaattccgatagtcggtaacctgaataaagggatcaatcccctgtccattgcgcagctaacgttccagtccaggcacatgaagacggcagtgaaagctggtctcttgtctgggatcctagcactggcagaaggaatagccgtcggccgaagcttggcgatggtcaagaacgagcagatcgacggcaacaaggagatgatcgcgtttggtatcatgaacatcgccggttctttcacctcctgctacctcacgacagggccgttctcaaagtcggcggtgaacttccacgccgggtgcaagacgccgatgtcgaacgtggtgatgtcggtgtgcatcatgctggtgctgctgttcctggcacccctcttcaagtacaccccgctggtggcgctctcctccatcatcgtcgtcgccatgatcgggctcgtcaaggtcaaggagttctgccacctctacaaggtcgacaagttcgacttctgcatctgcatggtcgccttcctcggcgtcgtcttcttcaccatggtcgcaggcctcagcgcatccgtaggcttgtcagttgtcagggcgttgctgtacgtggccaggcctgccacctgcaagctcgggaacatagcagggagcgagaccttccgcgacgtgaagcaatacccccaagcgaagagcatccctggcatcctcgtcttgcagctcggctctcccatctacttcgtcaatgcgggttacctgcgagaaaggattttgagatgggtggaagatgaggataacctgtgcaagagcgtcgggcacgatctgcaatacttggttcttgatcttggtggtgtcacttctgtcgacaactctggagttgggatgctactagaagtacacaagagcctcgaacgaagagggatcacgatagctctgacgaatccgaggctagaggtaacagagaagctggtgctgtctggatacgtcagggacatcttaggggatgagtgggtcttcctgacggtcaaggacgccatcacggcgtgtcgatacgcgctgcagatatccagaaataagggagaagacgaagtatag

SEQ ID NO: 95854 - DNA, 2058 bp, Oryza sativa
  Clone ID: PAT_MRT4530_94006C.1
atggactccgatgcttgtagtggcggggtcataatcatcaacctgttgtattgcgatatctactatcgtaagattgaactcatcaccctcaacgctaggtcccatgcacatgtcttggttaagaataatggagagtttttggtcgtcgatgttgtaggccttatttcggagatgagattgttttgtcatcatccattgtatgatgaaacaatcacccatgacatgatttgtttgccgttgttggagatctctttacccacattcgacgcctcattcacaccgactgttgaggtgccaacttctcatatcatcgaagttgtgggtagaggtggcgaggttgacatatgggaagaacgtaacatatttggatcccatgggcaaagtctcaaggaagactattctagaaggttcaaggagttcaaatccaagtcgagaaattctagtggggagctgctggaaaaggttatctcttgctacaagcatatgttgaatgctcatgtagacgacgatactctcatgcggaaatgtcaaaatgctcttagctttgttgacaatctcagcaacgaatatgagaacaactctattttaggtgaggatatcttcacaagacgtttttgtattatcccattcagtatatcagttctgatgcactgcagaagccttgacacttctttcagcaaaaacttccctggtgtggtgggaatgtcgataagacatctttcttgtatttttcaaatttacgactgtagtaatggatctggctttgtggaggagctgcaagaacaacataacatcctgagagactccattgaacaattcaaaacatcagaattactcagaggcaatcttatttcttgcttaaaggaagcactccatgaacaggagttcaaaatggaacgggccagaagccagattaaggaagttcaatcccgatacaagaaagctgatgacctctgccagaagcttggaatacatgtagaaaggcaggaacaaccgaaccatgggcctaagaactcaggttctgaaatgcatggtagctttggcccagattcagctaatgccagttcttttgagaagggacaatcaagtgcggtgatgtattcccaggagaacggcggtgagcatgagatccccaatggcgttttctcttcacgggccaccaaggataacattgagcagaaactagaagagcactctacgaataagagacagaaactacagaatgatgtgtatgtttcacggcctcaatcgccacctccgccactgccatctgatgcatttgaacagccgccgccaccacctgagcatcccccgccaccagagtctacatcgccccctccaccgccaacttctgatccacctccagtccccccgccaccaccgacaacaggttcattcatgccaattccttctgctccgtttgcgggactgccagtacctgccggccctatgacagcagtaccctacaactcttacccagtatttcctcctatgaactatcccatggtcaacatcccacctcccttccctagtgctccaaataccccccctggtttccaaggtttggctggtcccttctatggccctccttaccccgcaccaccaccgccaccgccaccaccgatgaacaggaaatagactagtttcttgcctgcagattagtactgccagccagctttggaggatagccatagactttgcttcactgaagaatatgatcgtgatgattcatcgccatgtgttgtggagcttggaatatactgttcctagtgttgtacattagtcagctggccagatagtagcggatttaacagttaattagcattagttgttcaggtcatggtcatgaagcaaaaaggaaaccatgtgtgactgctagaaagaaattctggagttatgagttatgacagctgaaggcaaatgccatagcatgacatcttttgttactcttctttttcttccttagaaaatgtttgtcacattttgcttgtgttgtttactagattattatgtccatagttccttcatgttgagaccaggtaaaaaaaaaaaaaaaaa

SEQ ID NO: 95855 - DNA, 162 bp, Oryza sativa
  Clone ID: PAT_MRT4530_94007C.1
atggcggggattagagtgctaaacaggctgtggaattccaaaaccgagcaggccatcgacgcaagagagagcaccgagcaggccattgacgcaagagagaacaccgagcagtccatcggtgggagagaggatagcggtgagccggtgaggaatagaaggtag

SEQ ID NO: 95856 - DNA, 590 bp, Oryza sativa
  Clone ID: PAT_MRT4530_94008C.1
ctttttttttttttttttttttttttttttttttttttttttttttttttttttttttttttttttttttttcccccctaaaaaaaaaaaaatatccctgtggggaaaaaaaaaatggcccaaccaccaaaaatccggggagggttttggcccccctggattaattttcccctcggaaaaataaaaaaggcaaaatggtcccctaaaccaccggggggcaaatggccccctcctcggaaacctgcccaaagggcctttttgctcccctttttacaaaggcccggacgggtaacccccaaaaaaaggggttttaacttttttttttaatggaaaacaacctttttacctcttttgaaaacaatcccccgggaaagactggaccaacacctggattttcagcttggcaatctaacccccaggaaaacaacccccgggcggaaactctaaggggaacccctaaattttggggccaaccaagagtaacccaccgggcccttggcttccaagtttttaggggggggaaacttgggccagtacaacatcgttttttttttggcactggtatatataaaaacctaatttctgggggg

SEQ ID NO: 95857 - DNA, 184 bp, Oryza sativa
  Clone ID: PAT_MRT4530_94009C.1
tcgatctaaagaaccccctgctcctgctcccgccgtcctcatcgccatcttccagggcgccgccgctctgctcgccttaacacggaccggcgacttcctcgccgagctgcagtcctacgtccgggaggaggacggcgtgcagcggcatgcgtcggcagcggctgcacccgcttctgggtggtga

SEQ ID NO: 95858 - DNA, 219 bp, Oryza sativa
  Clone ID: PAT_MRT4530_9400C.1
accatacctttttatttatcccttgctacaaattttttacaacaaactccttacagtttggttttaggggtcactgatcaaagaacacaaaggctagacaatccctatttatattattattattattacctccctaattaacatccttatcaaaccttttcacaattttcagatgtcataaactgttgcataatcctggaagatggagctggtttcagg

SEQ ID NO: 95859 - DNA, 423 bp, Oryza sativa
  unsure (1)..(423): unsure at all n locations
  Clone ID: PAT_MRT4530_94010C.1
gctcgaaaccccacgaacgcgaccaccgcctccnctcccccttccctcgaccgccgtgacgccgcccgcgaatcgcgcgatggtgaccgacgccgccgcgatggccgtcgtgaaggcggcgcgcccggccttncgcggcgcccacgacggggtcgccttcgccgncaacgtcgcgttcctcgncgccggctactncctctgcgccgtcggccccgccgcgctcaacgaccccccggcctnaagtgaagaggaggtggggattnatggttggaacancaatggataattgttatgnattttttgtacatcaaaggaggangaaggggcaaagaagaaacgggtatttggtaaaantgtctttgtgattcggtgatggtccttggcaattgatgtcctgggttttgagttanaagattaaaggcc

SEQ ID NO: 95860 - DNA, 273 bp, Oryza sativa
  Clone ID: PAT_MRT4530_94011C.1
aagatttgcaaagatgagaacaccattagcagcagcaagctaggagacaatccatccaggagatgaagtgtgtgagttgagtaacaattgctgctgcaaaacacactcttttttaagcctggtgattacaaaatttgagctgtatagttcatatttgaggtatgatgatgtgcctctcaatgtactgtataaatgtcatgatgtcaaacacacagatcaatatttccccagacatatggtaaaattttcacctacataaaaaaaaaaaaaaaa

SEQ ID NO: 95861 - DNA, 401 bp, Oryza sativa
  Clone ID: PAT_MRT4530_94012C.1
cacgagggagcgagcggctacgccaagtgtaccaccagcagcagatcaaggccaccggaggcgccgacatcgccacggcggcctcaatgcaggccaagcatgagctgctggcgtgcgagggagcggcgatgcgatagcggaaggccaccggtgaccggtgaccgtcggccggtggggattaatttttttttttgtttggcaatttgccatgtgtaagatgacacagcttggtcagtagttttgtgcagcttgttaaaaagttggttgattttgttgtttctttataatgttatgtttcgttttgctcatcctagcaaaaaaattgtgctgggatgggagaattgatgtggatgtattgtttggaccccaattacatttgtccagaaaaggtggttgctttc

SEQ ID NO: 95862 - DNA, 237 bp, Oryza sativa
  Clone ID: PAT_MRT4530_94013C.1
atgcggatgcggatgcggatagatgcatgcggatgcggatgcggatatggtatcggactgacaaaagctacagccgcgagtgcgaagccaaagcaggtccaggagacagatataactgcattctgtgagaggcggacaagatcagcggcggtggcaccactgcacgacccggtcggtggccatgcaattgcagatgcaggtcaggtgcatttgcaattgcaacgcaaagaggactga

SEQ ID NO: 95863 - DNA, 375 bp, Oryza sativa
  Clone ID: PAT_MRT4530_94014C.1
aaggaaaagttatgggcgccggataatatcattactacagttcattggagatatgctacagtaactttttcctcccttgtaaaaagaaacccaaaccttatctacaaagcaacacacacaccggacacaaagggcttgaacgaacggagcagacgagacaaacatggacaactactactaggcaagcgacaacacctaggttattcggggatacagagggcgggggtaaccgtgggagaaacgggggggatgatcagactctgggcttgctagccttcttggaaatggccaagcggatggatttggggggctgcataggcttcccggggggggtcttggtgggccttttggcgcggactttggcggtggggggga

SEQ ID NO: 95864 - DNA, 1368 bp, Oryza sativa
  Clone ID: PAT_MRT4530_94015C.1
atggtgcttcactccccaatccccacagcagtagggtttggagaacttggcgtcgatcgactctcctcctccggtgcggcggccgaggctgccgactgcgagtctgcgaggcctccatctcttcttgctcgcatcctccattgtgagttccaagctatttgctgctcgcgctgcagcctcgacgcacgccgcctgttcgacggaatgcctccgggggaagccccacctccgaccggcggcgataggatagggggtctgccggatggtgtcctccaacacatcctcggcttcctcccgccgcatgaggccgtgcggacctgcgtgctcgcgcggcgctggcgccacctctggaagtccgtcgcggccttgcgcatcaccaactgggactggaggaaggtggtgcccatggaggagttccggtatttcgtgcaccacctcctgctccgccgcgggcgcgctcctatcgacgaattcgagctcgatctcgccgagctgtccgaccgggacaccctccgcgtgaaccgctggttccggcatgcagtgatgtgccaggcccgggtgctacggctggatatccgtgtgagcaggggatccgagctcgagctagaaaacctgcctgtcgtctcccggcacttgcaaaagctagatctttatggtgtcaaattgatgcacaatttccttgatttctcgagctgtccggtgctgcaacatctagagattgctggttgcgacttgtctgattccaatgccaggaagatctcttccctatccataaaacacctaaacatctccggttgcaatttcagcgatactttccacacacacatttatgcgccgaatctcctctcacttggtctagttaattatatgaaccagtctcctgtgtttgagggtataccgtccggaagctttatcacaggccaagaagttggtgttgttagttcaggaacaagatgtatgttatgcacttatgccttctcatgcactgcctccacatgtgcattcttagaccacatgtttacttttaatttcgaaatgtactggcaacggtgccctacatttagcaagttgaagactttgttaatcagtgcatgcgcatctgctgttcttgactttgaagctgttagttgcatccttcgacactcaccagttctagagaatctcactcttcagtttcatcgcatgggacatggaccggatagggtggaaatgaaaggaagctatagtcgaatggataggtcatctgcaatatcagaatatcttaagatagttgtagtcagatttgatgagattgatgatttagttatcaaagttttgaagttcctctctgcattcagtattcctttcgtatgcatgaaagaaagctag

SEQ ID NO: 95865 - DNA, 754 bp, Oryza sativa
  Clone ID: PAT_MRT4530_94016C.1
ttagccgccgctatcgccatccgcgtcgccgtgatgccgccgccctccgccgccggccggtcgccgccagtcgccgccttgcgccgccgctgcgttgagccgcgcgcccttatccctcggtctctccgcctctctcccttctcgatctctccacctctcctccaatccctcgcgtctctcctccctcccttctccaccatcgccggttgccgttgtcacctcaccaccgccggctgtcgtcgcctccaccaccgcatcggccaacggggagggcctcgggagcggcggcggggcgtggcctcctcctctccgccgcgggccgctgcgacgacgggggaggccggatctggccaccgcaacgacgagggaggccggatccacctccttgatgacgtgggaagctgccgggtgacaacgacgatagggagagggtggcagctcggggaagggggcgatggcggctctcggaagcaatggtgcaggacaagagacggcgaggagcagatccggcgcctcctccctccccaccgacatcggcgatggcaaaggggaggatggtggcggtgaggtgatggctgtgcttgggaggacggaggaggatccagcgggagagtggatctggcggcgcttgggagcaacgaatccatccccaccggcggcgctcggcggcagcaacgcgtgggaggggcggcggggagcagatccgctgatggccatccacacccaccctccatcctcatctcttactgtgtga

SEQ ID NO: 95866 - DNA, 2759 bp, Oryza sativa
  unsure (1)..(2759): unsure at all n locations
  Clone ID: PAT_MRT4530_94017C.1
ttttttttttttttttttttttttttttttttttttcngangnaactgncattgtatcacattactctcagggattcnaatttccaaaaacaagcattggcccaatcaacatatagcaaatttttttggccttcatgcaaactaattaacacccgctgtttttatgtatgccttttcaatctgcttataaccattggcacatgaaacattttaaagaatgtctgaactcaaaacactgtcgcagtaatggttcaagaacttggagaggcgtcatacagattacacataactcttcaagaatcctattctaattattattggatgggctattctacagaccataaatgccccattggcgtgtgttctattattctgcatagtttccgcagttgataggaaagcaggatgttcatctatagtcgggccttgacttgcttagctggtgcactcagaggaaccccatttgctgctctttctgcaaggtaggaacaaggcttgaagatgtcgctataccgcttcgcccacacctccaacttgtcatggatgtactttgcaccaatggaatctgcccagaacatgattcctcccctatacggtgggaatcccatgccaaagattgaggcaatgtcaaggtcagaagccttgactgcaattccctcatcaagaacacggcaagcctcatttatgactgggaagaagaccatctcaactatgtccttctcacttagcttcatcaactcagtgtctggtgttactccagccatactcctagatttttcaatatatttcataatttcgggatcaggagttgccttcctcttgtcctcatacttgtaaaagcccttccgagaggcctcacctgtccttttgtcctccatcataagaggaatcaacattgacttgtagaccctctctgggaagttctcaaggtactgcataccagtggccgcagcaacaccaaaaccaacgaggtctgccagtctgaatggacccatgggcattccaaatttggtacatgcacgatcgatcttgtacacatccataccaagatcaacgaacaggagtgctgactgagtgtaaggaaagaacattctgttgactgcgaaaccggtacagttcccaaccactattggtgtcttcttgattttcttcccaacatcaagcaaatcaacgacaacttgtggtgaggtgtgctgggtgcggactatttccagaagtggcatgacatgtgcagggctaaagaagtgtgcaccgacaatacggtctttggaccttgttttctcaccaattagattaagatcaattgtagatgtattagtagcaaggacacaatgggaaggacagtacttctccaagtcagaaaatatttgctgtttcaatttcacattttcaataacagcctcaataactaaatccacgtctttgaacctttcataatcgaggacacctgttacaagagacatggctttctcatatctctcctctgtcattttccctttcctcacacgactctgcaaattggctttaattctgtcaattccagcatttagaaacttctcatttacttctttgagtataacaggataattactcagtatcatcgcagttgcaattcctgaacccataagtccaccacctagaatggcaactttagtaactttcctaggcatcaatcccaagtctgtagcaccaggaacctttgatgttgcccgttgagaaaagaatacatgaactaagtttttacatgtatccgcgaaaagaagaccctggaaagcatttgcttccttccagagcccagctcggggtcccgaaacaataccttcttcaatgacatcaatacaaacaagcggatgctcaagattggcagcctgccttcgagcttgagctcttgcaaacttgagaatctccctagcctcaccaagtggttctagtttgtcagtcttataaagacttttgatccatggcctttttaattcacagatatccaaagcccaacgacgagcagtattaaccaaatcatcagcagaaaccaaggaatcaacaagacccaattggtgtgcctctgcacccttaattggcttagatagcagcatcatttcaagtgcttttgtcaatccaacaagacgcgggagtcgttgtgttcctccaaatcctggaataactccaagttgaagttctggaagtcctaattgagctgtgggagttgaaatgcgtgcatggcatgccatagcaacttccaatcctccaccaagagcaagaccatcaattgcagccactgatggctttgttgcagcttctagggtatcagtgataatatctattgatatgtaaccaacctttggctgttcaactttgccaccctgaacactaccaaaggaactaatatcaaatcctccagaaaattttcctcctttccctgtaacaacaatagctttcacatcattcctccgaagagcttcagcatagttttcctttaagcttagcaatacatcgatggagagcgagttgacgggcgggttgcagatggtgatgacggcgacgccgtccgctccgacctccatctccgtcctccccttcgccgccgccgccgcggccatctctcctccgctaatctgtcggttccccgctccggcggagcctccaaagatctcgcgtttggctcctccgctgttgctttctcgctagaaggagcctcgtgcttgcaagcgatgtctatctccgtctccgaccaacgatttatagcgcgacccccccaagag

SEQ ID NO: 95867 - DNA, 142 bp, Oryza sativa
  Clone ID: PAT_MRT4530_94018C.1
atttataaccttacgactagggacaacctggtaatattttactgggacatgcatgcacacaagctgtgcttataacaagtgaaattagagcttgacaaaatcactggtcatatatttatacatggacaaaagtgcaattaat

SEQ ID NO: 95868 - DNA, 344 bp, Oryza sativa
  Clone ID: PAT_MRT4530_94019C.1
atgtcagggatgctcggcaggtggggagctcgtcgaggcgaggtgggagaggacatccggctggctggcgatgcggcggcggcggcggcgtcgtcgacgatgcgggagatgggagagcgtcacaggctcaccgcgcatgcgacctcgaggtcgggccatcagagaggcccgggcggtggcggcgaggacgccaaggcgcgagactccgggccgtcatctcccgacgacggcggcgaggcagagaaagggcggcgcggtgaggagggctcgatgaagaagatgaggagcgtggtgctacgggaggccatggcggggctcccggagcacggcgacagctgtgtgag

SEQ ID NO: 95869 - DNA, 4616 bp, Oryza sativa
  Clone ID: PAT_MRT4530_9401C.1
tggctcggcacgcctgaccgaccggaactgcacttgccggctccacgcatgcgatcagtttttggcttgctatgctatggttgcttgttgcagtggttttgccacggggaagggtcaccgggaaattattgtttaggctgacgtgatgctccagggagtcctgtcgtgagctcccggcgccgactcggcagcgatgaaggcgaagcgcgcggccgacgaccaggaggaaggctgttagcgggagcgcgcgcgtgggaagcggctggctgctgaggggaagcatgggttagtggtggtgagtacgggggaggaggaggttaccactacttgaattaacttatgggctgccgtgcccttggtccgaggccttttcattgcgccgttcctgagccgattcctaggagtacgaaggaggttccgttccaccgacataaggacagcgaagagacggcgaccgagggaggggaagatcactcggcacgtgggaaggaggaatgttggaattcgttgaggtggaatagcgctccgagccagaggcatgtcggatgctctgtggaagaggccaatcccaagctgagtgctgagtcacaaggcggaaaggcagaagatgtggcattaaatcgaaagaacaaacgtaggtgggagacagctggaggtcctcgtattgttgctaaaggggcgggcgagaagtgagaaggaaaacgcgcaatccaaaggaggggaggcaattcttgaggaagagacgagatgaagaaggacatcagggaggaaaagtaatttgggccaacaaaaactcaggtcattcatcacctgggctaaagtagatacaagtgtgaaaccgtgtcccatgttgcatcagttgaaatatgttgtgaatatgaaccctttcggaaacgtccaggatcatttggtcatggagaacctcaatcttcgaacttatatgttgggaatctgactcctagggaggacgagagttttcttatgagaacatttggtcgatttggacctattgctagtgtcaagattatgtggcctcgaacagaagaggaacgcagaaggcaaagaaattgtggttttgttgccttcatgaatagggctgatggacaagcagccaaggatgaaatggaaggtgttgttgtgtacgactatgaactgaaactagggtggggcaaatctgttgctcttccttcacaagcactgcctgctcctccaccagggcacatggcaatccggaataaggagggtggtactgtcatcttatctggtcctggtggtccacctcttgcatctgttaaaccacagacctcagagctggtcctcacaccaaatgttcctgatatagtggttgctccgccagatgatgcacatgttcggcatgtgattgacacaatggctctgcatgtacttgacgggggatgtgcttttgaacaagctgttatggagagaggccgaggaaattctttatttagtttcttgtttgatcttaaatcaaaggagcacacatactatgtttggaggctatactcatttgctcagggaagtggtgatagtattttgttggaagtgaactgtgatagtaaagagggtgatactttgcagcggtggagaacagaaccatttatcatgattacaggaagtggaagatgggttccacctgctttgccatccagcagaagtcctgagcgtgaaaaagaatctacttttgcggctggtagaagcaggcgtgtcgaagtggagcgcacattgactgattcacagcgtgatgaatttgaggacatgctacgtgcattgacattggagagaagtcagataaaggaggctatgggatttgcattggataatgctgatgcagctggagagattgttgaagttcttacagaatctttgacactcaaggagacacccatcccaaccaaggttgctcggcttatgctagtgtctgatattcttcataacagcagcgctccagtgaagaatgcttctgcattccggacaaagtttgaggctgctctacctgatgttatagaaagcttcaatgatttataccgcagtatcactggaaggattactgctgaagctctgaaggagagagttttgaaagttctacaagtatgggcggactggttcttattttccgatgcatatctgaatggactaagagctacctttcttagatcaagccacttaggggtcatcccttttcactctctatgtggtgatacaccagaaattgaaaagaaagctagctctgaggacggcagtgatggatttaggctcaacgaagatggtgccttggccacaggaaaggcagcggcaacaagggagctgttagggcttccgctagctgaacttgaacgccgttgcagacataatggcctctcgctatgtggtggtaaagagatgatggttgccaggttgcttagcttggaagaggctgagaaggaacgagtatatgagaaggacgcgggcattaaatatggacaaggagaatcgcatagaactggaagagatgacattgctgtgaatgctcgtaatgcttctagacctggagaaggtactgatagtggtgaatcagacatgttgggtctctctcattatgctatggaagcagggtacaaacgctctaatgaatccacacccgctgaacctgttccaagcaagaagccaaaagttgaccctgttttgcccgcttcaaaatggagtcgagaggatgatgtcagcgatgatgaagatagaaaaggtggcagaggcttaggattaagctattcatctggtagcgatattgctggtgattctgggaaagctgatgcaacagaagttagtactgatcactcgaatcatcaccaggatacgattcttgatgaagagcatagaaagaagttaaggcagattgaaattgctgttatgcagtatcgtgaatctcttgaggagaagggtttgcgaaacacagaagagattgagaagaaggttgccagccaccgtaggcgtcttcagtctgaatatggtttatcattttcaaatgatggtgcaaacagcaggcgctcttctgagaggacatcgtcggagcggagagataggcatgatgattcttcaagaaagcgtcatcgaagcctgagcaggagccgtagtcctccaaggagatcactggaaagagatcgagagcacaatcgcaacagagacacagacagatctcatggtaatgatgctggacgagagagagacagggtacgtgaaaaaagcgcaagccgagggagggatgatcactatgatagaagcagagacagggagaaggacaggagaaagggaagattgaaggtgcattattctcatcctttgcgtttgtataattgtatcttaccagtctggtcaggcttgaaatgtgccaaagagaagtggatgttgagacttgagactgtatccttctgtgtcctacatggtagtagtacagacacttgtgtgatgtctgttaggtttttgtttctgtttttctccatcctgttacatcagcattggtgctttgcatacctgcttatcaacatgggaatctacctcagtacccccaaaaccgataagttctctgaagacggggaaaatgataagcttaaacttggtctttcgtctatgcaaggatggcgtgcaaacatggaagatgctcattcagcattgctaaatcttgacaatgagacatcgttctttggtgtttttgatggccatggaggaagagtggttgccaaattctgtgcaaaatatttacactctcaagttctcagaagtgaagcctattcagctggtgacttaggcactgctgttcatagagctttcttcaggatggacgaaatgatgcgaggacagagaggctggagagaactatctgcacttggagataagataaacaagattggtggtatgattgaagggttgatttggtctccgagaggcagtgattcgaataatggacaagatgattggtctttcgaagaggcatacaatttgtcaagagaccacaagccagagcttgaagctgagagagacagaatagtaaaagcagggggtttcattcatatgggacgaataaatggaagtttaaacttgacaagagcaattggagatatggaatttaaacagaacaaattcttgcctcctgagaagcaaatcgtgactgcaaatcctgacatcaacgttgttgagctttgcgacgacgacgactttcttgttttagcatgtgacggcatttgggactgcatgtcaagccaacagctggtggatttcatccacgagcatatacagaaggagagcagtctttctgcagtgtgcgaaagagtgctcgacagatgcctagctccatcaacaattggtggagagggatgtgacaacatgaccatggttctggtgcagttcaaaaagcctattactcagaataaaaaagccgacgtaggggagcaatctgtgaaaggtgtggaagaggctgagatcaatgctgctgaggagaatggttcttgacgccgatgattatgcagacatttgctttcataagcaggccgagtggagcagcagtcactgtgtgtgtgtgtgtgtgtgtgtgtttatatatatatatatatatatatatatatata

SEQ ID NO: 95870 - DNA, 1081 bp, Oryza sativa
  Clone ID: PAT_MRT4530_94020C.1
actcacttcctctctccttccctctccatgggcggtggccggcgaagagcagccagggcggcgcgacaggacggttcggcgggcgcggtcaccggtgcagaggagcacgccacggtcgggcgtcgccatggcctctcttgtccccgtcaaagtcaccccgctcgacgaggtcggcggcggcgagcatggtgtcgcgtcgcggcgtgccccgttgaagtcaccccggtcgacgaggtcggcgcacgcgagcggggaggagcgtcggtggtgggaccacaggggtagagcgaagggggagctggaggggaacggtggtggcgaggtggaggaggaggatgccgctccgacgaaactcccattcagggcgagggaggagcggaagacggagacggcgacagcgggagggaagtggggatggaggcggcgaggagggagttggccggccgacgcgttgtcgccgccgccgccgccgttgtccttccggccgttgctcatccgcgaggccgtccccaacaagccgccgctccggccgtcctcccccgttccagcgccatggcagccagagttcttcggcgagggtatcaccgtcaacggcaaggcctggccgttcctcatcgtctaccgccgccgctaccgcctccgcatcctaaacgccatcaacgcccgctacttcaacgtctccctctctaacagcttccccatccacgtcttcggctccgacgcgtcgtacctctcggccctggacaccgtcaccaacctcctctccctggccgagatctttgacgtcatcatcgacttctcctagtcgccgacggccgagatcgagttgctcaactcggcgccctacccgttccctaccaacgccgcccccggctcgctcaatggcagggtgatgaagttcgtgaatccgcccgcacgcggctcctcccaccgccgtccgccgcacgcgcatgcttccacctttgcgcccatccccgcggcgccggcctgcgcccggcccgccgccgcagcgtcgccacgccaccccgccgcctgtttcctacctcgccctgccggccggcccgcacgaggtgagcgggga

SEQ ID NO: 95871 - DNA, 457 bp, Oryza sativa
  Clone ID: PAT_MRT4530_94021C.1
caccgagacaccgaccttgccgtcgccgttacccgccgccgtgacaccggcacataccctcataactcaccctgaagcgccatagacggcgcctgtactacgactatcgcagtcgcaccgggagccgcgaccacactctacttttcaatcctaagatgcccggcagttgattgtagcctacgagaagatgttacgccacttacactctgcccataaagcacacgatgaatattaccctgattttgctcgacgagctagcttctcttgtgaaagtttatgagtgtcactgatggtgctccttatacatatctgctgtaccgagatcagacactgagatgctcctagtattcagcacactgttatactgaagcatagacccaaactgctgtgcattggaaatgttctttgccgatggtcagacctgtggctgaagaacagccgttatagatgaaccaac

SEQ ID NO: 95872 - DNA, 1143 bp, Oryza sativa
  Clone ID: PAT_MRT4530_94022C.1
tcaactcacttcctctctccttccctctccatgggcggtggccggcgaagagcagccagggcggcgcggcaggacggtgcggcgggcgcgggcgcggtcgctggtgcagaggagcatgccacggtcgggcatcgccatggcctctcttgtccccgtcgaagtcaccccgctcgacgaggtcggcggcggcgagcacagtgtcccgtcgcggcgtgccccgttgaagtcaccccggtcgacgaggtcggcgcacgcgagcggggaggagcgtcggtggcgagaccacaggggcagagcgaagggggagcttgaggggaatggcagtggagaggtggaggaggaggatgccgctccgacgaaactcccatccggggcgagggaggagcggaagacggagacggcgacagcgggagggaagtagggatggagacggcgaggagggagttggccggccgacgtgttgtcgccgccgttgtccttccggccgttgctcttccgcgaggccgtccccaacgagccgccactccggccgtcctcccccgttccagcgccatggcaagcgacgagaagccggcggcgcggcgcccccacccgaagccgccgacgacgatgaggccgagtggcgcggagtcgtcggcgccgccgctccccatccgcagccgcgctcgcctgctgctgccggcgactgtcgccgtgctccgggagccccgccatggcctcccgcagcaccacgctcctcatcttcttcgtcgagccctcctcgccgcgccgcccttcctctgcctcgccgccatcgtcgggagatgacggcctggccctaattttctctgctcctctaatattggtcccaaactggcgcccgcagcgcgtcgtatgccgccgccaccatccggagtcccgcgccttggcgtcctcgccgccaccgcccgggcctctctggcggcccgaccccgaggtcgcacgcgcggtgagccggtgacgctctcccttctcccgcatcgtcgacgccgccgccgccgccgccgcatcgccggcccgccggatgtcctctcccacctcgccccgacgagctccccacccgccgggcatcctctcctcctcttccgccgcgcgcttccttgccaccgcatctaggccggccat

SEQ ID NO: 95873 - DNA, 189 bp, Oryza sativa
  Clone ID: PAT_MRT4530_94023C.1
tcagccgcctactccatcgtcaagtcctgctgttgctgcccccagttcatcccctgctgtaccgatgtcaaccatgcccccatggccaccgcaaggagcaggatggggctctgtaccccccaattttgcttttatggtcttctttgcaaccacagcaacagcttgccctacactctgtgctgtcgtcat

SEQ ID NO: 95874 - DNA, 2721 bp, Oryza sativa
  Clone ID: PAT_MRT4530_94024C.1
atgttcccgcgtcgccgcggagatgctgcgtgtctcctgcttctggcgatagcttgcatcctctcatgcgtcgccgtcgctgacgcacggccaatgccgccgccgcctacgctgcgccatcacggcggcgtggtcagccggtacgcgttctggacgggcaagccgcggtggacgcgacacggacgaccaatggtgctgacgtacgccgtgtcccacaccgacgccgtcggctacctcccgggcgacgccgtgctggccgtgttccggagcgcgttcgcgcggtgggcggaggtgatcccggtgagcttcgcggagatcacgacggaggacgacgcggcggcggcggaggcggacatcagggtggggttctacggcgccggcgagcacggcgacgggcacccgttcgacggtccgctgaacgtgtacgcccacgccaccgggccggaggacgggcgcatcgacttcgacgcggcggagcggtgggcggtggacctggccgccgacgcgtcgccggcggccgtcgacctggagacggtggcgacgcacgagatcggccacgccctcggcctcgaccactcgacgtcggagagctcggtgatgtacccgtacgtcggcacgagggaaaggaaggtgcggctcactgtggacgacgtggaaggcatccaggagttgtacggggtcaacccaagcttcagcttcctagactacttcaagccggaccatgacaccccaaggagtcgtttttggcgacttgcacttatagctaatcatagactaattaggctcaaaagaagcggagatgtggcgcgtctcaccgccacccagccggcactggcgcagacgacgatgacgacgacgctgcaaccgcggcccgaagacaacaacaacgacagcggcgccggcccgttcacgttctttccgggcaagccgcggtggacgcggccggacagggtactgacatacgccgtgtcgccgacggccaccgccgaccacctcccgccgagcgccgtgcgagccgcgctccggagcgcgttcgcgcggtgggcggacgtgatcccgatgagattcctggaggcggagcgctacgacgcggcggacatcaaggtcggcttctacctctacaccgacggccggtgcgacgggtgcgcctgcatcgacagcgacgacgacgacgacgacggggacgactgtgaaggagtgctcgctcactcctccatgccggagaagagcgggcagatccacctccacgcggcgcacaggtggacggtgaacctggccgcggacacggcgccgctcgccgtcgacctggagtcggtggcggcgcacgagatcggccacgtgctcggcctcgaccactcgtcgtcgaggagctcgatgatgtacccgttcatcagctgcagggagaggaaggtgcgcctcaccaccgacgacgtccacggcatccaggagctctacggggcaaacccacatttcagcttcggtgcctacttcaagcaggacatcttgtcgcgcatccaacagatgaagaaagagaagaagaagaaagctcgcggcagctctttttggcaacgtggtctagctctcacttgtgcccttgtaaacaaggactctatgataggttatatcagcgagctgtacagcagcatcaaggagctcgacatgatgaacaagattaattacgtttattttcttgattatgttggaaatagaacagttgaaaagaaagatccaaatatgcatcaattaagggagtcaattaggatcttaaccgtagaaataaaacgatggatgagatttgcccaaatccactgggtggagttgatgccaactctagagaatctgaacccctgtattgcacgttacgtgacaacgatcaatacgctagtattgcaactcaccggcggcacgtatacgtacacgatgtttctgctgtgtggctgtggcaccggctcccagccgacgcgactgcggtcccaagacaacaacggcggcggcggcgcggcggcgttcacgttcctgtggggcagaccacggtggaatcggccggacatgcggctgacgtacgccgtgtcgccgttggccaccgccgaccacctcccgcgggacgccgtgcgggaggcgttccggagcgcgctcgcgcggtgggcggaggtgacgcccctgaggttcgcggaggcggcgcgctacgaggaggcggacatcagggtggggttctacctccacacagccgacggcaagtgcgacgcgtgcggctgcgtctgcaagggcggcggcgaggaggcgctcgcccacgcgcacccgccgcaggacgggcggatacacctgcacgcggcgcggaagtgggcggtgacgaacgtggccggcgccggcggggacgcgccgccgctcgccgtcgacctggagtcggtggcggtgcacgagatcggccacgcgctcgggctcggccactcgtcgtcggagagctcgatgatgtacaggcattacagggggaaggtgagcctcaccgacgacgacgtcaagggcgtccaggagctgtacggtgccaaaccaccacgtgtcgacttgacagccgactccaagcccaagcgcgtcgaaactataagggaaattgaacagcacatccagcagaaaaaggaaacagcaaagaaaaaaccctttttttggcgactcgtacgtctaccactctaccctccatgtcttgcctgtgccgttaatagttag

SEQ ID NO: 95875 - DNA, 227 bp, Oryza sativa
  Clone ID: PAT_MRT4530_94025C.1
cgcacgcgtgcgttagctatagatcgagggcggtgcggcttgtttgttagttgtgacaggaagaacagatcgcagaatatctttttctcagcgtgcatactaggacatggccttcactaggcaaacatctataaaatgagtgctcagcggagaagcactgagaagcgacacagatagataatagggcgatacacttttagctgccaagacaggcgagttctattgaa

SEQ ID NO: 95876 - DNA, 332 bp, Oryza sativa
  Clone ID: PAT_MRT4530_94026C.1
atggctttaagaaggacacagcagaagaaaaacatggaacgaaagaaatcagagcacgaaccaaagagagtctgtgagataagagcagccagctgcagcacggactccaagacactatgtgtgtatgacaggtgggaccagattcatatgcatgggttacttgactccctcgtcggtcgggtgtgcgccggggagtcgtcgccccagggagggcagaagcgggagctcccctcatcctcgccctcggcctcggcgtcaccgtcgtccccgctgcggcctgccactttgcgcctccgggatggacgccggcagcctgtgtcaacctgcagcag

SEQ ID NO: 95877 - DNA, 2645 bp, Oryza sativa
  unsure (1)..(2645): unsure at all n locations
  Clone ID: PAT_MRT4530_94027C.1
gatagtcaaatttagcactagatcaaatttggacttaaaaaatcttggagatgtccacatatggtaagaaaaaaaaagttagctctaagaaattctagtcgcagaaatctaaatatacacaagnctgttgtgtcatgtgtgtaataacctattaataatcttacaacaataattcttatgacgtctgcgtgtcattgcttgatcactaccgtgtgctgctgcatgacgagcaccgagcccatctccagcgagtcgttggacgcgaggatctccgccgcggggcccatctcgccgccggcgtccgcccaccgttccagcccggccaagagctccggcggctgcctccctccccggccgacgatgaccagcgagaacatcccggccatcccggccagcgtctcctccacgtcggcgggcctctccacgaccttctccacgtacatggccatctccgtcgccgcgtacctctcgtagaacctccacaggaagcgctcgtcgacgtccccctcctggaacgccatgtccagctcgtcgaccttggcggaggtgacgctgtcgtacgtgctgcgcttcacgaagcggaacaccgtgaggccgatggacgggtgctcggcgaggcgggaggcgagcgacacggcctcgcggtcgtcggcgccgccgaagaacacggcggcgacgacgtgcgtcaccgccctgtcgctgcacgggtggaggagcgtcctgccgccgccgctcgtggccgccgcctccgccgccacgctgctgggcacgttgaagctggtgccgctgttccggtaggggcggtcgacgaggagccccacggtgcacggcgcccgcgacagcacgccgtggttcagctcccgccgcccgccgaggcggcaccacatcttgccgtcgtagcgctgctccttgtggcagggggcgaggaggaggcgggcgtggacgccctccgccgcgcggcagacggcgccggcgtcgtccagggccgcgccgccgcggcacaccacgtcgatctggcggaaccagatgcccgtggcgcgggagaagaggtcgacgatcgtgttcatccgcgtgacggcgtcgcggccgccgccgcgttcgtctcgtcctccgccgtcgtcgtcgtcacggattcgctggtggtacgggatccggacgacgcgctcttcgccgacgtcgaacaggtggaggacatggacggcgggctgctcctgcggctcgctcaccaggagctccaccaagctgagcatgcccggcgcggcgtgcgcgctgtgcacgcaggcgagcatgtggagctcctgctccgcgcccaacgactccatggcctggtgcctcgtcctgtacgcctcctcctccttccgccgcaccaccgccaccaccggaccggcgacgagggtgctgatcaagttgccgatgatcatcgcgtacagcgcttgctccgcccacaccccttctgatttggcgaacttcatgttcatggtgtcgacgtggcccttgatgttgaggaggacgctgaagcggagcgcgtcggagagcggcatgctgaggtaggaggcgacggcggcggcgccaatggccttgccgaaaaggccgagcagcgtaatgagcacgccgggcacgatgatggcgcccgacatggagttgaagttcatcctcatgccgatcgtcgcgaagtagaagggcagcatgatgcccttcaccggcggcgcgagcgcgtcggcgacggacctcgccgcggcgccttcccgcgggaacgccagccccagcgcgaagctcgtcggcatgccgtcgaagccgaggaactgcgggatgttgccgacgaaccagatggccaggagcatgaccgccaggtcgcggacgccgacgtggtgctggccgacgttgcgcttgttgatccgcgtcacggcggggcgcaccatccacaccgcgccggcggccacggcgagcgccaggaagcctttcctgatctggtgctcgccgcgggcgacgccctcgatcttgcccttggcgcgggtggtggacgacaggacgccgtcgccgaggatgcagatgaggttggtggcgatcccggcggcgacgacgaggcggccgttctcggtgacggtgagcttgagctcggcggcgatccgcgcgacggctatggaggaggtgttggtgagcgccagcatgagggtggcggcgagcagctcgggcgtcttgaccggggagtgcatcatgctgccgtacatgccgctggagacgacggcggcgaggagcaggctggcggcgacggtggcgtaggtgaaggcgacgcagcggtgcgtggcgtgacgcagcgcggcgatgtccatgtcgaggccgacgaggaacatgtacaggatgcgcgccgcggagatgtagccaccgtacatgtcctccacgttgtccacgtcgacgtgcacgatggcgctgcggagccccatgccgccgaccacaacgccggcgaggatctgggagatgacgctgggctggttgtagcggcggaggaagaggtggaagaacttggagacgaggatgacggcgagggcctggatggcgacgaggaagagcgtgtcgagggcgatgccggggatgggggagagagcgagggggtcgatatgggagcaaatgtagtaggatcttgccat

SEQ ID NO: 95878 - DNA, 381 bp, Oryza sativa
  Clone ID: PAT_MRT4530_94028C.1
cattgatacgccattgccatacaccgctgctgccgaggtcgtcgttgacgggcgccgccgtcgtctcagccggcgtcggctccgtcgccagccaccgccgccaccgtcgtcggatccactatagatgccaaggtcgccgtccgctaccgtcgtctccgaggtcgtcgctgccagatgccgacgtcgtcggcaccgtcgccagatccgtcccgcgtccacccaagtttgaggtccttgccagaggctcgcttctaccgccaccatcacctgcccttgacgccgacccctaaacgaccttatacttcatatgtccaccccgcgcgcgcgtgccacaatatgatggagtgcacacttacgagacagttcaagcaccacaagcca

SEQ ID NO: 95879 - DNA, 213 bp, Oryza sativa
  unsure (1)..(213): unsure at all n locations
  Clone ID: PAT_MRT4530_94029C.1
catgacgcgatgaagtttgttccttagagtgtcgcccttttttttttttttttgttttgatttttaangatttggggacggcccaaaacaatganngtttgtggatgtgaggagacagtgaagggtaaagaatgattgggattagagaatattacatggaatacatggaaagagaaggtgatgatatttgcaataacatgaatagtagaaggt

SEQ ID NO: 95880 - DNA, 1146 bp, Oryza sativa
  Clone ID: PAT_MRT4530_9402C.1
cgttctgtccgaaggcgcgtgatcccgcactcgcagcctcagcatcagctgcatcactccccgcctctccgcgatcgcaagggccgcgccgatcccccccgcaccagaagccctcgagattccgatctcccagaaaacctccgcctcgcagcgcgacggatccatccatctcgccacctttctcccacaaggaatttactagctctcggagaaactacggttgaggcttgcggtttggatgcaccttcatgtttataagaaggctcagagctacctgatataactcctgttctgtcataaacagcttatcaacatgggaatctacctcagtacccccaaaaccgataagttctctgaagacggggaaaatgataagcttaaacttggtctttcgtctatgcaaggatggcgtgcaaacatggaagatgctcattcagcattgctaaatcttgacaatgagacatcgttctttggtgttctggatgccctggaaggaagagtggttgccaaattctgtgcaaatattacactctcaagttctcagaagtgaagcctattcagctggtgacttaggcactgctgttcatagagctttcttcaggatggacgaaatgatgcgaggacagagaggctggagagaactatctgcacttggagataagataaacaagattggtggtatgattgaagggttgatttggtctccgagaggcagtgattcgaataatggacaagatgattggtctttcgaagagggaccccactccgattttgctgggccaacatgcggatgcacagcatgtgtagcgctaataagaaataaccaacttgttgtggcgaacgctggtgattcccgttgtgttatttctagggctggccaggcatacaatttgtcaagagaccacaagccagagcttgaagctgagagagacagaatagtaaaagcagggggtttcattcatatgggacgaataaatggaagtttaaacttgacaagagcaattggagatatggaatttaaacagaacaaattcttgccttctgagaagcaaatcgtgactgcaaatcctgacatcaacgttgttgagctttgcgacgaccaccactttcttgttttagcatgtgacggcattttgggactgcatg

SEQ ID NO: 95881 - DNA, 899 bp, Oryza sativa
  unsure (1)..(899): unsure at all n locations
  Clone ID: PAT_MRT4530_94030C.1
agcgcttatcccccgcccctctccacnccgctccgcggnccatggcgatggcggcgcgaaccctcgccctcgcattccccctccccctctgcgccgtctcctccccgcgccgcgccaccccactcgccttgccccgccgcggggcggcacgaccgctggcctcgctagcccagtgccccgcgcgtggccactccccctcgccgcggcgagcagcggggcgggcccttgcgccgtgcgcggccatgcgtggcagcggcggcggtggcggtggcggagagtttgcctcggacgatggcggcggggcgcgcgcgctgcttcgggcgacgctgtggggcgccgaggccgcctacatcctctggctcttcctcctaccatacgctccgatcatgcagggtgacccggtgtggggtatctcgcaagcaacgatcagtgacctcattggcttgtcgctcaatttcttcttaatcctgccattgctcaattctgctttcctgataccttacatggcaatccgactcaatgatcctgacaaggacaagtctccaccacaaacatcaaaattgggttcagttatggtaagaggtgctccaattgtcggcctaactggtggcttggtctgtattttgtcgattgcttgggcactctttggtcgcgcggatgctagttttgggggcattgctgaacgctggcagtatgtccaaagttatgtcttttcagagcggcttgcttatgcatttctttgggacatactgctgtattccatattccagccatggttgatcgcggacaatattcagaacgtgaaggcaagtgctactgagtttgtgaattcagtaaggtttcttcctgttattggtcttgttgcctacctgttctgcttagaggacagagatgattag

SEQ ID NO: 95882 - DNA, 363 bp, Oryza sativa
  unsure (1)..(363): unsure at all n locations
  Clone ID: PAT_MRT4530_94031C.1
aaanaaaattccnacgaccccgcttaaatataaaattgccccattcaaaaactaaaccaacaacttntaaaaacaccaaaattaaaactttcataaaaaccaacctcctcccttccaatatatcttatttcccaaagctataaaaaaaacaatttccacattaaaaacaacaaaaactatcctaaacatataataaccttattcgaaatttaacccaaccccccccaaacgatctataccccaataataactaaaaaaccttctatgttcttcacaaaccttaactaaaattcatcaaatccaaaattctcaaataataataaagctttcttttatccaaaattcataaaataattcatatac

SEQ ID NO: 95883 - DNA, 102 bp, Oryza sativa
  Clone ID: PAT_MRT4530_94032C.1
atggaagttgtggtgcgagagattgctgcgtactggtgtgagaaccaatttcagctccacggcgctcgttttgttggtggagataagccgagttcggtttga

SEQ ID NO: 95884 - DNA, 562 bp, Oryza sativa
  Clone ID: PAT_MRT4530_94033C.1
gctgcagtttaaacccaaataagaacaattctggtttttcgaattctgaataaaacattttttgaatttcattatctttaaaaaatgtttgaaaaattaattttgttttcaaatttgatgttaataataatgcccctttttgatttttagattaagctttttttgtaacgagacttatgcttttaaattagaaagcataaagtacaagcgaagggcaatatagtcattttgggagaattctaatggtcaatttagagtcaactcacaacatgggtataaaagtgatcaaaataaaaactcaagggcatacagaggatgaggcaaaattcaggggcacgtaaaggattaagcgaaaacccatgtctctaaaatatgtgacctcctatcatgtccatgtctctaaaatatgtgacctcctatcatgttgaattatccacacacctcagtatacttctcaggattaccacttgaataggataaggttaaacaaccacaaagaatagctatcaggtcattgtccagatccattatccactcaacagtatctgtaagccaataaatt

SEQ ID NO: 95885 - DNA, 194 bp, Oryza sativa
  Clone ID: PAT_MRT4530_94034C.1
atacaaggacgaaaggatgctatatatgagagcaattttaatttctcaagaaaaaggaaatacatatactctctctttctctaccaaggaccaacaaacgaaatacacaaaccaaaacgcttattacatgaatgaaactacaacacattcctaaccaaccatttaattaatctgtacaaattaaccatcacatt

SEQ ID NO: 95886 - DNA, 522 bp, Oryza sativa
  Clone ID: PAT_MRT4530_94035C.1
atacaagcttttggggctgagggaatgacagaggaaatgctgaagtacttgaatgtagctgaaaatgtcttatggaacatggatccttatcagaaaagtgacctctattgcattgccttgcatgctctggtcaaggccaaagatgaactgtacaatactgcaattgaagcattgcaagtcctcagtgtgagaatgatatctgaggaggccgatgttcttaaggaaaaaggagtaattgtagaagatctaatcctcagcgaagagccagatgctgaattaaagatcatgaagacatttgaagcaactgaacatcttgcgacagccttactgaacttgaggtgggggatcggaggaggaggaggcccgatggcgttgggggcggtgttccacggcgcgcagctgatgctggatctggcggtggccgggctgtcgctggtggtcgcgctcggccttttcgccgttgtcaccgccgtgctttgctccgccgccttcctccaccactccaagcccgtcgcgtcctag

SEQ ID NO: 95887 - DNA, 2625 bp, Oryza sativa
  Clone ID: PAT_MRT4530_94036C.1
atgtggttagtggagttcactccggagaggcctcaacttgttcaaacggtgctgggctttacaccttttcgttgtactgtcatgttttccttatggaaggccataactgttgtttctaatctagttacccagttctatgcttgcaaattgtatatgaacgaatatgatgaatttaaatggatgaccagtttggctactagatccattcaagcagatattgttggtgctcttcgcagaggtgatcggcagcaagcatccttgttgctttcaaatcttcaacagactaacagggcattgacttcagaagatttttctcatatactggaatattgtgcaacagcacctgatcctttgtttgttacggaggctttggaactcatggaagagaatgctgtacatatgagtcaaagagtctacagatctgtcactcgagctctcagcaaaggcgggtattcaaaggaggcaattcactggctgactcttttagttgagaaagaaagcagtcacaattatttgccaatttttaacatatttttaagtggctgcgggagtaccacaaagcagagtgatattgaaggctgtctagagaaaatggaaacttattttcttgggaagtctgaaataacatattgtgagctcctgaagcttgcagtttctcagagaaatttatctgcagttcatgatatatggaaggactgcactaggaattataacccaagcatcattttacagaggaaatttgttagggccctaactacactaggggaccttcgatctgcatatcgtatcatgcaacatatggtagtccttgctggacgaaacactgaccatctgaggggtaaaggaagataccaaagatcaagactagacattcctgtgcctgctttgactgaattagaagacctcaaaattctattaggctgtgacctgccatcatcatttcaaggaaaggtggaggaatctgagaaatgttcaactgatactcaacctgagctgtcacaggaagaaaatatttcatttgaaaatttgcaattgaagggttatgctgaattcatttctactggcgacaatctctctgacaagtctgtcctagacaatgggaggatggcaaggccattaagattggtaccagctacagtaaagaaatttctgctttggtctttcaatgatattgtacatgcgtgtgtgcaactgaacaactgccagatagctgagcagttattactagagatgcaaaggattggattgcaaccatcaaagtttacatatgatggttttatcaaggctgtcatggttgggaaaggagttgcatatgccatcaaagtgattgaagcaatggagagaaggggtattgaaccttacaatgacacacttgctgctctctcagttggcagtagcagaagtttacagttgaatctggctgaggactttttggcaagaatttcaaagccacaaccgaagtacatacacgcttttaatgctttgcttgcaggttgcgacatgatgaatgaaccagaaagagctgtccgcgtactagctgaaatgaggcatctgaatttgaaaccgaatctcaggacttatgagcttctcttttctctgtttggcaacgtcaatgttccctatgaagaaggaaatgtgctctcgcatgctgatgtttctaaaaggatcagcataatcgagacagacatgttaaacaatgaaatccaacacagttttgtgtgcatgaaaaacctgatacgagcttttggggctgagggaatgacagaggaaatgctgaagtacttgaatgtagctgaaaatgtcttatggaacatggatccttatcagaaaagtgacctctattgcattgccttgcatgctctggtcaaggccaaggatacccacaaagcaataaaaaccttcatgaccatcagatcatacggacttccagcaaatgttgcaatttataatattatgatagagtgctgtaaattgttgccttgtgtcaaatcagctagcgctgtgctatcattgatgctccgagatggcttttatcctacaattttgactttcacatctcttgtgaaggttgtattggcaagagaggattttgagggggcgctggatctgttggatgcatgcataatagaaggaattcagcctgacattgagattttcaatacagtactcttagaggcatttgaaaagggtcagattcatgtcgttgaatatatagttgagtgtattcaccgagctaaaatccgacctgatcaatcaacgctttggtacacattttgtgcctacgtggatcaggaactgtacaatactgcaattgaagcattgcaagtcctcagtgtgagaatgatatctgaggaggccgatgttcttaaggaaaaaggagtaattgtagaagatctaatcctcagcgaagagccagatgctgaattaaagatcatgaagacatttgaagcaactgaacatcttgcgacagccttactgaacttgaggtggtgtgcaacaatgggttccacaatatcctggtcacccgaggatagcctctgggcaaggaggttggcatcttcttatgacggtaacagaagaccacatatatttaccagtattgtgcctaaacagtttgtggtttga

SEQ ID NO: 95888 - DNA, 393 bp, Oryza sativa
  Clone ID: PAT_MRT4530_94037C.1
atggtggcatggaggcgtcaaggcgagctcgaccaacgaaagagccaccaaggtggccgcatggtggctaccagtcgcatgcaagtgggcgctcggttggcgaccgcgaatggcatctacattttcgtggacaacgcgaaaacggcggacattcaggaggcaaaggacggccaaagacagtggataggacagcgaaaattgaatgcgagatgctggaggagcagcagggcaagctggcacatggtcaagatggggctccaaggcgtagatgcagtcgtcatggagctcaatgttcgctaccgcaccaggacaagggggagagcaaggagcggcgtcaccacgttggtggcttgtggcatgtggagtcggggacgaggtgacaatggtggatga

SEQ ID NO: 95889 - DNA, 785 bp, Oryza sativa
  Clone ID: PAT_MRT4530_94038C.1
ccggccggggcccaccgcttggcctccgtgagatggcacgagcgctcgtccaggtggtcggctcgccgcctcctcgcccgcgctcgccgcgccgcgtgtcgcgccaccgcctccctctcttctcacccccccccccccctccttcctctctctccgctgcctacgatataggcatcggcgagggcgacgagggggatcggaggaggaggagggaggaggcccgatggcgttgggggcggtgttccacggcgcgcagctgatgctggatctggcggtggccgggctgtcgctggtggtcgcgctcggcctcttcgccgtcgtcaccgccgtgctctgctccgccgccttcctccaccactccaagcccgtcgcgtcctagccacccgctgctcatcaccgccgccacaacccccctcggaatgagattgttgttggaggcatgccttctcatgcaccatatgcatagcagaaggcgcaccattttgatgccagagcttccttcagacacttaatgtagatgcaagtgtagtgaatcacacgtatcaggtgatagttcgatgcacttgtagttgtatgaatgttatgtttacttgtactattctgccgatattagctgtttgtattgtaaatttcccatttagtcaaccttggtgatagttcgatgcacttgtagttgtatgaatgttatgtttacttgtactattctgccgatattagctgtttgtattgtaaaattccccctttaaccaaccttggcaacttttaggggtttacctctcatatac

SEQ ID NO: 95890 - DNA, 468 bp, Oryza sativa
  Clone ID: PAT_MRT4530_94039C.1
atggcgtcggtgggtagcggatcctgtggcgccgccctcgggagggtcggatccacctccctagggagtggctgcggctatggcgacggcgggcgcgcggcgagggtgttggatccagcggcaccgacctcgggaggaggcaaaggacggccaaagacagtggataggacagcgaaaattgaatgcgagatgctggaggagcagcagggcaagctggcacatggtcaagatggggctccaaggcgtagatgcagtcgtcatggagctcaatgttcgctaccgcaccaggacaagggggagagcaaggtggccttgcccgcgagagaaaaagcgaaaggaggaggaggaaagggagctttgcctccctccattttgggcggcggggctggcgagacatgtaggagcggcgtcaccacgttggtggcttgtggcatgtggagtcggggacgaggtgacaatggtggatga

SEQ ID NO: 95891 - DNA, 425 bp, Oryza sativa
  unsure (1)..(425): unsure at all n locations
  Clone ID: PAT_MRT4530_9403C.1
cactcgcccccgctgttacccatccccgcagcttcgaccaggacggctgattcgacaacggcttcggtgtggaagaaccaaagccgtgcatctccccgtcggcgagcatcttctaggtgatggaggagcatcactcacaaggagaagcattggtggagatggatcaagaaccatgactttttataatgaaaataaaaaacagtgtgttgtttgtcacagatgtatatgtgcttggagctgtatgtctgtatgtaggtggatgcagaggtttgcaaaagtccgtatgtgccgggtgtgtgtgtatggaggttcctttgtgctaggcatgggtggagcaagaagggcggcactggggccagcgatggtagcatgacgctaattncacctgctgttcatgtctgcaagatggctcagacacgacgatg

SEQ ID NO: 95892 - DNA, 599 bp, Oryza sativa
  unsure (1)..(599): unsure at all n locations
  Clone ID: PAT_MRT4530_94040C.1
ggtacgtgttctnccgtgttgcttcctccgcccgttcgttctnccgtgcctncgccgggcgaccggcgacccatgggcggacgtacccacccacccaaccgacccanggtggttctacncncccccccgggggccccggctcctggtccgnccacggaacttggggctacccccgacttgtacccccggctccccgccgttgggccggggcgtttggtgaccgcgcccgtgcgtcggccgtggcccggccgccgccgccagccggtccggcacactgctgccggccgctcgccgccgtcggcggcacgctggtgccggtgcgacggcgactccgccacactggctgggacgggcctctacccgggaagcctcgggcgcccccccgaatggtcggggacccccactggttccgacgggtgtttccgcgggctggccggacacggggaccttggacgcgcgcggcggcgacgcctcccggcgttctgcaccgtggacnntccccaccgggcggacggtgggtgtcctggctaccctgggccctggggcgagccacctccctgggggccctaacccctaaccgccccctaaaacgggggcct

SEQ ID NO: 95893 - DNA, 418 bp, Oryza sativa
  Clone ID: PAT_MRT4530_94041C.1
ggaaaaaaccaaacaatttttttttggaatttttttggggtccaaattttccttgaaaaagcatttgggttgaaaaaaattagcccgggtttgaaacgggcaattttttctttttgggcattttgaaattgggacttgctttgccctttggtttttaccccaaaaaccttttttaagtgtttaagggttaaaccccttaatttttttttgggaccgtttttaaacttaacccttttttttttgggggttttttttttttccagttaaaaaaaaatccttttgcttggggtaaagtggtttacccccgtggttgaaataggggccttttttggaaccacttggcctttacccttttttgggcccccattgacttcccccggcgggcagggcatttacttttttttgtttgaaagggggg

SEQ ID NO: 95894 - DNA, 1560 bp, Oryza sativa
  Clone ID: PAT_MRT4530_94042C.1
atggcgaacggcgtggcagagtacttgctgatggacccgtggcttgttctatggctcgtcctggcctccatggcgttcgcattgctgcacctgcggcggcgcgcacgccgtggggcgccgccgctgccgccgggtccgcggccgctgccgatcatcggaaacatgctcatgatggaccagctgacgcaccgcgggctggcggccatggcggccaggtacggcgggttgctgcacctccgcctcggccgcgtccacatggtggtggtgtcgagcccggagcacgcgcgcgaggtgctccaggtccaggacggcgacttctccaaccggccggcgagcatcgccatcgcctacctcacctacggccgcgccgacatggccttctcccactacggccacttctggcgacaggtgcgcaagctcagcgccgtgcggctcttcagccggcggcgcgcccagtcgtggcgcgccgtccgcgacgagtcggccaagctggtcggcgccattgccaggagagccggcgaggccgtcgacctcggtgagctcatcttcgggctcaccaaggacgtcatctttcgcgccgccttcggcacgcgcgacggcggcggccacggcgagctggaggttctcctgcaggagttctccaagctgttcggcgcgttcaacgtcggggacttcatcccctggctcgcgtggctcgacccgcacggcatcaaccgacggctccgcgcggcgcgcgccgccctcgacagcgtcatcgacaggatcatcgacgagcacgtcagcaaccccgccggcgacgaggacgccgacatggtggacgacatgctcgcgttcctcgacgaggccggacgagaccaaaccggcggcggcggcgagctgcagggcacgctccggctgacgcgcgacaacatcaaggccatcataatggacttcgtcttcggcgggacggagacggtggcgtcggcgatcgagtgggcgatggcggagttgctgcacagccccggcgatctccggcggctgcaggcggagctcgccgacgtggtggggctcgggcgcggcgtggaggagggcgacctggagaagctccccttcctcaggtgcgtcgccatggagacgctgcgtctccacccgccgatcccgctgctcctccacgaggcggcggcggactgcgtcgtcggcgggtactccgtgccgaggggcgcccgcgtggtggtcaacgtgtggagcgtcggccgcgacgccggcgcgtggaagggcgacgccggcgcgttccggccggcgaggttcatggcgggcggcgaggcggcggggatggacctcaggggcggatgcttcgagctcctgccgttcgggtcggggcggagggcgtgccccgccatcgtgctcgggatgtacgagctggagctcgtcgtcgcgcgcctcgtccacgcgttcgggtgggcgccgccgggcggcgtggcgccggaggagctcgacatggcggacggcttcggcctcaccgcgccgcgcgccgcgaggctccgcgccgtgccgacgccccggctcacctgcccgatgtga

SEQ ID NO: 95895 - DNA, 412 bp, Oryza sativa
  Clone ID: PAT_MRT4530_94043C.1
atgctgatccagtttgcgcatgccccggcacgcatgcggatggcggtggccatcggcaaggaaattcccaacgacataccgaagcaccattacacgttctacaagagaactacaaggaaattggcggttggacgtgctctacaagagccaggagtacaagctccattacacgttggaaacgaagcaccgcaaccgcaacacggcgaattccaaagacggcataaggatggctgccatggagaacctctccaacctgaagccggagccggcggcgagcaagcagttcgaggagcgccgccaccggagcatcgacgtcggcgccctcaactacgatccacgcgagcaggaagagcgcctcatggagaggaactacacagcacaggtgcaatgtgcagcccggggagtcgagtag

SEQ ID NO: 95896 - DNA, 932 bp, Oryza sativa
  Clone ID: PAT_MRT4530_94044C.1
tgatgctgagtgatcccgtccactagctggtgaattggagagacggatggagctcgagctcggcctcaggctcgcgctgccgtcgccgtcgccgtcgccggcgacggcgacggcggctgggagtgagcttgaccttctcaacagcgcgccggggtcctgccgcaagaggggcttcgaggaggcgctcggtgggttcaaaaccgacgacgacaacgacgacggcaatggccgcggcggtgacggcgattccgacggcgaaatgggcaacaagaggaggaagctggtggggtggccaccggtgaagtgcttgcaccggcggcgcgacggtggctgcggtggcggatatgtgaaggtgaagatggaggggttggccatcgggaggaagctggacttgtccatcctcggctcatacgctgagctgctcgacacgctccaccttatgttcccctccactaaccaagaggatgggcacgatcgtcgtcgacgtcacccatacgctgtcacctacgaggatggggaaggagactggatgcaggtcggagacgtgccatgggaggcctttgccaagtcggtgaaacggctcaagatactggtgtaactgactgcaaattaagctactagtactagtctttactacttcgaataaaattgtacgtgaacgggattattttgttcacgtttctctcatcaaaaaaaaaaaaaaaaaaaaaaaaaaaaaaaaaaaaaaaaaaaaaaaaaaaaaaaaaaaaaaaaaaaaaaaaaaaaaaaaaaaaaaaaaaaaaaaaaaaaaaaaaaaaaaaaaaaaaaaaagggggggggccgttttaaaggacccaattttacttccccgggtttgcaaggtaaaaatttttttatggggcccccaaaattaatttccggggccgcggtttaacaccggggggaggggaaaa

SEQ ID NO: 95897 - DNA, 583 bp, Oryza sativa
  Clone ID: PAT_MRT4530_94045C.1
ggccgcttggctgaagttgcggacgtgctggtggacggccacctgtttgggcagcgcggcacgcatcttgctggtgggcgcctcgaagtcgggcgtgacgaggacgaagtggaggcggagggcaggtggggaggagagcgggatgaggtggaaggggtcgtagctgcggacgaggacgaagccgccgaggatggccggggcgatgttgtcggcgtggaagcccgggacggctttctcggactcgaggcccgcgaggacgaggtcatcttggtgtaggagggagccgaagagggcgtcaacggccttgcagcggcggcggcggaggcggcggaggagccgaggccggagccgagggggaggcccttggtgaggtggatggagacggcgtgggacttgacatcgagggcgcgaagggcagcgatggcggcgactccggcgcagttgcggagggggtcgcgggagaggcggtcggcgagggtggggcgggagggggaggtgacggatgcgatggcgacggtgccggggggcagggaggggtcgagggtagcggtgtcggtgtctccgtaggagagggtggcgttcg

SEQ ID NO: 95898 - DNA, 1122 bp, Oryza sativa
  Clone ID: PAT_MRT4530_94046C.1
tgctggtggaggtgtgtttaaaaatgataaaggccttaagtgccagattccaggggccaatcttaatgatattgcaaaccaggcagatgatctcttggagtcaatggaatcaaggcccacaattcctgatcgaaaacttctcgctagactagttatcgtaagagaggaggctcgaaatatgatgggaggtggcctgttagatgaaagaaatgaccgtggtttcacaacgcttcctgaggcagaggtgaacttcttgagcaagctggttgctctcaaacctgggaaagcattggagaggatgatcaaggatgttatgcagggcaaggcagaaggtgctgataacattgaaaatgcaaatgctggaccagattctaagcttaatcatctaactgggatatctggaaggggaagtgtgacaggcctcaagccacggccagtccgtccaggaatgttccttgagacggtttctaaggttctaggtggtatatatgcaaacaacacatctggcattacagcacaacatctagaatgggtacatcaaacaacactgaagattcttcaggaaatggccttctaatgctgttttctggacgacattcactgccctgttcaagtatatgaactccctagattcttggcccttttaagcttatgatattacagcctagtgggcaaaaggatcatggtatggaccttagtcttgctgcaaaaacttattgatttttttttaccagtgaatggcaaatcttggaggaacttgagtggccattactaatatagttaaaaatagaagcagaagaaatgatgtctgggcatgcaaaggccaatggtgatctctgggtggaatgtaatatttataccacatttagtgcagaagtaaagtaagagcttcgaaaagcaaatagtcaaatggacacagtgatatttagcttagcttcctacaatggatattaagagagtttagcttacttttgagtgaaatagaagatggccttagatctaacatgatatgtatcgcccttttccattttgcaggattttctttgtctcaaaatatattttcaaattttatattgctggaagccagggatactttttaccagtaaatgtttttggttttcc

SEQ ID NO: 95899 - DNA, 445 bp, Oryza sativa
  Clone ID: PAT_MRT4530_94047C.1
cccactcgtgcgccgattcctgcttcttgccgtacgtacacgccgcaggccggacagatacacgaaccgcacggcgacaaactccgagacgcggaggatgtggacgagacctgacggatttcgatgacaacgctagtcgttcgggagcgttgagacgtcgggcaattcgcgggcggagacggtatggttcgacagcgcgagtttacggacctactcgggggaaacgcggcagccgggggcggaagtgtgtgcaggtacaaggccatgaccccgccttcgttgccgatgtcgccggctccggtgtggtcgaggatcttgttcatcagacctgtcggcatgaaccagaacgacttccttggttcgtcggtgctccggacctggaagatctttcggtagccgactagggtagcatgacctaggaagtaatttgactggatgacggatg

SEQ ID NO: 95900 - DNA, 3249 bp, Oryza sativa
  Clone ID: PAT_MRT4530_94048C.1
atggcgacgcctccactcacctccgtttccagccacctccgagcccctcctccatggccgcctcccaagaacagcagcccaagaacaagggttaggtgcgacgtcctcgcggcgtccggtcatatcctggaggcggcctctgctccgaggggcgccaagaattcgcggagtcgggcaccgagaaccgatgtggacgtgcagattgagaggctctgtcgggcgggtgagttagaggaggcgttgaggttgctcggctcggatggcgtcgacgcccggagctacggcgcggtcgtccagctctgctcggatctgagatctttggaggccgggaagagagcccatttcttggttcgcgcatctggtgttggaaaagatggaatggatagtgttctcggaaggaaattggtgctgatgtatgtgaaatgtggggatttggagaatgcaaggaaggtgtttgatgaaatgcctcaagtgagtgacgtgcgagtttggacttcactgatgagcggttacgcgaaagctggtgagttccaagacggcgttttgctgtttaggcagatgcactgttctggggttaggccggatgcacatgctatttcgtgtgtcttgaaatgcattgccggtttgggcagtattgcagatggtgaagtagttcatgggtaccttgagaagttgggtttgggggtgcaatgtgcggttggaaatgcgcttatagcactgtactctaggtgtggccatgttgatggttcactacaggtgtttgatgggatgcctcaccgggatgtcatttcttggaattctgtgattagcgggtgcttttcgaatggatggcatggtaagtctattgagcttttcgccaaaatgtggtctgaaggcctcgagatcaatccagtgacgatgcttggcgttttgcctgcttgtgctgaattaggatacaatcttgtcggaagggtgcttcatggatactcagttaaaaccggactactttgggaatttgaatctttggagaatgggatagatgaaaatctgggatccaaactggtgttcatgtatgttaaatgtggtgaattgggctatgcaaggaaggtttttgatgcaatgtcatcgaaaagcaatttacatgcatggaatctaatgatgggtgggtatgcgaagcttggtaaatttcaagaaagcctcttgctgtttgagaaaatgcatgactgtggaattactcctgatgagcataccatttcttgcctcctaaagtgtatcactggtttgtctggtgtaatggatggtttggtggttcatgggtatcttgtgaagtacggttttggggcacagtgtgcagtttgcaatgcactgatatcattctatgcaaaatccaacaggattgaagacgcactcatggtgtttgatgaaatgcctcaacgtgacatcatttcttggaattctataattggtggatgtgcttccaatggtctatatgataaagctgttgagttgtttgtaagaatgtggttagaaggacaggagctggactctactacactgctaagtgttatgccggcttgtgtacagtcgcactattcatttataggaggagtggttcatgggtattctgtgagaactggattgattagtgagacatctcttggtaatgctcttcttgatatgtattcaaattgctcagattggcgtagcactaataagatattcaggaatatggaacagaaaaatgtggtgtcatggacagcaatgatcacaagttataccagggctgggcattttgacaaagtggctgggttatttcaggaaatgggattagaaggtatcagaccagatgtcttcgcaatcaccagtgctcttgatgcatttgctggcaacgaatcactgaaacatgggaaatctgtccatggatatgccatcagaaatggaattgaggaagttcttccagttgctaatgcactgatggaaatgtatgtgaaatgtgggtatatggaagaggcaagatttattttcgatcatgtgacaaaaaaggatacaatctcatggaatacactaataggaggttactccaggagcaatcttgccaatgaagccttcaccttattcaatgaaatgctactccaactccgacctaatgcggtaaccatggcctgcatccttccagctgcagcaagcctttcatcgctggagcgaggcagggagatgcatgcctacgcagtacggagagggtacttggaagataattttgtagccaatgcactcgtcgacatgtatgttaaatgtggtgcattactgctagcacgccgtttgtttgacatgttaaccaacaagaaccttatctcatggaccatcatgatagctggatatggcatgcatggtcgcggtagagatgccattgccctctttgagcagatgaagggaagtggcattcagcctgatgccggttctttcagtgccattctgtatgcttgtagccattcaggcctaagagatgagggatggagattcttcaatgcaatgcggaatgagcacagaatagagcctaaactgaagcactacgcctgcatggtcgatctactatgccacactgggaatctgaaggaagcttatgagttcatagagacaatgccgatcgaaccggattcgagcatctgggtctcattgcttcgtggatgtcgaattcacaggaatgtcaagcttgcagagaaggtagcagagatggtctttgagctggaacctgagaacacagggtactatgttcttcttgccaacatctatgctgaagctgagagatgggaggctgtcaggaagctcaagaacaaggttggtggccgtgggctccgtgagaacactggctgcagctggattgaagtgagaggaaaggcccatatcttcttcgcggaaaaccgaaatcatccacaaggaatgaggattgcagagttcctggatgatgttgccaggaggatgcaggaagaaggccatgatcctaagaaaaaatatgctctgatgggcgctgacgatgctgttcatgatgaggcgctctgtgggcatagttcaaagctcgccgtggcattcggtgttctgaatctgtcacaagggcggccaatccgtgtgaccaagaattcaagagtttgcagccattgccatgaggctgccaagttcatctccaagatgtgtggtagagagataattttgagggattcaaatagatttcaccattttgaagaaggtaggtgttcttgcagaggttattggtga

SEQ ID NO: 95901 - DNA, 114 bp, Oryza sativa
  Clone ID: PAT_MRT4530_94049C.1
atggccgccgccgtttctctcctcaacctgctcctgccttgccgctgctcttttcccctgccgtttagttggggccttccataccgaattggaaaagaagcccaagtgtcctag

SEQ ID NO: 95902 - DNA, 412 bp, Oryza sativa
  unsure (1)..(412): unsure at all n locations
  Clone ID: PAT_MRT4530_9404C.1
cccacgcgtccgggagaatcgcatagaactggaagagatgacattgctgtgaatgctcgtaatgcttctagacctggagaaggtactgatagtggtgaatcagacatgttgggtctctctcattatgctatggaagcagggtacanacgctctaatgaatccacacccgctgaacctgttccaagcaagaagccaaaagttgaccctgttttgcccgcttcaaaatggagtcgagaggatgatgtcagcgatgatgaagatagaaaaggtggcagaggcttaggattaagctattcatctggtagcgatattgctggtgattctgngaaagctgatgcaacagaagttagtactgatcactcgaatcatcaccaggatacgattcttgatgaagagcatagtatcgtgaatc

SEQ ID NO: 95903 - DNA, 231 bp, Oryza sativa
  Clone ID: PAT_MRT4530_94050C.1
atggcgccggcgaggctgcggatgaccggatgggcagccggcggcggtctcctctcttttctcttccatcccaaggagcagcagcgaagctggagagagaaaaaggacaaaatgggccaagaaatctgctctgcaataccgcctgatctacaagactacgatagaaacttcaacattggcagggagcaaaccacaaagagaaaagggcaacttttccatttggattattag

SEQ ID NO: 95904 - DNA, 643 bp, Oryza sativa
  Clone ID: PAT_MRT4530_94051C.1
gtatcgtgcgatttctacgatgtatcggggtgatacttgtgaggtatcagatgatacctaccagatatcaggagctgggcgtcgaggcgtcgtcatcggcggccgcgtcctcccccgtccacggtccacaccgaacccgaacctcgtcgctggcagccgcatccttccccatccacggtccatatcggagcttgtcgccggcgactgcgtcctccgtcgggagctcgtcactagcggccgcgtccgtcgtccatgcctcaacatgcggccgcgttctccacgccggagctcgtcgccggcgccgccgccatcaccacgcaggatcctccgccgtccacgccccacattggagctcgtcgccggcgccgtctctatcaccacgcaggatcctccgccgtccatgcgaccatgccccacgctggagcttgccggtggccgcgttctccacgccggagctcgtcggcggcggccgcgtcctccacgccggagctcgtcatcggcgccgccggagcttgttgtcggcatcgccgacgtcagctcgtctacgctcgctgctcccacggtggcccgcgctcttgtgtctcagggaggtggagagggagcgatcccgttgggtcagtatcccaacgggataccgggctaa

SEQ ID NO: 95905 - DNA, 529 bp, Oryza sativa
  Clone ID: PAT_MRT4530_94052C.1
ggcctgcagcctcgctcgcatcagcttgcacacagcccacggcgccaccaccagcgaggcgggacagagggaaagagacacagaccagccaagtaaaaggcaaaagcacagcacattaaaagagagagggcgcaagcaagcggcagagaggagagagagagagagaggcgcacagagagagtgtgtgtgtgtgtgagggagagagagatagcggcagcatatatggcgatgccctttgcctccctgtcgccggcagccgaccaccggccctccttcatcttccccttctgccgctcctccactctctccgagataagacttcgctctcgccttcgctctctcttcgttcttgctgccgtggtggtggactaatgtgggtggtggcgtcatgcggttgcagggtcggggaggaggcgcagcagcacatgatgggcgcgaggtgggcggcggcggtggccaggccgacgaccttcacggcggcgcagatacgaggagctggagcagcaggcgctcatatacaagtacctcg

SEQ ID NO: 95906 - DNA, 1278 bp, Oryza sativa
  Clone ID: PAT_MRT4530_94053C.1
atggcggcacggtcgtcgttgtttcttctctgcctcgccaccgccaccgccggcgtactccaagctcgtgcccagcctgacagcaaaggtttcatcagcgtagactgcgggctcccggggaagacgagctacattgacgacaagaccaagatatcctacgcctcggacgacggattcaccgacggcggcaagcactacaacgtctcgccggagtacatcaagccggcggtcacggcgcgctactacaacgtgcgcagcttccccgacggcgcgcgcaactgctacacgctccggtcgctcgtggccggcctcaagtatctcatccgcgccaccttcatgtacggcaactacgacggcctcaacaagctgcccgtgtcgtttgacctccacatcggcgtcaacttctggacggtggtgaacatcacggacccgatccagccggtgaaccgggaggccatcgtcgtcgtgcccgacgactccgtgcaagtctgcctggtgaacaccggcgccgggacaccgttcatctccgggttggacctcaggcctcttatgaacaagctctacccgcaggtgaacgccactcagggcctactccaactcgccaggctcaacttcggcccatctgacgaaacctccatcaggtatccggatgatccgcacgacagagtatggtttccttggtttgatgcggccaagtggaacgagatatcaacgacaaacagggttcagaacatagacaacgacctgttcgaggcgccgacggcggtgatgcagacagcggtcacgccaatcaacgcctccaacaacatcgacttcttctggaactcacagccgcagcccaacgacccagcgccagggtacatcgccatctttcacttctccgagcttgagaacctccccaacaacgccacacggcaattctatatcaacatcaacggcatattgttcgacgatggtttcacaccatcgtttctctacgccgaggcctcctacagctccaaaccctttgtgcgacacccgcagtacaacatcaccattaacgccaccgccaactcgacgatgccgccgctcatcaacgccgtcgaggtgtactctgtcatctccaccgctaacattggcaccgactcacaagatgtatcagcaatcatgacgatcaaggcgaagtaccaggtgaaaaagaattggatgggtgacccgtgcctccctagaaatcttgcgtgggataatttgacctgcagctatgccatttctaaccctgcaagaatcacgagcttgtaa

SEQ ID NO: 95907 - DNA, 459 bp, Oryza sativa
  unsure (1)..(459): unsure at all n locations
  Clone ID: PAT_MRT4530_94054C.1
cctctgtttagttacatcactgntggtcttgatttcgcagtgtgttagttgttagttttgagttcaagtatgaagacgtgttgttagtgctttatactagtagtatttggtaagctcatgctcacctaacaacattttgtttcttcagattttctatggagatttagctttcatcaaaacaaaaacaacaatatgcattatgcacgnattaaaatggcgtgtactatagtaatttgtctcagacaattngtaaagattgtggtttttacctatactgtctattgttttctatgtctctccctggatcgccagtggtagctgaaattggggcattcagcatgagggtacaaaaattataatacattgtgatgtaatagtagagggcaatatgtaaggcagncagagtcacaagcacaattaaaatgtaaacctgttattctgatatatggaaatggggaa

SEQ ID NO: 95908 - DNA, 547 bp, Oryza sativa
  Clone ID: PAT_MRT4530_94055C.1
gtcttatttacatgcaatgttcaatcaatctccacctggaatgatgaaagttagccaaagcatattgtggtgtgctcctctagacatcatatatattggttgccctggtgcaaatttcctttttggccaagcacaagatgagatgactagagttgaagcttgcatcaatggtgataaaatttgagattggtaacttgctgaccagaaattccgtggagcctaagatgaattgctgccatactttcttcttgtctttataattaatctatacatacaagcatgtttgatttatgaggcatgggggatcaaatgtgcactacgcattttttattgagatcatgcttgctgctgctccaaatgactgcagctcagttctagctcatgctcttggaactttcttgttcctgatgagggctaagtgatcttctagccacttgaattggtttttattctgaagttatctgaaggcattcacccttctgactcagagcgggttggcttgatacgacgatgaggctggactgcttgatattctcctgaacttcca

SEQ ID NO: 95909 - DNA, 1785 bp, Oryza sativa
  Clone ID: PAT_MRT4530_94056C.1
attaaggcaactttcttcttctattatcagaggggttacaaagcaggtctatacatcacacttacaaattgtcatctctccatacaccagttaccagtcaccactaatgctcaaaactgcattctctctatccaattgtgtcatccttgatcctagtatttttaatatcaacaaaacaaaagaattgcacagacaaaaaagaagaaagtgccaagaacaagaacagccgaaaatgttgtgttgtcaatttcagtcagacatctgcaagatcagagacactcccaactgattcttgtctctgatggccggagagcgaagattgaacctcggatgcttccaagtcgacagattcatcgtctgctctacctggtggaggcctccttttgtgatgcttcttgctctggctgtgtttcgccacacggatcagagcctggacaacatctctcattgctgggcgcttgcgggaaactcggcttacgcatctgtaggccacagcagccatgtcgttgagctcctccacatcgaatgcgccttctaaccgagaatctgcaatctcctcccatccagttttgccatcagcattgattgcagcaagctctacatattccattagaccttgttgagggtttctgccagcaatcatttcaaacagcaaaacgccgtagctgtatacatcactcttctttgtgaacgatcgtgaggacacatactctggatcaagatatccataagttccacgtatgttggctccatttcgagtaaccatttcttctcttgataatccaaagtctgcaaccctggcatgcatggactggtccagcaaaatgtttggtgatttgatgtcacggtgaactactggaggaactgccccatcatgtaggtactccaagccccgagcaacatccagagctatgtttaccctcaaatcccaccggagatgtgcaatgttttcaccatataagtgcgatgcaaggcttccattaggcatgaatgcatataatagcatatgctgccctttttcagcgcaatagccaaccaaattcaccaggttcctgtggtgcaatcgtccaagaagtaaaacctcagtttgaaactccttttcaccttgctttgaattgttagcaagcactttaacagcaagagtttcaccagatgacaaatcagctttataaacaggaccaaaggctccttgacccaatagtgttgtgaaattgctggtggccttctgcagctctttgtatgcatatttgggtatcccagaagctgatatcacactcttcctaccaggcccttccagccacatagatgctccgcgatcttcaacctcccttggcgattcctgccccgtagtggagttcgagagtatcgtgcaagcattaacaccattggcgcggatgggaatcgtcgatgccctccttgagctactactccttatctgtgcctgagatcgccgatacctcaagcacagaagtatcccaactgccagcagcacccctatcaccactccaactgttattccaatgatcaggccctcagaaacccctttcatcctccccatttcgccgcagatcttagcaattgagatattgcatccacctcatggaagctctaacagctatgcgaatgcggcgggagacggggcagcgggtgggcgaatccgtgcttgctcggctcagcgaaaacgcgcggatctcgatcgcgccgctcctgatcggaaatggcggcgagatgggggaagaaatcgatcgggggaagctcggtgctcgcctaggggaaaaagagaag

SEQ ID NO: 95910 - DNA, 2192 bp, Oryza sativa
  Clone ID: PAT_MRT4530_94057C.1
acggtgggcttgtggggctagacacaatgggctcatctagaactgttataatttttatttaaacaaaacatttcatttcaatttttagaaatgtttcgataattacaaaccacgagttgtccaaagttcagacagttgatttatctacagaagtgctatagatatgcccaatacttttatgaaattagcgacagtcacatatactgtagtaagttcagagacaacggggatgtgtaccgtagctttcatcctccattggtttatctcagcgaagggattaaccacatgtacctctgtccttccggcctgcgccggacagcgtgaggctctggatgaccgtgggcatgggcgggctcaagagcttcgacgagctccttcgtcctgttctccaggttgaatgcgcacaggttgctgtaggagtcaatgaagtagacacaattcgacttcaggttgagatgatccttcgcccggtaacagaccgagctgtagtagctgacaaacagcgcaaagtccccgatgttatcaaccttctcccaggaaaatgtccccttgtccagaatccagaccacaaacttatcatttgattgccgcttcaccctcattagatcaccagctggggactccaccaaacagttaagctttccatgttgatgcggatagtgaatgaggttatgatacgggtcattcacctgcggggcgtcttcatctggccatgaacggggcggttctgcccacaactgaactgtgccatatatatcaacggtgtaaagctgtctcctgtgcttgaagatatccactagatcatgctttgattccactgatgaccagctgttgcttcctttacgcgttaccttatatcctttctggtcacgtaagatgacagcaacagtgaagtttgtgtctttcatgtcaagcaacagggccttggagacggcccatcagcccaaaggccccaatgttatcaaccttctcccaggaaaatgtccccttgtccagaatccagaccacaaacttatcatttgattgccgcttcaccctcattagatcaccagctggggactccaccaaacagttaagctttccatgttgatgcggatagtgaatgaggttatgatacgggtcattcacctgcggggcatcttcatctggccatgaacggggcggttctgcccacaactgaactgtgccatatatatcaacggtgtaaagctgtctcctgtgcttgaagatatccactagatcatgctttgattccactgatgaccagctgttgcttcctttacgcgttaccttatatcctttctggtcacgtaagatgacagcaacagtgaagtttgtgtcattcatgtcaagcaacatggccttggagaaggcccttcgtccgattgggggaagattgaactgcatgccactaatgggattaaccagctgcatggttccatgagatgggctgtaaaagatgagccaaccatgggaagaaccaacaggaatccaggtggagccaaagattgtaacagtgctcgggagacgaatggtttggttcttcctttcaggtacacacaaaaatttagaatcattaagcgcatttgtagggagcatcagccatgggtctatccttggacagttgaatacatccctacagagatggttccaagatgtgcatacagcacggaatctcagatagtcagggacggcaagcttctttacaattacaccaaggatatcagtctgaagaccagcccaatctgccatcccaacggaattagcttctaggcgccttggaaccttcgcagacatgccacttataagttataagttataaccaattcagatgctgtagataaccaaattcgacgacagaagcattccaatatttcaaaacgtcagcagattgatgaggaaagagcgtgtccaagcgccggtcccctgaaacctccgcgacggcgagcccgtaggagggatccccgatcgatgccagcgagccacgcgggacgcccggccgccggctgagcgggcgcggcgttccagcagcagcacgattcctggagtccggtgccgagacgcacctcgccgacggcagctaccgcggcggtgcggcggggttcggctggagcggatcgccggcggcggcgacggggtcgcgacgcgagcgcctccgccgcggagacttggggatcgacgatggctactag

SEQ ID NO: 95911 - DNA, 2111 bp, Oryza sativa
  Clone ID: PAT_MRT4530_94058C.1
tttttttttttttttagcaaaacggagctgtgtaaagatttatttatgcgcttctctcgttttggccgaatcagttttaacaggagggaacctgtctttccccctccaattcattgaaacaaaatttacattagtaagatatatcctaatatcctactccttccagcttataaaacattatagcgttaaacaagattaacaatggatattaacaatttaacatgaggataacctgcaccttttctttatgaaaccaaagcgaaaggaaatatgcaagatcaagacatgtttcaaatcttctatatattagacaagaccaacaatgtgtcttcagagttttggatagaggtgaggcgcctggctgtggataatcgctattcctgccgagaagcattgcaaaggcgaaagactggagtcgaagtatatgatgtgcaggtcatctgtgatgttcacaagcctgaacattggtcccttcttcgcacccttgactgagagctctactgatttcctgtcctgtgactgggactctgcctgaggcgaagtaccacagccatcattctgcagtactctgattgggcaaccaatatcccatccgccacaatcacagcgcccaccggacctccatcttccgatgaggctggcagggctgccgttcttggaagccgcgccgccaatggctagcctcggggaaatacgggtcttacactccctgcattattccgcctcctctcaacagcgccccccccggtgccccccggacgtgccgctccagcgttctcaaggaacttgagcccccatccaccaagaacaggtgatttccgacgttcgcgccgctgttttcgtactacaattgctgctatctcctggttggtaggcaaatcatcagcgacgaggttcttgaggactgattctttggcactgcactgttcaccttcaggtatttcagtcatctcatcaatctgttgggaggacgatttgccaaacttccacacatgtttcggactagagttcaaattggatggcttcataatgtctgccactctcttggctagccccttgccttttgtaacaccatatgaactttgcatttgcctcaggtagtcatccggagaaccatacaggacaaactctgtctccatagaagtagacttgtctgggttcagaaccaaagaacttgacaccttcatcttgccgacaagccgtgatacactgcttgagttgcctaaccaatcttttctcccttgctctcctgaatggaacaaatagacatagtcaaggggcttgtcattgtcatgggcctttgtaggattggcagtgtatactgccataggattgtccagtgacagttcaaagtgtggaagcccatccttccatatgcattgtagaagccctgcacttaaagaagatggacatgaggacagaacaggttgatttgaactcatggatggtgtatctgaggacaccatcttctcatgcatgctcaactcagctgtgctcttcttcaacggcgacacgccaggggaggagatctcccatgtctcaggagatatcagcttcagtatctctgactgtgttatgatgtgggattttgaccgagcttttctcatcttggttcctgagtggaagaatgaaggactttttggcctcgttttcgcatcaacaagtgaatgcaaagaatccaacatcattttctccgaaggaccaagaactacactccctgtgctagctccattgctgatcatgtcatcaagatcactcacattgtgggttcttcttgggtgcctcaggcttctgatgaggaattccagtatcatcatcttcgcaggaagtgtcgggtacaaatctgaatggaatacttcgctcctgcaagaacatggtgacttgtgacatgactggcagctcctgcttttcttctcatctgatggcaatggcttccactgaactctggagaggtgctatcttcatcgaatccatttctcctttccaagtagacaagttccatctttagctctggtaatgggaactctactactcgtcgtgaaacgagaccttgatcacctcagagctcaccacgcagcatccaacgccggcctgcaagctaagcactgacc

SEQ ID NO: 95912 - DNA, 747 bp, Oryza sativa
  Clone ID: PAT_MRT4530_94059C.1
atggcggcgcgcgccgatgtgaggacggaggctagggagagttgtctcgtgtcgtacgccaggggcaccatcaccgccctatcgaggtcgatgcggcggcttgcgtcggcgccggcgtcgtcagaggtggagcagagggacctcctggaggcggtggtcaccagcgtccccaccgacaagtgctcggggcgcgtcgtcaccgccaagttcctgttcgcgcagctgtggacggcgcacatcctgctcgcgttggacgcggcgctcgggcagaaggccgcgacgcagctggagcacgccacgctggaggacgtgctcatcccgagctactccggcggcatgaagacgctctacgacgtggactgcgtcgagcgtgtggtcaggcacgtactcgccgaggaagagcacggcgaggcaggggagtcgacctcagccgctgcaatcaccgaggagaagcggggggggggggggggtgagggcgcgagcgatggtggcgagcctgctggcgctgtggagtgccggcgtggagggggtggtggagcgggagggtccccagtgatacgactgggaggcctacgacgagctcgttcgcatggtggagcgcgccggcctccgcctccagatgccggcgttctcatggtggtgggacaacgcagccgtcgcctccctcaccttctcccgcatcgccggccggccgtcggagctcctcgccccgacgacctcctcccaaccgcctgccggcccgcctag

SEQ ID NO: 95913 - DNA, 1785 bp, Oryza sativa
  Clone ID: PAT_MRT4530_9405C.1
tcgccggagcgtgggctcctccgattcgaaaccctagctcgtctctctctgtgctagattccatggcgacggcgggtagtaggaagggcgggaggggccggaaggcgctgacggcggtgctggacaacgacgctaacatctccgccgggaaggccgacgtggccgctgccgccgggatcctgtcgccgccgcagaaggcgaagagggcgacgtcgaagagcagcaaggggaaggccgcggctgcggcggcggcggaggaacaggcgtcggtggtggacgcggtgtcggagctgcaggggatgctggaggagctgcggctggagaaggagaaggcggaggagatggtgcgggagcgggacgaggtcatccgcaggaaggaggaggagcagggtcgcctccaggccgagctcaagaaggtccagcgcgccaaggagttcaagcccaccgtgagcattcctctcgtgaaggcattgatcgagaaagaccaggaaggagagaagaagaagggcaagggcaaggccggccatgagaggaagaagccctgcccggcgtacgtcctctggtgcaaggaccagtggaacgagatcaagaaggagagcccggacgccgacttcaaggaggtctccaacgctctgggagccaagtggaaggcgctgggcgcggaggagaagcagccgtacgaggagaggtacaggcaggagaaggaggcgtacctgcaggtggtcgggcaggagaagcgcgaggccgaggcgatgaagctgctcgaggaggagcagatgcagaggaccgccaaggagctgctcgagcagtatctcaagttccggcaggaggccgacgacgacggcgacggtggtgacaacaagaaggcgagcaagaaagggaagaagaagaagaaggagaaggacccctcaaagccgaagcagcccatgtccgcctacttcgtctacacccagcagcgccgcgcggcgctcgtcgccgagaagaagaacgtccccgagatcggcaggatcaccggcgaggagtggaaggcgatgtccgaggcggagaaggcgccgttcgaggcggcggcgcggaagcagagggaggagtaccaggtggagatggcggcgtaccggcagaggaagcaggaggaggcggcgtgccaggagaaagaggaggaggagcagaagaagatcatgaagcaggaggcgctccagctgctcaagaagaaggagaagacggacaacatcatcaagaagaccaaggaggagcagaggaagaagaaggtgggcggcgccgccgctgccgccgacccgaaccggcccaagaagccggcgtcgtcgttcctgctgttcagcaaggaggcgaggcggcagctggcggaggagcgccccggcgtggcgagctccacgctgaccgcgctcgtgtcggtgaagtggaaggagctcggggaggcggagaagcaggcgtggaacggcaaggccgcggaggccatggcggcgtacaagagggacatggaggagtacaccaaggcggcggccagcggcggcggcggcggcgacgcctccccctgtacgtcctcctcggcctcgtcctagtcgccatggatggcgatggtggtggtggtcctaacgctgacgagaaatatcttctctgaatccaatggagaaaacagtagctttggtgattggtgcgaagttatctgttgcgtttggtctggtttaggcgtaacatttcgtatggattggggtattctgcttcaattttataactcagcaagcttgagaaatttcagcttattttcat

SEQ ID NO: 95914 - DNA, 782 bp, Oryza sativa
  unsure (1)..(782): unsure at all n locations
  Clone ID: PAT_MRT4530_94060C.1
cggacatcaaggtgcaggtgcagttgctggtcgcatgattgtgatgacacataatctcgatctgcaactcaccgtctccattttctcaagccggaacattggggacactccgtattatggcaggagcagcgtggagtcaaagccctgctccgtagagggctcgaggctgcgcggatctggccgcttcggccgcccggcccactcaaccggcttgcctgcaccatgattgctctctcagcaatcgcccggcgactcgcttcctctctttgaacacagctggggtgtgcgacatggctatggtggaggatctgcccccacccaggttgaacatggtgatttcagacattaatcaatgatggattatctgcttgcctattctttctgttacatcagttgtgggatgtttttctgttaaattaatctaggttgctctcttgatctggtctagacagatcctaagcaaaggttgcaataaggaaaacaaaaggaaaagatgaaccctgtttactacagcggaatctttgtgctctttatccaatctgcanagatgtgggtaccaaggagttgtattgttatgaatatttgacttctttatttttccagtttattgatcatcttacatatttaatgatgttataatatttaatgatgaatatnttaaacccagggaataggtccccatcatagcaataagcttatgtattatgtttaaaaaaacaattntacatgtgtaaagctttgtgatnttataagcnaaaaaaaaaaaaaaaaaaaaaaaaaaa

SEQ ID NO: 95915 - DNA, 375 bp, Oryza sativa
  Clone ID: PAT_MRT4530_94061C.1
atgagaggaaaccctaaccctaggggggctatgcagcgaaggtgtggcgctgcagtagtagagtgcagatcgatgaggcatggtggaaaggttttcttcaaatgcgaggaaaacgaacaagatgtgccaaattgttgcaagtttttcaagtggatcgaaagttataggaagatggttgaaggaatgagtgagcatgttgttgatgaaggtccaagtgatgttgcactggttgatggttctatagagatgaagcggagttcagttgatgatggaaagattgataagctgataaatttgattgaagtattggtgatgatcaacatcggcctgctagttctaggttttattggcgtgtttgtgatgattttgaagtga

SEQ ID NO: 95916 - DNA, 372 bp, Oryza sativa
  unsure (1)..(372): unsure at all n locations
  Clone ID: PAT_MRT4530_94062C.1
cgccgaccgccagaccacctgcgcctgcctcaagcagcagaccagcgccatgggcggcctgaggnccgacctcgtcgncggcatcccctccaagtgcgacgtcaacatcccctacggcatcagcccttccaccgactgctccagggtgcactgatgagcggatcaacgtcgacaagtgatgcgacaatantaaaggngagatcgatccatcgatctccaanctctnatttcgcgggttgctatgtacatgcgaccgttggtttaatggtcgagcttagaaatantataatgcatnnntngttcctttngtttgtgnttaattntcttgntttaacntgattgtanatttnanaagtttangntaantnttga

SEQ ID NO: 95917 - DNA, 6842 bp, Oryza sativa
  Clone ID: PAT_MRT4530_94063C.1
atgtggagcgatattaaacaatggcttccggacgcgtggggatgggttgtgcatcatacacttggggcgctaaacctgattatcgacgttgttcagggcacagtgattcaagttaaaatgattcttgcgaagggtgatgagtacatctcaaactttatcgcctcagccataaaggcaactcagtcactgcctggaatgagtgacttcggcgctgatgtactgaaggagcaggagaatattgtaaaaagttctcgcgacaactacgatcagttggcttcagagcttgatgctattaacgctcgcgtagaaaaaggcgagatgggatacgttgaagcgatgaagcagcgtcgcactcttgaaaagcagtacagcgaggaaactaaggaagcaataaggaaagaagcagaagagatcgagaagcgaaaccgagaacgaaataagcagtcgaaaattgtacgctcaccgacagagcaattcgacaaggagttaatttcactcaaggctcaacttaaggtattgcaggagcacaaggagatcgggcaaaaactttccgcacagagaaaggcgttgtttactaccgaggctacgatcgcggttcttcgcgaggctagttcaaaacgtcaattatctgcggaagaaaaagcattactggcaagtcaggagaaagttatcgagcttgccaaacagaaggctgagattggagatcagattgttaagcaacagcaattgaacgcacttaccgacaagtcactgaagtttgtcaatgagatgacggcggcgacggaacagcttaacgcgtcacgcggtcttagcacgcgcgaaatggaacgacaagcggaactggctaaaataaccactgattacatcaactctggaggtagtgagggagacgaaaaactccagaacatgattaaggcgcaaaatgattactacgctgcggaagatgccaaacgcgctgactggttggctggcgctgaaagcgcattcgctgattacggcgactctgcaatggatatgtacggaaacgttaatgagatcgcatcaagtgctctaaacggtatgacggacatgatggttcagttcctcactaccgggaaagcaaactttgctgactttgctaaaaatatcatcagcatgattataaagatgattgctcaaatggtaatcttcaatacgatctcaggaatgatgggcggtaagacgtggagctttgctggaggggcttcgtctggtgcttctgcggcatcacaggcaacccctgcgcctgctgcttctgtttttagatctgtatcttccggcggggccgctgtatcacttgctgccgcagcgggtagcgtggcaacatctggattcaacgcatcaaactcggctccaaaggtggtaaaccattcaggaggtggaacggtcgttgacgttagtggaatggaggttagagttgacaacggctcagatccgagggggatttctcagggtgtagaaatgatgttcaaaaaaatgattcgtgagtcttgctcgcagggtggcgaggttcaagggggcggcggctcccttaccactaccaacaatgaccgctcaatccagtttggtaacggctacatgcagcttgcatcgtctggatttaacaccactcgacgcgagtattcagttgtctatgccggggaagatttcattgctgtttacgacttctgtgactctcaccgcattaagccgttcgcatggacgccgccggacggtaaacaagaggaaaaatcaatgagcgaaaacaaaaaactttatgatgaagaaagcggaaagagcctgtttcacaactgccttcaatcactatatccgggagagataatcactctcatcgaagttgatggtagtaagttcggcgctcaggtgtaccgattccacggtgagaatatccagtacactccagaagaaatcatgcaggcccagcaaactggaacgctaccgccgaaggaaattacattccgtggcgagaaatacggggcgcgaccgttcggtatatccgggatctcgtttgacagttccggaaaggcaacaaaaccacaattaacggtggcaaacattgatagtcgagtatctgcgatgattcgtgcatataacggactaatgcaagctaaggtgactatctggataactcagcgtgagcttattaactccgatggctcaatcgctgatggagcttaccgtaaactggtatactatatcgagcgtccgaactatgttgataaaagcgttgcgcggttcgatctcacatcaccttacgatatggacggcatcatgatcccgtctcgattcacacaaagcgtatgctattgggcgcaaagggggtggtataaaacagggaaaggctgcggatacaacgggcaaaatgtgcaatacgcatgtattgaggacgacgcagactcaaccacgattgcgatcgttcacagccacacaggagatggggctacaacgctaccaagcgctcacgatacgtgcatgtgcaatgagatggaagtgacttggattattgttagcgtaccggaaggagatatgcgatttgtgaagccggagaaattacctctgattggtcgtccgtggtcattaggatcattcgactgttacggtcttgttatggcgtggcacaaagagcacggcgtagaattacgcgatcgacgattgaattttgaatggtggaaacctgagtatggaattaatctctatcaggattattacaagcaagatggcttcgttgagattccagatcagaataatccgtcattaggtgatatggtaatcatgcagatagggcaaaacgttccggtatggaaccacgcagggatttacctcggtgataatcagatcttgcatcacgccttcggatctcaaactatgaatgatgtaaaattaatcaaactatccggttcgcttgggagacgcttcggcgtctttcacagattcgctgttgactcttacccggaagctatccgggcgctatccagtcaggtagatggatttaaagaatacatgcaaagcgagataggatctcgtagcaagtttgcaatatttgtggatggcgttaacgtgggacaccatgaagaggaaaaattcaagtgcgcgaaagagataagaatcgtaccgatccctactggctctaagacaggaggtctattccaggttgtattgggcgcggcaataatggttgcagcattctatactggcggcgcgtctctagctttaatgggaacaatgtcctcgtctctgtttatgatgggcggcgctatggtgctgggcggcgtgatgcagatgatttcaccgcagccgggtggcgcaaactttgaagttcaatcaagcaagaataaaccttcgtacgcgttcggcggtgctgtcaatacgacggcggcgggataccctctcccggtcccgtatggatatcgcgccggaggtggcgcaactttctcagcaggtgggtcacagaagcctcataacccggttgagatggaggacaatctaatctcaatcaacaaaatcaagatcctgttagctgtatctgatggtgaaattgacgaaacattcagcctaaagcagttgatgtttaactcagtcccggtgcaaaacgaggatggatcgttcaacttcgaaggggtaaaggctgaattcaggccgggaactcagacgcaggaatacatcaagggaatggaagatagctctagtgaggtaactgtaaatcgtgaggttactaccgataacccatacacgatctcagtaaccaacaaaacgctgtcggcaatccgtatcaaaatgttcatgcctcgcggcgtacgaattgaaagtaacggtgataaaaatggcgttcgagttgagtacgaggtgcagcaagcggttgatggcggttcgtttgagactgttcttactgacgtaatcgaaggtaaaacaatgtcaggttatgatcgaagccgtcgcgtaaacctgcctaacttcaacaatcaggtaatattcagagttgttcgaaagacgcctgattccaatgactcgaatgtcgttgatgcaatccaggtaagaagctatgctgaggtcattgatgccaagttccgatatcctctgactggtcttcttttcgtagagttcgattcgaagatgttccccaaccagttacctacgatctcaattcgtaagcgctggaagattgtaaacgttccgtcgaactacgatccagaatcgcgaacatacaacggcaattgggatggcactttcaaaaaagcatggactaataatccggcatgggttctttatgacctgatgattaatcagcgttatggtctggatcagaaagagcttggaatctccgtagacaaatgggcgctctatgaggcggcgcaatattgcgaccagatggtccctgacggcaaaggcggcacggaacctcgctacctttgtgacgtgataatccagtctcagactgatgcgtacaaggtggttcgagatatttgctcaatcttccgtggaatgagtttttggaatggtgaaagcatttctgtaatcatcgacaggccgcgtgaacctgcgtacatcttcactaacgacaacgtagttaatggtgacttctcatatactttcgcaagcgagaagagcatgtacacgacgtgcaacgtgatgtttgatgatgagcaaaacatgtatcaacaggacgttgagccagtattcgatcgtgaggccactctacggttcgggaacaacgtaacgagcattacagcgatcgggtgcacacgtcgaagcgaggccaaccgacgcgggagatggattctgaaaaccaacctccgcagcactacggtaaacttcgctaccggactggaagggatgattccgacaatcggagacgtggtggcaatatctgataacttctggtcaagtaacttgacgatgaacctgtcagggcgattgctcgaagtgtcaggtagtcagattttcctgccgttccgcgttgatgcgcgcgcaggtgactttattatcgtaaataagccagatggcaagcccgtgaagcgcacaatctcaagtgttagtgcggatggtaagaccatagagattaacatcggctttggctttcctgtgaagcctaacacggtattcgcaatcgaccgcaccgaccttgcgttgcagcagtacgtagttacaaaaatcgacaagggcgatgatgatgaggaatttacctacaaaatcacggcggtggagtacgatcctaataagtacgatgaaattgattacggggttaacatcgacgaccgaccgacaagcatcgttgagccagatcagatccctaagcctgaaaacgtgaaagtgtcctcagagtcgagaatcgtccaggggatgagcgtagaaacgatgattgttagctgggataaagtgccgtacgcagttttctatgacgtacagtggagaaaggataacggcaactggcaaaacgttccgcagacagcaaacaaagaggtttatgttgaagggatttacgctggcaactatcaggttcgcgtgcgctccgtcgctggttcgggcacgacttcaggctggtcaaatatcgtcgcggcaacgttgacgggtaaacagggtgaaccgggccgaccgattaacctcacagctacggatgatgttgtttttggtatccgtacaaaatgggggttctctgatggttctggagatacagcctatacagagttgcaacagtcaccggatggaacagtggataacgcaagtttgctttcattgattccgtatccgcagcatgagtattatcactcaccgatgccgggaggtaatattgtgtggtatcgggtaaggacggttgacaggatcggtaacgtatctcagtggactgattttgtcagaggcatggcatcaacaaacgttgacgatatcatcggggagatttctgtcgatatcgaaaactcgccgggttacgagtggcttgttgataacgcaaccgacaacgcgtcgcagaacgcagctaatgcagaggcagcaattgagaacgcactagctaatgacaaagacgcgatctacatgaagaaggagaacggaaaacgaaaagcagagtacaccaaatcactgaagctaattgctgatgagactgaggcgcgagtaacagcagttgagcagttaagggcaagttttggtgatcagattagcgcaagcaatagcgaattgcgtgaagttatcgcaactgaaaccggagcgctatcgcgtgaaattgaccaactcaaggcagagattggtgatgatattcaggcaagtttgactgatatcagagaggctatagcaaacgagactgaggcgagaacgcaagctgacttgtcattaagcgcgaggcttgggaataatgaggcagcactttctcaaaaacttgattcgtggagcaatgcggattcgactggtgcaatgtacggcgtcaagctgggtctgaagtataacggccaagaatacagtgccggtatggctatgtctctgattggttcaggcgcagcagttaaggcgcagattttgtttgaggcatcacgatttgcaataatgacagggatgaatggtcagactcagtacccattcgttgttgagaatggccaagttattctaagtagcgcgatcataaaggatggatttattactaacgcaatgattggtaacgcgattcagtcgaataactatgtatttaaccagtccggatggaggcttgacaagggtggaacattagaaaactacggaagtgacgttgagggtgcaatgaagcaaactaataccacaatatctgttagggatgcgagtggtcgcctgagggttcagattggcaggttgactggttcatg

SEQ ID NO: 95918 - DNA, 426 bp, Oryza sativa
  Clone ID: PAT_MRT4530_94064C.1
atggtgcgccaggtggtaccacgcggccggccacacgggccacgggatggacggccaccatctgccgagaggcagatcgggcggctggggatgaggggcgcaagggccagcccgggcatggcgcacgatagcgagggacgactagccggcgacgcgggcgacggcgcagacagcggcgcagacgtgatggcgcgcatgcggggagcggcgacggcgtgggcgacgatgtgggcgcgggtttgtggacgcggagtggggcgcggaaagagcggcctgggcgcggcggcatgggcggtttcggcggcggttgccgccggctggaggaggaagacggggccgacaggcatcctcgacggtacgaacgaagcctacttctctgagaagccaccatccgacgcgtactcgaactctgggcttgggagatag

SEQ ID NO: 95919 - DNA, 337 bp, Oryza sativa
  Clone ID: PAT_MRT4530_94065C.1
acgcccaacccaaccccaccatacccgaagccgaagccgcaggaggggagggagattccgatgtccgctcaaccatgaccggcgggcagctgcgatctcggctgcatgctacgacggcctatgaggcgatgaaggaaggaccagaacatgttctatggggcgatggtgtcctatccgggcctgatcacgtcgcacatcgcgtgcctacagtgcctctactacctccccctgggcctgctcatgagcctccttatctgtacccgtgttccacgcctaaccctcctatacctattggactgtgccacgctcaccccgttccccatcaccggatggggcg

SEQ ID NO: 95920 - DNA, 2334 bp, Oryza sativa
  Clone ID: PAT_MRT4530_94066C.1
atggcgcttcgtcagcatgcaaacgccgtgtattgtcaatcgcggtttccaccaatcggcatacaccggcgactccaagtcggctgtggtggatttcgtcgagaacggcaaaaacggaacaagaacaaagagaaagagaggaattcgttttcgcgattagatcggcgagatgcaaaacggatctgcgagttcttaccctttttcttccttggtcttcggcttttcagcagtgccgtggatccaagggatcagttcatcctcaatgctcctgaagtggtggcggcagagaccgaaagatttgaggctatggagaatggaagctggcaaagacacataagcatcaaccggcaggtgtcgtcgtcgtctgtgacagcacaaggcttgagagccaaggtcgcgtcatactacgccaagcgctgcagctgcggcttcttcctcgccaagctcctgctgatgggcttcgcgctcgtgctgtactccgccgccgtcgcctccgtcgtcctcgccgcgctgcgcctgagcaagcaagactatgttgatccggcggaccagggcagcagcgaccacaagagcatcaagggttcactcaacctcttctacggcctggtgctcgtacagggcgcctccgacttgctagcccaagccatgttcaccgtcgccgacattcagctggtgctcaagatcacggaggcgtaccagctcgggcccttggggaagcagatggtgagccattacatgcttgtcacctacctgagatgctccggtggtaacgtccgcgaagccatgaacatggacctggttagcttcgccatggagctggtgcgatccaactccatcgcggatcgcctcgtcggggtcggtgttcttgacagcatccttagagtgcccaagtacagagcgctggcgctcatgaggctccgagcttctgccgacacggtcggcggcgtggtcagcatgctaggactgacgaacaacacccggaaggaagtgaataccagagggcatgctgcaggcgtcatcttggagctctctcgggaccttctccttgagagcttcccagcaatgctgccgatcgtgtcatcgttgatcgttgctgctgacaactctggcaacgatgtgactgtgagcatggagttcacctggttcggtgtgaaaatcctcaacaagatcatggacaatccggacaactgcaacaaggtcgcggatgctgatggccaggtgattgcaagcattgtgaacctcacagctgttactggtgatgatcgcagcttgagcatagtctcatcatctgcagtcagagacgaagagatcattttggaggcagttcaggtgttgcacaagctagttagcgctgctggtgattctgggagagtgcttaggtgcaaagtctctgacaatgtctatgtactcaggaacattagcaagatactacaacaccctagaagccaagtaaagctacttgttgaagccattggagttcttgcttgtttagcattggatgagaccgggagggaagagattgcatcctctccacaaattattaggaagcttgtctctttccttgttccaaggtcacagatgatttctgaaatttcagctgatagaagacagctagcaaaacctaatgctgaagcactagttatgcttgcaatggataatcaaagcattgtctggaagatccaagaagaactgaagcctcaagacatgcagaaacttgtcgagatgctctctgctgactctactgggttcaaaacgaacgttgcaaaactttcgggcattttacacgccaactccagagcagagcatgctcatcttcagaagacaataatcaacactgcactaccaacgctgctgaaagcaataaagtcagaagtggagaagctagaggatcctgtactgtatgctggagaacatgctaataatttccaagaatggaggaccaagcagggtgcactactagagagctttgttgggctcagtgttcagatctgcacatccattcacgcaagcgatttcaatgaagctctccggagtgccaatgttacagtgtacatggtcatgcagaagcttagaaagatcctagatttatacaagtcaccagccatcgagttcccagggataaggcgagtcgcagtagaactaatcatttggatgaagcaatgcagtagccactgcaatgaagttttctttcagtgtgaaatggataaggcgctgaaagaagtagctggaacagaagaaaggcttgaaatgtttaagatattctactatggtgttggaattgttaagcacagcgagcccatttcttcccttgtcaacttagctctcggtctctaa

SEQ ID NO: 95921 - DNA, 580 bp, Oryza sativa
  unsure (1)..(580): unsure at all n locations
  Clone ID: PAT_MRT4530_94067C.1
attatgacaaaatgcctcttcaaatgtataactcaatttaaataatgaaaacatactcatgggtttcgatgaatggggattcttaaaggtaaatttaaaaaatctcaaatgtgcctggcacatctattgaaaaaaatatttgtggcctatgaacttgatatctagactcagaaggtgctacaatactgaaaagtattagactattcaataggtgaaaatattgatcattgctgaggcagcatcttactgcttcagaatcaaacaccctttagaaaagtaacatatttcataagaagaaaataaaaattatcattgaaaataagtctagtcctttgtttaaaaaactgagaaagtctctatgaaaaggatgtttcaaagttgacaatattatttagaattgcttaaagtcctaggaaataaattattttcacacaaacaccctcatatcagcgttnaaaatttaactcattgcaaaacgaagacaaaataaccaaaatgataaaatataaacagaaataagaatattatcttacatgcaatggataatgcatagcatgaccagacccaaacagcatgcatg

SEQ ID NO: 95922 - DNA, 187 bp, Oryza sativa
  Clone ID: PAT_MRT4530_94068C.1
agatcaacagtgacaagcttggatgagccattgaaaaaactaggagggatctctcctgataggttgttacgcgaaagatttagctctatgagtgatgaacttcttgccaaggattcagggatggtaccttcaaggttgtttcttgcaagcagcagactttgcagagagtgaggttgccgatgcatca

SEQ ID NO: 95923 - DNA, 1527 bp, Oryza sativa
  Clone ID: PAT_MRT4530_94069C.1
ccggccgggcgcgtcacactcatcacacaaacacaagccccatccccgggaagacgaggcggtgtgtggcacgtcacgtgccccacccccctccccacccacccgcctcgtcacccacccatctccaaatccatggccggggacacgctgctgtggctgctcctgtgggcgacctccatgggcctcctcgtccagctgctcgccgccagggtgggcgtcgccacggggaggcacctcgccgagctctgccgcgacgagtacccctcctgggcgcgccgcgcgctgtggctcatggccgaggtcgccatggtcggggccgacatccaggaggtgatcggcagcgccatcgccatcaagatcctcagccgcggcttcctccctctctgggccggcgtcgtcatcaccgccttggattgtttcatttttttgtctcttgaaaactacggggtgaggaaattagaagctgtatttgcgattctaattgcgactatggctgtctcctttgcatggatgtttactgataccaagccaaacatgaagaacctgttcatagcgcttgttcagtcgagaaaaatagacccaaacaaggaacaccaagtccgtgaagcgttgagatactattcaatagagtcaaccatcgccttggctgtgtccttcatgataaatctctttgtaacaactgtttttgcgaaaggattttatggcacaaaagaagctggtaatattggccttgaaaatgctggacagtatctacaggagaagtttggtggaggagctggtgcctgcatcgtcaagctcggccacggggagcatgcagcagcagcgctggaggagttgacgggcattgtgcaacaacacctgggaattgagggatccttgctttgcctcgtcagttgtgggaggaaggcttcctcatttggtggcgtggctaccacctccgctgatggttttggtccggcctcactaccaatacccgggaaaccatctctgtcggccgagcccacgcgtggccgccgcccatggtgccaaggcttgtgcccccaccgccgctgcgatgctccgctcatcgggccactccgctcgccacctcttcctgtccccggcccctcccctatgccctcgtccgtctccgcctccgcctcggccctcgccgccgccaccaccaccaccacctcctccaagcaccgccgcccggaggtgctctctgtccttcctcgccaccccctccgcctcctcagccctcgctgtcgccgccgccaccgcccgaaggtgctccctatccttcctcgtcagaggtcgatgaggacgtcgaggacgcgctctcgctcgacgtccgcgcggcggcaacggctcgtccatgaccgtggtgcggcagcgacgaagatgacagtcgtggcggacggtggcctagatgacgacaccgcgacgggtggtggcccagacgtcggcagcgcgcttatgggtagggacgggcaagggaagggaggtgggtgggatgaggtgaggggaggtagttctttaaattag

SEQ ID NO: 95924 - DNA, 177 bp, Oryza sativa
  Clone ID: PAT_MRT4530_9406C.1
gactccaccccaccaagccagcaatataatagtgggggacatacagggaatgatggctcatcacatcatatcataacataacaatgacactgaccaatgggacccactatgcgggttttgactttttgtttgattcgaatttagaatcaatgagatagacttctagtcaagggaatt

SEQ ID NO: 95925 - DNA, 731 bp, Oryza sativa
  Clone ID: PAT_MRT4530_94070C.1
aatgaatccaacaatataattttttataacaaaaaccatgttattcgattaatcattagtcgagggttaaaattagacggtctttcgggtgtgaaagaaagaatacaagttacattacacaatcttaaattaattacactactccctaataactaaagaacaagccatcatctgcatcgccctacagcataaatgtactcattggattagcgaagtaccgccttccacacttggagggttctctattgtggccttgcctcaaaatattctgcagcgtggtcggagcagtaggcacaggttcatcaaacacccgaacataaaggtgtttatcaattgtcagctttcccagcaaggtccggcatgtctgaggattcagtacatccaaccaattgataacgtcctcctccataattccaggatactgcatgacatatccaataatccgatgacttaaacattcatagacagtgctattaatgcttccatcactatttagccatggtaatattggatgataaatatggctcttgcaaacatgagagcaaccactgccccagtgccaagtagatgtgccttcatcatctccaggactttgactgtgcaaatgtgagcttgacttactttgaacattgagaactgaaacaatgtgtccatcaccaagcttttttacaagttcctgcaaattaataggcacagcatacttctctttcattatatttctgggggcccca

SEQ ID NO: 95926 - DNA, 729 bp, Oryza sativa
  Clone ID: PAT_MRT4530_94071C.1
atggcaggattgcgcaagggaatacgagaacatcgacttctacaccttcgacgagatatgatgacttctccacgtgatgcatatgaggaggagaatagtttacttgagaagaaggaggatgaagcacctgggatgactaaagatagtttgcaaggtaaattaaatggtgttgagataaataaagttggccgcaatcaaagaaacaaggtgctgcgtcacctgtcatgggcctttgggcatgtaacttcttctaggaccccggcccaagtggggcccatgtggggtgcgccccaaccaggaatagggttgatttgcaccggcaagatcaacaactcatggagaggtgtatcaatcgctaagacgcaacacaacgtctccggctggcgcggcaacctggcggtgttctcgccggcgccgacgacgaacggtggcccttcagaggttgcaactaaaagagaaaatgaagagggaacgacggcgaagccatcggttgtgatctcgcatgatatggtggacggaatagcgctagcggcgagctcaagcgacgtggctctgcaagagatggcttggatcgtcggcaacggagatgtagcccacggtggtgctccggacgccgggaacgccgtcaagcgcgacacctcgaacccaatgagcagcaaggaactggccagcaatgtcaatttgattgtgctcatctatggagagaactttcatgtccaggttgagtga

SEQ ID NO: 95927 - DNA, 2747 bp, Oryza sativa
  unsure (1)..(2747): unsure at all n locations
  Clone ID: PAT_MRT4530_94072C.1
atggcgcccctcctcctcaccctcctcctcctcctctgcctggcttcaccgccgctggcggcggcggcggcggcgtgcgggacgaacactagcctggtggggtacgaggcggacctgtggatgtcgcagcaccagctccgcggccgcgtcgaggtgctcgacggctgctcgttccgcgtcgcggcgctcgacctcctcgcggggtccgcctccgcgcggtggtggcgcgccgaggggcccgacctcgactccctcgcccgaggcgcgcccgccgcgggcgacccgctcaaccgcaccttcctctccgagtccctcgtgttccgcctcctccctggcgtgtcctggccgctcgtccccgtcctcgccgccttcgaccccctcacctcctccctcttcggcttcgtccgcctctccaacgattcctccgccgattccgaggcgcccaccatgttcgactcgtgcgcccagctctcgccgcggctgcgcgtgcgctggacgctccacggcacctccgactccatcgacatcggcctcgaggcggccgtcgggtcggagtactacatagcgttcgggtgggcagcgcccggcgcgcccgagccgtccatgatcggcgccgacgtcgccgtcacgggcttcacggaggacggcctccccttcgccgacgactactacgtcaccaagtacagcgagtgcacggtgcgcgccgacggcgccgtcgagggcgtttgcccggacacgatctacgagcagggcaacgacaccgccgccggcgcggtcaacaacacgcggctggtgtacggccaccgccgcgacggcgtctcgttcgtccggttctcgcggccgctcgtgtcgccggacaagaagtacgacgtgccggtcaacgccacggcgaacatgacggtgatctgggcgatcgggctgctccggccgccggactcgctccagccatactacctccctctgggccacggcgcgccggccgggacggcgttcgggttcgccacgctcaacgtgtcggcgagcggcgggtgcgtcgggccgctcgacgccgaggacaaggaggaccaggacaggatcacggcggagcggaacacgccgctggtggtcaccgccgggccgtcgctgcactaccccaacccacctaacccggacaaggtgctctacatcaacaagaaggaggcgccgctgctcaaggtggagcgcggcgtgcccgtcaccttctccgtcgaggccggccacgacgcgccgctgtacatcacctccgacgccgtgggcggcaacgccacgtcccggaacgccaccgaggtcgtcttcgccggcggcgccagggccgagggcgtgccggcggcgccggcggagctcgtctggctccccgaccggaacacgcccgacgtggtgtactaccagtcgctctacgaccccaagatggggtggaagatccaggtcgtcgacggcggcctcagcgacatgtacaacaacagcgtcctcctcgacgaccagcaggtgaccttcttctggacgctctccggcgactccatcaacatcgccgcccgcggcgagcggaagagcggctacctcgccgtcggcttcgggagcgccatggtgaacagctacgcctacgtcgggtggatcgacggcaacggcacgggccacgtcgcctcctacttcatcgacggcgaggacggcgcgggcgtgcacgagacgagcgagaacctcacccacacgaggtgccggtcggagaacggcgccatcgtgttcgagctcacgcggccgctgtcgccgtcgtgctccggcagggtggagtgcaggaacatcgtcgacccgacgacgccgctgcgggtgatctgggcgatgggctcgcagtggtcgtctggccagctgaccgtgagcaatatgcactccatcaccagcaaccgccccgtccgcgtcctcctcctcgccggcacggcggaggcggaggaggagctgcgcccggtgctcgccgtccatggattcatgatgttcgtcgcgtgggggttcctcgttcccggcgggatcatggcggcgaggtacctcaagcatctgaagagcggcgacctatggttccaggcacacacctacctgcaatcctcagccatggccgtcatgttcttgggattgctcttcgcgatcgctgagctccgtggcttctccttcaaatccacgcacgcaaagatcggcaccgcggcatttgttctcgcttgtctgcaaccgattaatgcttatctccgaccgcatttgctcgcggagaatggcgaaattctgccaatgaagaacagggtgatctgggagtatctgcacattatcaccgggagatcagctgtggtagtcggcgccattgcactcttcaccggcttgcagcatcttggtgacaggtatggcagcaagaacatcaaggggttaacatgtgggttgatcctgtgggttgtgggtgtcacattggtggttgtttacctcgagttcatggcggcgaggcgaagaagaggcggcggcgcagatgacctttcgggtaaatgggtgcttggcaacactgatgaagatgattcagttgatcttttgcagtccactaaaatggagtctgattcgattgaaccaatggaggtgcagcttgagccactgaaaggttgataaattttctttttcagtatacataagaggattttagatcagattctttatagatagtgaaaaatggagttatatatntcncattaagggattatagttaa

SEQ ID NO: 95928 - DNA, 876 bp, Oryza sativa
  Clone ID: PAT_MRT4530_94073C.1
agttaatagtgctccacgttttatatatttactgggggatcctgggtccacatgtcatacaaagattatttgcatttacaaccttaccagatctaaacattcactaatgaaagtccttagtgcctaatctaactggacccatacgtcagctagcctgagaggaggagaacagagcagcggctggcgcggcaacctggcggtgttctcgccggcgccgacgacgaacggtggcccttcagaggttgcaactaaaagagaaaatgaagagggaacgacggcgaagccatcggttgtgatctcgcatgatatggtggacggaatagcgctagcggcgagctcaagcgacggtgagcttcggcatgcatgttcatgtcgagctccagcttgtttcggtatgaattgagtgtatgcatgtgcctctacggggtgcctgggtgctcacttgagttcgtgcttgcgctgacaaagcttggacgacgacgacggagcgtggagcgtcccggcggcggcggaaacaacagggcgacggcgtcggctccttccggtcttcgggctgctaaggagaggagggaaatggatcaaagactacctaaggttgcttcacaaacgaggaattgcgccgaagctcacccgggagcgagtaatcgacgatgatagccagcggccggacttgaagaagaagggttcgatctcgcgatttagggctcttccgctcaattcctccggtggatggccatctgcaaactaggtgactatggtggggcagtggctctgcaagagatggcttggatcgtcggcaccccagatgtagcccacggtggtgctccggacgccgggaacgccgtcaagcgcgacacctcgtgccggacgcgtggg

SEQ ID NO: 95929 - DNA, 155 bp, Oryza sativa
  Clone ID: PAT_MRT4530_94074C.1
cggcggtggcggcgtcggtggcctccgtctctgatgacgagttgctgatccggcaggtcaggctgtggcgctgtgccgtgtccaccgtccacccacagcgtcgccacgcgctaggcgctgtctctcacctcaacagcctagagagaggcgattga

SEQ ID NO: 95930 - DNA, 784 bp, Oryza sativa
  Clone ID: PAT_MRT4530_94075C.1
cccccccccccccccccccccccccccccccccaaaagctgtaccgagtagtgagcaagctaatgtatagagctgttttacttggttgtagaaaaacattaaaacaattgcagtaaatcaaaatagtgctactggaaaggccgactattgttgaccaacatacgcaatggccaccgacaaaaaaatgcagtcagatttcaactacgtacataaattgatcaacagttaaaccatttgcctggccagataaatggcgagccgcctttcttcaaaggagtagtcgatgtcctcctgcaatgttacctctggcttgtcgtaaacaagggaaactggagttgctgaaaccttgttggccagagagggagtcattgccatctgcattggagccgtaacagtcatcggagtcttgggattcagtgctgtaaatgtcttcggagtcctgttctcatcatcctcagtgttattggtgatagggcgcacaggcgtcgacgagacactgtttcctggtgtgatctgagcaaaaggtttacgaggtgtctccgtctcacgtagagtactggcattgaaagacaacttcttgataggcaatccggcaatgtccaaacctctactactaggggacaaagtgccgatttcttcagttttcttggcagcacgaacagactttgaatgcagtatatcagtcttcgggggttgcatggtggctccaccaagagatagccttcggtttgcaccacccatagagtgcctggtgccttccgtgtacttaggggcttggcctcgt

SEQ ID NO: 95931 - DNA, 719 bp, Oryza sativa
  Clone ID: PAT_MRT4530_94076C.1
ctcggagaaaaaaaaaagagcgattcctttgcgcgcctcgcgattcgtcgagctcgtcatcctcgtgatcttcctccttcctcctcctccggagaagcgtgggggcgcgcgtttctgctcgcgccttcttctcgttctcatcatttttccaattggtgtatatagcggcgtactcggagagatcggagatctgatctagtaggcggcagggtgggggtcgaccccgagggctgcgagatgggacccgccgccgctgacgacgccgccgccggcgaggaccaggctttgtccgaccttcgtgaaaagcatcgaattgacctggagagattaacgctaacatcgcagccactcagaacattggcgttatttgcattagccattggacagagtataaaaagcacatgtttatgtgttctgaaagatagtgctcggttgaagttcttggttctttaggttgcttctgcctgtactccgctcttgttaactaacggtccacatgaaaagcatgttcaggagctgctttggtatatcagatttggattatggtgggtcatactaggggtggcttcatccattgggttaggctctggtttgcacacatttgtattgtatttagggcctcatattgccctttttacaatcaaggcagttcattgcggacggactgatttaaagagtgctccttatgatactattctccttaaaatgagaccttcatg

SEQ ID NO: 95932 - DNA, 1537 bp, Oryza sativa
  Clone ID: PAT_MRT4530_94077C.1
aggcgtacgggcggcggcggcggcggcatgggcggggcgaggctggggagatgggtggaggggatgtcggcggacaacgtcaagggcctcctgctggcgctctcctccagcctcttcatcggcgccagcttcatcgtcaagaagaagggcctcaagaaggccggcgcctccggcgtccgcgcaggtgttggtggctactcttacttgcttgaaccattgtggtgggcaggaatgacagcaatgattgttggagaaatcgccaacttcgcagcttatgcttttgctcctgctatcttggtcactccacttggtgcacttagcataattatcagtgctgttcttgcacacattattctgagagagaagctacacatatttggtatactcgggtgtattctttgtgttgtgggttcgacaagtattgtgcttcatgcccctccagagcgtcaaattgagtctgtggcagaagtatgggatctagctactgaaccagcatttctactatatgcagccattgtgcttgcagcagcttttgtgctcatattccattttgtcccacaatatggtcagacccatatcatggtgtatattggtgtctgttctctcgtgggatccttatcggtcatgagtgtcaaagctcttgggatagcattgaagctgacattttcagggatgaaccagcttgtttatccacagatgtgggtgttcttactttttgtagttgcatgcatagtaacacagatgaactatctgaacaaggcccttgacactttcaacactgcagtggtttcgcccatatattatacgatgtttacatccttgaccattttggccagtgtgataatgttcaaggactgggatcgtcaagatccaacacaaattgtcacggagatgtgcggttttgttacaatcctttctgggacatttcttcttcacaagacaaaggatatggtggatggtctcccaccaaatttacctatccgactacctaaacacgccgaggaggatggttatgctgctgaaggaattcctctcagatctgctgctgatggcattccactcaggtcaccgagggccacggaatcgtttcgtgcgacattataacctgctaatgcttgcaaccgtgcttcaaggtttatactccagcagcaacgctagctcctcaatgtgggaagggaagaatctccattctttcattggatacacactccataggttgactgtaggatccaaaggtaacggctcggccccccctgtaattttttcagacatccgtacaaaattttgggggtcattacatcagttattatacatatcttcgggtgagttaaccaggatggccaagaatcccaagttctgaactgtaaatcgctgtgagccatagaggtcattggtctggaactgtttgtgttctttcaaatacaataggcaaatagctcactcataatacaagaagaggttgaaaaaccaaaaacaacaaaaaaaaattgctccccccccccgtcctcgatgttttgagatattggtcgtcgggtcg

SEQ ID NO: 95933 - DNA, 333 bp, Oryza sativa
  Clone ID: PAT_MRT4530_94078C.1
atggtgattagagatggcaacggtgaattcaccgtcgggggtcacatccgcgtccccgtccccacgcactcagcagccggcagagaaacggtggcagcggacagcatactggcgacgaagggcgttggcgacggacgcttcgagcggcatgacggctacaagcgcgcgcctgcgtcgacgactgggacagagggcgctggtgacggatggcagacgaacagcgcgacgatgacagcgggctccgggcggggcgacggcggcgacggcttcgagcagcggcttcgggcgatgcgacggctgcagacgtgcgcccgcgtcgacagctggggctag

SEQ ID NO: 95934 - DNA, 467 bp, Oryza sativa
  Clone ID: PAT_MRT4530_94079C.1
cccacgcgtccgcaacaaactaaactcatgtggggttgaggattgagggttgggaacagggcttgggggaaatggaagaggggtgggttcttggatttagaggtagctaggcttggagagacggttgattgatggtgtttggagcgcaagacagaagcgaagctgtgggggtggaaagtaggtgatgggcggggtactagggtaagcagcagggtttaccaaaccggccgtttgggtagggttactatcatcccacgaaatgatggttaccgcaagatctaacgtggtttcaaaaactgaaaagtttaccatgcataataatcatcatgataactacgtaataactacacggttttgtaaattaaccctggtaggcagtggggtaatggaaattaatttgagggtggtttggaggtggtgaccggatctagtagtgctagcccgccgagacacttggtaataatgct

SEQ ID NO: 95935 - DNA, 143 bp, Oryza sativa
  Clone ID: PAT_MRT4530_9407C.1
agcacctcgctgtcacttgttggaccgtcctccgccgccgcctctcccgtggttcagcttgccagcgcaggcgaagaccgaggacggattggcctccgttttattggcgggccagacaacggccccaattgccgccacggtgg

SEQ ID NO: 95936 - DNA, 620 bp, Oryza sativa
  unsure (1)..(620): unsure at all n locations
  Clone ID: PAT_MRT4530_94080C.1
gcgttcgggggcattgtaagtggcagaatggccttgctgccacgatccactgagnaccagccccgcgtcgcacggattcgtaaaaaaaaaaaaaagaagaaaaaaaaagataaaaaaaaaaaaaaaaaaaaaaaaaaaggaaaaaaaaaaaaaaaaaaaaaaaaaaaaaaaaaaaaaaaaaaagaaaaaaaaaaaaaaaaaaaaaaaaaaaaaaaaaaaaaaaaaaaaaaaaaaaaaaaaaaaaaaaaaaaaaaaaaaaaaaaaaaaaaaaaaaaaaaaaaaggggggggccgttttaaaaaaacaaaattttatctcccgtggttggaaaattttatttttttttttggggccccaaaaaaaaaattaaggggccgttttttaaaaacgtgggattggaaaaaacctgggtttcccaaaattaaatccttttaaatttaacccctttttcccaagtggggttaaaaaaaaaaaggccccaaaaatacctttttaaaaaattttccccacctttaatggaaaatggacccccctttttgggggcttttaaagggggggggttggggggtttcccccaaggggaccttttttttttggaaggccttaaacccctttttttt

SEQ ID NO: 95937 - DNA, 480 bp, Oryza sativa
  unsure (1)..(480): unsure at all n locations
  Clone ID: PAT_MRT4530_94081C.1
cgctattgggtccctcccaatccattttatcccccggcccctgaaactccaagttgttttgatacaattacaattaataatcaaccaactggggtggttgtggtgaaaactctncagccattgcaangacccaaatgccccctcaggcctgggccagccccaaaggncccatttccacccatgaatgatgggcgccccactaaaataaatttgttcccaccctacccatttttcatcgttgtgtgtttggattactgagcgtgaacaaaggggtcctatatatctgttggactgagcagggaaagatagatagtacttgagggggatggtgctctatctttgttggattgtactgtcttactgattagcgatttctattcatgtgtcggttagctcaatagctgttaaactttatatttgataactattttatatatattttgggctgataaaaaaaaaaaaaaaaaaaaaaaaaaaaaa

SEQ ID NO: 95938 - DNA, 313 bp, Oryza sativa
  Clone ID: PAT_MRT4530_94082C.1
atcataatgccaagatgtacaaggaaagaataaaagatggcattataagaggatcaaggcaaaggagtttgtagcaggagacaaggtgttcttactcaactcccgggtgaagctctttgaacacggaaaacttcggagcaaatggctaggaccgtacaccgtcatcgacacttcatttcatggggcagtcacgcttcaggatgatgaaagtaacatctttaaggcatatggtcatcgcttaaaaattttcctagaaccgatagaggggttagggcaggatctagacttagttgagttggtcgattttggtgca

SEQ ID NO: 95939 - DNA, 3949 bp, Oryza sativa
  Clone ID: PAT_MRT4530_94083C.1
atggccacatcatcagcatatcctccacctcctccatattaccgactatacaaggattacgaaaaggatccttcatctgcacctgaacctccaccgccagttgatggaccatatcaactcttcggtgctacctacacaacagatgtggtgctcccaagcttagaggatcaaggtgttcgtcagctttatccgaagagcccagatatcgatttcaaaaaggagctaaggaccctgaacagagagcttcagctccatattttggagctagcagatattttagtggaaagaccatcacagtatgctcgtagggtagaggatatttcactcattttcaagaacttgcaccaccttcttaattccttacgacctcaccaagccagagccactctgattcacatgcttgagaaccaaattcagcgtcggaaacaagcaattgaagatataaagcaggacagagaagtcggagaggagaaagaaaacattggaaggcgggccatagacacgggagcccagagctcagacagaaggccgaccaaaccgaggcggggctgggccaatcattcgtgggctcaaagtcatggatacgcaggcttattagatgtatttatggtctgtgcttcaaaagaattcttacatatgtttgataataagatggtactaattgataataagatagtactaagctttcttggagcagacaaatcccttacaaaaaccatcatattcaacagcatgccatatccgcaaataggccagaagttcataattacggttaccaggatcagtatcagcaaccagctggtctgcccgcagaacctttacgcccgccaatccctcagtcaagacagcacagggaaacaaactatctgccagttccagagtggagctgaagataatattgcagatggaggtcctttagtgcctcaaggacagtgctttcgcatatctgctatggtaagtcttgtataggaatgcttttattctatgccttgtgaatgatatgacatcaggttcatatatctcttatcctttcacttacccatttagtgatgtttcatctctagacgagtttcgcggtctccacatagcaagcttctcacgcaggcggtcagtccttcaccggcggctcgtaggatagtggtcagttctccctttttcatgatcttgctccacctgctttttccccttcgacctctccgggcctctcccccccggattctcgtccttctgaccctagctcagcgtcggaaacaagcaattgaagatataaagcagaggagagaggaggcactaaagctacttggggaatcactgctaatcttagatggcaaacacgcagagtttgctagctatatctagacctgtgatgtatgacctacttccatacgtaacttgcaatagtcagatagctccctcacgcaaacaaccttttattgggaaagagggtcagtcttccaagattgccgtggatcccagtgatggacctttagaactcaatagaaggaatgctcctgatattgcagtgcacagaaaaacaaaattcaattaaaatattccggcagctacagtagcaacacttcatcatgctgcagatacagcaacagctccataatggattccatctacagcagtactttaaactcaagcttcagtaccaccacaagcagcacagatggacccttcagttcatgctgcaccactctttggagcagtttctggttcaagctatattccacctgcagcatttggagttggtaatgtgacagaagcattccctgtggatgcaaacactccttttaatgtcacagaaagatcaaagaaacctccagtgcctaactggcttcgcgaagaacttttgaagaagaaatctacatcagtgagtgcttcggtgcaacactcaacagagttccactccaagggatctgaagatgctgaaaaaacacttaaaagttctgatcaggctgacagcagaagcgtagattcagctaaatctactgatgatgatgaagaagatgaggacgaaattgaagcagcccggatggcagcaatgaaccaggaaattaagcgtgtattaactgaagttctcttaaaggttactgatgatctttttgatgagatcgcgacaaaagtattgaatgaagatgatccatcagctgaaccaaatgagcccactagagtttctagtgtgaaggggcctggtctgggagaatcaaaaccaaaggtctcagctaaagttgttgtccctgctaagccaactaatgttagctcagctgatcattctgatggtactgggttaagttcccctaaaggcgctcttcttggccttgctagttatgattcagatgatgaggacgatgagggtgataatgaggataaggttccagtttcaaacttatcgtctgaaactaaagctggcgcagctcgtccaggagaaggcgaagatcgtaaatttaatgatgaaatgtctcataggaactcaagtgcagaacttaaacaagagctacgtgttcatgacacacatagtagggaatttccttcagatgccaaaatatcaagtcagccgaaggatgtggctcctaccctggatgagaaggcacatggatattcccaaaatggaaaagttccaccttcaggcaataatgttgaaaattttagcaatatggagagcagtcaagggcatttagggaagagcagcaatgaggaagattttgtaaaggagccaaaggctgttcgaagaaaagaatccgaatcttcttccaaaagatataatgatgatgataaatctagcatgtatggaaatattgataaaaagggtagcttcaaggaggaaaaaggatctgacaggagtgtgagacatggagctgatacaagggaaccccgttccagaggaaactctaagcaggatgatgcaaaaggagagagaaaagattatcaaaaggactgcctcaaggacactgctttcgcatatctgctatggtatcttctgagtgaagaaacatcaggttcatatatctcttatcctttcacttacccatttagttatgtttcatctctagacgagtttcgcggtctccacatagcaagcattctcaccgcaggcattcgccttattcatctgcggaaaggaataggacaggaagaagcgttccagatccagaactccagtcaaaagaagatagaagatacttttgatttcaagatgcctcgacatccttgtgaggcgatgtgtggcatatcgctgcatcttctactgattcattgaacaacgcattcccacggtagcaagatgcccgcggatcaccagtgtagataagctggaggtttgcccatacagaggatattaaatcttctgtgctagcagcctagcagagagcaatgtacttaattattttgtaggcctagcgacccacgcaaatatgacatgtaccacctttcgatttcatgtattccatcttgattgtggaaaattggcaacgccaacgcccagtaggtgtgtactggcttgcgattatttttgtagttttgaagattactgttatgtttttttcttgaaacgcagattgttcgtattattctatttggctcccctatccatcttgcttaaaaaaaaaaaaaaaaaaaagctacttggggaatcactgctaatcttagatggaaaccagccgagtttgcctgcaatgtgaagacatgtgatgtatctgcttccctgcttcctaacgtgccaagttggctagctagagagtgcacttggcagttcacctgtagaaatagtctagtgagtagtgtgaccgtgggagatacttctggcttttgtgcaaactccttatttattgcctgtttgtgtgttgtgatttgtgaaactttaaacattgaacctatcctggacttgacggtagaaaagcttcaatgttctcctgtaatgcatacagtttcatgatgtttagaccct

SEQ ID NO: 95940 - DNA, 263 bp, Oryza sativa
  Clone ID: PAT_MRT4530_94084C.1
caccacaaacaaaaatgcacaaatgggcaacgaattccccaaaaaatttattgggccagtttgatctttttacgggatccatcagccattcaataaaaaatgggctactaatggaacaccctacaagcagcttgtaatattctagcattactttggttgacaaagggggacccagccacaaaatgattctctgccaattcttttaaaaatatctttgcaggggggggtgtttgtcccaaaccatagtggccggaaaagtccgt

SEQ ID NO: 95941 - DNA, 531 bp, Oryza sativa
  Clone ID: PAT_MRT4530_94085C.1
atggccacatcatcagcatatcctccacctcctccatattaccgactatacaaggattacgaaaaggatccttcatctgcacctgaacctccaccgccagttgatggaccatatcaactcttcggtgctacctacacaacagatgtggtgctcccaagcttagaggatcaaggtgttcgtcagctttatccgaagagcccagatatcgatttcaaaaaggagctaaggaccctgaacagagagcttcagctccatattttggagctagcagatattttagtggaaagaccatcacagtatgctcgtagggtagaggatatttcactcattttcaagaacttgcaccaccttcttaattccttacgacctcaccaagccagagccactctgattcacatgcttgagaaccaaattcagcgtcggaaacaagcaattgaagatataaagcagaggagagaggaggcacaaaagctacttggggaatcactgctaatcttagatggaaaccagccgagtttgcctgcaatgtga

SEQ ID NO: 95942 - DNA, 2787 bp, Oryza sativa
  Clone ID: PAT_MRT4530_94086C.1
atgccgatgcagccgccgcctcctgcggcggggaatccctggcctcctcaccacgccgctgcccagccaccgccgcccagctacccgccgccgcctccgggccagggctgggccaatcattcgtgggctcaaagtcatggatacgcagctcataacactatgcatagggacaaatgtttattgaatgtacatgcgtttcaagaattttggggagtcatgccatatccgcaaataggccagaagttcataattacggttaccaggatcagtatcagcaaccagctggtctgcccgcagaacctttacgcccgccaatccctcagtcaagacagcacagggaaacaaactatctgccagttccagagtggagctgaagataatattgcagatggaggtccattggcgccaccagcaaagaactttggttcatttccatccgcctatgagcaggaggtatcttataattatccttctactccaggtgttgggaatgctatgattcaatatccaagctcgcagactcagctacctccaactgcctcagcaatgcaagacggatttccacaagcgccttccagtatgcatattgctccctcactggaacaacctcattttgggcatgatgggcagtcttccaagattgcagttgatcccagtgatcaacctttagaatttaatagtaggaaagctcctgatatggcagtgcacagaacagcaaatttcaattctaatattccagcagctccaatagcagcatctgatcatgatgcacattcagcaccagcgcaatcatggattccatctactacagtactttttcctcaagcttcagtaccaccacaagcagcacagatggacccttcagttcatgctgcaccactctttggagcagtttctggttcaagctatattccacctgcagcatttggagttggtaatgtgacagaagcattccctgtggatgcaaacactccttttaatgtcacagaaagatcaaagaaacctccagtgcctaactggcttcgcgaagaacttttgaagaagaaatctacatcagtgagtgcttcggtgcaacactcaacagagttccactccaagggatctgaagatgctgaaaaaacacttaaaagttctgatcaggctgacagcagaagcgtagattcagctaaatctactgatgatgatgaagaagatgaggacgaaattgaagcagcccggatggcagcaatgaaccaggaaattaagcgtgtattaactgaagttctcttaaaggttactgatgatctttttgatgagatcgcgacaaaagtattgaatgaagatgatccatcagctgaaccaaatgagcccactagagtttctagtgtgaaggggcctggtctgggagaatcaaaaccaaaggtctcagctaaagttgttgtccctgctaagccaactaatgttagctcagctgatcattctgatggtactgggttaagttcccctaaaggcgctcttcttggccttgctagttatgattcagatgatgaggacgatgagggtgataatgaggataaggttccagtttcaaacttatcgtctgaaactaaagctggcgcagctcgtccaggagaaggtgaaaaagccactgatggtgaacagcatggaaatcataatgaaagaaattctgtggtccaaaatgcttcattaggcgaagatcgtaaatttaatgatgaaatgtctcataggaactcaagtgcagaacttaaacaagagctacgtgttcatgacacacatagtagggaatttccttcagatgccaaaatatcaagtcagccgaaggatgtggctcctaccctggatgagaaggcacatggatattcccaaaatggaaaagttccaccttcaggcaataatgttgaaaattttagcaatatggagagcagtcaagggcatttagggaagagcagcaatgaggaagattttgtaaaggagccaaaggctgttcgaagaaaagaatccgaatcttcttccaaaagatataatgatgatgataaatctagcatgtatggaaatattgataaaaagggtagcttcaaggaggaaaaaggatctgacaggagtgtgagacatggagctgatacaagggaaccccgttccagaggaaactctaagcaggatgatgcaaaaggagagagaaaagattatcaaaaggacgtaagagagaaaagcagggattctgcagatagaagagagaaagggaaacatgaaaaggaggataggtcgaggcaaactacaaagggctcaagtagtcatagcagtagaaggtcaagatcaccaagtgcgagaagtcggaccaagaaggagagttcttcacatcgagagagtgtctcaagtgatgagccttctgataattcgaaaaggagaaaacttcattcatgtaaaagcagcatgtccccctcacccccaaaatctaggaacaggcagtgcctcaaggacactgctttcgcatatctgctatggtatcttctgagtgaagaaacatcaggttcatatatctcttatcctttcacttacccatttagttatgtttcatctctagacgagtttcgcggtctccacatagcaagcattctcaccgcaggcattcgccttattcatctgcggaaaggaataggacaggaagaagcgttccagatccagaactccagtcaaaagaagatagaagatacttttgatttcaagatgcctcgacatccttgtgaggcgatgtgtggcatatcgctgcatcttctactgattcattga

SEQ ID NO: 95943 - DNA, 348 bp, Oryza sativa
  Clone ID: PAT_MRT4530_94087C.1
atggccgatgctgccatcgccctagccgagaccgtcgccgtcaccgggagatgggaggagtgggaggaggagggggatagggagaggaaggagtgggaggaggcgggcgatagggagagagggaggagtgggtgtggggcggagagggcgatgggatttgagagggagatgggaggagtgggtgaggatgacctctttattggaaggaatgcacgaggtggaagggatgggcggcgacgtggcctgcacgagggaggcgtgaggaagccggatggggcggcgacgtggggaagaacggtggccatagcggttggacttggggagccggaggaagggaatgacaggtag

SEQ ID NO: 95944 - DNA, 548 bp, Oryza sativa
  Clone ID: PAT_MRT4530_94088C.1
cccgggctgcaggaatcggcacgaggcaatgataagtccggaagtgatgagaactacgatggtggattgcttttcagctgggcaatgcaccaaataagtaatcatcttaccactcttcaagttatgttgccaaatataacggaaggtggctctctctccttctttcttctccatctgcatgtattgtgcaatgggccttggcttggttggactggatttccgtggcttacttccaccaatttttgaaaaagctgtgttaaatttgttttcaaagaacatgggtacagcagtcgagaattttcaggttgttctggattcacatcgttgggttccaatgccatctgttggctttgtagcgaatggagttgtggatgagacttctgatgatgtgacgccgccttctgttttaatggagcatccacctcttgcagtctttgtcaatggtgtttcagcggcaatgaatgagctaagaccgtgcgcaccattgagcttgaaaaatgtacttgccgaggaggtggtgaagggattacaagccgtttctgactccc

SEQ ID NO: 95945 - DNA, 3792 bp, Oryza sativa
  Clone ID: PAT_MRT4530_94089C.1
ggctatccggcggcgccgcccgggatggagcgccctgccccggaggcggcggctgcggcggcggagccccctggggcgaaggcggaggaggaggaggaggggccgaaggatgtgggggtgaagggtacggggaaggagaaggagacagagaaggttgaggccgagaaggagatggaggggaaggggaaggggaaggagtcgatggaggtggaggaggggaaggagaaggagggtaaggggaaggcgaaggagaaggagaaggagacgaaggtgaaggtgaaggaggagggtggggaagagaaggagaaggggaaggttgaggtggtggaggcaaagcggcggccggctggtgttggcgcggagacacccatcctagcggtgccgatggtggccgtgccatgcttcttggcgtctcctgcatttgcgggtcacttttcaatgagccatcaagcagctttggcgagtgtgacggctcaggcacaaatacaattgcagtcaccaaccacaccatattcagaagggctgcccagtccatttcctataacacctaaagctgtaatgcccctgcagcgatcaccttcaggaactgaagggagtgttcgcagatcagtgttagagaagtcagcctcatttcagtcaagaccacacaatcatgtgtctgtaaacatggttggtgatggcttcaactggaggaagtatggtcagaagcaagtgaaaagtagtgaaaattccaggagttactatagatgtaccaactctaattgcttggctaaaaagaaggtcgagcattgtcctgatggccgcgtggtggaaatcatttacagaggaacacataatcatgaaccgccacaaaagaccagatttgtgaaagagagagtggctcatattactgcttcctctggagatgatgaaaccttgggacttgtgaacaatgaaattatagaatccccgtcaccgggatgtaaattagagccgggtgctgtctctgaagcttctgaacagcagcttttttgctcaagtgattgtgaaggtgatgctggtaacaaatcagaagatgatcatcctagcacagagcctcagccaaaacgaagaataattgaaactagcacacctttgactccagttctcagaactgttagagagcaaaagattattgtacaggctggaaagacgagtgatgggtatagatggcgcaaatatggacagaaaattgttaagggaaatccaaaccctaggagctactaccgttgtactcatgatgggtgccctgtccgtaagcatgttgagaaggcaccagacgatgataacaatattgttgtgacctatgaaggtaagcacaaccatgatcaaccgtttagaaacaacagtgagtcgaaggatgggcctgttcctatgatcattccagcagagacaacatctgagcagcccagcacaatgacctcaacatcagaacagaaacagccgatcagtctgctgaaggatggcggcgatgagcccatgaagggcaagacttcagaaatcggtggtgagaaggcagtggagtctgcgcaaacccttatcagcattaaaactaatcccgatgacatgaagaataccctcttgaaagatacttccgcggtagttcctgtccaaaataattgatcctgtgaggttagggttgattcgattaatgtattagtttgtggtatttattggttcggggagctattgttgtgttagattctgtacatgagttgagggccggcattctgtggagcaccattggatagaagcatctaggctcgggaagccatgatacttacagttgtcccccttgtatagatctccaaacccctagtgtgtataggtactgtatcgcttactgaggctaagcaacaaggagacctgagaaacttcatgtgcggggtgctctgcttggattcattgcacatctaagccgatccatgccatgatatgtttattgtatctggtgttatatcataaaaacgtgcaaggtgtatgccatttccattctatgaacagagtaacacaggctgcatcgcttgtctgctcggtgagcagtagacaaggtgagtttgggcatttcatgtggttgtatgtggaacatttgtagctgaactgaacgactacaagacacattgaatcagaaccaggcaaggagcttttgctgctcacttgctcaggcgagctcactgtaaccgtgcagatctatgtacagtgcaacaagaagatgatggtcttcatcatgtttgagccaatgcaacgcttggggcggccttgaactccttcaccgccttcttgacggcctcgacgtcgatgtcgatcagcttcccggtctccgacgcgacgacggtgcagcccttcttctcctccaagtacggcaggaacagcctcgccttctccttggatgagaagagagccacgcatggcttgtccctggcgttggcgagctggacggcggcggtgttggtcgcgacgacgccgacggagtcgttgatgaggcaggtgagttggccaggagtggtgatgaacaggatattggtgtccttccccacagtctcctcaacctcttccctgtgcttctgatgagggatcacaaacagaggcttcagaccattgtcttcagagctgccaagacaccaccatttttttggctttagttctaccttctcacaatcggtaccaagctggaaatgtaagtgtaagagcagccgtgcttgagtgagtgagtgaggtgaggtgaaaaacctgatctccttggcgatctcagcccaatgctcgagagggaggaggcagtcatcgtcccccctcgacctcatgttggcgaaggagtcggaggcgatgccgtggacgacgacgaacttgcccttctcgacgccggcacggctatatttgtcctccacgaacgctcggagcttcttggagatggacacccgcaacggcggtaccgggtgctccggcacacccttcgctggccgcccaatccactccaacatgtcctgatacatgttgtagccgctgtcggcgaggttggtggtcggcggccggaacatctcggtgaggaacagcccggcgccggcgctgttgacgttggggtaaacatagccgaccttgtcgcgggccgacgacatgaagaggaagagcgcgtgccctatcccggccaacttggtcgatatgatcagatcatagtacctgttcttgagcacgccgagctggtgggtgtactcggcgggctcgggccagtcgtcgtcggggtcgtagacgtcggcgtacctgacgttcttgcacatctcgtacacctgcttccccctcgccgatgccaccacgtccaccaccaccccggggtacctgtcccgcagcagctgcaccaccgggaagaagagcacgttctcgtacaccccgccggacaccacgcagcacgcccgccgcacgtcgcgccgcaccttggatgccaggctgtccagctccgggttgtaccccgccgggaaccgcaggaacccgtacgggttcgccgggtcctccggcggccgcgggtcctcctcctgcttcccccccgagaacgcgccgcggtagtcgaactcgtcgtcgggcccgtcgtcgaacgggtccagccacgggttcttcttcttcgccgacgcccgcgccacgccagcgccgccgcgccgccctagctgcagcaggtggcagcagcattgcctcgctatcggcagcgacggcggtgaggggagcttcgccggcgtgcccatgacgtcgacatggttggcgcctgcagcccggggatccactagttct

SEQ ID NO: 95946 - DNA, 996 bp, Oryza sativa
  Clone ID: PAT_MRT4530_9408C.1
gtaaatctgcacaagaaaaagattcaagaacagtttagatttcagaaaaagaagtgatcgatcgattgattgattcttgcacatgagcatggcgagcagtggcggctactactcctactacaacggccaccagccggcgccgtactactacggctacgcgcagccggcgagggtcgccggcggcggcggcgtcggcgggtcgcagcggccgtcggcgcacgcgctcctcctcgtcgcgacgctgctgctcgtcgccgtgaccacgctgtacgcgcggtgcgaggaggcggtggagagcctgctcgaccagctccgcgtcctcctcatcctctccccgctgctgctcatcgtcgccgtgcaggtatgggccccgagcgccgccgccgccgccgccgaccgccgtggcgccggcggaggcctcatgtacctcctcgcgcagctgatgggcatgggcgacggcggcggctcgccgtacggccgttggcacggcggcggcggcggcgcgtcgtcgtcgccgtggggcgtggcgctggtgctggtgctggtgctgttcttggtgtcgtaccagtcgtcgttccagagctggtggttcccgctgctcagccgccgatgagaattgcaaaagctcgtgcatgtaaaaccatggtgaaaatatagcagaggcttcttggttaatcagagctaagctcggtgacgatcgagctatatataattgagcacaagggcggagctagagcgagatggagggatgccacttgtttaatttactctgttttatattaagtttaagctaatacgggtatttaaatttgtattgagagatgtgcacacatgatgaaaataggttaggtataactatattttttcttgaccgggttcctgggtacccccctcaatacattagctcgagcagatggcatttgggtgccgtgtaattatgcttgtccgatctccaatcccagtaactaaatccaatttacctgtgactttcgagcg

SEQ ID NO: 95947 - DNA, 534 bp, Oryza sativa
  Clone ID: PAT_MRT4530_94090C.1
gagcaactaaaggttgtcgtctcatagaattgtagaatttaagaatcacataactctttgaacagcagcacagttttaacctaccacagtgtccagtagtgaccaaatccataactaacagtcaatagaatccataactaatatttcctatctccagttcccttccatcagaccacgggcagaaaactgaattaatggataaactctaccattttctacattcccaatgagtatactcacttaagggcaatgatgatgagtacatgagatagctcaacttaaattggagaccatcttgttcagaagtttcagtctttcacccacactggtaacttgacaaacaagagccacacatagtggactgtttctctccatactcctaactccttagtgacatgcaggagtactgcatgtttctaatatgtgatcatcattttccttttttcatcaacctattgtccttatcagcttgagaagtggcttatttcatgtcagcactaacacagtagctcaaacgtactttcatgtataaag

SEQ ID NO: 95948 - DNA, 297 bp, Oryza sativa
  Clone ID: PAT_MRT4530_94091C.1
atgaaggtggtgaggtgcagcaactcaccttgctttgggttgtcggaggagatcgaccggtcgctgtcgaggcagtgcttaattagagaatgcggtggaatggctcgtggtcaaggtgtggagcaagagaagcagacgagctccttcacatgggaatggggcgcggtgcccgggcgtgtgacttgggcgaaggcgacgcgacggaacggcgccacgcggggccagcatgtcagtggcgctgtgcgagctgatggggcagcgttccggtgcgacgcagcgcgccacgtggtctcctag

SEQ ID NO: 95949 - DNA, 111 bp, Oryza sativa
  Clone ID: PAT_MRT4530_94092C.1
atggccgagcagctgctctacggctgtgacgtcgcgttcgcgccctacggggagcataatctccagaccgcattagttcctgattctattaccagttgggctaaggcatga

SEQ ID NO: 95950 - DNA, 516 bp, Oryza sativa
  Clone ID: PAT_MRT4530_94093C.1
ccttgtcccgcacgaggcgtcacgtgactgcatggtcgctggacacgtcatcgcacgcgggacgatggtgttggtcgacgtgtactccatgcagcgggatccccgtgtttgggaggacccggacaagttcatacccgagaggttcaagggtttcaaagtcgatggaagtgggtggatgatgcccttcggtatggggaggcggaagtgccccggtgaaggccttgctcttaggacggtagggatggcgctaggggttatgatacaatgctttcagtgggagcgcgtcggaaagaagaaggttgatatgagtgaaggttctgggctcaccatgcctatggccgtgcctctcatggccatgtgcctaccacgtgtggagatggagtctgtgctcaaaagtctctagaaatttttttttctttgatacgttataggatctgtcacgccaaataattgttttgtgtaattgatttcaaccaaatagtcaaatattcggtcattaaaaaaaaaaaaaaaaaa

SEQ ID NO: 95951 - DNA, 396 bp, Oryza sativa
  Clone ID: PAT_MRT4530_94094C.1
gattaattagggtttggccctttttatagtttttttattaagtttattagaaataatttgaaatattggtatattttgaagaataagttattaattgtatacgggtacagaggagaagatgaaacagggagaaattagggtggaggggaaaaaagggagagaaaaaaaacagagagggagaggcctaggaggggggtttcttcttggaaaggttgggggacttgggcggggtcaaaaaggggggcaagttcgaaggggtggttgggtttaacctgagaaatcacccgggcttggaaggggttggagaaaaaaaaggcgggtgggttaaaaaggatgggggtaaacttggaggaaaaaacggaaaaggggggagtggttgttttagagggttttaaa

SEQ ID NO: 95952 - DNA, 588 bp, Oryza sativa
  Clone ID: PAT_MRT4530_94095C.1
atgaccatcgggaagggcgaccggtggatctggccgtcggcgaggcacgattccgcttgcccgtccaccaagtcgtcgggcgtcgtcgagctgaagagatgggtgccacctctattacactcctctacctcgcctaactcttccgtcatcgctgccgccgtcttccaggtcgcctcctccaccgggctactgctgcccccctcaccgagccaggccatgaccgtagttgccttcttctctgtcgagctcccaacggccaccttgtcgagctcgatcccgatggtggcagcaagagctcaagggcacgcaggcaggggccacctcggtgacgacgaccgaggcgagctcgccggccaactcacctgcagggcagttgacaaggggaggccctgctatgtggatgcatttcctggaaagtactgcgggaagtccaaaataatccccaatccatccaggcaggagatagcgcccccaatccatcccgcgcacttcgcatcgccctcgctcggccaccgccgtgagccaactgggaggcgcgccgccgcggcgaccgaagaggcgccaggccactgggctcgccgtgagtag

SEQ ID NO: 95953 - DNA, 913 bp, Oryza sativa
  Clone ID: PAT_MRT4530_94096C.1
agttctctacggtttatgctctggcatgccgcctgagaagatgctgccttttgcagctcaagtggtaagataactctatagtattgcactcgagtactgcagttagttgggaattttctgctaagcacaaccacttattaccacataccacagcaatactatcatctaagctgctctagggcacacacaggaggctcacctaaacgcactgttactagaacacagcccagaagttgctactaaatgattatgttcctttttctttgtataacagtataagtaaaaaaaatatagaggggaaattgcagccagtaattgcattggtatcgagattgccgtttataggtggatgtgtgtacctataaaactgagaagtgggtaaactggcaaatgatttatataaagtaaattgcgttcatggtacacgaacttatatggtgggtgcaaataggtacaacaacttgcaaattgtttattccggtacaataacttggttagttcgtgcaaacctgggccaaaccaatccacacaagtaaaattaatctaatatgatacatatgtgtgtgtgtttgcaggctgcttgcgggtgccaggggtttaggggctcggactgctcttccccatcgcacagatccccgcctggttggcctattgactcgaggaactgtagtgtatccatctgtgttggatctgattgggatggattcattggattgtgggcgcctttgaaaaagaagagattaagcatttgaaatatggagtaataagaaagccgcctgcagttgaaatcggttcctaagttgtatgtaaacattgattgttgttgcatactgtcaatataccttggcttgtgttaataagagagatttgtgtgctgttgttgcaaggcccaaaaaaaaaaaaaaaaaaaaaa

SEQ ID NO: 95954 - DNA, 2166 bp, Oryza sativa
  Clone ID: PAT_MRT4530_94097C.1
atggctgagctgaagccggaagcgatcagatgcccaaccgcccaagtgatcgaggtgttagggaccaacgtcggatcaacgagtgtcagagtggacagtatcctacgccggcgcgagtactacattcctctttgcgccgcctccctctctcacccggaggagccatcgtccatcgcggcttggtctccaacagattgggtcatgatgtccccgcctgcgctagagggacgctgccgtgagccgcggctgagcgcgttcgccgaggaacgcctgcccacggtggttccagaatccttcgcgatagaggggccgataatggagaacatagaggcgtcgacactagcgagcatcccgtgcgtttaccagttgtcctgtcgtttcatgagtcggctgcggggtcctcgcatggtatccacccgcattctgatcggcgtcgattggcgccagttgtggcgcatgttctccagattcttctgctcgttggggatgcggccattgggtgctcctcttgggtttttccttttcgaaagaggatgcccagtctttgggtcatgcgttgcggcttgactctcggcgttactgtggtttgtcgtgctttcccggtatccatggaaggtacgggtgacagagattccaatactggagaggtgctccctctttatctgcctcgcgtcggttggctcctatactcaaatcctcgctgcaggtggcgcgtataagcatagccctgaggtcactcagatcaactgccgcactgaccgtgccaatctcatctcttccgcgccatggtttgtctctgcttattttcccatcgaatttgtgatatctttaatgtgccaaggacttgctccaggattaagatcccttttccactacaatggggcgcaccaactttcagtgccggtcaatcctttgggaattggtatccttcttgatgggctatttggaacgggtactggctccaccgtgtcagtggagaatgtcgggttgttaggatcaacgaggatcgggagccgacgagttatacagatctctgccggcttcatgatcttcttctccatgctagcggcagtggggctctccttcttgcagtttactaacatgaactccatgcgcaacctctttatcgtcggtgtctccatctttcttggcctatctgtgcccgaatactttttccggtacagcatggccgctcagcgtggccctgcgcacacaaaagctggatggttcaacgactacatcaacactatcttctcatcgcctccgacggtcggactgatcgtggccgtcttcctggacaacacgctggaggtgaaaaacgcggccaaggaccgggggatgccatggtgggtaccgttccggtcgttcaagggggacgccaggagcgaggagttctacagcctgcccttcaacctcaaccgcttcttccctccgtcttaaggaacgggtactggctccaccgtgtcagtggagaatgtcgggttgttaggatcaacgaggatcgggagccgacgagttatacagatctctgccggcttcatgatcttcttctccgtgctaggaaaatttggagcattgtttgcttccatcccatttaccatctttgcggccgtgtactgcgtcttgtttggactagttgcggcagtggggctctccttcttgcagtttactaacatgaactccatgcgcaacctctttatcgtcggtgtctccatctttcttggcctatctgtgcccgaatactttttccggtacagcatggccgctcagcgtggccctgcgcacacaaaagctggatggttcaacgactacatcaacactatcttctcatctcctccgacggtcggactgatcgtggccgtcttcctggacaacacgctggaggtgaaaaacgcggccaaggaccgggggatgccatggtgggtaccgttccggtcgttcaagggggacgccaggagcgaggagttctacagcctgcccttcaacctcaaccgcttcttccctccgtcttaaaaccagcacggggagaagtttgagggaaacggggatttcgtcgctgatgcgcgatcgaatcgtttgtgtctgtgtcagaaagaactcagaatgctgagcagaggcaatgtagatgttcttctagttggccattatttcaaaaaaaaaaaaaaa

SEQ ID NO: 95955 - DNA, 294 bp, Oryza sativa
  Clone ID: PAT_MRT4530_94098C.1
atgctgtaccggaaaaagtattcgggcacagataggccaagaaagatggagacaccgacgataaagaggttgcgcatggagttcatgttagtaaactgcaagaaggagagccccactgccgctgaaagtcaaacaaagcaaatgtgtgagacaagaacaaaaacagtggcgtatttactcgcatcagatggcgcaggcatggagaagaagatcatgaagccggcagagatctgtataactcgtcggctcccgatcctcgttgatcctaacaacccgacattctccctgcattga

SEQ ID NO: 95956 - DNA, 210 bp, Oryza sativa
  Clone ID: PAT_MRT4530_94099C.1
atggatgcaccacgaccatccgtggtttgtgtggccctgcggggaggatcgctcaaccgctcagccgtcagcgagctcggccaggagcagaccatcgctgacgagttcgatccgtaccatgccagctgtagaccccgattcggagcttgttgccacagacagaccaagagcacgccgtcgacattctccatgagcaaatcgaagaagcag

SEQ ID NO: 95957 - DNA, 255 bp, Oryza sativa
  Clone ID: PAT_MRT4530_9409C.1
aaacgggggaaattgatgcctgaaggaaagagataaaaaagcacaatgccaaaaatattagggatttatgagccgcgtacattttgccccaaatagccagggttaagcctaaagctaaaacatcctggaagaaacactttgaaaaaaactttaaacaaaaccctagtaaatatttacagggtataggaggaacatgttaaataactaaattgataaaactaaccttgaaaataaaaaaattattcatactaaaac

SEQ ID NO: 95958 - DNA, 296 bp, Oryza sativa
  Clone ID: PAT_MRT4530_940C.1
tttgttgtttttttttttttggctctactgcatgaaatatatatttacagtgattatctttactgaattagatagagaagtgcgaaaaccatacatgttaggaatgtaactgactcataaaatatgcattacaagatccaatagacgtgcatggataataaaattagctttgtgcattaagctggaacttggcttcaacaatgacagtcgggatcatgattgaaatagaattgactcacatacagcattatataatgcattccgggaactatttacaggctataaggttgtctttt

SEQ ID NO: 95959 - DNA, 255 bp, Oryza sativa
  Clone ID: PAT_MRT4530_94100C.1
atggctaccacggatacaaccattgctcacatcatggatgaacaagaagatatcgagatcaagaataaggttgatttgcaccggcaagatcaacaacccacagagagcctcgacgagaggctcgtgacggtagatgaggttcgtgtggcccttgcccattgcctccagaccgcgctcgaagtgggtgcgccaaggtcaacaaagccaagaatggtgcggaaggcaggggcttcgctcatcagcggggccatttga

SEQ ID NO: 95960 - DNA, 936 bp, Oryza sativa
  unsure (1)..(936): unsure at all n locations
  Clone ID: PAT_MRT4530_94101C.1
ccggccgggatcatcccactctctctcacccaacgaattccctcgcaaatccgtccaagttcatcgacacaagaagctcgagctcgctgtgtgtgcttgcaatggcgggggtgcacacgcacagggcgttcctgctctgcaactacctcctcctcggcgccgcctcgggctgcatcttcctcacgctctccctccgcctcctcccgtccccgtgcggcctcctcctcgtcttcctccacgccctcaccgccgtcctcgccgccgcggcctgctcgggctccttcaccgcccccggcggcggcggtggcacgcacacggcgcacaccgcgtccgccgtcctcaccgccatcttccagggtgccgccgcgctgctcgccttcacccgcaccggcgacttcctcgccgagctgcggtcctacgtccgggaggaggacggcgaggtgatcctcgagctcgtcggcgggctcggcgccgccatcttcgtcctcgagtgggccgctctcgccctcgcgttcgcgctccgcctcggcgacgacggcgccgacggcgacgaacacgacggcgggtacgccaagagctggcaatcaggttaccatgtctgatccatcgagactgatgaacagagaagcataagagaggaattcttcgattcttcttttttctttgggtttatttactgaattcgtgcggctattcagctgtgattacagtgttgctgcaatttttttttactgctctcttcttggcttcttgaactaaagaagtgcaaggcaaatgtattgctttgctgtgtagtattcgttttcctttaccggatctggtataaattagaggaaatcatgtcattcgcttgaatgaaatttgtcaaatttctcgtaaacaacctttgcgggcaatgttggtatgatttctcaatagaaattttgtcattcancc

SEQ ID NO: 95961 - DNA, 490 bp, Oryza sativa
  Clone ID: PAT_MRT4530_94102C.1
acaaaccaacttacatatttcgaagccacgtgtgtgaatatagatcacaacttctacaacccgaacaaatgcatctggcttccaaatcgtgtcatttaatttacaaactcaccagaggaagccgactccacgtgcactacatacatatatatggagctgctgatcatgcgatgggacgaatatactcgactaatttctgaggtacattgatgatgcaggcgatcatgatcgatcacctgatcatcactgtacttcatatctggatagagatacatgtgtatagatggtgccgatgacctgtggatggatgagacgacacatgagatgctgggttcttcaaacgcgacgacctgcaagcaaccagtggatatcaccaagttgttgcaggctcatacaccatacagtagcagtcacatacaccacgttttgaagtaccaaacgcgatcacagtctcgaagctgaactacgctgacacgagccgtcatattcc

SEQ ID NO: 95962 - DNA, 2097 bp, Oryza sativa
  Clone ID: PAT_MRT4530_94103C.1
gcacgaggcttagctagtactaatcatcattagtgtatagctaagctagctccattatcttgcgcttcttggttttgtctgggaactattgtataggtctatatcgatctccatggatgaggtgtggtgcagcctggacagcatgccggccgacatcgccgccggcatccaccagccgccgccgcccgacctccacgacccctccttctggccggctttcgccgactgtgctgcgagcttcatcgccggcggcggcggcgacaatgcgtgcttcgacgagctcatggcgggagggtcgtcgggtgacactaggatggtggccatggacgacggcgacgacgggagtggcttcttggtgggggacgccgaggccgagcacctgatgctgtcgtcctcgtcgccgtcgtcgctctcctcgggccgctccctctccatcgacagcgccggctccatgtcctccttctcgctcgacgccgccgcggcgctggcgatgtcgaccctcgccgtcccgcacccgtacccgccgcccgtcgcgcacggcatgttcgcctccggcgacggtggcggcggcggcggcggcgcagtcgacgaccacgaggacgccatcatgcgtgccatgatggccgtcatctcctccgcctcggcctccccctcctcctcgggcggctccgcctcctcgcccaccccgttcagccgggacagcggcgcgcaccaccagcctgcaggtcagccagccatggcggcgccgcagcagccgcgtggagggaacggcggccacgtggtggtgaagagcagcagcagcagcggcggcctcgccgtgccgatggatcagaagcccggcggcggcgggcggggacggcagcaggaggaggcggcggcggcgagcgccaccaacagcagccagctctaccacatgatgtcggagaggaagaggagggagaagctcaacgacagcttccacacgctcagatcactcctcccaccttgctccaagctttacacagtatttgagtggttaccaggaaacaacctgtttcatggaaacggaagtgacaacaaggacaagacgacggtgctgatcaacgcggccaagtacctcaagtcgctggagacggagatcacggagctggaagggacgaacacgaagctggagaagcacatcgccggcggcggcggcgcggcggacgccgccatgagggctcgccgggcgcagcagagggccaaggtgcagatcagcaaggcggcggactcgcagtcgcagcagctggtgagcctgacggtgatggtgatggtggagtgcgacgtggtggagctggtgctccacatcctggaatgcctcaggtggatgaaggagatcagcgtgctgtccgtctacgccgacacctactcgccgcagcttcttctcaaggccatcgccaacatcaagctccagatcgtgggaggagattggaacgaggcgtcgttccacgaggcgatgacgaaggcggcgaacgacgcgaccatttcctgcgccccgctcgcgatcacggcagcacagtgattgctgattagtgagtgattagcagcgagcggcggcggtggcgacctaccggttaattcaatccatcctcatcgtcctcgcgcgcgtgcagtcatggttgaacgttgaacccagtaaaaaaaatatttatgtatggagggcgatgggttcgctacgtcataaccgatctcaatagttggaggaggaaaacgaggacaattcaaatacttcgagagtggggaagaatattgttagatatatattagggtttggttattcattcctttttccgtcttaaaatataataagttttgatgatgtataaacatgtataaatatatagctaaaagttattatattttaggacggtgatagtaattacgtagcgtatttttcaggtgtgccctagttgcagccgcaagctaggttgcagacgatggtgctttagtagcgctagcctagctagtataggtatatgtatatgtatatctctatgtatatacatgcatggtggtggttttgagtgattgttaaaaaaaaaaaaaaaaaaactcgagactagttctctctctctctct

SEQ ID NO: 95963 - DNA, 333 bp, Oryza sativa
  Clone ID: PAT_MRT4530_94104C.1
cagtttcgtgtagcctcgtctcacctctcctaggtgaggctgttttcaactccggggggttccccacccgcatccactgatacacactcacctcgtgctcatcgtaccgccaccctctcaaggctcaccgtctcgtgattcggcactcgagacagccaccaagatctccgacgaccggcgccagcaccctgacaaggtacttgaacatgccatgctatattccatatgggtaaagatacacaactctaaacttcagacacggtctgtatggcgcccatggatgaagagacaatgtccaacgaggctacacatcttacgattaacagcaaggac

SEQ ID NO: 95964 - DNA, 501 bp, Oryza sativa
  Clone ID: PAT_MRT4530_94105C.1
ttttccttctcgattctactccactccttaaagggggccagtttttgtgtaattctggttgtcatacggtttattgtgtggttgctgaatcttgaaaatttaggatccaatggttaggagatttttatcggccctgctgtctccagagttttttcggttgaggatcccagttgtaaatttgtaaccagtttttttgccctgctttctccgccggccgatcgatcgattatcgacctgtatgcctggtggtgtccgtgagctgctcttgatttcttccaagaatacaaaaaaaaaaaggattacagctctgccagtggagtttcctttttgtgctcctagtgtttgttcttgggcagaaagcctgacgaaactgaatcctccaacaaaagcaaatggcgaaacgtgggctttggtgttcattatactgtttgagtttgcccattcctcgaggttggtagtggtgaactggtatgtgttggtagtgcagatgatgcttctttg

SEQ ID NO: 95965 - DNA, 255 bp, Oryza sativa
  Clone ID: PAT_MRT4530_94106C.1
atggtggcagccgctgtcgggagaagcagctgccgcccgctggagaagcagcagccgctgtcgggagaagcagctgccgcccgctggagaagcagcagccgctgctgccgcaacagccaccgccgctgccgctgctgctccgggaaggtgccgacgccgctgcttgggggaggagtcgccgcccccaccgcaagagtcgctgctgcctccgcaagatgccaccgcacgatcacagctaagtgccgttatatttag

SEQ ID NO: 95966 - DNA, 281 bp, Oryza sativa
  Clone ID: PAT_MRT4530_94107C.1
ataaacttatgcattctaattaacattataattggagcattgtgtagcattgcactgatctgttttcaaataacagacaactttgactagctcactactactaaaaggatttttttcgtgcggtcaaaaagttttttttccatgcggaggtcttgcccgtctacaccctacaccctggtgtctgtgaaaataaatatttccgcatgcgggcagcctaaccgcacggaaaaaataatcttcacatgcggtcagtttaagtagaccacacgggataatcggat

SEQ ID NO: 95967 - DNA, 2265 bp, Oryza sativa
  Clone ID: PAT_MRT4530_94108C.1
atggccacgggcgcggcttccctcctcccgcaaccggccaggggcgcggctgcccgcctcctgctgccggccagtggcgcggccaggggcgcggctgcccgcctcccgctgccggagccgccctgcacccgcctcctgctgccggagcagccctggggcgcggctgcccgcctcccgctgtcggagccatcctggggcacggcagccctgccgccggagccgccgtggggcgcggctgctcacccgccggcgtcgcactggggcgcgggtcccagccgaccggcgctgcccagcagcaagctcgtcccccgcgtactggagcgacgaaccagaaagctaaaatcgtccatttatttgcatcttgaaaactataaaatctctaatttgactggacagggtgattcaatggaatggattgatgagcatactaccattgtttgtcaattgtttgcccaacaagtggtgaaaggaaataggccaaatacccatttgaactccgtaggctatgacgaagtgatccagttgtttcgccaaataactggaattgagttgagtaagcgacagctcaggaataagtgggataagatgaagcctgattttgtggcatggcaaaaattaatgaggcagcaaactggaacaggatgggatcactcaagaggtgtgattgtaatggatgatgagtggtggagaaaggcaaaaaaggatattcctggatgcggcaagtttaggaagaaacccttgcagaatgtagatgaccttaacattatgttttctgacattattaatgatgcatccgatcattggaatcctatgagtgagaaccccatcatacctgagcacatgactgaggaggtccaggaagataatcttgtagttgatgatgaagaggtccaagagacccccatggaggaaatgaatgacgaggcccaggagtgccatgaggtttctccttccattggtattggaaagagaagatctcgggctgttcttgacaaaggcaagaaatcaaagatagggacagcacttgttattcaagaacaaatcaccaagattgctgagtcagcctcctctttcacatcaaaaaagtcaaatgaagtgactgacagtgaaagtgagagtggtgcccaaatagctcaagtttatgctgatatgtaccttcacaaaaatccaccaaggacatcaattcttagtggcatgggatggttgctagagacattgcggactcctggtgaatgtcattcacagcttcgtatgaacacagatctttttttggacctaaatgatttgttggtgcaaaggtatggactcgaaccatccctgcatatgagtactcatgagatgcttgcaatgtttctgtttacatgtggtggaaatgagtccaataggagagctcaaaataggttcaaacattctggtgaaaccattagtagaaaatttgatgaggttttaaattctttgatggccatggcaaaagattacattcgaccaaaagatcccaattttcgttcggttcataagaggataagagatgatagaagaacttttccccatttcaaagattgtattggtgctcttgatggaactcatatccgtgtgtcattgtcacctgatgagcaagttagatatattggaaaaactggaattcccactcaaaatgtgcttgccgtttgtgactttgacatgcgttttacttatgttgcaacgggtcaaccgggagctatgcatgacacaagtgttttatacaatgcattaagagtggatgaaaaattcttccctcatcctccacaaggcaaatactatgttgttgacgcaggatatcctaatcgtcccggttatcttgctccatacaaaggtgagagataccatttaccagagtggcacagaggtatggaacccaatactccaatggaaaaattcaatcgtgtgcactcttccatccgcaatgttattgagcgatcatttggattactaaaaatgaagtggcaaattctgtacaagatgccgtgctaccccatgtacaagcaaaaaatgattgttgtggctgctatggtccttcataattacattcgtgagcatggaggtgaggatcctgattttgctaggtttgatcgtgaccctaattttattccaacaataccagaacggtacaacaaatacgcagttcctcgaacggcatctgatgagtcaactcccgaaagaagtgcaggaactatggatctcttccgtgatgaactagccaccgctttatcaatttcttggcgctag

SEQ ID NO: 95968 - DNA, 534 bp, Oryza sativa
  Clone ID: PAT_MRT4530_94109C.1
atggagacagatgggcgggcgagcacttggccaccggcggcggcggcggcggtggcggcggcgttggaggccgacgagcggggtgggaagggaggatgcgggaagggtgtccataactccatgtcaatgaggagggtgacgaaggggagtaggccagagccaaagtcgacgatgacaccgatgccagtgtctgcgcgggttgtgaaactgagccgctccagcccgttgcagagaaggggtgctggtgtggtgctcccagaacgcgacctccggatgggcgtggatgtggtgccacacgcgcaccatccagtcccctgctccctcatcaacgtgtccactagccctgaggagattgtttgcgccaatagcccaaagcccgtcatgtggaacaacgtcactatgaccggcaacgacggcttgccacttcaacttcgatggcttggcggatggaggaggagcaacactgtcaagccgtcttgttttgaaggaaaagagacaaggatttggggagagatgttggagagtcgacattag

SEQ ID NO: 95969 - DNA, 510 bp, Oryza sativa
  Clone ID: PAT_MRT4530_9410C.1
atgccgacggtctcgcgcgccggcggcaatgggcgccacctcatcctcgacgtcgacgacatcccccgcatcatcgaggccttcttcctcacgtccaccagccgccccggcccagtgttcatcgatatccccaaggatatccaccaccggccgacaacttgctcaacgaagtcatctgtctcgtcggcgacgccaagaaacccgtcctctacatcagtcggcggctgctccgcgtctggcgatgaactgcgctgcttcgtggagctgacgggcatcccgttgacgaccaccctcatgggcatcggaaacttccccagcgacggccccctctccctgcggatgctcgggatgcatggcaccgtgtacgccaactacgccgtcgacaacaccgacctccttcttgcgttcggcgtgcgcttcgatgaccgcaccaaccggcaaaatcgaggcattcgcgaggaggggaaattgacgaccgcgggaggaggggacggcgggactaaactttaa

SEQ ID NO: 95970 - DNA, 1179 bp, Oryza sativa
  Clone ID: PAT_MRT4530_94110C.1
ggagatgtggtgctacgattgcagagttcagatcaacgaagtcagctcgtgttgccatcacgagccattagtacgaaccgacaaaacctttcggagttcctcaagtcctatcatagaagtttatgggattctacgtggagtgcctatgaggaacgagaatgtcgaagccaccctagacttccacgtgttcaaagtccctgacttcgatcttctgatcgactatcccatagaaaaacttctataatgtgcctaatccagattgtgcctaaggagttatgacggtcgttgaaaatgccaaaaacaaattgatcccacaacgaatcgtcatgggatggaggatgtgcctagattacagaaaacttagcaaggcaactaggaaggatcactccccgtcgccttccatcgacgagatgctagagcggcttacaaataatttcttctgtctccttgatgactattctggctatcaccaaagtcctattcatctcgatgatcaaagcaagaccacatttgcttatcgtcgaatgttgttcgggttgtgcaatacacccatatcattccaaaggtgcatgatgtttatcttctccgaaatgacgaatgaaatcatggacgacttctcagtctatggaaaaatcttcgatcattaactcgagaacttagacaaggccttgcaatggtgtaaagaaaagaacttgatgcttaattggagaaaaaaaatgtcatttcatggtcaagaggggatagtcctaggacagcgaatttctgaaagagggatagaggtggagagagcaaaaatagaagtaatgaagcaactttcatctctcaacaatgtaaagggaatccacagcttcctaggtcacacaaggttctatcgatgcattaaagtttttttctcaaattgctaaacccctaacttatctgctagctagatatgctccctttgaatttaatgatgagtggttaaaatctttcaatttgttaaaagaatctcatcttagcgccaatcattcaacctcctgattggttgttggcttttaaaattatgtgcgagtttagtaattatgttgttggggtcattcgtggttgaactaaaaacaggaagcactatgctattcgatatgctagtcaagcatgatagaaagcaaagtcagccatttccacgacgagccaaacgcaact

SEQ ID NO: 95971 - DNA, 639 bp, Oryza sativa
  Clone ID: PAT_MRT4530_94111C.1
tggcgcggcaaggggccgggctgcccgcctcccgctgccggagccgccttgcacccgcctcccgctgccggagcagccttggggcacggctgcccgcctcccgctgtcggagccgtcctggggcacggcagccctgccgccggagccgccgtggggcgcggctgctcacccgccggcgccgcactggggcgcgggtcccagccgaccggcgctgcccagcagcaagctcgtcccccgcgtactggatgatagaagagcttttccccatttcaaaggttgtattggtgctcttgatgaaactcatatccgatatcctaatcgtcctggttatcttgctccatacaagggtgagagataccatttaccagagtggcacagaggtatggaacccaatactccaatggaaaaattcaatcgtgtgcactcttccatccgcaatgttattgagcgatcatttggattactaaaaatgaagtggcaaattctgtacaagatgccgtgctaccccatgtacaagcaaaaaatgattgttgaggctgctatggtccttcataattacattcgtgagcatggaggtgaggatcctgattttgctaggtttgatcgtgaccctaattttattccaacaataccagaacg

SEQ ID NO: 95972 - DNA, 237 bp, Oryza sativa
  Clone ID: PAT_MRT4530_94112C.1
atggcaatttcccccgcggggccgggtcccctgcggggacccgcccctacgggggcgggggcggggccgattttcaacccgtgggtgcgtcggggacggggacccgcatttaggcggggaggggacggggaactgatttcacccgcgggtgacccgcgggtgacccgcggggccccgggggcgcggcggggaggcaacaccggcagcaagggcacggccggcggcacacagggctag

SEQ ID NO: 95973 - DNA, 1614 bp, Oryza sativa
  Clone ID: PAT_MRT4530_94113C.1
gatattcctggatgcggcaagtttaggaagaaacccttgcagaatgtagatgaccttaacattatgttttctgacattattaatgatgcatccgatcattggaatcctatgagtgagaaccccatcatacctgagcacatgactgaggaggtccaggaagataatcttgtagttgatgatgaagaggtccaagagacccccatggaggaaatgaatgacgaggcccaggagtgccatgaggtttctccttccattggtattggaaagagaagatctcgggctgttcttgacaaaggcaagaaaccaaagatagggacagcacttgttattcaagaacaaatcaccaagattgctgagtcagcctcctctttcacatcaaaaaagtcaaatgaagtgactgacggtgaaagtgagagtgagtcaggggactctactgatggtgaccagttctggaaacttgttttaggtggtgcccaaatagctcaagtttatgctgatatataccttcacaaaaatccaccaaggacatcaattcttagtggcatgggatggttgctagagacattgcggactcctggtgaatgtcattcacagcttcgtatgaacacagatctttttttggacctaaatgatttgttggtgcaaaggtatggactcgaaccatccctgcatatgagtactcatgagatgcttgcaatgtttctgtttacatgtggtggaaatgagtccaataggagagctcaaaataggttcaaacattctggtgaaaccattagtagaaaatttgatgaggttttaaattctttgatggccatggcaaaagattacattcgaccaaaagatcccaattttcgttcggttcataagaggataagagatgatagaagagcttttccccatttcaaaggttgtattggtgctcttgatgaaactcatatccgtgtgtcattgtcacctgatgagcaaattagatatattggaaaaactggaattcccactcaaaatgtgcttgccgtttgtgactttgacatgcgttttacttatgttgcaacgggtcaaccgggagctatgcatgacacaagtgttttatacaatgcattaagagtggatgaaaaattcttccctcatcctccacaaggcaaatactatgttgttgacgcaggatatcctaatcgtcctggttatcttgctccatacaagggtgagagataccatttaccagagtggcacagaggtatggaacccaatactccaatggaaaaattcaatcgtgtgcactcttccatccgcaatgttattgagcgatcatttggattactaaaaatgaagtggcaaattctgtacaagatgccgtgctaccccatgtacaagcaaaaaatgattgttgaggctgctatggtccttcataattacattcgtgagcatggaggtgaggatcctgattttgctaggtttgatcgtgaccctaattttattccaacaataccagaacggtacaacaaatacgcagttcctcgaacggcatctgatgagtcaactcccgaaagaagtgcaggaactatggatctcttccgtgatgaactagccaccgctttatcaatttcttggcgctag

SEQ ID NO: 95974 - DNA, 3302 bp, Oryza sativa
  Clone ID: PAT_MRT4530_94114C.1
agactagtgtcagagtaatatattaccagctcagttttttcgcgaacgcgcaaaaggattacacgtcaatatattagaagaaaaagaatttttgttactagggaagggagaaaaagcaaagccaaaaactgaagcttaggaactactgcggcagctaaaagcaactcctaaacagcgggaaggggcaaagccacgctatcagctcagctccacatagttcttttcacttatccaaagtagagttattcacactgttccctgaagctggtggccacatccatttcccgtccgacgacgacgacgacgctgagccgcctcccccacgccccgccgcggctccggcgccgcacgccgccacgctatacacctacgctccgccgtacggctacggccccggcgccgggcagtatgaatacggcgtcgacatgggcggctacggccagagcttcttcagcatcagctacgcccggagccagccgccgccgccgtccgccgcgccgccgccatcgccgccgcgggtgtccgcctgggacttcttcaacccgttcgagtcattcgagagctactaccaccaggaccagccatctcctgctccaccggcctacacgccaagccggagctccaatggcgcgcgggaggaagatgacaatggcatccccgaggtggagcacgacgaggtcgacaaggttgacaaccaccaggatgccaatggcatgccattgccggcgaaggatgtcagtgaggagcagcacaggaagtccaagtcctcggaggccagcagtagtaccagcagcagcatgatcagtgatctccatgtagttcagaagagtgtgattgaagaacagctgcggcattcggatgccgcggggcctcccgcgatccccaggaaggtttacaatgacgatgtcgaggtggtggaggagatcagatcacaattcgagcatgccgcaaagtccgcattcgatgtatccaaggtgcttgaggttgggaagatgccttactaccagaagagttcaggattaaaagtatcctcgatgatgatttgtgggctatcttcggtgggggaggagttcctgcaatttgaggaggacaaggctatggaatgtggtaacctttcttcaacattgcagaagctgtacatgtgggagaaaaagcttcttgaggaagtcaagactgaggagaagatgagggtgctgtataaccaaaagcgtgaggagctgaaagttttgtatggaaggggtgccgaagcacacaagcttgaggcaactgaaactcatatcaggaagctatcaacaaagataagcattgccattcagattgtcaatactatctcaaaaaacatcaataatctgagagatgacgaactatggccgcaaacatgtgaactgattcaagggcatttagtgattactggtgagcagggtttcccataccaccggggccggggttaccgcgccccggcggtaagcacggttaccgcgcggttaatgcaaatgtggcatgccatgtcaaaatgccatcagatccaatgccacgccatatcccaagctagaaacttggactctaagctagattctgcaaggttcagtgaagctcacatggacttaatcaagcggctagagcttcagttactggagttgatttctagttttgctacatgggtcaatgctcaaaagagctttgttggcactttaaatgagtggctcaagaggggaattgactatgtgcccgaagttaccgatgacgggactccccccttttctccaggacgcttaggagcgccccccattttcatcatctgtaataattgggcaatcggcacgggaagaatatcggagaaggaagtagtagacaaaatgcaggcttttgcctcaagtgtcctgcacctctgggagaagcacaggttagaatggaggcaaggtatgatggctaacaaagatatggacagggaccttagagtgatggagagggatgaactctcaatgcgcaaggctctcgatgcgcaaagcaagaagcttgtgcttgtttccaatcagagtggcgtgtcgttatctgcgcaggtggttcacgatagtggtccaactgctgaagttggtttgcaatcttgtatgaataaggtctttgaagcaatggagagcttcactgccgcttgtgcgaatgcatacagtgatctccatcttcgctctgaagaagagaagactcgactcggccaaaacaatggcagagttcctagcttcatttcagacttagctgctatggaggagcagcagctgtgcaggctgaggcagaacgtggcgtcgtcgtcgtcgtcttcctcggcggcggcggcgatggccggcgcgctggagggcgtggcgcgggtgtacgagcacgtcgggccgctcgtgcggttcgcctgcgccgagcaggtggaggaggagctggaggcgtcggtggcgctgctcgacgcgtgcgccgcagcgagggacagcctgcgggcgatgcgcgcctgcgcgcttgacctcgaggtggccgtccgccgaggcgacgccgccggcgcccagagcgcggcgagcgcctacgcgcgcctcgccaggaaggcgcgcgccgacgtcaagaagcagcagcgccgcctcacgaacagcaggaggcgcgagcggccaacccgcgacggcgacgacgcgcagtcgctgcaggaggcgcggcggctcgccgtggacgtgctcgaccgcgtcgtggcggcggcggcggcgggcggcgccaccgggccgagcaggtggtcgacgtgcgtggcgcgcgcgttcaggaacaggacgcgcgtggcgtgcgaggacgccgaggagatcgcggccgcctcgccgccggcgttggctcacctgtactgcagctcgttgccgtccaaagatctccacgacggcggcgagacggcggcgcgggtgcagaagcagctgagaacgctgggagacacgatccagaggctggaggatgggctggagctactcttcaggcgactcgtgcattgcagagtcttcttgctcaacattgtacctggaattagacaacatctgaagggcatcaccttgtctgcagctgcattggccatgcaatcaaagagcagatgggagagcagagcagtggagattcctgctgtctctgcataaattttcagactatttgagatcgtttgcagtttgaggaattttcgttgagcctcgtggcctgatggagatgtcctactattagttggtgacaatgtattggacataaaataaaaaaaattctgcagacagagcatcaggatcaacgagttgtggacctccatg

SEQ ID NO: 95975 - DNA, 1710 bp, Oryza sativa
  Clone ID: PAT_MRT4530_94115C.1
cccccgctcctggccccgtcgctttctctcgccggctgcgctcctcctcctcctcccaccggccctggccttcctgcccgacgtcgccgcatatcttcggcggcggccggtaggcgtggcgccgtggccccccgtttggtttgcagtgccgccgcgcgccggcgccccccagccctccaccggttctgcgggggtcccggtcccccggggctttagcacgccctacgtgccccggatccagaagcttgcgacgcggaccatttccctccctcccgcccacggtcgtctcgtcgcgaacccgcgagaatcccaacctcctcctccgctttccctcctttctccttcccacccgcgctaccgagcagagcactgcttggctcggctggctcttgcggttcgaggtcagtcgcctggcgccgcgcgcggcgggcgagggggtcggttgatggtgccatgtggcccctggggttcttctccgagaggctgttcaaggtcgcgggggaatgggacagcggcgtgggggcggacgactcgccgccggcccctgacggccgtgtccctctagcccgccgctcgtactacgtcgatgttccgcatgtccagcaggccttcacgtgggactgcggcactcgcttgcgtgctcatggtgctcaggacactcgggatggattgctgcgacggcattgccgatctcgagaagctctgccgcaccacgatcatatggacagttgacttggcataactgttaaacaggttttcagtttgtttttccttcttcactgtgactctaggagcaaatccgcaatattcttgctgaaaccttttatagggagcaattgcaagaagacattgatcgagtggatgagctctttggcagagcccttgaagctggaattagtattcaatgcagatccatcagtgcgtatgatatagcttttctactgttatctgggcactgcattgctatcgcactagtggacaaaacaaaattgaattcctcatggagcaatgatctacaagatatgcaacagttcagtgaggattcagattacatggggcattatgttgtaatatgtgggtatgatgctgatgcttgcgaatttgagataagggaccctgccagttcgagacagcgtgaaagggtgtcaatgaagagcttagatcaggcccgcaagtcctttggaactgatgaggatattattttggtttctttaactggaaaaattggaatgaagctctcacgtaaactcctggtgggctccttgtgaaaacctcaactccctggttccatgtgtatatacgttgtacatgccactgtagttatgattgtcatctgttaagtcatgtatgtagttcaagatcattcttacagctataggaactgtgagctagtgaagtacccagttaggtttgttagctcatggctcatcacactgaagctgcaaaggacgcagcaggcagcagcaacaatgctgcgcaggaactactcttgtaagcaagagcagcttctgtagcgagcaaaagtcataccgttatagccggacagagatgtatcatatgtacatatatccttgcatctgtggccatgtgtatcctactccctgaatcctcttctgtaaattccaaaccatctcgcgtgctcgcctgcctttctctgaatgattcttaatgcaatgtaagaaaaaaaattgaaaaaatatgggtgtgttt

SEQ ID NO: 95976 - DNA, 338 bp, Oryza sativa
  Clone ID: PAT_MRT4530_94116C.1
gcagggggcatcttcaacctccagccggctggagacagagcccgatgccgccattgccgtcgattttctcctccaaatccggccttatctctcgtgcattcctaaaattagttgaggggatttgtttcccttagcctcctctatcttttcccccaaaaatccggttttatccctttgaattcgacgcgaatttggattcgttttcgagtttatctctccaccaaaccctaggttttcccggcgcgattccttgcgttccaagcccgatcactctctcccgtgactataaatagagtccctccctctcctccttcggccaccacctctcccccctcccc

SEQ ID NO: 95977 - DNA, 259 bp, Oryza sativa
  Clone ID: PAT_MRT4530_94117C.1
tatacgctttcttttctagggggggggggggtttataataatcctctaaattaaattcactgcctctcttttttacaacttcccttcctgaaaaccccctggcgttccccaatttaatcgcttgggggcccctccctttttcgccggggggcgtaataacccaggggccctccccaatcgcccttccgaacaatagcccattttgattggcgaatgggccccgccctgaggcggccctttaagcccggcggttgtggtg

SEQ ID NO: 95978 - DNA, 1051 bp, Oryza sativa
  Clone ID: PAT_MRT4530_94118C.1
gccggtgacggcggcggcggcggcggtctcggcatgtatcttggaggccatttcccgacaattggtatcagagcaaggtttagggcttggacgcgtgatcatgctctcgaagttgcactcatgcctcgccgtcgctcgttgtcaccgacggagcgcactccagcaggttccggcggctgcgccatgggcagcggcgggaacgaccgcgggctggtgattcaccgcatggtcaaggaggcaggaggcgcgtcgaactacccgtgctcacaaagacaaactacaacgagtggtctctgttgatgaagatcaagctgcaagcacgatgcttgtggggcatcatcgattcgggaggaggcatggtggagctgcatgaagatcgaaaggcgttggacgccgtccccgtcgagatgatctcgacgctagtgaccaaggaaacggcgaaggcggcgtgggactgcatcaagaccatgcgcgtcggcaacgaccgcattcgcaaggcgagtgcacagaagctgcgctccgagttcgaggctctcgcgttccgtgacagggaattggtcgaggacttcaccatgcggcacaacaccatcgtcatgcagctgtccacgttgggtgacacccgagccagacgacaaggtggtcgagaagtaccttcgcgtcgcacggcccaagttctctcaactcgttctttcaattgagacattgctcgacatctccactttgtccttggaggaggtcaccagacgcctcaagacggctgaggactccagccagtcgtcatccttgtcctcaccaggtggcggcggcaaactctatctcaccgaggaggagtggcttgaacgtcacaagaagaaagatttactggccaccgggggcgtcaccggagttgaaacgaaacgaaacggacaacgcggtcccagggcgccggcacggtgttgctgccgggggggatttggcaaaaaacatttttcccagggccaattgccggccgggttctcggaaaattggcccacctcccccacctaacaatccgatgcccacccaaaagccg

SEQ ID NO: 95979 - DNA, 3261 bp, Oryza sativa
  Clone ID: PAT_MRT4530_94119C.1
atggcttcgtgcgccatgctcttcctttgcctcctgcctcgggatggagccccacaccgacaattccgtgctctccatcatccttggctaggaccatggtggtggcctgccacgacaatcggcagggacagcaaggttccgaggtttgaggtccgagctcctccaaagcggcatagcaccagcacgacggtggggacaggaagcatcgccgccgagggcttcttcggtgagtttggcagtgcgattggcgatctttctccacccttcccaccgatggtgagccccttcctccacttcgccactgctgcatcaacgttacacctcctcctccaccaccacgccgccgttgtcggatcgaactgcgagcgccaccagaagctgcaacaggcgaggcgagcattctccaagccgtcttctccaccgctgccctgcattcccgcgctatcggccactccgccactagcgtcagggcagaaggggccagggtgggagagaaaggaaatccccaccatcgtcccgctacctccgccgccgctctccgtcatcgtgccagtaccctgctactgtcagagcccagacggcaatgtcatcgactgcgtgccacctcacctgcagccggcgttcgaccactcgaagaagctccgaggacagaagcccgaagttgagcccgagccagaggagaggcccaaggtcgacggcgcgtcggcggcgcagggggaggcggcggaggaggaggagacggatgtaatcgcagtgggcagcggatgggcatctcaaagagcacgccccagtaggcgaggatcacgtcattgcataaggagctcgagtggcaatgggtctgggctcgaggagggcgagatagccgacagtgtgaccaaattggcatacgacagcaacgggagcgagttgagcgagaagaacattggctgcgactatgaccacatgtggaggatagagggttccaccgctgccgccgctaaagggagatgcacctgcgggtgtgccggttgccgcagtaaattcaggtttcatctgaggatggacgagaactcaggcagctggaaaggaaaggaaggccatgaggcaagcgacccagtcatgcgggaacaccattctatccgtctgaaggcattctttctcttaaatgctactgcatttgtcatgtccctgctcaccattatgctgcttctagacaagcggctcatcatcccattactccatgacaaggttccaagcacaactagaccagtgcggactatagtgctcaaagcatacatctctattgctcttgtcggtcttgcgggggcctatgccaccggaagcagccgagaaagtgacactaccatctatgtgggcagtctagtttttgccgttcttgcatgcattattgtcctcaagacaattatattccatcagtcagattcaagtgacaggtcaagtaatgggacgagaagaagaaatggtgaagcacaggcaaacccaagcagtagaagagaacaaacaggcacaagccatggtggagccaagttgcccacaagcaatggtgtaccaccgaccacaagaaatgttggagtgcagacggacacgagcaatggtggagcagacacaaatacaagcaatgcggatattctggagaaggctcaatctcttgttgtactgctttccactcttgtagcaactgtcacataccaagcaggactagtcccaccaggtggtgtttggcaggacaactggaacggacatgaggctggcgatccaatactcctatccatgcaaccagaacgttacaaggtatttttttactgcaactcaatggcctttgcagcgtccttggtcatcatcatcttggtccagtataaacctatgctcaagcgccgcatactacagtttgccatgatactggatttgtttggcctaattggtgcatactctgctgggagctgcagagatgtaaccacatccatttatgtcattgccttggctggagctgtcctagtctatgtgattattcatgttctgttcgtcacacttgaagatgaggacataggaaagaagggtggggacaaggacaggaagcttgaggacaagaggcgcaagaggttgctcctttttgctgtgttgggtgcgaccctcacttatcaagctgggttgaccccaccaggcgggtttcgtctgaaggatgatgagtttgggcacaatgcaggcgaccctgtcatcttttacaactatccaagccgttataaggcgttcttctactgcaactcagtgagcttcatgtcatcgattgcactcattatactccttgtgaacccaatcctgtacagaccagccatacgaagctatgctctctcagtttgcacagcggtaggcatgtttgctctcatgtgtgcctatgctgccggaagcacccaacacctaaaaacatccatatatatcttcgggttggtagctttagtgctcttcattatgatcttagtcctaatatgtttctatcatagagatgtcaatacaggaagcatgtcaaccaacgaagaagatttagagacaggaagtggagttaagacccctgtgaaacaagaagccttcactgagacaaagtctgttgatgaaataaaagaagataacacagcagcaaagtcccctaaaacaaaggaagatgacagcacagtggaatcctctgaaataaaatatgagggtgaatccaaacaaaatacaaccaacaagtccattgaacagaatagaacagacacagactctctcaggacagaggaagactcaaaaaagaaacatgcaacacgcaaatacttgatgttgttagcagtcttggcggcaagtgttacttaccaggccggcctcaacccacctgggggtgtgtggcagggcaatagcaatggtcatgcagccggtgacccagttatgcatgacaacagaaggtaccgttacctcatcttcttttacagcaactctttttccttcatggcatccattgttgttatcatcctgttgctaccggagaaactgctaagggagaaccggtcgtttaaggtgatgcatttaaccatggtcatgaacttgctcggcctcctactagcctacatggctggctccagaatgaggtcagagtcttctggatatttcatggagtttgttatcactacactatgctttgctgcactccacaagattctatccagcgaaaaggagcaacaaaatgatcagccttctcaggtagaccaacaaggggatagtcaagtcagttag

SEQ ID NO: 95980 - DNA, 180 bp, Oryza sativa
  unsure (1)..(180): unsure at all n locations
  Clone ID: PAT_MRT4530_9411C.1
ccgagctctttttatggtctgtgttgtcgttttggtccgtatccgtcctcatctccctttgcccggatcggtctttgtcttttcagatttcntgtgccgtgccctatcaggtcttagggcctccaaaaatctagatgcttgtatctgggagtgtgctgttggcgcgctgccccgttgcca

SEQ ID NO: 95981 - DNA, 705 bp, Oryza sativa
  Clone ID: PAT_MRT4530_94120C.1
atgagttactatggaagcagttcttctggtggacggggtggtcagagagttgagtacgggaggacctatgtggtgaggccaaagggaaggcaccaagccaccattgtgtggcttcatggcctaggtgacaatggtgcaagctggtcccaactcctggattctctttcattgccaaatatcaagtggatttgccccaccgcagcaacccagcctgtcacagcatttggtggattcccttgcactgcatggtttgatgtggaggatacttcagtggatggccgtgacgacattgaaggactggatgcttcagctgcgcacattgcaaacttgctgtcgtcagagccgcctgatgtgaagcttgggattggtggtttcagcatgggtgctgctgcttccctctactcagctgcgtgctatgctcatggcaaattcgcaagtggcatcccctacccaatcacacttagcgcggtcatcagcttgagtggatggctcccttgctccaggaccctgaggggcaagatggagagctcacacatagctgcaagaagagctgcctccttgcctatcttacttagccatggaagagcggatgaggttgtatcctacaggaatgctgagaggctaggccactataccatccctgaagagatggacgacgttggcaagtggctcagctcaaggcttggcctcgacagatcccgctaa

SEQ ID NO: 95982 - DNA, 1842 bp, Oryza sativa
  Clone ID: PAT_MRT4530_94121C.1
agaagaagagaattgacccagtttataagaaaaaccggacccaaaaaccgtacaattgcacggttaattaaaggaaaaccggctaaaacccaccgctacagatctaacaacgacagcggagcccaaacgcaagacgtcgctgctaggctaaacacaaaagcgacacaacagctcccaaatcgtagaagacgtgttatcgttgccgagctagccgcccaagcgacccagcagcgccgacttcacaaccgcagcgacattgaaggcacgaaggtcgccaaagcgaaaagcagctccgacctccaacaatggacatcagccaagccaccaaagagccacttccttcacacggccagcaccaaactccttggaagagactgcaacatgtcatcgttcccaagcgtcgccgcacccccatcagcgagaagcttcgactcatcagcagaaacaaccgaagagcgtgtcgcccaccacaagaatgaagcggaccccaagaaggcgaaggcctcgccgaacacaaggtatgaaagattttgaaccgaaaaggaccatcaacagtcatcgatgcgttggaacttctccgaagcgacacccccaaggaggacacgacgtcgtaactccgccgccgccgctcgtccgaagccggaacaaggttttcacctggagatttgtgggggatatgaaagaaacgccatgacaacgcctccaagaaggaaaacggcgcccacgggcgccgtcgtcgtcgaaccggccaaaggcacggcaaggctttcgccgacgtcttcgtatcacccacacaagcacccccacaatgacggccacagaatagtccatgacgtctcacaagcattcatacctcgaccataacggcaaagacaggccctccggcgcggaggcgacggaactggtcgcggacggccagatccagccagggcggcgcaagccggctcgacatccgcgccgctgcagctccgtcgtcgtcgcaaccaccacgccgccacagcctctatcgccaccgctgtgaccccgcgcggacggacgccgacgccgacgccgcgaccggcgcgagcgagccgccgctgcccgcccaccgtgacgccgcccctgcctgccaccatctccgcgtcgtctccagccccgttgctgacctcccgtcaacaccgcgacctcggcgcaagccgctgcccgcccaccgcgaagccacccctgcctgccaccggtcttcgcaccctctccagccccgacgttaacctctcccccgccgctagccgccacctcccagcgcctcgcccggcccggatctggacgggaacctgggccgccggtgacgggagcgtcaccggcctgcgcgcgaacgtcgtcctcctcgcacgtcgccacttccgccgcctcttccgcgctcctcgttgagcgtgcgcctccttcctgtcgccaccggctgagacgcccgatccagccgtgtggggaccggatccggtcctaccgacgccggatctggccgccggcgaccgctgcacccgcgagacctctctccggtcatggcatcgccccagccgccgcgcctgcgagaggaggtagggagcctcgccgccgctgtcattgcgtccccccggctttgccggcgggcgctcgagcggcggcaaggtggaggggagaagaggaagaggttggcggcggcgcgctcgtctggtcgccgcccgtgccgccctggggctgagcggcacgagggccttctcttaattagattatttcacggaaatttttctcctgcaagcttcggctccttcggaaaacagcaataggtcaaacagacccccagtatcgtattggtcgaagcctatagag

SEQ ID NO: 95983 - DNA, 741 bp, Oryza sativa
  Clone ID: PAT_MRT4530_94122C.1
tcaagcgccaagaagaacagcgaagcacgcggagacaactagcagcgaaagcaagtagagtgctgccacagccggcagagacatgccagccgccacccagaacgtcatcgtcaccgtgagcgccatggcgaacgaccacagcgccacctctgccaccgtgctaaacccgcggcaggcacccccagaggcgtcgtgctgccttctctcgcacgccgccacgccggacatgacgaagaagatgcagaacgactcggcgacgaggagcacgaacgtcctgacgtcgtgcaccagcaggtgcacggtgaagaggaggccgaccatgagaaccaccatccatagggcgcgcaccggcgtggcgacgagcgcccggtgactgcctgctcctggcttcctacacagcccatggagcggctctgccgacgacggcagcggcgacggcggcggtggcgccaactgctcctccaagtcgacgtcttccatgttttccaacccttctgtggcggtggtgcaacgacagtggcaatgttgatcggccatgatcatgcatgtacgtctagtcgtcacaattaggacgtacgggggtgttcatttcgtatatatgataaggttgacgatatatcatatatacacacacatactaatctatctttttgttgtcatcgttaattagttgctttcaacatattgtaactaccccctccatcccataatataagaaattttaaccaaaaaaaaaaaaaa

SEQ ID NO: 95984 - DNA, 1547 bp, Oryza sativa
  Clone ID: PAT_MRT4530_94123C.1
atgcgcggcggcggcggcggggatgcgggcaccagctcgaggggcggcggttccggcggggcccccgcgcgtccgcggcggttccctgaggcggcgcagccggagatcatgcgggcggcggagaaggacgacggctacgccgcgcacgtcaccgaggcctgccgcgacgccttccgccacctcttcggtaccagggtcgccgttgcttatcagaacgagataaaattgcttggtcagtctctttattacttgctaacaactggttcaggccagcaaacacttggagaagaatactgtgatatatctcaggttgcaacctcgcacggacttccgcctacacctgctagacggattctattcattttgtaccaaactaccgttccctatcttgctgaacgcatcagctctagaattgttgcacgtggtattgccctcgaggactctcagcttgatgaccattctgaaagtgatagttctagtataggcactgcagcacaaccatccccaattaggaacagtccttcaagaagcttgagtttttctcatttgtcaaggttgagaggcagagtccataccttgtgggaatgggttcttcggaaatggccttcgatgctaccatttgctcaagattttatacagttaactatccggacaaaccttatgttcttctattttgaaggattgtattatcatttaccaaagcgagcagctggcattcgttatgtattcattgggaagccattgaatcagaggcccaggtatcaaatcttgggtatttttctgttaattcagttatgtattcttggtgctgaaagacttcgaagaagtcgaggtgtccctgttctaaatgaagatggaaatataatcagcgacatccgccatgggaaaactgcagatttggctactagttcagagcttttaagattatcggtatcaagcacttcatgttatgcaacagaattctatttaaaaaagaaagcaacaaagcatccagtggtaagagcaaatgcaccctttgtctcagtacccgtcagaatcccactgccacaacctgtggccatgtcttctgctggagttgcattatggagtggtgtaatgagaagcctgaatgccccctatgcagaactccgattacacattcgagtttgatttgtataaatcattcagatttctagcaaatgattactagcaaggggtcatatcattctccagtggattcattaaaatgatactgaatccccacattttggcgagaactcttcttctgaagtgttttagtgtaccaaaagaggagagtagaacccatccaatgaggctgaagatcaatgctgccattcaactgtattgtagagctcaaataacaaaacaatcaaacagaacaaaattttcattagagctcaaacggatacccatgtatatgtacattgtagacacaacttgattttgtagggtagaacagtggctgactggaatcattagagcaaaatgtatcgacctgaaattctgccgggaaatttaactatttgccaatattagattcgacaatt

SEQ ID NO: 95985 - DNA, 6706 bp, Oryza sativa
  Clone ID: PAT_MRT4530_94124C.1
atggcgtatggggggagaaaatccggctccaacggatacgccatctgggcctccatagatggtacatgcgctattcttggcgtttctctctcctcacgccatcctgcaaccaccgctcccatccgttctactgccctcatccgaatcgagatcgaggcagagggtgaagcagtgaagcatgccgctgacctgctcggggagatgcagaggtacgcgggtgccggtaacaacagtgggtttagtggcggcggtggcgcgggtggaggcggtagagacagctcgaggttggatgggtcgccctactccgccaacaattatcccctgagctcgaggcggcagcagcagctagctccttacaagctaaagtgtgataaagaaccacttaataacaagcttggaccacctgattactatcctcaaacaccaaactgtcctgaagagacattgacaaaagaatatgtacaatctgggtataaggagaccgttgaaggaattgaggaagccagagagattgtacttagccagatcccgtacttctgcaagacagatattgttgtaaaatgcaaagaggcactaaagaagcgcttgagagctataaatgactctcgtgctcagaagagaaaggccctttcccagccaaacaagcgactgcgttcattatctgaacatgttcctcatggttatcgtaggaaatctcttcttgatgttctcactcgatacaatgtcccattattaagagcaacatggtttgtgaaagtcacgtacctcaatcagccacaggttcgatcaacatcggtcagtacatcagcaggaggctctgacaatcatcgatctaatcaatggacaaacgatgtcgttgaatatttacaacagcttttggatgaattttgtttaaaagaggtacctccatcttttagagaacagtcatcaccagggcttattgctggggtcacacaagtaaaaatgaaaagcgaagcacccccagctgttggagacatagacgagcctttggtgcacttcaaatggtggtatatggtccgccttattcagtggcatctcgccgaagaattgcttgttccctcggtacttattgaatggttatttaaccaatttcaggagagagttgcagttgaagctttagagcttcttatgcctgtggcacttggtatgattgacatcatcactctctcacaaacatatgtgcgcatgtttgtggaaatattggttagacgtctgagtgatggccctgttgttgataaccccaaaagggcacatatttcttctgttatagctgaggtactgcgatacatggtgcttgcagtgcctgatacgtttgtttctttggattgctttcctcttccatcttttgtggttcctgatgtttacagtagaggtgctttactgaagataactgctggtggtggtattgctggttcaaagaggcaggatggttatcgttacttgtcctgtggttatgctgtttgttcaattcagaaacgttcatatgatcttgcaacagttgccaaccctaactttcaggcacgtggtgcagccaaagtggtgcaagctttggacaaggctcttgtcacaggaaatttgacaatggcatatttgtcgctgtttaatgatttatctgatgcattaatggaggagagatggattaaagaagtgagcccttgcttgcagtcttctttgatgtggatcgggactgttgagtcatccctaatctgctcagtattcttcctttgtgaatgggcaacgtgtgattatcgtgattgccgcacatctctcttgcggaacgtaaaatttacaggacgaagagatttatctcaggtacatctggcagtctccatcttgaagaataaaatggatgagataaataacctgtctcgttctaagagtagcagtcgcattgcagtgaataatactgctaaaggttcttcattaaacaacacttctttagcagctacagtgagtgattcctctggattgagaaacaacgcaaagagcgtggatgagaaggacaagaaggatatatttgaaagccctggtccactgcatgatattattgtgtgttggcttgatcaacatgaggttaacagtgctgtaggttttaaacgtgtggatgttctcatcatagaacttatccgcagtggtatattttatcctcaggcttatgttaggcagttaattattagtggaattactgacaagaatgacacactgctggatgtggaaagaaaaaggaggcaccgcagaattctgaagcagcttcctgggtcatctttatttgaaattcttgaagaagatagaattactgaagagcagcatttgtatgagatgatgtcaacatattctagtgagcgtcgccttgtgctttccgaactttcaactggccaagcattcgatgcaaatagcagaggtgaatatgcttcaagttcctgtgttccgaaggcaagtgatctttttcttgcatcaggaggcgataagcatgggagggtgccggaacaagtcgaagatgtgaaagctctggtgtcgagcatgttgcgctttataaatcctcactcagtggaagaagagcattgtcaaatcaaaacaaacccgcaaggatcgtcagcttcaacggtcacacaaattgatactgtagatgtgaaacatgactgtgaggattgtgcgaggaccaagagacagaaattggatgagagggcctctccattacaagggttcccattgattcaatcagatgaggaagatatttggtgggtgaggaaagggacaaagttacatgaatccttgaaggctgaacctgcacagaaacccattaaacaaaactctagaggtagagcaaaggtggttcggaaaacacaaagtcttgcacagcttgcgtcttccagaattgaaggcagccaaggggcatctactagtcatctttgcgagagcaaggtgggctgttcccaccataaacctagcattgatgttgacaatgtcaaagatgttgatcacatgaagatagtggatctgtctgaagttgggaaatcgttgaagaggctcagattgcttgaaagacgatctgtttctgtatggttgttgaaatcatctgatgataaaactctattgaaatggaggcttggtgatgaagaattactgtcgattctctatatattggacatatgctgtgatttagtctctggtgcaaggtttcttgtttggttgctaacaaaagttcgtggtggaatggcaacctctggtcaaacagggagaagtgccactcatatcaaaaatagagaaaaccaagtttgccagattggcgaggcacttgtgttctcatccttgctaaggtatgagaacatacttcttgcaactgatctcttgcccgaagttttaagtgcttcaatgagcagaaattttgtgttagctactgcaaggcagcctgcttcaggagcatttgcttatactcgatatttcctgaagaaatacagggatgttcctagtgtggcaaggtgggagaaaagttttagaaccacatgtgatcagcgactgctagctgagcttgataatggacgttcagttgatggtgatctggtttcttcttctggggtttcagcaggtgaagagattgatgaacagatccgtcaaaaaatgaatgtaaggaattcaagaattgttccaaacatgaaggatataatacaacggcaaactgaggaaaagaaaggtattacggcacccaagagcccctctgttgatagggaagacagctatcaaattgcacatgacattgttttgggcttacttgaatgtatcaggcaaaatgggggagctagtctagatggagacccttcaattgttgcttctgctgtctctgcaattgttctcaatgctgggcatacaatagctaaacatttggatctttcggccgatgctcttggggatcgcttcagccgtgtatttgaaatagctctggctgttgaagcgtcttcagctattacagcaacttttgcccctccaaagatgcagcgtaatcagtttcaaccatctccagagacccatgatgtatatggaaatcatacaaatgacctaagcaacacagggaaaggttttgttgggagaactacaaaggtagccgctgctatttctgcacttgttgtgggatctgttattcatggagttgttaatattgagcggatggttgctgtcctgaaaataaaagatggtttggatattttgcatctcctaagaggtttgagatcaagcacaaatggtgtatcccggtccactggaacgtttaagatggagaattcagtagaagttttggtgcattggtttaggattctcttggggaactgcagaactgtctatgatgggcttattgctgatattcttggtgagtcctatgttcttgcactctcaaggttgcagcggatgcttcctttaagtatggtccttcctccagcctattcaatttttgccatggtcctttggaagagatatacttttagccgtgaagatgtgcagctttaccagtctctgtcaaacgcaataaatgacatcaccatgcatcagccttttcgggatatctgcttccgtaatacacatcagctgtatgatctcctggccgctgatgttggtgattcagagtttgcggcaatgcttgaaatgcataacccagataagggttcaaaagcaatggcatttatacctcttcgtgctcggctatttttgaattcccttgttgattgtaaaacagctggggcaattctaggagatggttcatgtgcttcagagtctggcgaggcaaaagagagtgagttgaaactctctgacagacttatacaactactggataccctccaaccagcaaagttccattggcaatgggttgagttgaggtttcttttagatgaacaagctcttctggaaaaagttgcagctggtaatacatcagtcgcagaagcaatccagtcgctttcccctaatgctgaaagctttgccctttctgatagtgagaaagggttcactgaaatcatcctgtcaagattacttgccagacctgatgctgctcccctctactcagaacttgttcatcttcttgggaagcttcaagagtcacttgtcgtggatgtcaaatggctcctgcaagggcaagatgcccttctgggacgcaaatccacaaggcagcagcttgttcatattgctcaaagaaagggcctctcgacaaagactcaggtttggaaaccatggggctgggccagcttgcttagtgatgtaatagccagtaaaagtaccaagaggaaattggaagtcacttcaattgaggaaggagaagttgtggatgactctgctgatgctaaaaggcctagcaaggctaacccccataatgtggacagaagcttcgaggggattagatctattaataaatatttgactgagaaagccctttcagaattaatgttgccatgcattgatagaagctctgctgaatttcgtagtatatttgctggtgatttggtgaagcagatggggactatcagtgaacacatcaaagcaatagcaaggaatggtacgaaacaatctggtttagttccatcaggaactgaagcagcatcgaacaaatccagtagccgtaaagggattcgaggtggaagtccaaatattggacggcgagctccagttggtaatgatccaactcctccttcagcatctgctctgcgagcaacagtgtggttgcgcctccaatttatcattaggttgcttccattaatcatggcggataggagtatgagacatacacttgcttctgcaattctaggccttctttcagcacgcataatttatgaagatgcagatttgccccttcctcctaccaacactaccgttttaaggcgggacgtggattctttgctggaacctcccttagatgtccttctcgaccgccctggtgaaagtctttttgagaggctcatatgtgttttccatgcattacttggcaatggcaaaccaagttggctgaagtcaaagtcagtttctaagtcgaccactagaactccaagagatttccctgcatttgatagtgaagcagctgagggcttacagtctgcactagatcacctggagatgcctggaataatcaggcgaagaatccaagcagctatgccagttctcccaccttctcgccacccttgtatatcatgccaaccacctcagttgtctttggccgcattatcaccactccagagcggtacatctacttcaggtcctcaacagaaaggcaactctactagctgggttcctactaatgtatcgatcagaaacaaggcggcgtttgcaacccaagatcctgagatggaagtagatccatggacattgcttgaggatggcacaagttgcccctccatgtcatctggaagtaacagttccagtggcatggctggcgatcatggtaatttgaaagcttgtagctggctcaagggtgcagtgagagtgaggaggacagaactaacctatattgggtccctggatgatgatagctgatcatgcttgtacgctatcactgctgacgttgcacaaattcaagatggggattgaggaaaatttttcggttttggaccaggttgggcttgagtggtatacatgccgccaccatgataaactccactattgaagtgagttttgtgttgaaattgtggccttgtgggggcggccttgatgt

SEQ ID NO: 95986 - DNA, 618 bp, Oryza sativa
  Clone ID: PAT_MRT4530_94125C.1
attgggaagccattgaatcagaggcccattatcaaatcttgggtatttttctgtgtagttcaggtatgtattcttggtgctgaaagacttccaagaagtaatttatcaacaatagctagttcgattaaccaaatctcatctggaggctatccttcatccacgcgtccgggtgtccctgttctaaatgaagatggaaatataatcagcgacatccgccatgggaaaactgcagatttggctactagttcagaggcatccagtggtaagagcaaatgcaccctttgtctcagtacccgtcagaatcccactgccacaacctgtggccatgtcttctgctggagttgcattatggagtggtgtaatgagaagcctgaatgccccctatgcagaactccgattacacattcgagtttgatttgtatatatcattcagatttctagcaaatgattactagcaaggggtcatatcattctccagtggattcattaaaatgatactgaatccccacattttggcgagaactcttcttctgaagtgttttagtgtaccaaaagaggagagtagaaaccatccaatgaggctgaagatcaatgctgccattcaactgtattgtagag

SEQ ID NO: 95987 - DNA, 483 bp, Oryza sativa
  unsure (1)..(483): unsure at all n locations
  Clone ID: PAT_MRT4530_94126C.1
cacaaaggtaatattggaacattttatacccatgtaacaagtaaacacaaagcattggcataaaaccaaaaccggtttcataaattcagaaaaagaaagtgccacctctcgatgaaggatagcttccagatgagatttgattaatcgaactagcaattgttgataaattacttcttcgaagcctttcagcaccgagaatacataactgaattaacaaaaaaatacccaagatttgatacctgggcctctgaatcattggcttcccaatgaatacataacgaatgccagctgctcgctttggtaaatgataatacaatccgaaggccatttccgaagaacccattcccacaaggtatgaactctgcctctcaaccttgacaaatgagaaaaactcaagcttcttgaaggactgttcctaattggggatggttgtgctgcagngcctatactagaactatcactttcagaatggtcatcaagctg

SEQ ID NO: 95988 - DNA, 193 bp, Oryza sativa
  Clone ID: PAT_MRT4530_94127C.1
gccactgaagaataatatgaatgaagaagcaagagaatgcacaccgcgtgctagcagagtcattctgatatgggcgaccagagttgcccgctgctctcaagggtcgcactctcacatattcatgctctgtctcaagttgcgttttgcgttcttgcgacagtcggggccggtggagatgcactgctgcggatgt

SEQ ID NO: 95989 - DNA, 108 bp, Oryza sativa
  Clone ID: PAT_MRT4530_94128C.1
atggagggaaccccgaatgacaccatgataggacgggtcatacctacttccactccgcctgttacagaggtgacgtgggggcacggccacccgttcaatcggatgtga

SEQ ID NO: 95990 - DNA, 812 bp, Oryza sativa
  Clone ID: PAT_MRT4530_94129C.1
tgatatagagttgttgggtgagcaaaacatagataatctcgcgttaggaaatttgtgtagtggtattatgtaagagatgatggatgtgggtgctaatcatgatgatggtataaatgtcactgcacaatctaaaaaatctcttacagttaggagtgaatttacaacaattgtccttaaaattctttgtgctggtaatttttttttggcactgtaaacctcctaagggtagatcttgtttgagggaattgcacatggctcacaggatttatacttgggcaaacaatctagatgttcctacttttgagaagctaaatagaatattggtctctactaaatgggaggaaaaataccctctatctttattagagatatttctgatcatacttctttcttattaaattcttcctcgaatttcaatccaaatttgaaatttatcttggtagcttgttacgagaggggtttttttgacatgattaaggaggtatggtcaagtgttcatgttgggaatagtccaatggagaggtggcaagtgaaatttcataagttaagacaacgtttgagaggatggccaaaaatattagtggatcttataaaagatagaaaaaagagttgctagataagtttgatatcctggacaaaaaggaagaggtaacattattgtcacaagaggaattatatataaatcagtttatgaataatagattagctatacttttaggagaggaggagattaagttgtacaacgtgctaaagttaaggacttgttggaaggtgttccaatatgaaatattttcaattggttgctaacagta

SEQ ID NO: 95991 - DNA, 2736 bp, Oryza sativa
  Clone ID: PAT_MRT4530_9412C.1
atggcgagcgcctccagtggtgcgatcaactccctcctatccaagctcgccgcgctgatgggggaagagtacggcaagctgagaggcgtccggaaggaggtggcttccttggaggacgagttgagaagcatgagggcccttcttgagaagctcgccgccatggatgagcttgatggtcaggccaaggagtggagagaccaagtgagggagatgtcctatgacattgaggattgcatcgatgatttcttgcatcagcttgacaagaacaatggaagcaatggatttgttcacaagacggttaaatttctgaaggagataagggcacgccatcagattggtaacagtattcaggagatcaagaaccttgtgaaagaggtgagcgagcgccgcatgaggtacaagattgatgagtatacccccaattccagacatgttccggttgacccgcgagtggtcgcaatctattcggaggcggctggccttgttggaattgatgcgccaagagatgagctcctcaaattgctgatgggtgaagagcaagggctgaaggtggcttctattgtaggttttggaggtgtaggcaaaaccacgcttgcaaaggaagtgtaccgcaagcttgaaaggaaatttgactgcggcgcgtttgtgtcggtatctcaaaaacctgacataccaaaacttctcaatagaatattattggaagttagggggcagtgctctgtgcacaacaccaatttggatgggattctcaatgatatcataaatagtctgcgggataagaggtacttcattgtggtagatgatttatgggattcctttgagtggaacattattagatgtgcttttccagagaacaagtatggcagcagggtattaacaactacacgaattttgtctgttgctaccacctgttgctccaacagtcaagcgtatatatataagatgaaatcacttactgaccaaaattcacgaaatctcttttatagtagaatatttggatcccatgaagctttccctaataaatttgaagaggttacaactaatattctaaaaaagtgtgatggcttgccacttgcaatcatcagtatagctagccttctatctggtcaaccatatatcacctgggaatatgtaaataattctatgaggtccatgtttgaaggaaatcctaccttgggtggaatgaggcagatactggaactgagctacaataaccttcctcaccatcttaagacatgccttctatatgtcagtatgtatccagaggactacataataaagaagaatgatttggtaagacaatggatagctgaaggcttcgtgagtaaaatcagtggtctagatgtggatgatgttgcaggtagctacttcaatgagcttatcaataggagcatggttcaacccatatatacagattacaatgatgaggtgttatcctgcagaatacatgatataatgctggaaattatcaggtcgaagtctgccgaggagaacttcttttctgtaatagatgatcgtactgtggcaccaggactgcacacgaagatccgtcgagtttctttccactatgctgatgaagaggacggtgtgataccagcatcaaacaatagatcactgtcacaagttcgttcagctgcatttttcaaaaacagttttaggccttcatccttggagttcaaatatgtgcgagttctacttcttgaatttcctcggagatggaggggaaaaagagtggaccttacaggtatctgtggattttctctgctgagatatttaaagatttcacatgatgtcaagttggtgctacctagccaacttggtgggatgtggcatttggagacaattgagctgcatacatcagaagaattgagcattccatcagatattgttagtttgccccatttgtcacagctgtttattccagcaaatacagttctgcccaatgggattggcgacctgaaatccttgcgtaacctagagtggtttgatttaataaaaaactcaatgagcaatattgaatgccttggtgagctgaccaacttaagagatcttaaacttgactgcagcagtagtgagcccttggaggatgtgactagccgtattgaagccctgcgctgttcccttgaacgactctcgcgatcttccggcagcctcaggaacatcgttctgctgaaacattttccttcatggttgcaggttgatggcttgagcacactgtcccctccaccgcgccatctctggaagctccatctggaacgttgcttgttttccaggataccctcatggatcgtacagcttcgtgaccttcacagcttgaagcttacgattaggaaggcattgcccatggatgatggtgttactattcttgcatgtttaccttcccttgttcacctcgacttgaggcttctagtgtgcccagaagaaagagtcatcttctccggtacgggcatggcattccgagctctcaagcacttgctgttcaggtgtcataagccattcctggacttcaaagcttgttctatgcccagcggcacttgcttacctgttggcattgatcacctgccagcatgcctaagagaaattcacataaaccgggattatggtgctgacagacgtgacatagaaactgcaaaatctgcgctgagtagcttatttgccacacatcatcctggtgctggcttgatttttggaggtgcaccttggaattatccttctaatgaccctgaccagtggtga

SEQ ID NO: 95992 - DNA, 1668 bp, Oryza sativa
  Clone ID: PAT_MRT4530_94130C.1
atgcgcgtgctcgttgctgtctttgtctctccctctctccatatatatgagcatctgatgggagacatatggagtgcacatctgttggtttcctttccggtgctgttcaattgcagtacgttctggtatgtggcctcattagcatatcgaccatcacttgccactgatcagtcattagatattgaaagggctaatgtccatgtggcgtatcagggctcacctggtacggccattgaggagatggtgtttaaggccttcccagactgtatagccgttccctgcaaaaagtttgtggctgcatttgaggcggttgactcttcacttgctgacatagttgttcttcctattgaaaattcatccactggaagctttcaccagaactatgacttacttcttcgacataagttgcatattgtgcaagaagttcaagtggagatagagctgtgtctctgggctcttccaggagtgcagaagaatgatttgagaacgattttcagccatccagaggaatttgctcagtgcgagcattcactctctagtcttagggttataaagaaaaatgtcgaccactgtgctgctggtgccgagattatatccatgcaaaatttaggagatgctggagttataggcaatgctcaagcggcggaattgtatgggcttaacatagtagaatgcaactttcaggatgcttcacccaatctcacaagatacttggtattggccaaaactgctgacatccccaaggaatatggccaatataagacaagcatcgttttcggtcttgaagaagggcctggcatacttttcaaggccttgagtgcattttggatgagggatataaatttgtcaaagaactccgcagccccaacttcaacaagtggaaagctttcttccgttcgatatgcgggaaatttggtctccttgaccatctcgacgccgctcgacccgctgaccctaacaatgcctaggagcaagctgattgctacctccacagttggctcttcagctcagtcgccgacgaaatcctcgacggctcaggatttgtggatcgccatcaacaacctcttccaagccaagaaggagccttgtgcgatcttcctgcatcacgagttccaccctatgactcagggcgatcactccatctctgactactgtcaaagcatgaagacaacggttgatgccctccgcattgtcggccaccctgtcaccgagtcccagctagtctcaatctcctgcgtggcatcaatcctcgcttctccggcaccatggacgaccgctcccgtgctgccctccctcgcctccacgcggaacacccttgtcctcaaggaacttcgcatcgccaacgaagtgaaggtccaatcggagaccgccctcatcgcggccaatgccaccaccttcgcttgtgccttgggctcatgtccttctgatagtggcaggggacagcagcagaaccacaatggtggcggcaacaagcacaagaacgggggccgcaataacaaccgcaacagcacctccggccgcaatggtggcggtggcaacggtggccaccctggtgaacagaacaatgacggcagcggcttcagcaatagtggcatctccttcactactccgcgtctagctgggtcgtgggtgtgcttctctccttgggctggacaacagccggcctag

SEQ ID NO: 95993 - DNA, 1242 bp, Oryza sativa
  Clone ID: PAT_MRT4530_94131C.1
ctacgaaacctcctctctctctctcccttcgctttctctcttccttcctagggcttcccctcctcggcggcgcatcgcataggcggcggacgaagagctcccggcgatgggcggcgacaaggagaacctcgacctctccgacctcaacgcctcgctgcccgccgccgccgccgctctcagcgccgaggaccgcgccggcctcgtcaatgccctgaaggataagctgcagagcttggcgggtcagcacacggacgtgcttgaggcgctctcccccaatgtcaggaagcgtgtcgaatatttgagggagatccagggccagcatgatgaaatcgagttaaaattctttgaagagagagctgcgcttgaagcgaagtaccagaagctttatgaacccttgtacacaaagaggtataacatagtaaataggaagttgttgaggtgttatggttggcaatgcaacaagagctgtttgttatattttgttgatgcagtattttgcgttgaactgcccaggaaattattggttggttgtgcacgggtgagttttcgttgcttggtatatgttacccgtggttttattggcggaagttgtgaggcctgtctgggaacatctatattagagtattattatgttttagttatatgtaatcggtttattaagtttgtgtaattatttggaatctgccggtggaacttttactagtattcatttgagccttatgaaaaaaaaactaaaataggagaaagcaattgggactgaaaatagagtggtatcctggtaaaaacctgacacagaagattctaaaaaagaaacccaagaaaggttcaaagaatgcaaagcctattaccaaaactgaagtctgtgagagcttcttcaactttttcagtcccccgcaagtacccgatgatgatgaggacattgatgaagacactgctgatgagcttcagggtcaaatggaacatgattatgacattgggaccaccataagggataagatcatcccacatgctgtttcctggtttactggtgaggctgtgcaagccgaggattttgacgatatggaggatgatgaagaagatgatgaagacgatgatgaagatgaggaggaggaagaagaggatgaggatgaagacgaagacgatgaggaagaaaaaagcaagccaaagaagaagtcggcaggcaaaccgaagtattttgcgttgaactgcccaggaaattattggttggttgtgcacgggtga

SEQ ID NO: 95994 - DNA, 517 bp, Oryza sativa
  Clone ID: PAT_MRT4530_94132C.1
ccataagacatatttcattttttttccataaggctcaaatgaatactagtaaaagttccaccggcagattccagataattacacaaacttaataaaccgattacatataactaaaacataataatactctaatatagatgttccagacaggcctcacaacttcgccaataaaaccacgggtaacatataccagcaacgaaacctcacccgtgcacaaccaaccaataatttcctgggcagttcaacgcaaaatactgcatcaacaaaataacaaacagctcacgtggcgctgtgaaccacaacagttctactgctgcttgcaatctgctggttgatcagcacctccttgtgccccgcccttcgatggtagcttcggtttgcctgccgacttcttctttggcttgcttttttcttcctcatcgtcttcgtcttcatcctcatcctcttcttcctcctcctcatcttcatcatcgtcttcatcatcttcttcatcatcctccatatcgtcaaaatcctc

SEQ ID NO: 95995 - DNA, 834 bp, Oryza sativa
  Clone ID: PAT_MRT4530_94133C.1
atgtggtggccctgctgggcaccacacaccccaccaccgaccgccaccgggcacggggaaagaaactttcggcgcggaaccgcgcgcactgctggcgctggcgcgaggagggagggagacgcagcgcaggtgcaagcgcgcaggcgcaggtggaagttggtcgagcggcgcggcgacgacgaggagaggagggctttggcgcggcggttcccgaggagagcgcgcggcgtggcgagagagagactgtgcggatgggcgcctcgagccccgcgcgggcaggagctggaggggaccgggccaggcgcatccgcagccggcgctggccgcctttcttttcttttgttttatctacgcgtcctgacaacgaccacaataactaaaccctgccaaaagccaccggacgcgcaggtccaacaccaccccgccgtgcccctgccttaccttattaaagcctgcactgcactgcaccagccggcctccggtccaaccgcagccgtcttatccgtcgcctccctcaacgccgacacgtccccgcgccgtcccctactccacttgcaaaaacacgctctcctctccactcctgctcctgcctgcatcgcggtgctcgacccaacttcacgtgatcatccatccccggtgtgtctttctcacgcagaaaaagcagctctcgacttgcaaggtgcggtgtcttctcgagtcaaacgatcgctaaagcgaaagccgcccatggtggaagaaagcgacgacgatttacgtggcaccagccagacaatcgatccgatccgatccgacgcctccccggccttgggcttagcacgcgtcagcgtgaggtga

SEQ ID NO: 95996 - DNA, 1236 bp, Oryza sativa
  Clone ID: PAT_MRT4530_94134C.1
atggcggtggcggcggagggtgaggagatgacaccggagcacgaggaagaggtgatcatcgtgggcgccgggcagtccgggctggccgcggcggcgtgcctgtcggtgcgcggcgtggcgagctgcctcgtcctggagcgcgacgactgcgtggcgtcgctgtggcgccaccgcgcctacgaccgcctccgcctccacctccccaagcgccactgcgcgctgccgcgcgcgccgcacgccgccgccgcgcccgactacctcccccgcgacgacttcgccgcctacctcgacgcctacgcctcccgcttcggcgtccgcacccgcctccgccgcgaggtccgctcggcgcgccacgacgccgcccgcgccaggtggctcgtcgaagccgtcgacctcgccacggggaaggcggagcggtacgcggcgaggcacctcgtcgccgccgcgggcgagaacgacgagagggtggtgcccgaggtgcccggcatggacacgttccccggcaaggtcgtccactccgccgactaccgctcggccggcgcgttcaaggggaggtccgtgctcgtcgtcggctgcggcaactccggctttgagatcgcctacgacctcgccgccggcggcgccgccgccgtctccatcgccgtgcgcggcgaggtgcacctggtgagccgggaggtctggagcgtggggatggcgctgcagaggtacctgccgacgtgggcggtggacaaggttgtgctgctcatgtgcgccgtcgtgttcggcggcgacaccgcgcggtacgggctccggcggccggccgtcgggccgttctccatgaagatgaccacgccggcgtacccggtgttcgacgtcggcaccttcgccaagatcaggtccggggagatccgcgtcgtgccggccggcatcaagagcgtccgcggcggcgacgtcgagttcgccgacggccggcgccacgccttcgacgccatcgtcttcgccaccggttaccggagcaccaccaagcagtggctcaagagcgatgacgggctgatcggcgacgacgggatggcggggcggagctacccggatcactggaagggggagaacgggctgtactgcgccgggatggtgaggaggggaatctacggcagcggcgaggacgcggagctcatcgccgacgacatcagcaagcagatgaagcgctggagcagcgagcccgtctacaatggccacatcagcaacggatccccctaa

SEQ ID NO: 95997 - DNA, 738 bp, Oryza sativa
  Clone ID: PAT_MRT4530_94135C.1
atggccatgcacgcgcactctatccttctcgggtttggctccgaccggttcgtgcagacggcgctgggcgtgctatactccaagtgcggccagctacctgttgcacgcaagttgttcgacgcaattcgttacaggagcgtggtcgcttggaacgccatgatttctggggagatgcaggtggctcaggtggtgcctgattccgccacgtttgttgctacactctactcgccgaagttcgattccctcctcgtcgccggcccgcgcaagctggcccacgcgcgcctcatcgtcgccagccacggcagcttgctcccgctcgtcaccaagctcgccaccctcaccgtggccgccggcgccgtgcactacgcgcacctcctcgcggcgtcccaccacgcctgcgacttcttctttctctccttgctcacctgcgccgccgcacatcgcaacctccccggcgcgtccatcgccgccgggagattcgtggaggtggtgggggccagcggtggcgaactgggcggagacggcgtggccgacgacgccgccgccgccgccgcggcccacctcgcggagcgcgcggcgggcgcgccccaccggcctcctcccctcctgtcggctagcctgcgcagatcgagaagtgagagagagaagggagagaagaggggaaggagaaatgtgttgaggtggcatcctgacatgtggggtccacgtgggtcctatgctgactcagcagccacgtag

SEQ ID NO: 95998 - DNA, 2041 bp, Oryza sativa
  Clone ID: PAT_MRT4530_94136C.1
tttctagcaaagactacagagcgcaagattgttgtcaagtgaaatccttggacctccgtgtttcacattcagaagcttgatttcttctgatttggtggcagttttctcctccaagcacctaaatttgcagccccaaaactcagaagagtgcagtatccttcacatgtacagtagagacgcatatttgcttctacacgactgtaaccgacatgttcccatgtacgttggcaattcaaacaccattttgattgcagcttaacttctttcttccttgcaaagcctccagttagcttaatgtatgatatcccataactcctccaatatcatctgggtttgttggtctatttccaggtttaggtaaccatggaaacaatttagtgaggccttgcctttcagaatcagcattctcttgtctaccattgaccccatatttctccctctcaattgcatccataatatcctcccgagccacagtattgccaccccttcgagcagctagtaacgcagcctcattcacaatgtttgctagatccgcaccaaccaatcctggtgttaaactagcaaccagatcacaaattatttcaggatcctcttccaaaggaacgtcccttaaatgaacagccaaaatattccttcgcccctccaaatcaggcacaccaaccaaaacttttcttgagaaccgaccagggcgacacagagcagggtccagtgctttaggcctattagtagcagccatgacaataactttcatgtccgagtcaaaaccatccatctcagtaagcagctggtttaaagtttggtccctctcatcattaaaacttctacctcgacttccacccacagcatcaagttcatcaatgaaaattatagatggggcagcttctttggcctccttgaataaatcccttacacgggctgctcctcttccaacgaaaacttcaacaaattcactagcagaaacagagaaaaagggaattccagcctctcctgcaactgcccttgccagaagagttttcccagttcctggaggcccaacaagcagaacacccctgggtaatttagctccgagcttcttgtagttcagtgaaccatgcaagcaactcactacctcgattatcaacctagatatctcgacgagttcctccttggcctcatcgacgccctggacatcgtcgaaccccactcgctgcttcctcggccggcgccgcttctctgcgccgccaccggcggacatctgccgctgtatgaaccacatcatcggcagcagcgacacccacagcgtgagcagcgtgctcagcatgtccaccagcagcctccccgccggccgcggcgccgaccggtagtccaccccgccgtcccgcatcagccccagcaagaacccctcgtcgtgcggcaccctcctcgcgtagcacggccacctcgccgccgccgcggcgcctctgcgggcctcgcccgcgcccgcgccggcgtcgtcgctgccgcccccgtcgtccgcggccctgcggaagtagatgcggcgggagtcctcctcgaacgcgacggcggtgacggcgcccgcgcggaggccagccaggaggtccgagtaggccacctccttggccgcgttcttgggcagcgcgaggcgggcggcgaggaggaggaccgcgaggacgatgggcgcggccgcggcgggcggcacgcgtcgagcggcgcgccgcagcgcggccgcggcgtccccggggaggtcccgcggcgacagccgccggagccgccaccacagcaggcgcagccgcggccggagccgcagccgcatcctcctccgttccggctcgcggaaccccagcccggcctccttgtcctcgtccaccttggcgcgcaccggtgccctccaccgcaaccgcatcccattcccaccgcgaagcaacccgcggccattgctcgcggcgaggcagctccaagaaccgggggggctcacgaagcaaacccgagcgcgcgggacggaggcagcggcagcgcacacgggggacaagcaagccgccgccgccgccaccacggcagccat

SEQ ID NO: 95999 - DNA, 135 bp, Oryza sativa
  Clone ID: PAT_MRT4530_94137C.1
gacaaggagagggaacaacaaggacgtcatgagcacgagagagtaccacgccatggtgccggcctgtggaggagctcccagcgattcgtggccgtgctcatggctgatcaggccatcaaggaggaaggctgctag

SEQ ID NO: 96000 - DNA, 3061 bp, Oryza sativa
  Clone ID: PAT_MRT4530_94138C.1
ctccattctgtatatggtcaaattagctgatgtagctgctgcagaggaccagcctattccagaagtcattcaacaagtgattcacaaataccaggaaatatttgaagaacccaaggggttacctcccaggaggaattgtgatcacaaaattcctttgatggaaggagcacaaccagtgaacataaggccatacaggtacaaccctgagttaaaaactgaaattgagaaacaggtgcaagagatgttggtttctggagttattcaaccaagtcagagtgcttggtcctctcctgccttattggttaggaagaaagatgggtcttggagactgtgtgttgactataggcacctcaatgcacttaccattaaaagcaagtatcatgtccccattatagaagagttgctagatgagctatatggttcaaaatggtttactaagcttgaccttcgagctggctaccatcaagtcagaatgagtcctggagaagaacctaaaactgcatttcaaacccattatggccattttgagtacaaggttatgtcgtttggttttactggggcacctgctacctttcaagcagctatgaacaaaaccttggcatcagtcttaagaagatgtgctctagtattctttgatgatatattgatttatagtccagatcttaaaacacatgtggctcatgtttcacaagtattgcagctattgaagcaggatcagtggcaggtgaagttatctaagtgttcttttgcacaacagcaagtttcttacttgggccatgtgattggggtacaaggagtagctactgatcctggcaaaatcaatgatgtggttaattgggcagttccaactaccattaaaaagttaagaggattcctcggtcttgctggatactacagaaagtttgtcagaaactttggagtgttgtgtaaacccttgactcagctgctaaggaagggagtatcttataagtggactgaggaaacacaagaagcttttctggccattaagcaagcattggtgtctgcccctgttcttgctttacctgacttttctaagacattcacagtagaaacagatgctagtgattatggcattggagttgtgccgtcacaggagggacacccagttgcctatcttagcaaagcattgggtccacggtccaggggtctttctacttatgagaaagagtgtatggttgtcttattggctgtagagcgttggaggccttacttgcaacatcaggaattcgttatactcacagatcaccacagtttagtctatctgtcagatcaaaggttgcatactccctggcaacagagagcattcaccaagttattggggttgcaatataaaatttgttataggaagggcagtaccaagtctgcagctaatgcattatccagaaaggagaatgatgaggaagtgcaactgctagcaatatctgttggagtgcctgtatggatacaagaagtgattaagggctatgtctccgaccctttttcatctcagttactaactgaattgactgtgaacagagaagcaagaaaccatttctctttgcaagatggtctcttaaggtataagggcagagtgtgggttggtaataattctgatttgcggtctaaactcatggaagaaatgcacagtcagccacttgggggacactctggcttcccagtaacttacaggaggttgaagcatttgtttgcttggcaaggaatgaaacagcaagtcaagcagtatgtttagaactgccaaatctgcatacaggccaaaccagagagagtgaaataccctaggttactacaaccattacatgttcctgaaggtgcatggcaagtgatttctatggatttcattgagggattaccaacatctgagagatacaattgcattatggtggttgtagataagttttctaagtttgctcatttcctaccactgtctcatccttacactgcagccagtgttgctgacatcttcatgaggaatatttataagcttcatggcatgcccaaggtgataatttctaatcgagacagaatcttcactagtcatttttgggactatttgttcactaaggctggaaccaaactgcatatgagctcatcttatcatcctcagtcagatggccagactgagagagtgaatcaatgtttagaaatcttcctgaggtgcttcattcattctgtccctcgcaaatgggctacttggctatatttggcagaattctggtacaatacctcttaccactcggtagttcacaaaacaccctttgaagttacttatggatatcaacccactcactttggcgtcagcatggaggattgctcagttcctgatctggctgagtggatgagagacagaaggtcgatgcatcaactgattcaacaacacctaaatcgggctcaacagcagatgaaggcttatgctgataagaacagatcctttcgtgagtttacagttggagattgggtgtacctcaaaatccagccatatgttcaatcattagtagccaaaagagctaatcacaaacttgcatttcgatattttgggccattccagattctacagaaggtgggcactatagcttataagctagatttgccggaagattgtctctttcatccagtcgtgcatgtgtcacaactgaaagcagccaagggttttactccttcagttcatcatactctgccttctgaattgggcaaattgcaagtaccaatggcattcctggactatcgtctgttcaaaaagggtaactctgttttatcccaagttctaacgcaatggtcaggtggtgcggcggaggatgctacatgggaggatcaggaagacctacgtgccaggtttccgcatgcgccggcttgggggcaagccggttcccaaggaagggagaatgtcagagctcctgatgaccaactggtagatgaaggtgatggcggcaataacctggaggaagaagaacagagtgaaggcggacaggagaaaggcgtcacccttaaggcaaaacgtaatagagttgctaatactaagtatagtgggcccgaatggcttgtg

SEQ ID NO: 96001 - DNA, 858 bp, Oryza sativa
  Clone ID: PAT_MRT4530_94139C.1
ttttttttttttttttttaatataacaacactggcacactgcactgcaaacaatgcatgcacatcaaattatcgaggattaatcaacaacacgacaagacaaaacacgacgcacattacgaggacatgtcgacatcaatgcatgcatgcatgcgatgacgtgacactgtcacacactgacacactcactagctaaagctagcagtagctacatatagctagtagacggactcaacgacgatccaaatgattaacttaaaactaatagacggcctaatcacccactaatccaaacgaaatttaaccaaaccaaaaccaaaatcacgggctgtagtagatgatcttgagctcgtcgacggcgtggcagttgccgccggggacggcgtcggcgaagcactggccgccgccgcggcacccggcggcggggcagtggccctggagcggccggccgtgcggcgtcacggtgaccttcaccggcgacccggcctggcggttgtccacctggtaccacgcgccgccgtcggggccgacgtggaactccaccaccgccgcccccggcgccgccacgcgccccgtccacaggcacgtcgtgaactcggcgtgcgtgccgtggcggagcacgtagccggcgccgaacagcgcgccgctgttcgccagcggcgtctcggagaggggcaggtcgcggccggagaggttctggatcgtcaccttcctcggcgtcgcgcagccggtgtaggcgccggaggcggtgggggagatcgccgccgccgccattgcggcggcgaggagggcgagctggagcttggagatcgccatggatggatttcctttgaggcgtgtgggttcgggaggggggaat

SEQ ID NO: 96002 - DNA, 473 bp, Oryza sativa
  unsure (1)..(473): unsure at all n locations
  Clone ID: PAT_MRT4530_9413C.1
cccacgcgtncgcttcgaagtacatagtatcgtcacatttagttatgcttgttataaccaatgcttttggtcttctaatgcatcgacacaaatcttcttagtggagtgcagccttgttgagatccttcattttttttgttccaaatgatctatactagctgactttgctttagtcttgtaaatgtttatgcctttgtcttcttgtttgctaactgtcacttaattttatagagtaaagctgaagaacctctcccttttttccccaaaggctcagctaactttgctttagtcttagaaatgtgtatgcctgtcttcttctttgctaactgttcatttaattttagggagcaaagctgaagaaccaagtgcttctggtgatccactggcaagcaagagtggtgcagttctcatggtttgcagaacctgtgggaagaaggtgatcactggacctcaaagtgcccctacaaggatct

SEQ ID NO: 96003 - DNA, 384 bp, Oryza sativa
  Clone ID: PAT_MRT4530_94140C.1
atgattgtcagagtcagtcaggggcatggttgcattgatcataagctgaaatgcaacctgattgaacccgcccaagtggtgagcggcaacagagctggaaatcagaaaggctgcaggatttcaaaaaccatgcggcgctttgtgctcactgaaatcatggggcgtcgcattcatggccagtgtgcacagtgcctgcagcctcctgcagctaccatcctttaccctggcactgttcgttcaggggggcaaaacctgggcttgctgcagagtctgtatggatacagatatgcctttgtcacagtgcctcaggggcaaccttcacatggtttagggcaccaaccaaacacacccaaattcaaggcatctggcattatcactgtgtga

SEQ ID NO: 96004 - DNA, 294 bp, Oryza sativa
  Clone ID: PAT_MRT4530_94141C.1
ttcttagaagctctcctcctcctcccatggcggcgacgatcgtgttcgtcaaggcgcgccagatcttttacagcaggggcaaccccaccgtccaggtccatgtgtgctgctcacatggaacctttgcaagggctgcagttcccagtggtgcatcaactggtgtctatgaagctctcgaattgagggacgggggatctgattacttgggaaagggtggttccaaagctggcgacaatgggaactcggttattggcccagctctgattggcaaggaccctacgtcacaagctgggc

SEQ ID NO: 96005 - DNA, 380 bp, Oryza sativa
  Clone ID: PAT_MRT4530_94142C.1
aggaccgtttttttttggttttttgggtgcaagccaggtttctattcataattaatggaagtgtttaactaatccgtcatagttttaatattaaaaagatacgaaaacatgactggttttgatcgtggaacaaatgggacaagcggtaccataaaccaatggcgcaagaacagatcaattctgaaacgaattagtacacacaacgcgtgccatgctcacatcagagacaaaacctcaaatgcgggcaccgatgatgaaagcttcagacggtgataggctggacctggtaagcatttacaccgagctgaatctgacgaaattgcgcagaccgcgaataaccaggtgcggactgggatccccaacggggagatacacagtga

SEQ ID NO: 96006 - DNA, 254 bp, Oryza sativa
  Clone ID: PAT_MRT4530_94143C.1
catgattctcctctcccttgccgcttccaacaccaagtctcgccgtggccaggactgagctagggtttgcgtgatcttcgggaggagggagcaggagagagttcgaggaggaggaggaggaggagaacatgatcgaggtggtgcttgaacgaccggctggggaagatggtgtggttgaagtgcatcgaggactacaccattttgcgatcttaagaagccggtggaggttcacaccggttcgaggcctcagaaga

SEQ ID NO: 96007 - DNA, 303 bp, Oryza sativa
  Clone ID: PAT_MRT4530_94144C.1
acgacgcgtccggtcttagcgaatccaggagggcatgcagcatcatgggctcaacctccggcgatggcgtccacgataatggcttcatcgtccatcgtcctcgctgcaatgaccccgttcgtgagatatccgcggccgtccaatgccgccttacgatacataaggggctgcggcaccggccggataaccatgagcacggggctgcggttcgggccgaatacgggtgaagtccttgggggcatgctcggcgcagactccggctgacatgcggggcgagtctccgggcgactacgggtgggacac

SEQ ID NO: 96008 - DNA, 362 bp, Oryza sativa
  unsure (1)..(362): unsure at all n locations
  Clone ID: PAT_MRT4530_94145C.1
cccgtctcgtcgcccgccgccgtcgacgactcccgtctcctccgcctgccgccggcgccgatctccatcctgctagcagaggtggcgccggcgttctcctgctcccgccgcatcatcgctcaccggtgagcatcctaatccatcccgtccggcctcgaatttcggtctcctcgcccgccgcttgtgccgaaccaccccaatccggcgagcagaggtcggcgcccgtggtcctcctgcagtcctgcttccgccgcatcgtcgctcgcctgtgagcatccttcataaggtattttgtgtttttctcgagacatcgaaccagcntcgtcgtcgccggcgaacgcgccgaggatgccggtgaaggt

SEQ ID NO: 96009 - DNA, 148 bp, Oryza sativa
  Clone ID: PAT_MRT4530_94146C.1
ccacccggcccaagccgtggcgccccctggccgagctgctcccctcccgtgccgcgcacgtgcgcgcactgacgacgcgcgccccacgtgggacccgcctgccaggcgcgtcttcctcctcccgctcggcctcttctccctcccgtga

SEQ ID NO: 96010 - DNA, 385 bp, Oryza sativa
  Clone ID: PAT_MRT4530_94147C.1
ggcggcggccttcacaatccgagaccaaacggcagggagcaacaacacagcaagaccagtgacaggtcatcacggggcgggcgcatcgccagtacaaagagaacaccccctccccatcccaaaaccctcaggcaaagtctctgcttggagagcacacgaaacctctctcttgggaacgcttttgaggcgaaaagatgggggaagaacatggtcattctccgggacacggaaaagcccccagggaaaggcaggaggagatgatgtaaccgtctgtctgcgtacgtctgtgagtatggggtgagggatgtatggtcaccacaggaatgccgcctctctcgagtggtatatacggtggatgtagaattctgccatcccccccagcctg

SEQ ID NO: 96011 - DNA, 576 bp, Oryza sativa
  Clone ID: PAT_MRT4530_94148C.1
atggcagccggcggcagcacggtcagcggtgcgccgccggtgatcgccaagaaaagagacgacgagtggagggcgacgacacacaaggcggccaagagctggggaggcccgagattatcacaagaagggcagagtctgagcaacgcctctctgcccctcgcctcctctttctcgccatggagccacgggaggcggcaggcggcaacgccctcccttccggcgggaagggaggcggtgggcaggggcgacgccctcccctccgtcggatccaacgggaagggaggcgacggcggcggcggcacccttccctccgctggatctagtgggaagggaggggaggccgaggcccagccaggccgccccgccgtcctcctctcccggggtcgccgacaggtggggcccacctgtcgggtccttcccccacctccggccgatgccgcgcccgcaaccgccgccgcgtccacgcctccgcctcctctgggccacgtcgaccacgcccgcgcgtgcgccgcgttccccgcgcccactcccctctctctcccgctcgcgcccgcgcccgagatggccgggatttga

SEQ ID NO: 96012 - DNA, 281 bp, Oryza sativa
  Clone ID: PAT_MRT4530_94149C.1
aaaccaatcgatatattaatattattgatgtaatttaggcaaaagagtgatgcatacagcagtgagtgagtaagtaaaatagaaatccctatgctatttattccttgctaggtctaggtggagttgcatccaatccacatggtacaagattagattagagcagcagagtgaggaatctgacggggaacctgggatgaaagaagaaggaggaggcaggtggagctagggtttaggagggggatccttcaggtccagggcgtggttgcgcttgcggcggatga

SEQ ID NO: 96013 - DNA, 204 bp, Oryza sativa
  Clone ID: PAT_MRT4530_9414C.1
tactatcggtgttatgataaataccatacaagtgcatggatagtgtatcatgaatacatacgcatgaaagataccattcaggctaccacagtctaagagcgtgggcatactttgtgttgagtggtggtaggattatttatgctttggttgtgcagttgctcgagcagaagcatggtatgcggatgaatgatagcatggatgtta

SEQ ID NO: 96014 - DNA, 594 bp, Oryza sativa
  Clone ID: PAT_MRT4530_94150C.1
atggcagtgccaccaaaaaatgatgcagaggcatttgatcagcctgatccaaatgatgagaggctgccggaagagaagctcaacaccatggccgtacgcattgcgttcttctacagggtgatgaacggttgtggtgcactggctttcgcatgggccacggtggtgttgctaggtggatacgctaccctcatcaaacagaaggatttctggttcgtgaccatcatcgtcttcatggaagcaacctggtatgtctacatattaattataaggtcaattttaatttcaagcaatactcgctattccgcaaagttcatagaagggcttccctgtcggttcgtaacaaacagtctctctgctggttttcccactggcaggctgcatggcacggatcaggatcgtctgccttcacgggcaagcaacgtattacgtaaagtacgcattcaatcagctggttttctacggaaacacaacgagaacacctttgtcatgcttgcctccggctgctgctgcgccgctgccgctacagacttgtcctcaacggaagatgggacggcggagattgaacacgacgtacatccgaggagacagcagtga

SEQ ID NO: 96015 - DNA, 993 bp, Oryza sativa
  Clone ID: PAT_MRT4530_94151C.1
atgtcggcgtgctcgattacttcgtctacaacgccggcgccgtcgccgccgacccggccgccacagccgccatcgctgtcgctgctccctgcctacgtcaccaaagcagcggacgatgaagaatgtgaagaatggcaagcatatgaagaagagagtgaaacctggccgcgccaccatcatcagattcatcaccatctggatgagaagaccaccggcctcctacgccgcggcgacgacgacatggtggtggtggatctcgccgtgctagagggccacgggctggaggaggagggggacgccgagctcctcgttctccgctccggcgagtggaccgtcacgcgggcgccggtcgcccacttcgtcggtagagccgacaagccgccgtcgtggatcactgacatggccatccccgtcagcgagcggcggatgtgctgggccgacctgtaccgcggcatcatcctctgcgacgacgtgttcgaccagaatccacagctgcggttcgtgccacttccccccgaggccctcaccgatgaaaccgacgacggctacaagcgggattacgccattacggaccgaagagtttgtgccaccgacggcggcgccgcgctcaagttcatctacatcatctcccgctgttgctgcggcctccccggcacaaccttctgcgacaattccaaggaggccttcatcatcaagacctggatactcaggatggacgacgacgacgacatggtttggacgatggacgccatggtcgacgccaccgagctctggtctctccatgcctgcgctggcctcccacaagccaaaccaatattccccgtcgcaagcatggacgatccccatctcatctgcttcatggtgcaggagcgagaattcgagggaagaagaagaagatactgccacatcaagagaacatggatggtcatgttcgacacaaggagcaagaaactcttgtcagtctgcagctgccgcgatagttggctcatataa

SEQ ID NO: 96016 - DNA, 756 bp, Oryza sativa
  unsure (1)..(756): unsure at all n locations
  Clone ID: PAT_MRT4530_94152C.1
atggcggcgcatggagcgggggcagggaggtgggagcggcgggaaccactactgactgctcatactttggttacatcttacccaaaaggctttattgaggaaatgagggagctagagaagctgagaacagaaacaatgatgaaatcctgccaaagcactacaagcagggctggagcgataagatgtccagtaccacgcaagagtggcaggtcatataaggagtatgatttaacacaggatctttctgatttcattatgagcaaggcttctcctccatactttacgggatctccaccagttcgagcaagcaatccacttgtacatgatacacagttctgtgcatggaagctgcaaaacgttgatcagtcgcttagcattcctataccaacaaagggttgcaatgttcgttactgtgtgagggaaggatctattacaaaggcttgaagctacatttatgagcttcatgaccgctggcaaccagacctcagaggacatgcttggttaacattccggcttttgacattagttgtagttgtaactttgcttgcctcttcaaggccaatttgtacatatgagttatcaccctctagaagctgccgttttcaagttttgtgccgttgtcatcggcagtggtgtacatatcttttgtgttcagttttgtcgtctgtgaagttagttttggcaaataaagtctgtcaaacctatgttgctgagaaaaaaaaaaaaaaaagcggccnaaaatttgttttcctttaa

SEQ ID NO: 96017 - DNA, 213 bp, Oryza sativa
  Clone ID: PAT_MRT4530_94153C.1
atggaggaggtggagaaagatggtcactacaagtatagaggcaggatggtggcgacggcacacgggggaagagcttggcagccagctggccgcgcatggaaggaggagctcgtcagccaaccgcaacgcgtgtggggaggagatcatcagccgtcggtggagttttgcgggcctgtggcgacaatggacgtcgaggtggtggtgctgtggtga

SEQ ID NO: 96018 - DNA, 662 bp, Oryza sativa
  Clone ID: PAT_MRT4530_94154C.1
cctcgtgccgaattcggcacgaggcctcgtgcggcacgagggtggatcgagtagcttagctagctgtgatggagatcttggtgagtgcactgctcctgctcctcgtgccacccttgtccgccctcctcgccgtcgccgcgccgagcctcgcgtggccgtcggggtcgtcgtcggtgaggaagctgatcgccaagaaggtggcgccggagcaggcggcgcgcgacgagctgctgcgcgtggcgcggtacagcagcgctagcgccgccgctgccgctagtgctgtccaacaaccaggcggcggcgagagtagtcgtccggcggcggcggcggcggatgatggtgggcggccggatcagtgcgcggtgtgcctgagcgacatcgaggagggcgacgaggtgagggagctccggtgccggcacctgttccaccgtggctgcctcgaccggtggtggttgtcggcgcggccgcccgccacgtgcccgctctgccgctgccggctcctgcagagcccgtcggcggcggcggacgacggcgacggcgacggcgaggaggattcggactcggacatggtgatgttcatggcgtacctgcgaagcagtagcacctggctctagccattaagggcatgtttagttccaaaaacttttcccaaaaacatcaca

SEQ ID NO: 96019 - DNA, 315 bp, Oryza sativa
  Clone ID: PAT_MRT4530_94155C.1
atgacgcgccgtaagctttatcctctttttcggccgcccttctttttttggtgtttttataaaaaagggggggtacaatataatgtataatccacaacctacacccacttaccacattgtagctcactgggtaggcccagacctccttatacaaattgactggacaaaaactgatgtctatctctcaattaccaacatacacttacagcatacttccgggaagaactataagggaccttgtggaggggaaaataggaattgctgaaacaaaaggggtggggggcccccttttttcgaagaatcactctctttaaa

SEQ ID NO: 96020 - DNA, 294 bp, Oryza sativa
  Clone ID: PAT_MRT4530_94156C.1
cagggcaaaatttttttggaaccaaaagggggccatcatcctcctttataatttccctccttaattaaatcatcccagaataatcatttatttcctccgggaggcagttgtttagggggggaccaaaggggggggccgtaaataaataaacccaaaggggcgaatttacaaagccaggcacgcttttaggggttattaaatctccttaaattaggggcctcctcctctttaatcaacggccaaggggggtagggcttgcggcttggcggtggcccccgtcgccggggggtcttg

SEQ ID NO: 96021 - DNA, 424 bp, Oryza sativa
  Clone ID: PAT_MRT4530_94157C.1
actatgtccaatttcctccactggccagcaactgggactaaccaggcccctgaaaaaacatatttcttacagttcagtccctccgccgccgctggctcgcttctccggccaccgcgcaccgatcaaccttggcctgaccaaccgccgccgccatcgccgccgctttctagctcagctccggctcgccggccggtgcccgtctgcctccgtgtttcgagaggaggcggacgagcttatagctaatatacgtagagagattatatatatatatatatatttacagtttgacaacgaggtggagtagagaggtgtgtacatgtgcagcatggacgactactccggccgcctcgtgttcagctccgccggcgccgcgccgtcgtgcagcgccgccggcgcgggaggcgggcagatgctgctctttggc

SEQ ID NO: 96022 - DNA, 369 bp, Oryza sativa
  Clone ID: PAT_MRT4530_94158C.1
atggcggagggtaggccgccggcgttgcgccgctgccgcttcgtgcgctgcggggcgcccgctgtcaccgtcgtcgacgcggtggcaaccgagcggcggtccggcggaggcagcagcggcggcccaagctgctccttcactgctgagtcgagccgacggctgcaggatcacgttcacctaggctgcctgctccccgcgctctgcctacggagtcatcgccgcgaccttctcctccccgccgctgggttcgctaccacggccaactactccggccaccttgctggctgggtggctgccgccgccaccgctgctgccgtctcccggccactgccacctaggcaggtcgctgtcgtcgcctggaccgggtag

SEQ ID NO: 96023 - DNA, 141 bp, Oryza sativa
  Clone ID: PAT_MRT4530_94159C.1
atggcggtgttggtgagaggcaggccttggcaaggcttcaaggacggcgccaacaagaggcaaagctccataaggcttcaaggactgccaccaagctccgccttcctcgcgagccccgagctttgttgcctcgacatctag

SEQ ID NO: 96024 - DNA, 148 bp, Oryza sativa
  Clone ID: PAT_MRT4530_9415C.1
atggcgacgagcggccgcacgcactgccgagctgagctgcagtggccaccacgctcgccggccgggctcactgtgtcgccgctcgtgatggcgtgcagggaaaaaccggccgattcctcacgttttcgcctcccgaaccttcggtccg

SEQ ID NO: 96025 - DNA, 1909 bp, Oryza sativa
  Clone ID: PAT_MRT4530_94160C.1
cgcagtcgtctgccgggggaggcagccgacaccgccgcccgcgctgcggcctccccccatccatcccgcgagcgagcgagggcgcaggcatcctgatccgcccctgggcttggctagcacaacagttttcagtgggggcaggaggggaaagggctcggtgggtggatcgatgcgagcgttcgcgcgaaatctggcggccatcatccctctcgcgcgctgcaatgcgacggcgacgaccgcggcggcgccgtcctccctcgtcctcaaggtcggcgacacgctgcgcgagcggcggcgcttcacggatggggaggtggaagcgtacgccgcggtgagcggcgaccgcaacccggtgcacctcgacgacgccttcgcccgccagcctggagccgtgtatgcgaggcagtcgctcaagtttgcggcaccggtgtatgtcggcgacaaggttcttgtgcaggttcaggcgctgcacatcagggcctccacaaaacacatgaacaccattttgaagtatcataaattgaaagcctcactcgtgtgccactgcccaaactggcagatcttgataggtggctttgcaatctttggccccctgaacctgtccttctccatggctggggccaccaccacctcctctcccctgcggaggatggagtctgtctgccgccacctcctcccagcatcaccgcctatcctttaccagaatccgttaggtgccatcaggctggagtcatctccagtgattattggggggatggtgctggacatccatgccaagccatccatgcagccgcatcctggaacgactgtgcctgggatggttaagtacgtcagtgggggagtagcaagaaatattgccgagtgcatttgtaagcttgagactcgaccattcatgattagtgttgttggaaatgatatggcaggggatttccttttgaaatactggaggtcggctggactatgtacagatggaatactgcagattgatgacgtaacaaccccaatagtatcaaatgtgtttgatgggagcggtgaattaattgctggcgttgcaagtgttggggcagttgaaaaatttctctctcctagctggatatgtcagttccgtcttcatatctccactgcacctctactaatgcttgatgcaaatttatctcctgattcacttgaagccgcctgcaaaatagcacatgaatcaggagtgcctgtgttttttgagcctgtctcacttgcgaagggttcaaggattgcaccaattgcaaaatatattacttacacttccccaaatgagattgagcttgtggcaatggcaaattcattatctcctcctgagaaatatacttttgtcaaaatggagcagtccaagaacaaagccaaagctgtagagtatttgtttgaaatgctcagcccagcaatgtttttcctcctcgaaaagggcataaagtttcttctggtgacgcttggctcaaatggtgtttttgtttgttgcaaagagagcacaagtttgatggaccagcgaaagtctgaaatgatgtctttctcaactccactacttcaaaaattggagcgatgttttccatctaacatgcttgtagatttgcctagagaaggctcttccagaacatgtgtttttcattttcctgcagtatctgcctcagtggttagcctcacaggtgctggtgattgttttgttggtggagtcatttcagctctatgtggaggtttgggtatgatgcaatctgttgcggttgggattgctatagcaaaatcatcagtggaatctgaagctaatatacctgataagttttctgctgcaactatcgcaggtataactccttgcatttccatttctcatgcagatgatgcaagaagaacattgctatcagctaaaatgatgtggtgcaaataa

SEQ ID NO: 96026 - DNA, 621 bp, Oryza sativa
  Clone ID: PAT_MRT4530_94161C.1
atggggcacagtggtggcgttgaggctgcgtgcagagtgctacccatcatcgacgaggagtcggagtcggaaatggacgaggggtcgccggagaggaaggtcgtcgacgaccgccggaaggccatcgtgtccaggatgagggagctgctccggcgagcggccgctcagtcgtcggcgcagtccaagctccggtccaccgtgcttgtcagtgccaagaaatggaagagggtggtggtgagcctgcagaacagcaggaggaagcaggagcagcagcagcagcaactgacgacgacgagccggcagagcgacggcggcatgagctcgtcgccggtctccagcaagagcgacagcttcagctgggacatcgccacagcagagagctgctcgtcctcgccagcgcagtcgccgctgtggccggcggcgctgcgtcagttctcaccgtcgccggcgacgaagcacggcatgaggctccggcgagacagctcggggtcagcagctgacgatgacaggatgagcagcatgtcgtgcagtggcagcccggatgacgacgactatggcggcagcagcaggctgtgtcagtggatcaccacggattctgactttgtggttttggagctgtag

SEQ ID NO: 96027 - DNA, 941 bp, Oryza sativa
  Clone ID: PAT_MRT4530_94162C.1
tggatatggtaggatgcgtggatttagtaagttcgccaatatgtccttatggctagtgtcatgggcgtggatgaatatggttttggttctgtggctatgaatagctactggatgtgttcaagatgtccacactaatggccctgttcttgatgagacaatccttgcaaatcctgatatatctgatgtaattgagaatgaggaggtttccaagatattataatgctgagagggctgtctgtggtcaagtagcaaggtgtcattgcgaagaagtttactggaagtgcagggccagtcttttggatgttttctaactcctggaatactctgcaagttgagagaggccaatgattatgttggaaagaatttgcagggcatgggtggtggagagatggttgtagctcctgtagagtgtactagatagcacaggattcgttcctgacttcctgacgaagctactatagctggaaacgcttgtctgtgttggctactagtgagcaggtatttgtgacaggcaaaacaggtgaaactctcttggtcaatcagtggttgaggtcagggcactggagatcattgctgcgagtacatgatcggtggctgtgtagttggcaaatcctccctgtttcacaatgtaagtcattttagtatttcccatatttatattgatgttaatgaatctagatatattgtgggaaatgttagaatgacttacgttgtgaaacgggggaagtaagtaggacatgctgctaaatgaggatcacagtgttttgtcctgactagtggcggatcgtgagcctaggcaagtttaacaacaaatatagtatacacaaatctatacaaatttgtagatcattttagagtgagcatttgctttgctattttacactaaatcgttataagtatgtacactatatactattgttgtttcaattcatacggtgatt

SEQ ID NO: 96028 - DNA, 504 bp, Oryza sativa
  Clone ID: PAT_MRT4530_94163C.1
ctaaaatgactgataacatagaattaagtagtagctatcaaactaaaataaataagatacataagagagaaaggtggtgagcatgacaagtgggtcccaatattttctacatttctttgttgtttattgttgatttgtgtggtgaacaactcttttcacaagtaggtaggggtggcattttccccattggaaacagggcctcggtgggtccccacccctacagggccggggacagggccaaatcttcacccgtgggtgttactgagtagggccctgactttgagcggtgttagggccaaggtgacatcttcactcgtggagccctgaagtttaagaaataggcacctcatgtatgtatttctagccatcaaaagcccataaggccaaaaatagaatataaaaagacaaaaaaacaataatccacctgcacaattcgatgctcccatcggctgcatgatttgtgcgatcgcttcaatgctctgcgcatgcaacgagtcacgcacg

SEQ ID NO: 96029 - DNA, 3823 bp, Oryza sativa
  Clone ID: PAT_MRT4530_94164C.1
gttaccaaggtattcacagacaatggccttgaggttcttggctggcctgttctttttaatgtatcagtggtaggtcgctatgcaaaaagaaccatgcatgatatacaacagatttgtgaaactcgcaaaataaaaggataatgcggataacagatagggagggatggactttatttgtgttctttgtcaagcagaagtgcagaattgtattagggaaattatatttggacctttggaatggactctacaaatctctttttgccatataacaaagaaaatgcagtaccaatacaaatcgtagatggcctcttgcacaatcagtgaggttactagggcacaatggagagagaaatgcaatataggggaacttgagcaggatgcaatcaagggaagccacagtacagtctcctgtatggcgcaggtgcgagcatggaatacacccatttggtgaccctaaagcatctgagcatgaaacactacagcaaaccttgacagcactgctgaagtaagaggctgcacatggagcatctattactagtgcttcttgtccataccattgacatagcttgcttcttgtttgtaataatggcatgtacgattttttttgggttcttcttgatgcaaaatacagaaatctgatgaaaaagacttgcgtttaattctaaagttctaaaacaattgaaagatgcacggtatgcatgcaaacatcctgtgttagtttgaatttaatgcttttgagatgtggggaatgaggttgtacttccatatgttataaagttgcaagttactgctagttgctaagcaacatgattttaacttgatctatttcagtgtgcattaccatttctatgtatcaatctgaatgtgcatcatgcaccctgttctcttcttcaataaactttttacattaaaaggtgctgcaaaactgctgtattattaaatcatgaaattctttcttgcaccagttgctgctaagaaatatggagtgcattagtagatatagaagccatgggtatacatcaaatttgtcatatactaactggtgcaatttctatcgaagtgaaggttctcttgatttgtgcattaagcgatccacttttatgactactataaaggtcacatggaggcttgagatggacctgctttgctcttatttaggtaagatcatttgtgtgtgaatctgttaggttttttttttcttttgctatatcagttcatgatgtatatcacagttttcttgcgcagtttggtccatctcacagagtatttaattgccttgtcacattgtatgtttagaagtgaccatctcctatttgtgtaatgtttatctctttttctattgttacctgctgacacttctctgacactactaccttatctttttcttgtaaagctgggcagagaaatattatcattctgggtgaagacgttctctgcgaagagtctagcaaactttgtgttcatccaataggaccaatacagacctggaggtagcatctaagtaatcaattgttgtcaaaacatattttattcgttgtttgcctctgttctgccatttcctcaatcaaaatgacatcaatttgatggtatgatatgagatctcattttctacagaatgtgtgtttttccttttccttttatatgtgatacttcttccgtttcataatgtaagactttctagcattgcctacattcatatagatgttaatgtgtatagattcattaacatctatatgaatgtgggcaatgctagaaagtcttacattatgaaacggagggagtacatactaaggtgctgtctatctatgtttcaaaatcaagtttggttggatttgtttttatgtaagaagttcatcagctcatgtactcatgtcttactgtttaatactgaaatttggtgcttttcaatcgtctgaacaggcgaatatcgtgcaaataatcctgagatgtcaaagctgccgcgcaaagcagttcatgaaaaaaaaaaaggtgataatgcatacaccatgtaccagcatctgcaaaccgtcctgtcaatgttagtgatgcttaatccttactttgatgtggccaatccatagatccttctgcaacctcaattgttgagttattttgtacaggtggaattccccttcccttggagctatttccagataaacaaatgaagctattgcaattgcaatgaatagaacaggagggatactcaggggaaggtggtgaggacccaatccgctgaagtccccttgcagatgttgttgatgagtattctccaatacttgctcatctcaaaagtctgcagaatggagacgctgccacaagttccattaagcaggtggggcatcagaatttcaattctcttcccaagcacctaattggctgaaaatttatggatttccgtgcattgaaatcagtgccctggaaatgcttacattgtggaacaaattttgaatgctggaaatacttgtattttggaatggagggagtagaatggccccaaaattttagcagtgtagcgcatgatggtctcttccaaaaaatctcatactaatgaagatactgaactaatttacaaactgaatggatgtactaaacattatagtcttcttcgaatgaagttagattattgcagcatttaacttagattatttatgaaaacttatatttgaaatatttgtatttctgtcacacatcagattatgatggtggcactggagctaggccaattagtttgattaagcattctgccggtccttgggaacttggtctttcagaagcacaccagacacttatgcaaaattgattgtgagagaggatggtagggtggatggtggattcagaagttgccaatatgtccttatggctagtgtcatgggcgtggatgaatatggttttggttctgtggctatgaatagctactggatgtgttcaagatgtccacactaatggccctgttcttgatgagacaatccttgcaaatcctgatgtaatgttttccattcctttctcagttacattaacctccctagtgactgatttgtgaatagtcaatcaaagtaatccttcattctgctatttggtcagcttgaaaccagaaattaattttgacgatcgatgcccttaattgtagtttaaagcgaagtgtgcagttgtatacttgtatcttgcttaatgatgcagcattatttatatattctattttgcagatatctgatgtaattgagaatgaggaggtttccaagatattataatgttgagagggctgtctgtggtcaagtagcaggtgtcattgcgaagaagtacgctgacacaggctttgcaggccagctcaacattacgtttactggaagtgcagggccagtcttttggatgttttctaactcctggaatactctgcaagttgagagaggccaatgattatgttggaaagggcatgggtggtggagagatggttgtagctcctgtagagtgtactagatagcacaggattcgttcctgacttcctgacgaagctactatagctggaaacgcttgtctgtgttggctactagtgagcaggtatttgtgacaggcaaaacaggtgaaactctcttggtcaatcagtggttgaggtcagggcactggagatcattgctgcgagtacatgatcggtggctgtgtagttgcaattggtagagtaaggaggaacgttgcagctggaatgacgggtggccttgcctatgttcaactgcaatcagcaacttccgtcccaaaaaaagacaaaccctggtttccgtgctcaacgtttgaccgtccgtcttatttgaaaaaattatgaaaaaaatta

SEQ ID NO: 96030 - DNA, 231 bp, Oryza sativa
  unsure (1)..(231): unsure at all n locations
  Clone ID: PAT_MRT4530_94165C.1
cccacgactcccctctccttcctctctctctcgctcgcgcgcgnctgcgtcgncaatggcggaccagntcaccgangaccagatcgccgagttcaaggaggncttcagcctcttcgacaaggncggcgacggtngtattactactaaggggttgggaactgtcatgcgttcgntggggcagaacccaactanggcagaactacangnnattgatcantgtaggtggntgct

SEQ ID NO: 96031 - DNA, 290 bp, Oryza sativa
  unsure (1)..(290): unsure at all n locations
  Clone ID: PAT_MRT4530_94166C.1
ttgtcanacaaagagccagatcntggagagccgntgtgacaaggaaaaaggaggcttataccccctggtgaacgcttgggagcgtgctttgatggttaatacttgccacgttaaaatacacgaagttataagaaagacccacaggctcacccgttctgtatatttccttgtgccctttttgtgcactcgatcgcaagagcatatgttccctgctctgctgcatgacaagtatgtcttctagtattttatggttttgatgatgactggcctaaaaaaaaaaaaaaaaaaaa

SEQ ID NO: 96032 - DNA, 365 bp, Oryza sativa
  Clone ID: PAT_MRT4530_94167C.1
gaatgtttactacagtgattggtccgtatcacaaagtacaatggcggagccaggatttcaaagttgggtattcccgtctaagcgctgaggcgctggccctgcccctcgtggccaccggccacccaaccggcctgaccgcccgagattggcggagtggcgggcgtcggccaccgctcgccacggcaatggcctccccctccgcgatagcacggtccagctcccgctgccggttgccgcctcgccgcgccgccgcctagggtttggaaatggggagcggcgcgaggggagccgagccagggagggatgggtcacggagagagagcaagagggggccgtctagaagggtggtggataagtgggtcaac
